United States Patent Application Publication US 2009/0100536 A1 - sequence listing, part 3

SEQ ID NO: 8350 - protein, 881 aa, Arabidopsis thaliana
MRVLKYFRAPSSLRHRSSPMAQFLRRFSSSPMANEDEFQSPVEPSQQQSQDCVSESYLIGFVIANIVGLKYYSGRINGREMVGLVREPLNVYDNNAIRVLNTRSEQVGHIERTVAAVLAPMIDSHTIVVEGIVPNTRSNSNRYRIPCQIHVFAKLEASSTVKSTISRGGLVLISESDTSFGLSEAVVVKEQMGNGDKRSVDKIFKLVDENVKLMGKLVAAEPPREVIKSELFAHQKEGLGWLLHREKSGELPPFWEEKDGEFLNTLTNYRSDKRPDPLRGGVFADDMGLGKTLTLLSLIAFDRYGNASTSTPTEEPLDGEGDKIEKKGKKRGRGKSSESVTRKKLKTDDVVGMNVSQKTTLIVCPPSVISAWITQLEEHTVPGILKVYMYHGGERTDDVNELMKYDIVLTTYGTLAVEESWEDSPVKKMEWLRIILDEAHTIKNANAQQSRVVCKLKASRRWAVTGTPIQNGSFDLYSLMAFLRFEPFSIKSYWQSLIQRPLGQGNKKGLSRLQVLMATISLRRTKEKSLIGLPPKTVETCYVELSPEERQLYDHMEGEAKGVVQNLINNGSLMRNYSTVLSIILRLRQLCDDMSLCPPELRSFTTSTSVEDVTDKPELLQKLVAALQDGEDFDCPICISPPTNIIITRCAHIFCRACILQTLQRSKPLCPLCRGSLTQSDLYNAPPPPPDSSNTDGEDAKSSTKSSKVSALLSLLMASRQENPNTKSVVFSQFRKMLLLLETPLKAAGFTILRLDGAMTVKKRTQVIGEFGNPELTGPVVLLASLKASGTGINLTAASRVYLFDPWWNPAVEEQAMDRIHRIGQKQEVKMIRMIARNSIEERVLELQQKKKNLANEAFKRRQKKDEREVNVEDVVALMSL

SEQ ID NO: 8351 - protein, 862 aa, Arabidopsis thaliana
MAQFLRRFSSSPMANEDEFQSPVEPSQQQSQDCVSESYLIGFVIANIVGLKYYSGRINGREMVGLVREPLNVYDNNAIRVLNTRSEQVGHIERTVAAVLAPMIDSHTIVVEGIVPNTRSNSNRYRIPCQIHVFAKLEASSTVKSTISRGGLVLISESDTSFGLSEAVVVKEQMGNGDKRSVDKIFKLVDENVKLMGKLVAAEPPREVIKSELFAHQKEGLGWLLHREKSGELPPFWEEKDGEFLNTLTNYRSDKRPDPLRGGVFADDMGLGKTLTLLSLIAFDRYGNASTSTPTEEPLDGEGDKIEKKGKKRGRGKSSESVTRKKLKTDDVVGMNVSQKTTLIVCPPSVISAWITQLEEHTVPGILKVYMYHGGERTDDVNELMKYDIVLTTYGTLAVEESWEDSPVKKMEWLRIILDEAHTIKNANAQQSRVVCKLKASRRWAVTGTPIQNGSFDLYSLMAFLRFEPFSIKSYWQSLIQRPLGQGNKKGLSRLQVLMATISLRRTKEKSLIGLPPKTVETCYVELSPEERQLYDHMEGEAKGVVQNLINNGSLMRNYSTVLSIILRLRQLCDDMSLCPPELRSFTTSTSVEDVTDKPELLQKLVAALQDGEDFDCPICISPPTNIIITRCAHIFCRACILQTLQRSKPLCPLCRGSLTQSDLYNAPPPPPDSSNTDGEDAKSSTKSSKVSALLSLLMASRQENPNTKSVVFSQFRKMLLLLETPLKAAGFTILRLDGAMTVKKRTQVIGEFGNPELTGPVVLLASLKASGTGINLTAASRVYLFDPWWNPAVEEQAMDRIHRIGQKQEVKMIRMIARNSIEERVLELQQKKKNLANEAFKRRQKKDEREVNVEDVVALMSL

SEQ ID NO: 8352 - protein, 675 aa, Arabidopsis thaliana
MDDFWDLTVEEMDAIENEALQRINQQRNSSSSSSLPIPNEVFPQSLSLSLGDFVAVHTSSQGARILPSTLAPKPNTVLVSVPIDAGSKPQEQKVSVKILLHSSGVLAAKFPYNQVVVDAVRKIPKAIWNAKESPGYGPFLILHCLQQKIFYEKFPALKLRHRVCQPYVVPVVFLYYQMSSNLLWLPDDFCLIIGLHLSRKAIAVTTCVQESWPVLIIAPSSLRLHWATVSLRYLNSTWTLFMTLEMIHNAAFLQMIHQWLHVPPSDIVVVLPQPGGSNKCGFTIVSSNTKGTIHLDGVFNIVSYDVVTKLDKLLMALDFKVVIADESHFLKNGQAKRTSACLPVIKKAQYAILLSGTPALSRPIELFKQLEALYPDVYRNIHEYGGRYCKGVSPLHIEKLPRSSYKGFFGTYQGASNHDELHNLMKATVMIRRLKKDVLTELPSKRRQQVFLDLAAKDMKQINALFHELKVVKSKIKDCISEDDIKSLKFIEKNLINKIYTDSAVAKIPAVLDYLENVIEAGCKFLVFAHHQSMLEELHQFLKKKKVGCIRIDGSTPASSRQALVSDFQDKDEIKAAVLSIRAAGVGITLTAASTVIFAELSWTPGDLIQAEDRAHRIGQVSSVNIHYLLANDTVDDIIWDVVQSKLDNLGQVYSFSMSLHMERKSLGVKYTSII

SEQ ID NO: 8353 - protein, 1465 aa, Arabidopsis thaliana
MVWLCHHAFFMPFSLSLSAHLSLFHFLKPVKIKNFSKNSRTSSSSSQTRIFVFALMECIGKRVKSRSWQRLQAVNKRKKMETVAPVTSPPKKRRQKKPKNYDSDIEDITPTCNDSVPPPQVSNMYSVPNNSVKESFSRIMRDLNVEKKSGPSSSRLTDGSEQNPCLKERSFRVSDLGVEKKCSPEITDLDVGIPVPRFSKLKDVSEQKNTCLMQKSSPEIADLDLVISVPSSSVLKDVSEEIRFLKDKCSPEIRGLVLEKSVPGEIEILSDSESETEARRRASAKKKLFEESSRIVESISDGEDSSSETDEEEEENQDSEDNNTKDNVTVESLSSEDPSSSSSSSSSSSSSSSSSSSDDESYVKEVVGDNRDDDDLRKASSPIKRVSLVERKALVRYKRSGSSLTKPRERDNKIQKLNHREEEKKERQREVVRVVTKQPSNVVYTCAHCGKENTGNPESHSSFIRPHSIRDEIEDVNNFASTNVSKYEDSVSINSGKTTGAPSRPEVENPETGKELNTPEKPSISRPEIFTTEKAIDVQVPEEPSRPEIYSSEKAKEVQAPEMPSRPEVFSSEKAKEIQVPEMPSIPEIQNSEKAKEVQANNRMGLTTPAVAEGLNKSVVTNEHIEDDSDSSISSGDGYESDPTLKDKEVKINNHSDWRILNGNNKEVDLFRLLVNSVWEKGQLGEEDEADELVSSAEDQSQEQAREDHRKYDDAGLLIIRPPPLIEKFGVEEPQSPPVVSEIDSEEDRLWEELAFFTKSNDIGGNELFSNVEKNISANETPAAQCKKGKHDLCIDLEVGLKCMHCGFVEREIRSMDVSEWGEKTTRERRKFDRFEEEEGSSFIGKLGFDAPNNSLNEGCVSSEGTVWDKIPGVKSQMYPHQQEGFEFIWKNLAGTIMLNELKDFENSDETGGCIMSHAPGTGKTRLTIIFLQAYLQCFPDCKPVIIAPASLLLTWAEEFKKWNISIPFHNLSSLDFTGKENSAALGLLMQKNATARSNNEIRMVKIYSWIKSKSILGISYNLYEKLAGVKDEDKKTKMVREVKPDKELDDIREILMGRPGLLVLDEAHTPRNQRSCIWKTLSKVETQKRILLSGTPFQNNFLELCNVLGLARPKYLERLTSTLKKSGMTVTKRGKKNLGNEINNRGIEELKAVMLPFVHVHKGSILQSSLPGLRECVVVLNPPELQRRVLESIEVTHNRKTKNVFETEHKLSLVSVHPSLVSRCKISEKERLSIDEALLAQLKKVRLDPNQSVKTRFLMEFVELCEVIKEKVLVFSQYIDPLKLIMKHLVSRFKWNPGEEVLYMHGKLEQKQRQTLINEFNDPKSKAKVFLASTKACSEGISLVGASRVILLDVVWNPAVERQAISRAYRIGQKRIVYTYHLVAKGTPEGPKYCKQAQKDRISELVFACSSRHDKGKEKIAEAVTEDKVLDTMVEHSKLGDMFDNLIVQPKEADLVEGFSILMP

SEQ ID NO: 8354 - protein, 588 aa, Arabidopsis thaliana
MYPHQQEGFEFIWKNLAGTIMLNELKDFENSDETGGCIMSHAPGTGKTRLTIIFLQAYLQCFPDCKPVIIAPASLLLTWAEEFKKWNISIPFHNLSSLDFTGKENSAALGLLMQKNATARSNNEIRMVKIYSWIKSKSILGISYNLYEKLAGVKDEDKKTKMVREVKPDKELDDIREILMGRPGLLVLDEAHTPRNQRSCIWKTLSKVETQKRILLSGTPFQNNFLELCNVLGLARPKYLERLTSTLKKSGMTVTKRGKKNLGNEINNRGIEELKAVMLPFVHVHKGSILQSSLPGLRECVVVLNPPELQRRVLESIEVTHNRKTKNVFETEHKLSLVSVHPSLVSRCKISEKERLSIDEALLAQLKKVRLDPNQSVKTRFLMEFVELCEVIKEKVLVFSQYIDPLKLIMKHLVSRFKWNPGEEVLYMHGKLEQKQRQTLINEFNDPKSKAKVFLASTKACSEGISLVGASRVILLDVVWNPAVERQAISRAYRIGQKRIVYTYHLVAKGTPEGPKYCKQAQKDRISELVFACSSRHDKGKEKIAEAVTEDKVLDTMVEHSKLGDMFDNLIVQPKEADLVEGFSILMP

SEQ ID NO: 8355 - protein, 1227 aa, Arabidopsis thaliana
MSKKDSVFQSQADDFSGGFEFGADDEDFMIDIEAIYRILDESPVSMEVSQEIMSPVGSSVVESGEFRNTLMQSGSQATGWFPYRDLYGLGASQSEIAEPSSFSDPENGRLGLSATCYSDYGGNVVSFPVNCEDGTVSILDDMRIESKFTPCSPTTMTTYLNNMPGNDSGIGATQNSSLMSHFSPNSSSIVDCASSEPYGHHTMDAPLSEVSPNLVPGYAFQFFPKKEELLNDLKNEFIHCQSDGASRMVFDRHVGFDNGTSERNSGPDVSSERELSLKCEIIPSVSPVCVKPYNSSDGHQVEKELEQPDNCSSSFQENRAVHMKVKPELALENTVYSSIPGNYSRCSDVHTVGGTTLPWSGVSNCAISYQTDVGKEYPFIPPQTAFPGQDIDGRSFYSCFDSDDCFQNVTDPDPETSRTESLDYLVGDEDHEYIKRTCFNLSSFSSGTVESLSSKRIPEREDDSEIHKIESYGEFVNPHQYLPVQRPVFSSEHSTGSQTLNNCGGLKFESNKGNMNFHADLQDLSQHSSEASPPDGVLAVSLLRHQRIALSWMSQKETSGNPCFGGILADDQGLGKTVSTIALILTERSTPYLPCEEDSKNGGCNQSDHSQVVFNENKVVEDSLCKMRGRPAAGTLIVCPTSLMRQWADELRKKVTLEAHLSVLVYHGCSRTKDPHELAKYDVVITTYSLVSKRKHMDCEPVEFLSGPLAQVSWFRVVLDEAQSIKNYKTQASIACSGLHAKRRWCLSGTPIQNSIADLYSYFRFLKYDPYSSYQTFCETIKNPISSYPGEGYKTLQAILKKVMLRRTKDTLLDGKPVISLPPKSIELRRVDFTKEERDFYSKLECDSRDQFKEYAEAGTVKQNYVNILLMLLRLRQACGHPLLVSSLSWSSSAEMVKKLPYEKLTFLLHRLEASLAICGICNVRLSTHAVVSLCGHVFCNQCICECLTRDNNQCPLSYCKVGLEISSLFSRETLENAMLDLHKLDAPCDRTTSDPVGSGEPCENLPCGSSKIKAALDILQSLSRPQSPATVMNDVNQSSENGENNQQLDKSFSLPATPAKSSVGGVVNVAGEKAIVFTQWTKMLDLLEAGLKSSGIQYRRFDGKMTVPARDAAVQDFNTLPDVSVMIMSLKAASLGLNMVAACHVIMLDLWWNPTTEDQAIDRAHRIGQTRPVKVVRFTVKDTVEDRILALQQKKRKMVASAFGEHENGSRESHLSVEDLNYLFMA

SEQ ID NO: 8356 - protein, 1471 aa, Arabidopsis thaliana
MEANEESLKGKIEKLEGKEVIVESKEDEMDIIIEENREAEQEVMEVKARDGRGEQNDVLMEENNNQGEQKDEEMQDASSRSESSDFNSDEDEQILSRRDDELDLEKPLSEEEIDELISDLLAVESKAAEAQEALEKESLSKVESEVREELAQALRGDELDEAVAAEMMTFKDEWEATLDELETESATLLEQLDGAGIELPKLYEMIESQAPNGCYTEAWKQRAHWVGTQVTKETVESLANAERFLHTHRPVRKRHGKLLEEGASGFLEKKLADGAVKESLAGTSELDWSSLNKVFSEKRDESVSFGSKQWASVYLASTPHQAAAMGLEFPGVNEVEEIEEIDASLADPFLADAIDNERELALTEEQKTNYIRVKEEDDITCDRVLQLRLKRKRRKKRSKQVIRCAAENMDDDSVYLDGNNTTPNFAKDQVKSPETSTQVHNSEVNIEENGNFSNSDVDKMTPSTHINVDAKRDDSQNPANNFRCTACNKVAVEVHSHPLLEVIVCMDCKRSIEDRVSKVDDSLERHCEWCGHIADLIDCRTCEKLFCASCIKRNIGEEYMSEAQSSGWDCCCCSPIPLQRLTLELEKAMRDKKSIELSSDSSSDSSSDNNSVDTDADVNVTISSKKKSKKKIRRIIDDAELGKDTRTKIAIEKARQERLRSLQFSARYKTISSMGDVKSIPEGAEVEVLGDAHSGYIVNVVREIGEEAVRVPRSISAKLKVHQVTGIRFMWENIIQSISRVKSGDKGLGCILAHTMGLGKTFQVIAFLYTAMRCVDLGLKTALIVTPVNVLHNWRSEFEKWMPSEVKPLRIFMLGDVSRERRFDLLTKWRKKGGVFLMGYTNFRNLSLGRGVKDLNAARGICNALRDGPDILVCDEAHIIKNTKADTTQALKQVKCQRRIALTGSPLQNNLMEYYCMVDFVREGFLGSSPDFQNPIENGQHMNSTAEDVKIMNQRSHILYEQLKGFVQRMDMNVVKKDLPPKTVFVISVKLSPLQRILYQRFLELYGFSDGRTDERMRKNFFAAYQVLAQILNHPGIPQLRSEDSKNGRRGSIVDIPDDCSSDENIDYNMVTGEKQRTMNDLQDKVDGYLQKDWWVDLLQKNNYKVSDFSGKMILLLDILSMSADVGDKALVFSQSIPTLDLIELYLSRVPRHGKQGKFWKKGKDWYRIDGKTESSERQKLVDRFNEPDNKRVKCTLISTRAGSLGINLYAANRVIIVDGSWNPTYDLQAIFRAWRYGQKKPVFAYRLMARGTIEEKIYKRQVTKEGLAARVVDRQQVHRTISKEEMLHLFEFDDDDEKSEAVTEISKQNEAGHSNLVEQAILWTKKATLSRVGGDKLMENLLQRHGPNFHEHETLLQENEEERLTKEEKDMAWEVYRRALEWEEVQRVPFSESPVVPKPSPSTQTEPLPQPKGFNRSRFVNRNCTRIAHQLTLISQGLKVGSSTVCGECGRVIRWEDVIPASKLSAVIVN

SEQ ID NO: 8357 - protein, 833 aa, Arabidopsis thaliana
MELRSRNKAIRPSTEVVDLEEGTGINPDEEPYAISSDDDSIGSEFQGDEEEEEELEEVVANDDLPNPVPVLAIVNLPRASKKRKKPDARKEKVVLLWETWEKEQNSWIDEHMSEDVDLDQHNAVIAETAEPPSDLIMPLLRYQKEFLAWATKQEQSVAGGILADEMGMGKTIQAISLVLARREVDRAQFGEAAGCTLVLCPLVAVSQWLNEIARFTSPGSTKVLVYHGAKRAKNIKEFMNYDFVLTTYSTVESEYRRNIMPSKVQCAYCSKSFYPKKLVIHLRYFCGPSAVKTAKQSKQKRKKTSDSSSQQGKEADAGEDKKLKKSKKKTKQTVEKDQLGSDDKEKSLLHSVKWNRIILDEAHYIKERRSNTARAVFALEATYRWALSGTPLQNRVGELYSLIRFLQIRPYSYYFCKDCDCRILDYVAHQSCPHCPHNAVRHFCWWNKYVAKPITVYGSFGLGKRAMILLKHKVLKDILLRRTKLGRAADLALPPRIITLRRDTLDVKEFDYYESLYKNSQAEFNTYIEAGTLMNNYAHIFDLLTRLRQAVDHPYLVVYSNSSGANANLVDENKSEQECGLCHDPAEDYVVTSCAHVFCKACLIGFSASLGKVTCPTCSKLLTVDWTTKADTEHKASKTTLKGFRASSILNRIKLDDFQTSTKIEALREEIRFMVERDGSAKAIVFSQFTSFLDLINYTLGKCGVSCVQLVGSMTMAARDTAINKFKEDPDCRVFLMSLKAGGVALNLTVASHVFMMDPWWNPAVERQAQDRIHRIGQYKPIRVVRFIIENTVEERILRLQKKKELVFEGTVGGSQEAIGKLTEEDMRFLFTT

SEQ ID NO: 8358 - protein, 653 aa, Arabidopsis thaliana
MDDTMDMSSGSDEEVQEEKTTVNERVIYQAALQDLKQPKTEKDLPPGVLTVPLMRHQKIALNWMRKKEKRSRHCLGGILADDQGLGKTISTISLILLQKLKSQSKQRKRKGQNSGGTLIVCPASVVKQWAREVKEKVSDEHKLSVLVHHGSHRTKDPTEIAIYDVVMTTYAIVTNEVPQNPMLNRYDSMRGRESLDGSSLIQPHVGALGRVRWLRVVLDEAHTIKNHRTLIAKACFSLRAKRRWCLTGTPIKNKVDDLYSYFRFLRYHPYAMCNSFHQRIKAPIDKKPLHGYKKLQAILRGIMLRRTKEWSFYRKLELNSRWKFEEYAADGTLHEHMAYLLVMLLRLRQACNHPQLVNGYSHSDTTRKMSDGVRVAPRENLIMFLDLLKLSSTTCSVCSDPPKDPVVTLCGHVFCYECVSVNINGDNNTCPALNCHSQLKHDVVFTESAVRSCINDYDDPEDKNALVASRRVYFIENPSCDRDSSVACRARQSRHSTNKDNSISGLNLIFTFLKDKCNDYETGAMLMSLKAGNLGLNMVAASHVILLDLWWNPTTEDQAIDRAHRIGQTRAVTVTRIAIKNTVEERILTLHERKRNIVASALGEKNWQKFCDSTNTRRSRISVFWCVEYPRVFIDKRNKTFSYLISHKCECNE

SEQ ID NO: 8359 - protein, 638 aa, Arabidopsis thaliana
MDDTMDMSSGSDEEVQEEKTTVNERVIYQAALQDLKQPKTEKDLPPGVLTVPLMRHQKIALNWMRKKEKRSRHCLGGILADDQGLGKTISTISLILLQKLKSQSKQRKRKGQNSGGTLIVCPASVVKQWAREVKEKVSDEHKLSVLVHHGSHRTKDPTEIAIYDVVMTTYAIVTNEVPQNPMLNRYDSMRGRESLDGSSLIQPHVGALGRVRWLRVVLDEAHTIKNHRTLIAKACFSLRAKRRWCLTGTPIKNKVDDLYSYFRFLRYHPYAMCNSFHQRIKAPIDKKPLHGYKKLQAILRGIMLRRTKEWSFYRKLELNSRWKFEEYAADGTLHEHMAYLLVMLLRLRQACNHPQLVNGYSHSDTTRKMSDGVRVAPRENLIMFLDLLKLSSTTCSVCSDPPKDPVVTLCGHVFCYECVSVNINGDNNTCPALNCHSQLKHDVVFTESAVRSCINDYDDPEDKNALVASRRVYFIENPSCDRDSSVACRARQSRHSTNKDNSISGLVCAMLMSLKAGNLGLNMVAASHVILLDLWWNPTTEDQAIDRAHRIGQTRAVTVTRIAIKNTVEERILTLHERKRNIVASALGEKNWQKFCDSTNTRRSRISVFWCVEYPRVFIDKRNKTFSYLISHKCECNE

SEQ ID NO: 8360 - protein, 888 aa, Arabidopsis thaliana
MGFVYIVMTGYYKNVHKRKQNQVDDGPEAKRVKSSAKVIDYSNPFAVSNMLEALDSGKFGSVSKELEEIADMRMDLVKRSIWLYPSLAYTVFEAEKTMDNQQVVEGVINLDDDDDDDTDVEKKALCVVPSSSEIVLLDSDDEDNERQRPMYQFQSTLVQHQKNQGDVTPLIPQCSFEEVDLGRGKEMPSAIKAIVEGQTSRGKVLPIENGVVNEKGVYVGVEEDDSDNESEAADEDLGNIWNEMALSIECSKDVARETSHKEKADVVEDCEHSFILKDDMGYVCRVCGVIEKSILEIIDVQFTKAKRNTRTYASETRTKRFGESDNELKFSEEGLMIGGLAAHPTHAAEMKPHQIEGFQFLCSNLVADDPGGCIMAHAPGSGKTFMIISFMQSFLAKYPQAKPLVVLPKGILPTWKKEFVRWQVEDIPLLDFYSAKAENRAQQLSILKQWMEKKSILFLGYQQFSTIVCDDTTDSLSCQEILLKVPSILILDEGHTPRNEDTNLLQSLAQVQTPRKVVLSGTLYQNHVKEVFNILNLVRPKFLKLDTSKSAVKRILAYTPCDVRGRLTGSNSDMASMFNETVEHTLQKSEDFTVKIKVIQDLREMTKKVLHYYKGDFLDELPGLADFTVVLNLSPKQLNEVKKLRREKRKFKVSAVGSAIYLHPKLKVFSDKSDDVSDTTMDEMVEKLDLNEGVKAKFFLNLINLCDSAGEKLLVFSQYLIPLKFLERLAALAKGWKLGKEVFVLTGNTSSEQREWSMETFNSSPDAKIFFGSIKACGEGISLVGASRILILDVPLNPSVTRQAIGRAFRPGQKKMVHAYRLIAGSSPEEEDHNTCFKKEVISKMWFEWNEYCGYQNFEVETIDVDEAGDTFLESPALREDIRVLYKR

SEQ ID NO: 8361 - protein, 1616 aa, Arabidopsis thaliana
MEANEESLKGKIEKLEGKEVIVESKEDEMDIIIEENREAEQEVMEVKARDGRGEQNDVLMEENNNQGEQKDEEMQDASSRSESSDFNSDEDEQILSRRDDELDLEVCIMDISCLLGGGIVYVYLIFLFSIIGQKPLSEEEIDELISDLLAVESKAAEAQEALEKESLSKVESEVREELAQALRGDELDEAVAAEMMTFKDEWEATLDELETESATLLEQLDGAGIELPKLYEMIESQAPNGCYTEAWKQRAHWVGTQVTKETVESLANAERFLHTHRPVRKRHGKLLEEGASGFLEKKLADGAVKESLAGTSELDWSSLNKVFSEKRDESVSFGSKQWASVYLASTPHQAAAMGLEFPGVNEVIFSIMPLYFLTVLMLMMICICLHLLIFVAPRKKALNVTSPFLDRLLAVRHLKKACVEEIEEIDASLADPFLADAIDNERELALTEEQKTNYIRISGIKRSTFEIITFSGCSLCSCFCGVGSKSIYMKYHLRLLTTPALPFMSFSMTLNHLQVKEEDDITCDRVLQLRLKRKRRKKRSKQVIRCAAENMDDDSVYLDGNNTTPNFAKDQVKSPETSTQVHNSEVNIEENGNFSNSDVDKMTPSTHINVDAKRDDSQNPANNFRCTACNKVAVEVHSHPLLEVIVCMDCKRSIEDRVSKVDDSLERHCEWCGHIADLIDCRTCEKLFCASCIKRNIGEEYMSEAQSSGWDCCCCSPIPLQRLTLELEKAMRDKKSIELSSDSSSDSSSDNNSVDTDADVNVTISSKKKSKKKIRRIIDDAELGKDTRTKIAIEKARQERLRSLQFSARYKTISSMGDVKSIPEGAEVEVLGDAHSGYIVNVVREIGEEAVRVPRSISAKLKVHQVTGIRFMWENIIQSISRVKSGDKGLGCILAHTMGLGKTFQVIAFLYTAMRCVDLGLKTALIVTPVNVLHNWRSEFEKWMPSEVKPLRIFMLGDVSRERRFDLLTKWRKKGGVFLMGYTNFRNLSLGRGVKDLNAARGICNALRDGPDILVCDEAHIIKNTKADTTQALKQVKCQRRIALTGSPLQNNLMEYYCMVDFVREGFLGSSPEFRNRQSFNCGSPYLQLPKSNRKRTAYEFNCGGCFVQRMDMNVVKKDLPPKTVFVISVKLSPLQRILYQRFLELYGFSDGRTDERMRKNFFAAYQVLAQILNHPGIPQLRSEDSKNGRRGSIVDIPDDCSSDENIDYNMVTGEKQRTMNDLQDKVDGYLQKDWWVDLLQKNNYKVSDFSGKMILLLDILSMSADVGDKALVFSQSIPTLDLIELYLSRVPRHGKQGKFWKKGKDWYRIDGKTESSERQKLVDRFNEPDNKRVKCTLISTRAGSLGINLYAANRVIIVDGSWNPTYDLQAIFRAWRYGQKKPVFAYRLMARGTIEEKIYKRQVTKEGLAARVVDRQQVHRTISKEEMLHLFEFDDDDEKSEAVTEISKQNEAGHSNLVEQAILWTKKATLSRVGGDKLMENLLQRHGPNWISSFHEHETLLQENEEERLTKEEKDMAWEVYRRALEWEEVQRVPFSESPVVPKPSPSTQTEPLPQPKGFNRSRFVNRNCTRIAHQLTLISQGLKVGSSTVCGECGRVIRWEDVIPASKLSAVIVN

SEQ ID NO: 8362 - protein, 816 aa, Arabidopsis thaliana
MFTAWNLRSRSRSITQEELAKRPDPFCLPNLLDGLEDGLYGRLADDVKRLCKLRQEYLNGSISLEDIEARQDNKRAKSSHNLIIDSDDELPQESVTQINPLEKRLKKLKEVIVVKNGDSSGSDSSPQGYDEEDSSRNSTDIDNQSLYVDAEEEEELWRKMAFAQESIKVTVEDSQSNDHKQIEDCDHSFICKDDIGEVCRVCGLIKKPIESMIEVVFNKQKRSRRTYMREKENGETSRDFSGIQSSHTNILGEKMFIHPWHDQEMRPHQTEGFRFLCNNLAADEPGGCILAHAPGSGKTFLLISFLQSFMAMDPQARPLVVLPKGIIESWKREFTLWEVEKIPLLDFYSVKAESRKQQLKVLGQWIKERSILFLGYQQFTRIICDDNFEAASEDCKLILLEKPTLLILDEGHTSRNKETYMLSSLARVKTRRKVVLTGTLFQNNVEEVFNILDLVRPKFLKRPGTREIVSRIMSKAEIPRGKQVNQSSSSIEGTFFAAVELTLQRSTNFSAKASLIKDLREMTRNILHYHKADFSGLLPGLSEFTVMLNLSSIQRDEVKGLRKMELFKQISLGAALYIHPKLKSFLEENPSNGEKGFSDNNTTVMKLDKMLKKINVRDGVKMKFFLNLLALCESTGEKLLVFSQYIVPIKTLERLMSSMKGWRLGKEMFTITGDSSNEQREWSMERFNNSLEAKVFFGSIKACGEGISLVGASRVLILDVHLNPSVTQQAVARAYRPGQKRKVYAYKLVAADSPEEENYETCTRKEMMSKMWFEWNVGSGREDFGFRAIDADHSGDAFLETTKMKEDIKCLYTKVN

SEQ ID NO: 8363 - protein, 744 aa, Arabidopsis thaliana
HFIMPMLFDNHDQFNEWFSKGIENHAEHGGTLNEHQLNRLHAILKPFMLRRVKKDVVSELTTKTEVTVHCKLSSRQQAFYQAIKNKISLAELFDSNRGQFTDKKVLNLMNIVIQLRKVCNHPELFERNEGSSYLYFGVTSNSLLPHPFGELEDVHYSGGQNPIIYKIPKLLHQEVLQNSETFCSSVGRGISRESFLKHFNIYSPEYILKSIFPSDSGVDQVVSGSGAFGFSRLMDLSPSEVGYLALCSVAERLLFSILRWERQFLDELVNSLMESKDGDLSDNNIERVKTKAVTRMLLMPSKVETNFQKRRLSTGPTRPSFEALVISHQDRFLSSIKLLHSAYTYIPKARAPPVSIHCSDRNSAYRVTEELHQPWLKRLLIGFARTSEANGPRKPNSFPHPLIQEIDSELPVVQPALQLTHRIFGSCPPMQSFDPAKLLTDSGKLQTLDILLKRLRAGNHRVLLFAQMTKMLNILEDYMNYRKYKYLRLDGSSTIMDRRDMVRDFQHRSDIFVFLLSTRAGGLGINLTAADTVIFYESDWNPTLDLQAMDRAHRLGQTKDVTVYRLICKETVEEKILHRASQKNTVQQLVMTGGHVQGDDFLGAADVVSLLMDDAEAAQLEQKFRELPLQVKDRQKKKTKRIRIDAEGDATLEELEDVDRQDNGQEPLEEPEKPKSSNKKRRAASNPKARAPQKAKEEANGEDTPQRTKRVKRQTKSINESLEPVFSASVTESNKGFDPSSSAN

SEQ ID NO: 8364 - protein, 981 aa, Arabidopsis thaliana
MDSAIDISSDSDVEIQETRTRPQHPPRIAEGSHRRDLSTLRPHFLSGSSSGANGHTKTGLTNLDSRNGFESKPLPRAEHHTHIPGNGSIVTSRIPNISVGDYEKFSSQQAFKRTHPPTFSRPPFPPRPDIGTSNGNASHFRGGAHDDLGMGRVTNGTRILPPSVAHGTSASPSHFNGLSDPMHRNGIGEERNSENDERLIYQAALQELNQPKSEVDLPAGLLSVPLMKHQKIALAWMFQKETNSLHCMGGILADDQGLGKTVSTIALILKQMHEAKLKSKNSGNQEAEALDLDADDESENAFEKPESKASNGSGVNGDSGIKKAKGEEASTSTRKFNRKRPAAGTLIVCPASVVRQWARELDEKVTDEAKLSVLIYHGGNRTKDPIELAKYDVVMTTYAIVSNEVPKQPLVDDDENDEKNSEKYGLASGFSINKKRKNVVGTTKKSKKKKGNNNAGDSSDPDSGTLAKVGWFRVVLDEAQTIKNHRTQVARACCGLRAKRRWCLSGTPIQNTIDDLYSYFRFLKYDPYAVYKSFCHQIKGPISRNSLQGYKKLQAVLRAIMLRRTKGTLLDGQPIINLPPKTINLSQVDFSVEERSFYVKLESDSRSQFKAYAAAGTLNQNYANILLMLLRLRQACDHPQLVKRYNSDSVGKVSEEAVKKLPKEDLVSLLSRLESSPICCVCHDPPEDPVVTLCGHIFCYQCVSDYITGDEDTCPAPRCREQLAHDVVFSKSTLRSCVADDLGCSSSEDNSHDKSVFQNGEFSSSKIKAVLDILQSLSNQGTSNSTQNGQMASSSQQPNDDDDDDDDDVTIVEKTSLKSTPSNGGPIKTIIFSQWTGMLDLVELSLIENSIEFRRLDGTMSLIARDRAVKEFSNDPDVKVMIMSLKAGNLGLNMIAACHVILLDLWWNPTTEDQAIDRAHRIGQTRPVTVTRITIKNTVEDRILALQEEKRKMVASAFGEDHGGSSATRLTVDDLKYLFMV

SEQ ID NO: 8365 - protein, 1062 aa, Arabidopsis thaliana
MDSAIDISSDSDVEIQETRTRPQHPPRIAEVVDLGAGSHRRDLSTLRPHFLSGSSSGANGHTKTGLTNLDSRNGFESKPLPRAEHHTHIPGNGSIVTSRIPNISVGDYEKFSSQQAFKRTHPPTFSRPPFPPRPDIGTSNGNASHFRGGAHDDLGMGRVTNGTRILPPSVAHGTSASPSHFNGLSDPMHRNGIGEERNSENDERLIYQAALQTMCMEALLFFLFDKREGIGTFTIVAFVSYFALLHQGYDFHLKSLVFLHNSPGTESTQVRGRFTCWSSFGSPYEASGIQVYIIFQYLSEWSCVLNTVVSQKIALAWMFQKETNSLHCMGGILADDQGLGKTVSTIALILKQMHEAKLKSKNSGNQEAEALDLDADDESENAFEKPESKASNGSGVNGDSGIKKAKGEEASTSTRKFNRKRPAAGTLIVCPASVVRQWARELDEKVTDEAKLSVLIYHGGNRTKDPIELAKYDVVMTTYAIVSNEVPKQPLVDDDENDEKNSEKYGLASGFSINKKRKNVVGTTKKSKKKKGNNNAGDSSDPDSGTLAKVGWFRVVLDEAQTIKNHRTQVARACCGLRAKRRWCLSGTPIQNTIDDLYSYFRFLKYDPYAVYKSFCHQIKGPISRNSLQGYKKLQAVLRAIMLRRTKGTLLDGQPIINLPPKTINLSQVDFSVEERSFYVKLESDSRSQFKAYAAAGTLNQNYANILLMLLRLRQACDHPQLVKRYNSDSVGKVSEEAVKKLPKEDLVSLLSRLESSPICCVCHDPPEDPVVTLCGHIFCYQCVSDYITGDEDTCPAPRCREQLAHDVVFSKSTLRSCVADDLGCSSSEDNSHDKSVFQNGEFSSSKIKAVLDILQSLSNQGTSNSTQNGQMASSSQQPNDDDDDDDDDVTIVEKTSLKSTPSNGGPIKTIIFSQWTGMLDLVELSLIENSIEFRRLDGTMSLIARDRAVKEFSNDPDVKVMIMSLKAGNLGLNMIAACHVILLDLWWNPTTEDQAIDRAHRIGQTRPVTVTRITIKNTVEDRILALQEEKRKMVASAFGEDHGGSSATRLTVDDLKYLFMV

SEQ ID NO: 8366 - protein, 95 aa, Arabidopsis thaliana
LKAGGVALNLTVASHVFMMDPWWNPAVERQAQDRIHRIGQYKPIRVVRFIIENTVEERILRLQKKKELVFEGTVGGSQEAIGKLTEEDMRFLFTT

SEQ ID NO: 8367 - protein, 1256 aa, Arabidopsis thaliana
MKRKHYFEFNHPFNPCPFEVFCWGTWKAVEYLRIENGTMTMRLLENGQVLDDIKPFQRLRIRSRKATLIDCTSFLRPGIDVCVLYQRDEETPEPVWVDARVLSIERKPHESECLCTFHVSVYIDQGCIGLEKHRMNKVPVLVGLNEIAILQKFCKEQSLDRYYRWRYSEDCSSLVKTRLNLGKFLPDLTWLLVTSVLKNIVFQIRTVHEKMVYQIVTDEDCEGSSSSLSAMNITVEDGVVMSKVVLFNPAEDTCQDSDVKEEIEEEVMELRRSKRRSGRPERYGDSEIQPDSKDGWVRMMPYRYNIWNVSSDDDDEEEDCEDDKDTDDDLYLPLSHLLRKKGSKKGFSKDKQREIVLVDKTERKKRKKTEGFSRSCELSVIPFTPVFEPIPLEQFGLNANSLCGGVSGNLMDEIDKYRSKAAKYGKKKKKKIEMEEMESDLGWNGPIGNVVHKRNGPHSRIRSVSRETGVSEEPQIYKKRTLSAGAYNKLIDSYMSRIDSTIAAKDKATNVVEQWQGLKNPASFSIEAEERLSEEEEDDGETSENEILWREMELCLASSYILDDHEVRVDNEAFHKATCDCEHDYELNEEIGMCCRLCGHVGTEIKHVSAPFARHKKWTTETKQINEDDINTTIVNQDGVESHTFTIPVASSDMPSAEESDNVWSLIPQLKRKLHLHQKKAFEFLWKNLAGSVVPAMMDPSSDKIGGCVVSHTPGAGKTFLIIAFLASYLKIFPGKRPLVLAPKTTLYTWYKEFIKWEIPVPVHLLHGRRTYCMSKEKTIQFEGIPKPSQDVMHVLDCLDKIQKWHAQPSVLVMGYTSFLTLMREDSKFAHRKYMAKVLRESPGLLVLDEGHNPRSTKSRLRKALMKVDTDLRILLSGTLFQNNFCEYFNTLCLARPKFVHEVLVELDKKFQTNQAEQKAPHLLENRARKFFLDIIAKKIDTKVGDERLQGLNMLRNMTSGFIDNYEGSGSGSGDVLPGLQIYTLLMNSTDVQHKSLTKLQNIMSTYHGYPLELELLITLAAIHPWLVKTTTCCAKFFNPQELLEIEKLKHDAKKGSKVMFVLNLVFRVVKREKILIFCHNIAPIRLFLELFENVFRWKRGRELLTLTGDLELFERGRVIDKFEEPGGQSRVLLASITACAEGISLTAASRVIMLDSEWNPSKTKQAIARAFRPGQQKVVYVYQLLSRGTLEEDKYRRTTWKEWVSSMIFSEEFVEDPSQWQAEKIEDDVLREIVEEDKVKSFHMIMKNEKASTGG

SEQ ID NO: 8368 - protein, 1132 aa, Arabidopsis thaliana
MDMTSCVARRTRSRTESYLNSILNKSKGISGEEEDQSLGCVNSRTEKRRVNMRDACSPSPRKKKRRRRKDDDDDVVFVRTEYPEGKRDDENVGSTSGNLQSKSFDFGDRVCDFDADDRNLGCEEKASNFNPIDDDDDVVFVGTVQRENDHVEDDDNVGSASVISPRVCDFDEDDAKVSGKENPLSPDDDDDVVFLGTIAGENQHVEDVNAGSEVCDILLDDANLRGEEKTYVSDEVVSLSSSSDDEEDPLEELGTDSREEVSGEDRDSGESDMDEDANDSDSSDYVGESSDSSDVESSDSDFVCSEDEEGGTRDDATCEKNPSEKVYHHKKSRTFRRKHNFDVINLLAKSMLESKDVFKEDIFSWDKIAEVDSREDPVVRESSSEKVNEHGKPRERRSFHRVREKNHLNGESFYGGEKLCDGEETINYSTEDSPPLNLRFGCEEPVLIEKTEEEKELDSLWEDMNVALTLEGMHSSTPDKNGDMLCSKGTHDFVLDDEIGLKCVHCAYVAVEIKDISPAMDKYRPSVNDNKKCSDRKGDPLPNRLEFDASDPSSFVAPLDNIEGTVWQYVPGIKDTLYPHQQEGFEFIWKNLAGTTKINELNSVGVKGSGGCIISHKAGTGKTRLTVVFLQSYLKRFPNSHPMVIAPATLMRTWEDEVRKWNVNIPFYNMNSLQLSGYEDAEAVSRLEGNRHHNSIRMVKLVSWWKQKSILGISYPLYEKLAANKNTEGMQVFRRMLVELPGLLVLDEGHTPRNQSSLIWKVLTEVRTEKRIFLSGTLFQNNFKELSNVLCLARPADKDTISSRIHELSKCSQEGEHGRVNEENRIVDLKAMIAHFVHVHEGTILQESLPGLRDCVVVLNPPFQQKKILDRIDTSQNTFEFEHKLSAVSVHPSLYLCCNPTKKEDLVIGPATLGTLKRLRLKYEEGVKTKFLIDFIRISGTVKEKVLVYSQYIDTLKLIMEQLIAECDWTEGEQILLMHGKVEQRDRQHMIDNFNKPDSGSKVLLASTKACSEGISLVGASRVVILDVVWNPSVESQAISRAFRIGQKRAVFIYHLMVKDTSEWNKYCKQSEKHRISELVFSSTNEKDKPINNEVVSKDRILDEMVRHEKLKHIFEKILYHPKKSDMNTSFF

SEQ ID NO: 8369 - protein, 953 aa, Arabidopsis thaliana
MDSAIDISSDSDVEIQETRTRPQHPPRIAEVVDLGAGSHRRDLSTLRPHFLSGSSSGANGHTKTGLTNLDSRNGFESKPLPRAEHHTHIPGNGSIVTSRIPNISVGDYEKFSSQQAFKRTHPPTFSRPPFPPRPDIGTSNGNASHFRGGAHDDLGMGRVTNGTRILPPSVAHGTSASPSHFNGLSDPMHRNGIGEERNSENDERLIYQAALQTMCMEALLFFLFDKREGIGTFTIVAFVSYFALLHQGYDFHLKSLVFLHNSPGTESTQVRGRFTCWSSFGSPYEASGIQVYIIFQYLSEWSCVLNTVVSQKIALAWMFQKETNSLHCMGGILADDQGLGKTVSTIALILKQMHEAKLKSKNSGNQEAEALDLDADDESENAFEKPESKASNGSGVNGDSGIKKAKGEEASTSTRKFNRKRPAAGTLIVCPASVVRQWARELDEKVTDEAKLSVLIYHGGNRTKDPIELAKYDVVMTTYAIVSNEVPKQPLVDDDENDEKNSEKYGLASGFSINKKRKNVVGTTKKSKKKKGNNNAGDSSDPDSGTLAKVGWFRVVLDEAQTIKNHRTQVARACCGLRAKRRWCLSGTPIQNTIDDLYSYFRFLKYDPYAVYKSFCHQIKGPISRNSLQGYKKLQAVLRAIMLRRTKGTLLDGQPIINLPPKTINLSQVDFSVEERSFYVKLESDSRSQFKAYAAAGTLNQNYANILLMLLRLRQACDHPQLVKRYNSDSVGKVSEEAVKKLPKEDLVSLLSRLESSPICCVCHDPPEDPVVTLCGHIFCYQCVSDYITGDEDTCPAPRCREQLAHDVVFSKSTLRSCVADDLGCSSSEDNSHDKSVFQNGEFSSSKIKAVLDILQSLSNQGTSNSTQNGQMASSSQQPNDDDDDDDDDVTIVEKTSLKSTPSNGGPIKTIIFSQWTGMLDLVELSLIENSIEFRRLDGTMSLIARDRAVKEF

SEQ ID NO: 8370 - protein, 1287 aa, Arabidopsis thaliana
MGEEGSMFGLGGEFPVDDCDGGFEFEDDDETIDIETLYRILDEKPDSAEVVFSAFVGSQENLSPVGSSADELKDSQLLNGSFDEHVKMEAGLSPSPAHTCSASLKDWFSLSQGEQPVETCGVSQSEMTSCSISSSFSDPDGNMMAFNPVNCDVDTVSKQDDKIIDSKSMLTPYFDNVTGYGVGLGANHNSSAMSVFFNNSNSLSDSADNYVSSAQDCYNTSGTSLSDHTPNSVQNFAFEFFPNKEEAVNDVESGVSESQSDGASRMIFDRHGRVDNGSLERKPPIDFSSARGISFKFESNPSVSPACVKPYNSFDSHLADSDLDRPNNYSCSFQDNKTVHVKVKPEAESEKVVYSSVPGEFSVRDDAYLSGETNRWWSGASSSAVSYQTDIEKGYSYMAPQTALPSQDSGKISSNHFYDSDTCLQYVVEDPSPVTQNNEYKDFQIQQGDREYIQPRGIDSQFSNASFESVQSHSSECISDSDDDSDVCIIEPYGQSAIPHRPLAMKMPVVSSEYSTVSHNFNQSGGLKLQSNKENMIFQAALQDLTQPNSEAILPDGVLTVPLLRHQRIALSWMAQKETSGFPCSGGILADDQGLGKTVSTIALILKERSKPAQACEESTKKEIFDLESETGECAPLKPSGRSKHFEHSQLLSNENKVGGDSVGKVTGRPAAGTLVVCPTSVMRQWADELHKKVTSEANLSVLVYHGSSRTKDPHELAKYDVVVTTFSIVSMEVPKQPLVDDEDEEKDGVHDGGTAATGFCSNKKRKYPPDSKKKGSKKKKVEFLSGPLAKVSWFRVVLDEAQSIKNYKTQVARACWGLRAKRRWCLSGTPIQNSIDDLYSYFRFLKYDPYSSYVLFCSTIKNPITRNPVKGYQKLQAILKTVMLRRTKGSLLDGKPIISLPPKSIELRKVDFTVEERDFYSKLEAESRTQFREYAEAGTVKQNYVNILLMLLRLRQACDHPLLVNGEYSFTWESSVGLAKKQIQSDASLAICGICNDAPEDAVASVCGHVFCKQCIYERLTGDSNHCPFANCNVRLTISSLSSKTRLDDAMPDMQERATSNSLSPCSDEDLPYGSSKIKAALEILQSLPKAHDLTDSNQISENREYSGLSITPVKNEGMSVDVPIKVAGEKAIVFSQWTKMLNLLEASLVSSHIQYRRLDGTMSVAARDKAVQDFNTLPEVTVMIMSLKAASLGLNMVAACHVLMLDLWWNPTTEDQAIDRAHRIGQTRPVTVVRFTVKDTVEDRILALQQKKRMMVASAFGEDEKGSRQSHLTVEDLSYLFMADS

SEQ ID NO: 8371 - protein, 1047 aa, Arabidopsis thaliana
MDSAIEISSGSDSDDEVPPQPVWPQTRTRMDPTWLSRRPLPTVDSHARAEHTNQAPPNGASSDTSRPGVSKPFTGNGNTVNSRISSGSGADYVRLSSEQALKRTLPPSFNSPPLPARSGTNNISNASGSRVGVDYERPLSQQALKRTLPPSFNPPPLPSRSGTNNIRNAGGSRFGADYSHPAVSAVGNKSTFGDHYSGAHAEIGIQRGVNGVRILPPSLTHGTSASVLHHAGSSDPMHRFGGGEDRNPDNDERLVYQAALQVLNQPMTESDLPPGTLSVPLMRHQKIALAWMFQKETSSFNCPGGILADDQGLGKTVSTIALILKQKIVSQLKSESSCKQETEALVLDADDESDNAKHESGSHVKPELKVSSNSETSVLSACGNDENDSSDMEKAEDEEANSSTRAFQWKRPAAGTLIVCPASVVRQWARELDEKVSEESKLSVLVYHGSNRTKDPNELAEYDVVVTTYAIVTNEAPNKFLVDEDENDEKNTDRYGLASGFSNNKKRKVVVGASKKSKRRGRKSTNDTSSEPDCGPLGKVGWFRIVLDEAQTIKNYRTQMARSCCTLRAKRRWCLSGTPIQNTIDDLYSYFRFLRYDPYAVYKSFYSTIKVPISRNSCQGYKKLQAVLRAIMLRRTKGTLLDGKPIINLPPKVVNLSQVDFSVAERSFYKKLEADSRSQFKAYADAGTLSQNYANILLLLLRLRQACDHPQLVKRYNSDPVGKVSEAAVRRLPREARSRLINRLESSSAICYECNEPPEKPVVTLCGHIFCYECVLEYITGDENTCPVPRCKQQLARDVVFSESSLRNCTSDDSGCSSSHDNGLDRSVFQKRDFCSSKIKAVLDILQSLSQPDSPNSAQHGQMPSSSRPYDDDDVTIVEPMRLHSSSPSQGAVKTIIFSQWTGMLDLVELRILESGIEFRRLDGTMSLAARDRAVKEFSKKPDVKVMLMSLKAGNLGLNMVAACHVILLDLWWNPTTEDQAIDRAHRIGQTRPVTVTRITIKDTVEDRILKLQEEKRTMVASAFGEEHGGSSATRLTVDDLKYLFMV

SEQ ID NO: 8372 - protein, 1272 aa, Arabidopsis thaliana
MGEEGSMFGLGGEFPVDDCDGGFEFEDDDETIDIETLYRILDEKPDSAEVVFSAFVGSQENLSPVGSSADELKDSQLLNGSFDEHVKMEAGLSPSPAHTCSASLKDWFSLSQGEQPVETCGVSQSEMTSCSISSSFSDPDGNMMAFNPVNCDVDTVSKQDDKIIDSKSMLTPYFDNVTGYGVGLGANHNSSAMSVFFNNSNSLSDSADNYVSSAQDCYNTSGTSLSDHTPNSVQNFAFEFFPNKEEAVNDVESGVSESQSDGASRMIFDRHGRVDNGSLERKPPIDFSSARGISFKFESNPSVSPACVKPYNSFDSHLADSDLDRPNNYSCSFQDNKTVHVKVKPEAESEKVVYSSVPGEFSVRDDAYLSGETNRWWSGASSSAVSYQTDIEKGYSYMAPQTALPSQDSGKISSNHFYDSDTCLQYVVEDPSPVTQNNEYKDFQIQQGDREYIQPRGIDSQFSNASFESVQSHSSECISDSDDDSDVCIIEPYGQSAIPHRPLAMKMPVVSSEYSTVSHNFNQSGGLKLQSNKENMIFQAALQDLTQPNSEAILPDGVLTVPLLRHQRIALSWMAQKETSGFPCSGGILADDQGLGKTVSTIALILKERSKPAQACEESTKKEIFDLESETGECAPLKPSGRSKHFEHSQLLSNENKVGGDSVGKVTGRPAAGTLVVCPTSVMRQWADELHKKVTSEANLSVLVYHGSSRTKDPHELAKYDVVVTTFSIVSMEVPKQPLVDDEDEEKDGVHDGGTAATGFCSNKKRKYPPDSKKKGSKKKKVEFLSGPLAKVSWFRVVLDEAQSIKNYKTQVARACWGLRAKRRWCLSGTPIQNSIDDLYSYFRFLKYDPYSSYVLFCSTIKNPITRNPVKGYQKLQAILKTVMLRRTKGSLLDGKPIISLPPKSIELRKVDFTVEERDFYSKLEAESRTQFREYAEAGTVKQNYVNILLMLLRLRQACDHPLLVNGEYSFTWESSVGLAKKQIQSDASLAICGICNDAPEDAVASVCGHVFCKQCIYERLTGDSNHCPFANCNVRLTISSLSSKTRLDDAMPDMQERATSNSLSPCSDEDLPYGSSKIKAALEILQSLPKAHDLTDSNQISENREYSGLSITPVKNEGMSVDVPIKVAGEKAIVFSQWTKMLNLLEASLVSSHIQYRRLDGTMSVAARDKAVQDFNTLPEVTVMIMSLKAASLGLNMVAACHVLMLDLWWNPTTEDQAIDRAHRIGQTRPVTVVRFTVKDTVEDRILALQVCELVDLVLFNFSISFKPFHF

SEQ ID NO: 8373 - protein, 1261 aa, Arabidopsis thaliana
MKKRGFYNLKHPFDPCPFEFFCSGTWKPVEYMRIEDGMMTIRLLENGYVLEDIRPFQRLRLRSRKAALSDCICFLRPDIDVCVLYRIHEDDLEPVWVDARIVSIERKPHESECSCKINVRIYIDQGCIGSEKQRINRDSVVIGLNQISILQKFYKEQSTDQFYRWRFSEDCTSLMKTRLSLGKFLPDLSWLTVTSTLKSIVFQIRTVQTKMVYQIVTDEEGSSSTLSSMNITLEDGVSLSKVVKFNPADILDDSQDLEIKQETDYYQEEDEVVELRRSKRRNVRPDIYTGCDYEPDTIDGWVRMMPYQFGKCAVNVESDEDEDDNNEDGDTNDDLYIPLSRLFIKKKKTNSREAKPKSRKGEIVVIDKRRVHGFGRKERKSELSVIPFTPVFEPIPLEQFGLNANSFGGGGSFSRSQYFDETEKYRSKGMKYGKKMTEMEEMMEADLCWKGPNQVKSFQKRTSRSSRSVAPKTEDSDEPRVYKKVTLSAGAYNKLIDTYMNNIESTIAAKDEPTSVVDQWEELKKTNFAFKLHGDMEKNLSEDGEGETSENEMLWREMELCLASSYILDDNEVRVDNEAFEKARSGCEHDYRLEEEIGMCCRLCGHVGSEIKDVSAPFAEHKKWTIETKHIEEDDIKTKLSHKEAQTKDFSMISDSSEMLAAEESDNVWALIPKLKRKLHVHQRRAFEFLWRNVAGSVEPSLMDPTSGNIGGCVISHSPGAGKTFLIIAFLTSYLKLFPGKRPLVLAPKTTLYTWYKEFIKWEIPVPVHLIHGRRTYCTFKQNKTVQFNGVPKPSRDVMHVLDCLEKIQKWHAHPSVLVMGYTSFTTLMREDSKFAHRKYMAKVLRESPGLLVLDEGHNPRSTKSRLRKALMKVGTDLRILLSGTLFQNNFCEYFNTLCLARPKFIHEVLMELDQKFKTNHGVNKAPHLLENRARKLFLDIIAKKIDASVGDERLQGLNMLKNMTNGFIDNYEGSGSGSGDALPGLQIYTLVMNSTDIQHKILTKLQDVIKTYFGYPLEVELQITLAAIHPWLVTSSNCCTKFFNPQELSEIGKLKHDAKKGSKVMFVLNLIFRVVKREKILIFCHNIAPIRMFTELFENIFRWQRGREILTLTGDLELFERGRVIDKFEEPGNPSRVLLASITACAEGISLTAASRVIMLDSEWNPSKTKQAIARAFRPGQQKVVYVYQLLSRGTLEEDKYRRTTWKEWVSCMIFSEEFVADPSLWQAEKIEDDILREIVGEDKVKSFHMIMKNEKASTG

SEQ ID NO: 8374 - protein, 538 aa, Arabidopsis thaliana
MYRGYQYCRIDGNTGGDERDASIEAYNKPGSEKFVFLLSTRAGGLGINLATADVVILYDSDWNPQVDLQAQDRAHRIGQKKEVQVFRFCTENAIEAKVIERAYKKLALDALVIQQGRLAEQKTVNKDELLQMVRYGAEMVFSSKDSTITDEDIDRIIAKGEEATAELDAKMKKFTEDAIQFKMDDSADFYDFDDDNKDESKVDFKKIVSENWNDPPKRERKRNYSEVEYFKQTLRQGAPAKPKEPRIPRMPQLHDFQFFNIQRLTELYEKEVRYLMQAHQKTQMKDTIEVDEPEEVGDPLTAEEVEEKELLLEEGFSTWSRRDFNAFIRACEKYGRNDIKSIASEMEGKTEEEVERYAQVFQVRYKELNDYDRIIKNIERGEARISRKDEIMKAIGKKLDRYRNPWLELKIQYGQNKGKLYNEECDRFMICMVHKLGYGNWDELKAAFRTSPLFRFDWFVKSRTTQELARRCDTLIRLIEKENQEFDERERQARKEKKLSKSATPSKRPSGRQANESPSSLLKKRKQLSMDDYGKRRK

SEQ ID NO: 8375 - protein, 1648 aa, Arabidopsis thaliana
MGRRKQSKPQRAVGLITPTGSESDRNQLPGDEAEGSGDKNVEDIDKPYYVNICLSSRVSEQQQNFDLAEVVLTNFSVRERVGSSSTFTKPIEVDHDLDCSLRFRLCNVTNFVDRIKLGHWPVLSSSDITLELVDNKVSDDEVGSVIWSASFDGPGEGVSGLAHLASIKFLTLRLMPGNEGLLSPRVRVEMLQQAFDACDSLLENTRQIWKKSMIHVMSWLRPEVMTSEARYGTRFNVKDIESSVVTEDETLDSSKQSSFDAAAFYEAIKPSKTDAMLGDDIADLLPELRPYQRRAAYWMVQRERGDPITLGDKEDNQFISPLSISVGFLDSATKMFLNPFSTNAADEMGLGKTVELLACIFSHRKPAEDEISVSNGSSVTDVLNAGLRRLKRERVECICGAVSESHKYKGVWVQCDLCDAWQHADCVGYSPKGKGKKDSQHIDEKASQKKSKKDATEIIVREGEYICQMCSELLQVTASPISTGATLIVCPAPILPQWHSEITRHTRLGSLITCIYEGVRNASLSEEPMIDITELLNADIVLTTYDVLKEDLTHDFDRHDGDRHCLRFQKRYPVIPTPLTRIFWWRICLDEAQMVESNAAAATEMALRLYTKHRWCITGTPIQRKLDDLFGLLKFLKANPFDVSRWWIEVIRDPYERRDTKAMEFTHKFFKQVMWRSSKVHVADELQLPPQEECVSWLKFSAIEEHFYSRQHDTCVSYAREVIETLKRDILKRGHTSSDNPLVTHAEAAKLLNSLLKLRQACCHPQVGSSGLRSLQQSPMTMEEILMVLVKKTQSEGEEALRVLIVALNGIAAIAMLKQEFSEAVSLYKEALSITEEHAEDFRLDPLLNIHILHNLAEILPMAKSYGGKLSASGRPETKIDVKDDDHHRASKRQRINELESLTHDSSETVHQREAIAPDNGLKKDGECHEECKTLDIVCDTLKVKYLSAFNSKLSAAQHEFKKSYNQVSESLSNMGKQRSVWWLDALQLTEQNKDFSSELTRKIEEALHGNLNNSSSSRESSRFRTIHGMKLHLQTCMDMLERSRKKVIDRILEIDQTMEKPKLEDIERISNCKYCNKNSDGPPCIHCELDELFQEYEARLFRLNKSRRGVMEIAAAEETVHLQKKRDARNLFLFGLSSRSKDLNASRGDDEEPTKRNAGDIVVLSKSPSETEIVLGVIRNHCKTHLDRESKLAATKHLHTLEVMRKEYVHARVLARDQAQLLRAYDEINMSTMRLQLRESEDDTSIYALGRDELDVASVLNTNDKFMAQSSLLSIKGKLRYLKGLMKSKQKQESESPDLSSPIHETVDASDPAEQESENLLKRDEACPICHEILRNQKMVFQCGHSTCCNCFFAMTERKSVQETLQKWVMCPICRQHTDVRNIAYADDRRNSSSSDQDHKDSEASLVVQGSYGTKIEAVTRRILWIKSSDPQTKVLVFSSWNDVLDVLEHAFAANSITCIRMKGGRKSQTAISKFKGSEKETQKTNSHQKEEKSIQVLLLLVQHGANGLNLLEAQHVILVEPLLNPAAEAQAVGRVHRIGQEKPTLVHRFLVSGTVEESIYKLNRNKNTNLSSFSSRNTKNQDQQFLTLKDLESLFASPTAETAEMEQNPGERQENLRDLPPSVAAALAAERRMKESNASSSTTNAS

SEQ ID NO: 8376 - protein, 844 aa, Glycine max
  unsure (1)..(844): unsure at all Xaa locations
GRVRAWRXMQRPRATRAEKLRYHTXKADDPEAYMRMVKESKNERLTLFLVETNLLLVNLGATVQAXKDSKQSDGIEPLEDSETDLPESDGLKNGISKESPLEEDVDLIDSDRNGGDTSDLLEGQRQYNSAIHSIQEKVSEQPSILQGGELRPYQLEGLQWMLSLFNNNLNGILADEMGLGKTIQTISLIAYLMEHKGVTGPHLIVAPKAVLPNWINEFSTWAPSITTILYDGRLDERKAMKEELSGEGKFNVLITHYDLIMRDKAFLKKIHWLYLIVDEGHRLKNHECALARTLDSGYHIQRRLLLTGTPIQNSLQELWSLLNFLLPNIFNSVQNFEDWFNAPFADRVDVSLTDEEQLLIIRRLHQVIRPFILRRKKDEVEKFLPSKSQVILKCDLSAWQKVYYQQVTDVGRVGLDNGSGKSKSLQNLTMQLRKCCNHPYLFVGDYDIHKHKEEIFRASGKFELLDRLLPKLRRAGHRVLLFSQMTRLMDILEIYLRLNDFKFLRLDGSTKTEERGSLLRKFNAPDSAYFMFLLSTRAGGLGLNLQTADTVIIFDSDWNPQMDQQAEDRAHRIGQKKEVRVFVLVSVGSIEEVILERAKQKMGIDAKVIQAGLFNTTSTAQDRREMLQEIMRRGTSSLGTDVPSEREINRLAARSDEEFWLFEKMDEERRQKENYRSRLMEEHELPDWVYSPLNKDDKVXXIFDSGSVTGKRKRNEVVYADTLSDLQWMKAVENGQDISKLSVKGKRRXXTSLLTTMHKLVXDMGTEERLFRSEDTFDVTPASKRLKPEEINSQKHENEDVSVGGLNEHIFSWNTRRKKRSGYLGQGSFSDSRGQNSNGRANWN

SEQ ID NO: 8377 - protein, 957 aa, Glycine max
  unsure (1)..(957): unsure at all Xaa locations
IDADMNNRGKGRLKYLLQQTELFAHFAKGDQSSSQKKSRGRGRHASNFTEEEEDEEYLKGEEDGLANTRLVTQPSCIQGKMRDYQLAGLNWLIRLYENGINGILADEMGLGKTLQTISLLGYLHEFRGIKGPHMVVAPKSTLGNWMNEIRRFCPVLRAIKFLGNPDERRHIRDELLVAGKFDVCVTSFEMAIKEKSALRRFSWRYIIIDEAHRIKNENSLLSKTMRLYSTNYRLLITGTPLQNNLHELWSLLNFLLPEIFSSAETFDEWFQISGENDQQEVVQQLHKVLRPFLLRRLKSDVEKGLPPKKETILKVGMSQMQKQYYRALLQKDLEVVNAGGERKRLLNIAMQLRKCCNHPYLFQGAEPGPPFTTGDHLIENAGKMVLLDKLLPKLKERDSRVLIFSQMTRLLDILEDYLMFRGYQYCRIDGNTGGDDRDASIDAFNKPGSEKFVFLLSTRAGGLGINLATADVVILYDSDWNPQVDLQAQDRAHRIGQKKEVQVFRFCTEYTIEEKVIERAYKKLALDALVIQQGRLAEQKTVNKDELLQMVRFGAEMVFSSKDSTITDEDIDRIIAKGEEATAELDAKMKKFTEDAIKFKMDDTAELYDFDDXXKDESRFDIKKIVSENWIEPPKRERKRNYSESEYFKQTMRQGGPTKPKEPRIPRMPQLHDFQFFNTQRLSELYEKEVRYLMQTHQKNQIKDSIDVDEPEEVGDPLTAEELEEKERLLEEGFSSWSRRDFNTFIRACEKYGRNDIKGIASEMEGKTEEEVERYAKVFKERYKELNDYDRIIKNIERGEARISRKDEIMKAIGKKLDRYKNPWLELKIQYGQNKGKLYNEECDRFMICMVHKLGYGNWDELKAAFRTSPLFRFDWFVKSRTTQELARRCDTLIRLVEKENQEYDERERQARKEKKLAAKSMTPSKRSMPRQTESPSLKKRKQLTMDDYLSSGKKKK

SEQ ID NO: 8378 - protein, 946 aa, Glycine max
  unsure (1)..(946): unsure at all Xaa locations
XLMVSIKREQEEILEMKPAEALAELMYHCVARKPCPNDKLIKNICRLTCMDPSETPQAKSLCSMESIDDQGFLSCRTPVSKQKLKVHVLAGEDRSKVEGFLSTRRSELALRHLSEKLGVSLFDKLPKLWDCLTEVLKPSCLESLLGTNEKPVTMSIESVNDPQTLINNIQVVRSVAPVLNEELKPKLLTLLPCIFKCVQHSHVAVRLAASRCITSMAQSMTVKVMGAVVENAIPMLEDASSVYARQGAGMLISFLVQGLGVELVPYAPLLVVPLLRCMSDCDQSVRQSVTHSFAALVPLLPLARGLPQPIGLGEGVSRNAEDLQFLEQLLDNSHIEDYKLCTELKVTLRRYQQEGINWLAFLKRFKLHGILCDDMGLGKTLQASAIVASDIAEHRTSIGNEDXLLPSLIICPSTLVGHWAFEIEKYIDVSVISSLQYVGSAQERMLLRDHFCKHNVIITSYDVVRKDIDFLGQLLWNHCILDEGHIIKNAYAKVTLAVKQLKAQHRLILSGTPIQNNIMDLWSLFDFLMPGFLGTERQFQATYGKPLLAARDPKCSARDAEAGALAMEALHKQVMPFLLRRTKDEVLSDLPEKIIQDRYCDLSPVQFKLYEQFSGSRAKQEMSSVVTSNESAAAEGSSSSTKASSHVFQALQYLLKLCSHPLLVIGEKIPESLSTILSELFPAGSDVISELHKLYHSPKLVALHEILEECGIGVDNSGSEGAVNVGQHRVLIFAQHKAFLDIIERDLFHTHMKSVTYLRLDGSVEPEKRFEIVKAFNSDPTIDVLLLTTHVGGLGLNLTSADTLVFVEHDWNPMRDXXQAMDRAHRLGQKKVVNVHRLIMRGTLEEKVMSLQRFKVSVANAVINSENASMKTMNTDQLLDLFASAETSKKGASVLKSSENNSYGDAKLVGCRKGLKSILGGLEELWDQSQYTEEYNLRQFLARLND

SEQ ID NO: 8379 - protein, 774 aa, Glycine max
  unsure (1)..(774): unsure at all Xaa locations
MARPSKLHSSSDEALSNASSSSDEEEQVNDNEEEDXEEELEAVARPASSADDDDEFAGDNPPDSDEDPAADDADDDQDGDNVDPEISKREKARLKEMQKMKKQKIQEILDVQNAAIDADMNNRGKGRLKYLLQQTELFAHFAKGDQSSSQKKSRGRGRHASNFTEEEEDEEYLKGEEDGLANTRLVTQPSCIQGKMRDYQLAGLNWLIRLYENGINGILADEMGLGKTLQTISLLGYLHEFRGIKGPHMVVAPKSTLGNWMNEIRRFCPVLRAIKFLGNPDERRHIRDELLVAGKFDVCVTSFEMAIKEKSALRRFSWRYIIIDEAHRIKNENSLLSKTMRLYSTNYRLLITGTPLQNNLHELWSLLNFLLPEIFRSAXTFDEWFKISSXFDQXEVVQQLHXLRRLKSDVKKGLRSKKGTTSKEXATILKVGMTQMQKQYYRALLQKDLEVVNAGGERKRLLNIAMQLRKCCNHPYLFQGAEPGPPFTTGDHLIENAGKMVLLDKLLPKLKERDSRVLIFSQMTRLLDILEDYLMFRGYQYCRIDGNTGGDDRDASIDAFNKPGSEKFVFLLSTRAGGLGINLATADVVILYDSDWNPQVDLQAQDRAHRIGQKKEVQVFRFCTEYTIEEKVIERAYKKLALDALVIQQGRLAEQKTVNKDELLQMVRFGAEMVFSSKDSTITDEDIDRIIAKGEEATAELDAKMKKFTEDAIKFKMDDTAELYDFDDXXKDENRFDIKKIVSENWIEPPKRERKRNYSESEYFKQTMRXGGPT

SEQ ID NO: 8380 - protein, 560 aa, Glycine max
  unsure (1)..(560): unsure at all Xaa locations
XEDSGFKPLLKPYQLVGVNFLLLLYRKGIGGAILADEMGLGKTVQAITYLTLLKHLHNDSGPHLIVCPASVLENWERELKRWCPSFSVLQYHGAGRAAYCKELNSLSKAGLPPPFNVLLVCYSLFERHSAQQKDDRKILKRWRWSCVLMDEAHALKDKNSFRWKNLMSVARNANQRLMLTGTPLQNDLHELWSLLEFMLPDIFATEDVDLKKLLNAEDGDLIGRMKSILGPFILRRLKSDVMQQLVPKIQQVEYVIMEKQQETAYKEAIEEYRAVSQARMEKCSNLNSKSVLEVLPRRQINNYFVQFRKIANHPLLIRRIYNDEDVIRFARKLHPIGAFGFECTLDRVIEELKNYNDFCIHRLLLHYGVNDRKGILPDKHVMLSAKCRALAELLPSLKEGGHRALIFSQWTSMLDILEWTLDVIGLTYKRLDGSTQVAERQTIVDTFNNDTSIFACLLSTRAGGQGLNLTGADTVVIHDMDFNPQIDRQAEDRCHRIGQTKPVTIYRLVTKGTVDENVYEIAKRKLVLDAAVLESMEEINXXGDMPEKTMGEILSAILLS

SEQ ID NO: 8381 - protein, 560 aa, Glycine max
  unsure (1)..(560): unsure at all Xaa locations
XEDSGFKPLLKPYQLVGVNFLLLLYRKGIGGAILADEMGLGKTVQAITYLTLLKHLHNDSGPHLIVCPASVLENWERELKRWCPSFSVLQYHGAGRAAYCKELNSLSKAGLPPPFNVLLVCYSLFERHSAQQKDDRKILKRWRWSCVLMDEAHALKDKNSFRWKNLMSVARNANQRLMLTGTPLQNDLHELWSLLEFMLPDIFATEDVDLKKLLNAEDGDLIGRMKSILGPFILRRLKSDVMQQLVPKIQQVEYVIMEKQQETAYKEAIEEYRAVSQARMEKCSNLNSKSVLEVLPRRQINNYFVQFRKIANHPLLIRRIYNDEDVIRFAPYGEKTTEGGFECTLDRVIEELKNYNDFCIHRLLLHYGVNDRKGILPDKHVMLSAKCRALAELLPSLKEGGHRALIFSQWTSMLDILEWTLDVIGLTYKRLDGSTQVAERQTIVDTFNNDTSIFACLLSTRAGGQGLNLTGADTVVIHDMDFNPQIDRQAEDRCHRIGQTKPVTIYRLVTKGTVDENVYEIAKRKLVLDAAVLESMEEINXXGDMPEKTMGEILSAILLS

SEQ ID NO: 8382 - protein, 1211 aa, Glycine max
  unsure (1)..(1211): unsure at all Xaa locations
PRVRLVGLQWMLSLYNNKLNGILADEMGLGKTVQVMALIAYLMEFKGNYGPHLIIVPNAVMVNWKSELHTWLPSVSCIFYAGGKDYRSKLYSQVMAMKFNVLVTTYEFIMYDRARLSKIDWKYIIIDEAQRMKDRDSVLARDLDRYRCQRRLLLTGTPLQNDLKELWSLLNLLLPEVFDNKKAFNDWFSKPFQKEGPTQNTEDDWLETEKKVIIIHRLHQILEPFMLRRRVEDVEGSLPPKVSIVLRCKMSAVQSAIYDWVKSTGTLRLDPEGENSKIQKNPHYQAKEYKTLNNRCMELRKTCNHPSLNYPLLGELSTNSIVKSCGKLWILDRILIKLQRTGHRVLLFSTMTKLLDLLEDYLNWRRLVYRRIDGTTSLDDRESAIMDFNSPDSDCFIFLLSIRAAGRGLNLQSADTVVIYDPDPNPKNEEQAVARAHRIGQKREVRVIYMEAVVDKISSHQKEDEVRSGGTVDMEDELVGKDRYIGSIESLIRNNIQQYKIDMADEVINAGRFDQRTTHEERRLTLETLLHDEERYQETVHDVPSLQEVNRMIARSKEEIELFDQMDDELDWIEEMTRYDDVPKWLRANTREVNAAIGALSKRPSKNTLLGGSIGMESSEFGSERKRGRPKGKKHPNYKELDDEILEYSEASSDERNEYAHEGENGXXFDDDGYSVADGNQLEDGLLCDAYEFLLLXENARNNYLVEQXRSSISSSNIQXARGQFYHQFFPASLCYVGPPPSALDARPGSISKIMGDELEEGEIVVSGDSHMDHQQSGSWIHDRDEGEDEQVLQKPKIKRKRSLRVRPRHAMERPDGSEMISLQQYQIQKRIDPESKSFGDSNASKHDKNEASLKNKQIPSRKIANSSKLHGSPKSNRLNCTSAPSEDGNEHPTESWEGNNPNGSSAHGTKTTEIIQRGCKNVISKLQRRIDKEGHQIVPLLTDLWKRMENSGHAGGSGNNLLDLHKIDQRIDRMDYSGVMELVFDVQFMLRGAMHFYGYSYEVRTEARKVHDLFFDILKIAFPDTDFVEARGALSFSSQVPAGTAASSPRQVTVGPSKRHRVTNDAETDPCPSQKPSQSGSTTNGENTRFKGHLPQKNSRTGSGSAREQPQQDNPPLLAHPGQLVVCKKKRNDRDKSLGKGRTGSTGPISPPSAIRSPGSGSTPKDARLAQQGRGSQPSQHSNGSGGSVGWANPVKRLRTDSGKRRPSHM

SEQ ID NO: 8383 - protein, 977 aa, Glycine max
  unsure (1)..(977): unsure at all Xaa locations
PRVRLVGLQWMLSLYNNKLNGILADEMGLGKTVQGMALIAYLMEFKGNYAPHLIIVPHAVLVNWKSELHTWLPSVACIFYAGGKDHRSKLFSQVVAMKFNVLVTTYEFIMYDRARLSKIDWKYIIIDEAQRMKDRDSVLARDLDRYRCQRRLLLTGTPLQNDLKELWSLLNLLLPEVFDNKKAFNDWFSKPFQKEGPTQNTEDDWLETEKKVIIIHRLHQILEPFMLRRRVEDVEGSLPPKVSIVLRCKMSAVQSAIYDWVKSTGTLRLDPEGENSKIQKNPHYQAKEYKTLNNRCMELRKTCNHPSLNYPLLGELSTNSIVKSCGKLWILDRILIKLQRTGHRVLLFSTMTKLLDLLEDYLNWRRLVYRRIDGTTSLDDRESAIMDFNSPDSDCFIFLLSIRAAGRGLNLQSADTVVIYDPDPNPKNEEQAVARAHRIGQKSEVRVIYMEAVVDKISSHQKEDEVRSGGTVDMEDELVGKDRYIGSIESLIRNNIQQYKIDMADEVINAGRFDQRTTHEERRLTLETLLHDEERYQENVHDVPSLQEVNRMIARSKEEIELFDQMDDELDWIEEMTRYDHVPKWLRANTREVNAAIGALSKRPSKNTLLGGSIGMESSEFGSERKRGRPKGKKHPNYKELDDENLEYSEVSSDERNEYAHEGEIGEFDDDGYSVADGAQTIDKDQLEDGLLCDAGYEFPQSLESARNNQMVEEAGTSGSSSDSQRVRQIVSPSVSSQKFGSLSALDARPSSISKRMTDELEEGEIAVSGDSHMDHQQSGSWIHDRDEGEDEQVLQKPKIKRKRSLRVRPRHATERPDGSEMASHLAVQADHKYQAQLRTVGDSNASRHEQNTPALKNKRTLPSRRVANTSKLHGSPKSSRLNCMSVPSQDAGDHSRESWEGKPINSSGSSAHGTKMTEIIQRRCKNVISKLQRRIDKEGHEIVPLLTDLRKXRIENSXGLETALLDLRKXIDQRID

SEQ ID NO: 8384 - protein, 532 aa, Glycine max
  unsure (1)..(532): unsure at all Xaa locations
XDVLPRRSSDSLGPYGARKGLGKTVQAITYLTLLKHLHNDSGPHLIVCPASVLENWERELKRWCPSFSVLQYHGAGRAAYCKELNSLSKAGLPPPFNVLLVCYSLFERHSAQQKDDRKILKRWRWSCVIMDEAHALKDKNSFRWKNLMSVARNANQRLMLTGTPLQNDLHELWSLLEFMLPDIFASEDVDLKKLLNAEDRDLIGRMKSILGPFILRRLKSDVMQQLVPKIQQVEYVIMEKQQETAYKEAIEEYRAVSQARMEKCSNLNSKSVLEVLPRRQINNYFVQFRKIANHPLLIRRIYNDEDVIRFARKLHPIGAFGFECTLDRVIEELKNYNDFCIHRRWHDYMLXIELLHGXCRXLAELLPSLKEGGHRALIFSQWTSMLDILEWTLDVIGLTYKRLDGSTQVAERQTIVDTFNNDTSIFACLLSTRAGGQGLNLTGADTVVIHDMDFNPQIDRQAEDRCHRIGQTKPVTIYRLVTKGTVDENVYEIAKRKLVLDAAVLESMEEINXXGDMPEKTMGEILSAILLS

SEQ ID NO: 8385 - protein, 360 aa, Glycine max
  unsure (1)..(360): unsure at all Xaa locations
XPRPLGNWMNEIRRFCPILRAIKFLGNPDERRHIRDELLVAGKFDVCVTSFEMAIKEKSALRRFSWRYIIIDEAHRIKNENSLLSKTMRLYSTNYRLLITGTPLQNNLHELWSLLNFLLPEIFSSAETFDEWFQISGENDQQEVVQQLHKVLRPFLLRRLKSDVEKGLPPKKETILKVGMSQMQKQYYKALLQKDLEVVNAGGERKRLLNIAMQLRKCCNHPYLFQGAEPGPPFTTGDHLIENAGKMVLLDKLLPKLKERDSRVLIFSQMTRLLDILEDYLVFRGYHYCRIDGNTGCDDRDASIDAFNKPGSEKFVFLLSTRAGGLGINLATADVVILYDSDWSVFLVVLNTAMLFISVP

SEQ ID NO: 8386 - protein, 474 aa, Glycine max
  unsure (1)..(474): unsure at all Xaa locations
XSYVGPPPPXXTGTPLQNNLEELWALLNFLLPNIFNSSEDFSQWFNKPFESAGDSSPDEALLSEEENLLIINRLHQVLRPFVLRRLKHKVENELPEKIERLIRCEASSYQKLLMKRVEENLGSIGNSKARSVHNSVMELRNICNHPYLSQLHAEEVDNFIPKHYLPPIIRLCGKLEMLDRLLPKLKATDHRVLFFSTMTRLLDVMEEYLTSKQYRYLRLDGHTSGGDRGALIELFNQPGSPYFIFLLSIRAGGVGVNLQAADTVILFDTDWNPQVDLQAQARAHRIGQKRDVLVLRFETVQTVEEQVRASAEHKLGVANQSITAGFFDNNTSAEDRREYLESLLRECKKEEVAPVLDDDALNDLLARSETELDIFEAVDKERKEDELATWKKLVLGQAADGYSDIPPLPARLVTDEDLKQFYEAMKISDVPKAEVESSGVKRKGGYIGGLDTQHYGRGKRAREVRSYEEQWTEX

SEQ ID NO: 8387 - protein, 264 aa, Glycine max
  unsure (1)..(264): unsure at all Xaa locations
XHASAXXRKAKKAVAAMLTRSKESEKTEDMNMTEEERVEKEQKELMPLLTGGKLKNYQLKGVKWLISLWQNGLNGILADQMGLGKTIQTIGFLSHLKAKGLDGPYMIIAPLSTLSNWVNEISRFAPSLPAVIYHGDKKQRDDIRRKHMPTRTIGPQFPIVITSYEIALNDAKKYFRSYNWKYLVVDEGHRLKNSQCKLVKALKFINVENKLLLTGTPLQNNLAELWSLLNFILPDXXASLEEFESWLVSFAYLLFKIMLFFSAG

SEQ ID NO: 8388 - protein, 436 aa, Glycine max
  unsure (1)..(436): unsure at all Xaa locations
LQKIDXKYIIIDEAQRMKDRDSVLARDXDRYRCQRRXLLTGTXLQNDLKELWSLLNLLLPEVFDNKKAFNDWFSKPFQKEGXPPQNVEDDWLETEKKVIIIHRLHQILEPFMLRRRVEDVEGSLPPKVSIVLKCKMSAVQSAIYDWVKSTGTLRLDPEDEKHKLHRNPAYQVKQYKTLNNRCMELRKTCNHPLLNYPFFSDLSKEFIVKSCGKLWILDRILIKLQRTGHRVLLFSTMTKLLDILEEYLQWRRLVYRRIDGTTSLEDRESAIVDFNSPDSDCFIFLLSIRAAGRGLNLQSADTVVIYDPDPNPKNEEQAVARAHRIGQTREVKVIYMEAVVDKIASHQKEDELRSGGTVDMEDELAGKDRYMGSIESLIRNNIQQYKIDMADEVINAGRFDQRTTHEERRLTLETLLHDEERYQETVHDVPSLXXVX

SEQ ID NO: 8389 - protein, 546 aa, Glycine max
  unsure (1)..(546): unsure at all Xaa locations
XDXDIFKHNSQVERVIADRISKDNSGNVIPEYLVKWQGLSYAEATWEKDIDIAFAQHTIDEYKAREAAMAVQGKMVDSQRKKSKGWXXSSAFLWAVLXFFNKTWNISTDSVYALDMVAGXGKLVLLLLLSTXXNIXXLSSWNXITKKKTNSRTPSIDYXXYYMYNKLISIMCVVWYFVCFGFLVCLTIPLPSPSLFCRALLHFLDPDKFRSKDEFVQNYKNLSSFNENELANLHMELRPHILRRVIKDVEKLLPPKIERILRVEMAPLQKQYYKWILERNFHNLNKGVRGNQVSLLNIVVELKKCCNHPFLFESADHGYGGDCSDNSKLERIVFSSGKLVILDKLLVKLHETKHRVLIFSQMVRMLDILGEYMSLRGFQFQRLDGSTKAELRQQAMDHFNAPGSDDFCFLLSTRAGGLGINLATADTVIIFDSDWNPQNDLQAMSRAHRIGQQEVVNIYRFVTSKSVEEDILERAKKKMVLDHLVIQKLNAEGRLEGQEAKSISQHTRPPGAVNIYRFVTSKSVEEDILERAKKKMVLDHLVIQKX

SEQ ID NO: 8390 - protein, 234 aa, Glycine max
  unsure (1)..(234): unsure at all Xaa locations
XPRPPKAVLPNWVNEFTTWAPSITAILYDGRLDERKAMKEELSGEGKFNALXSHYKIIVRXXXDKAFLKKIQWKYLIVDEGHRLKNHESALARTLDNGYRIQRRLLLTGTPIQNSLQELWSLLNFLLPNIFNSVQNFEDWFNAPFADRVDVSLTDEEQLLIIRRLHQVIRPFILRRKKXDEVEKFLPGKSQVILKCDMSAWQKVYYQQVTDVGRVGLDNGSGKSKSLQNLTMQL

SEQ ID NO: 8391 - protein, 424 aa, Glycine max
IRLELIVLSQNGGSNRGGFNIVSSSAKSSIHLDGLFNIISYDLVPKLQNMLMTCNFKVVIADESHFLKNAQAKRTTASLPVIKKAQYALLLSGTPALSRPIELFKQLEALYPDVYRNVHEYGNRYCKGGFFGVYQGASNHEELHNLIKATVMIRRLKKDVLSQLPVKRRQQVFLDLAGKDMKQINALFRELEMVKAKIKAAKSQEEAESLKFAQKNLINKIYTDSAEAKIPSVLDYVGTVIEAGCKFLIFAHHQPMIDSIHEFLLKKKVGCIRIDGSTPAASRQQLVTDFQEKDSIKAAVLSIKAGGVGLTLTAASTVIFSELSWTPGDLIQAEDRAHRIGQVSSVNIYYLLANDTVDDIIWDVVQNKLENLGQMLDGHENALEVSASLPVNSPSKQKTLDQFVRRCDNTDGLEYEPNPKRPRN

SEQ ID NO: 8392 - protein, 835 aa, Glycine max
  unsure (1)..(835): unsure at all Xaa locations
MELRSRRRLSNPSVSGKEQPPGDGSNNKDKGVAVISSNSDIVSGPDSDSDYEDEEFGVGSLPDLNQELSVPSVSKGTKRRKYSRKGRKGDSKSVLLWNAWEEEQEKWIDRHMLEDVDLDNHSEVMNETADIPSDLTMPLLRYQKEWLAWALKQESSASKGGILADEMGMGKTVQAIALVLAKREFELASLKPAIKGTLVICPVVAVTQWVSEVDRFTLKGSTKVLIYHGANRGRSGNRFADYDFVITTYSVVESEYRKHMLPPKERCPYCGKLFLPNKLMYHQIYFCGPDAVRTEKQSKQAKKKKREVTKGKTKKSDSKISKSSNTKKEEEMWMDEEDLDAPVRSDRSILHAVKWQRIILDEAHYIKSRHCNTAKAVLALESTYKWALSGTPLQNRVGELYSLIRFLQITPYSYYLCKDCDCRILDHSTKECSVCTHSSVRHFCWWNKYVATPIQSYGNGDAGKRAMILLKHKVLKNIVLRRTKIGRAADLALPPRIVSLRRDCLDIKEQDYYESLYNESQAQFNTYIEANTLMNNYAXHIFDLLTRLRQAVDHPYLVVYSQSAASRSGVLSNNVTVEQVCGICHEPVEDVVVTSCEHAFCKACLIDFSSSLGRVSCPTCSKFLAVGSTSNKDVGDQANKTTIKGFRSSSILNRIRLENFQTSTKIGALREEIRFMVERDGSAKGIVFSQFTSFLDLINYSLHKSGVSCVQLNGSMSLAARDAAIKRFTEDPDCKIFLMSLKAGGVALNLTVASHVFLMDPWWNPAVERQAQDRIHRIGQYKPIRIVRFVIENTIEERILKLQEKKELVFEGTIGGSSDALGKLTEADLRFLFVT

SEQ ID NO: 8393 - protein, 750 aa, Glycine max
IRLEGDSKSVLLWNAWEEEQEKWIDRHMLEDVDLDNHSEVMNETADIPSDLTMPLLRYQKEWLAWALKQESSASKGGILADEMGMGKTVQAIALVLAKREFELASLKPAIKGTLVICPVVAVTQWVSEVDRFTLKGSTKVLIYHGANRGRSGNRFADYDFVITTYSVVESEYRKHMLPPKERCPYCGKLFLPNKLMYHQIYFCGPDAVRTEKQSKQAKKKKREVTKGKTKKSDSKISKSSNTKKEEEMWMDEEDLDAPVRSDRSILHAVKWQRIILDEAHYIKSRHCNTAKAVLALESTYKWALSGTPLQNRVGELYSLIRFLQITPYSYYLCKDCDCRILDHSTKECSVCTHSSVRHFCWWNKYVATPIQSYGNGDAGKRAMILLKHKVLKNIVLRRTKIGRAADLALPPRIVSLRRDCLDIKEQDYYESLYNESQAQFNTYIEANTLMNNYAHIFDLLTRLRQAVDHPYLVVYSQSAASRSGVLSNNVTVEQVCGICHEPVEDVVVTSCEHAFCKACLIDFSSSLGRVSCPTCSKLLTVDLTSNKDVGDQANKTTIKGFRSSSILNRIRLENFQTSTKIEALREEIRFMVERDGSAKGIVFSQFTSFLDLINYSLHKSGVSCVQLNGSMSLAARDAAIKRFTEDPDCKIFLMSLKAGGVALNLTVASHVFLMDPWWNPAVERQAQDRIHRIGQYKPIRIVRFVIENTIEERILKLQEKKELVFEGTIGGSSDALGKLTEADLRFLFVT

SEQ ID NO: 8394 - protein, 331 aa, Glycine max
IMLPRKKEIIIYANMTEHQKNLQDHLVNKTLGNYLKENMSSGLSVPAIMIRNLAIQLRKVCNHPDLLESAFDDSYLYPPLEEIVGQCGKFHLLDRLLQRLFSRNHKVLIFSQWTKVLDIMDYYFSEKGFAVCRIDGSVKLDERKQQIQDFNDVNSNCRVFLLSTRAGGLGINLTVADTCILYDSDWNPQMDLQAMDRCHRIGQTKPVHVYRLSTAQSIEGRMLKRAFSKLKLEHVVIEKGQFHQERTKPASMDEIEEDDVLALLRDEETAEDKMIHTDISDEDLEKLLDRSDLIVNDFNDDNSVSVFPLKGPGWEVVIPTATGGMLSTLNS

SEQ ID NO: 8395 - protein, 223 aa, Glycine max
  unsure (1)..(223): unsure at all Xaa locations
XYGLYKNNHGGILGDDMGLGKTIQAIAFLAAVFAKEGHSTLNENHVEKRDPALIICPTSVIHNWESEFSKWSNFSVSIYHGANRNLIYDKLEANEVEILITSFDTYRIHGSSLLDINWNIVIIDEAHRLKNEKSKLYKACLEIKTLRRYGLTGTAMQNKIMELFNLFDWVAPGSLGTREHFREFYDEPLKHGPRSTASDRFXQIANKRKHHLGXVLYXKYLLR

SEQ ID NO: 8396 - protein, 350 aa, Glycine max
  unsure (1)..(350): unsure at all Xaa locations
XTRPEQSESERDFYEALFERSKVQFDQYVAQGKVLHHYANILDLLMQLRRCCNHPFLVMCGSDTQKRADLSRLARKFFQTNTEFPDESNQNDPRQAYIAEVLENIQKGDIIECSICMESPEDPVFTPCAHKFCRECLFSCWGTSVGGKCPICRQLLQKDDLITYSSESPFKVDIKNNVTESSKVSKLFEFLQRILNTSSEKSIVFSQWTSFFDLLENPLRRRGIGFXLRYDGKLTQKQREKVLDEFNETREKRVLLMSLKAGGVGLNLTAASNVFIMDPWWNPAVEEQAIMRIHRIGQNRRVVVRRFIVKDTVEDRLQQVQARKQRMISGTLTDDEVRTARIQDLKMLFT

SEQ ID NO: 8397 - protein, 849 aa, Glycine max
  unsure (1)..(849): unsure at all Xaa locations
IDIAFAQHPRVRYKAREAAMAVQGKMVDSQRKKSKASLRKLEEQPEWLKGGELRDYQLEGLNFLVNSWRNDPNVILADEMGLGKTVQSVSMLGFLQNAQQIHGPFLVVVPLSTLSNWAKEFRKWLPDMNIIIYVGTSCXVERVVSTMDXLVAYHSALPLQXTVWKNLWXALLXXSLIRXXVQESKDEXFVQNXXKNXELFFNEXNELANLHLXELRPHILRXRVIKDVEKSLPPKIERILXXEMSPLQKQYYKWILERNFHNLNKGVRGNQVSLLNIVVELKKCCNHPFLFESADHGYGGDCSDNSKLERIVFSSGKLVILDKLLVKLHETKHRVLIFSQTTXVRMLDILGEYMSLRGFQFQRLDGSTKAELRQQAMDHFNAPGSDDFCFLLSTRAGGLGINLATADTVIIFDSDWNPQNDLQAMSRAHRIGQQEVVNIYRFVTSKSVEEDILERAKKKMVLDHLVIQKLNAEGRLEKKEAKKGGNFDKNELSAILRFGAEELFKEERNDEESKKQLLSMNIDEILERAEKVEEKEADGEQGNALLGAFKVANFCNDEDDGSFWSRWIKPDAVFQAEEALVPRSARNIKSFAEVDPSERKXXKKKEGTAXELDRVSKRRKAEYSAPAVPMIEGASVQVRNWSYGNLSKRDALRFSRSVMKYGNESQVDLIVAEVGGAVGAAPPGVQIELFNALIDGCTEAVELGNLDAKGPLLDFFGVPVKANDLLTRVQQLQLLAKRIGRYEDPIAQFRVLSYLKPSNWSKGCGWNQIDDARLLLGIHYHGFGNWETIRLDERLGLTKKIAPVELQHHETFLPRAPNLKDRANALLEQELAVLGVKNANSRVGRKPSK

SEQ ID NO: 8398 - protein, 203 aa, Glycine max
  unsure (1)..(203): unsure at all Xaa locations
XEIVRASGKFELLDRLLPKLRRAGHRVLLFSQMTRLMDTLEVYLRLHDFKYLRLDGSTKTEERGNLLRKFNAPDSPYFMFLLSTRAGGLGLNLQTADTVIIFDSDWNPQMDQQAEDRAHRIGQKKEVRVFVLVSVGSIEEVILERAKQKMGIDAKVIQAGLFNTTFTAQDRREMLEEIMRRGTSSLGTDVPSEREXNXLAARX

SEQ ID NO: 8399 - protein, 177 aa, Glycine max
  unsure (1)..(177): unsure at all Xaa locations
SAYLFPVAAMEAPXMPNGMYDGSALIKGAGKLFLLQKMLRKLKDDGHRVLIFSQMTKMLDLLEDFMEHEGYKYERIDGGITGNMRQEAIDRFNAPGAQQFCFLLSTRAGGLGINLATADTVVIYDSDWNPHNDIQAFSRAHRIGQNRKVMIYRFVTRASVEERITQVAKKEMMLTHL

SEQ ID NO: 8400 - protein, 1246 aa, Glycine max
  unsure (1)..(1246): unsure at all Xaa locations
HRKSHLRQRKHPFHACPFEAYLSRSWRAVELIKFESGTTTLYFVDNHHMTIKKGSFSDVRVRSRKATLSDCSFLRTGIDICVLYNSDESSANHVWLDAKINSIQRKPHNPECSCQYYVNFYVNQGSLGTELRTLRKEVKVVGINEIAILQKLERNTCQHKYYRWESSEDCSKVPHTKLLGKFISDLSWLVVASAIRKVSFCARSVENNIVYQILGSDATTSSLYMDSEISVVNFKVNEDGMQMPVIHLVDLFETDTNTSGDKHDSHYDVEGLRRSKRRNIQPERYSDCGNVSEIKVGNVRTWPYKLNXXRKDDDGGGEXXSLPLAXXENSDNSQKVNELSSCREIIVYHGRNETLELKSGEANQTQLASVPLLQEGDSLALEHHHLNDNXLLEEVXXAYYSTPKLKRKRLVDLEADVDFDPGREGINSNKGVSEKRHGSSWYSRSRSHAAEHSYKDRSLNATAYKEMIDSYLKDVNRTPTTEEXXPVMDQRKEIGNFGQKKEAEIPEREDEEQISEIDMLWREMEMALASSYLEETEGSNSANFAKTTEECTCPHDYRLSEEIGIYCYKCGFVKTEIKYITPPFVRQIEMQRSVRHQEEKQCNGKDTKEKASKDDDFHLPHAPTDEHNSMEHDNVWKLIPQFREKLHDHQKKAFEFLWQNIGGSMEPKLMDAESKRRGGCVISHAPGAGKTFLIIAFLVSYLKLFPGKKPLILAPKGTLYTWCKEFNKWEISMPVYLIHGRGGTQKDTEQNSIVLPGFPNPNKDVKHVLDCLQKIKLWQEKPSVLVMSYTAFLALMREGPEFSHRKYMAXALREGPGILILDEGHNPRSTKSRLRKGLMKLKTDLRILLSGTLFQNNFCEYFNTLCLARPKFISEVLDTLDPITRRNKTVEKAGHLLESRARKLFLDKIAKKIDSGIGNERMQGLNMLRETTNGFVDVYESENFDSAPGLQIYTLLMNTTDKQREILPKLHTRVDECNGYPLELELLVTLGSIHPWLVKTTSCANKFFTADQLKQLDKYKYDMKAGSKVKFVLSLVFRVMQREKVLIFCHNLAPVKLLIELFEMFFKWKKDREILLLSGELDLFERGKVIDKFEEHGGASKVLLASITACAEGISLTAASRVIFLDSEWNPSKTKQAIARAFRPGQEKMVYVYQLLVTGTLEEDKYKRTTWKEWVSSMIFSEAFEQNPSHSRAVNIEDDILREMVEEDKSKTIHMILKNEKASTNXREELARYLKQEQGQWKIKEP

SEQ ID NO: 8401 - protein, 205 aa, Glycine max
  unsure (1)..(205): unsure at all Xaa locations
PTXCAHASAQVLNVWKEQGHRVLLFTQTQQMLNIFENFLTTSGHIYRRMDGLTPVKQRMALIDEFNDSSEIFIFILTTKVGGLGTNLTGANRVIIFDPDWNPSTDMQARERAWRIGQKRDVTVYRLITRGTIEEKVYHRQIYKHFLTNKILKNPQHKRFFKARDMKDLFTLNVDGETGSTETSNIFSQISEEVNVIGTYKENKDK

SEQ ID NO: 8402 - protein, 192 aa, Glycine max
  unsure (1)..(192): unsure at all Xaa locations
XASADDEDALVDSSDVMPDEEVDPEEAELKKEALKAAQEAVSKQRMLTSAFDTECLRLRQAGETDSLPPDVAGASNIDLQTPSTMPVASTVRTPELFKGVLKEYQLKGLQWLVNCYEQGLNGILADEMGLGKTIHAMAFLAHLAEEENIWGPFLVVAPASVLNNWNEELERFWPALKRLPYWGGLSDRTGLW

SEQ ID NO: 8403 - protein, 189 aa, Glycine max
  unsure (1)..(189): unsure at all Xaa locations
XQPEDLKGGSLFPHQLEALNWLRKCWYKSXXVILADEMGLGKTVSAXXSLPCLVLVPLSTMPNWLAEFELWAPNVNVVEYHGCAKARAIIRQYEWHANNPSGLNKKTEAYKFNVLLTTYEMVLADSSHLRGVPWEVLVVDEGHRLKNSESKLFSLLNTFSFQHRVLLTGTPLQNNLGEMYNLLNFLQPX

SEQ ID NO: 8404 - protein, 497 aa, Glycine max
  unsure (1)..(497): unsure at all Xaa locations
XFGSSCSLRAKRRWCLSGTPIQNTIDDLYSYFRFLKYDPYAVYKSFYNTIKVPISKSTIQGYKKLQAVLRAIMLRRTKGTLLDGKPIINLPPKTIELSKVDFSIEERAFYTKLESDSRLQFKAYAAAGTVSQNYANILLMLLRLRQACDHPLLVKDFDSDPVGKDSVEMAKNLPRDMLINLFNCLEATFAICLVCNDPPEEPVITMCGHVFCYQCVSEYLTGDDNMYPSVNCKELIGDDLVFSKATLRSCISDDGGSLSSANSHRDYSLVQQRDYTSSKIKAVLEVLQSNCKLKISSSDLLNSSGGCRDSPSSDNLYVEDCDSDVRVTKHTIKYSESTTEGPIKAIVFSQWTSMLDLVETSLRQFSIQYRRLDGRMTLGARDKAVKDFNTEPEIAVMLMSLKAGNLGLNMVAACHVILLDLWWNPTTEDQAIDRAHRIGQTRPVTVTRITIKDTVEDRILALQEDKRKMVASAFGEDHAGGTGTRLTVDDLKYLFMV

SEQ ID NO: 8405 - protein, 190 aa, Glycine max
  unsure (1)..(190): unsure at all Xaa locations
XSARDLRLDGSVEPEKRFEIVKAFNSDPTIDVLLLTTHVGGLGLNLTSADTLVFVEHDWNPMRDHQAMDRAHRLGQKKVVNVHRLIMRGTLEEKVMSLQRFKVSVANAVINSENASMKTMNTDQLLDLFASAETSKKGASVVKSPENNSDELVGSGKGLKSILGGLEELWDQSQYTEEYNLSLFLARLNG

SEQ ID NO: 8406 - protein, 481 aa, Glycine max
IRLEAKRRWCLSGTPIQNAIDDLYSYFRFLRYDPYSDHASFCTRIKNPISRNPANGYRKLQAVLKTIMLRRTKGTLLDGEPIISLPPKYIELKKVDFSMEERDFYSKLEADSRAQFQEYADAGTVKQNYVNILLMLLRLRQACDHPLLVKRYNSNSLWRSSVEMAKKLPQEKQISLLKCLEVSLALCSICNDPPEDAVVSVCGHVFCNQCICEHLSGDDNQCPAANCKSQLSTSMVFSKATLNSCLSDQGCDNSPSCSGPEAEEAEPWSESKPYDSSKIKAALEVLKSLCKPQCYTSKSTSEHSTFREDKLSDENRSSNASVTVVGEKAIVFSQWTRMLDLLEACLKNSSINYRRLDGTMSVVARDKAVKDFNNCPEVTVIIMSLKAASLGLNLVVACHVLMLDLWWNPTTEDQAIDRAHRIGQTRPVTVLRLTVRDTVEDRILALQQKKRMMVASAFGEDGTGDRQTRLTVDDLKYLFMM

SEQ ID NO: 8407 - protein, 207 aa, Glycine max
  unsure (1)..(207): unsure at all Xaa locations
QKSKDXNRLRFRSSKFSSGKQKNSVKDDAXLKKQQKEFQHYTQSPVFLSEGTLHPYQLEGLNFLRFSWSKQTHVILADEMGLGKTIQSIAFLASLFKEGVSPHLVVAPLSTLRNWEREFATWAPHMNVLMYVGSAQARSVIREYEFYFPKKQKKIKKKKSGHLISESKQDRIKFDVLLTSYEMINFDTASLKPIKWECMIVDEGHRL

SEQ ID NO: 8408 - protein, 544 aa, Glycine max
  unsure (1)..(544): unsure at all Xaa locations
XYDDHAVSRRNRKCHSSAQSGKMELNSAMLDAVLRPSVKVAWFRVVLDXDQSIKNLRTHVARARWGLRSAGVXQMDRESYKMSINQXCYVVRMANFVTWDVIISLPSKTVKSKKVEFSQEERDLYSKLEAVTLGQFQEXPVDGTVKQYYVHISLMFKRLKXAWDDPLFFKSHNADSLSQSQEYADAGTVKQNYVNILLMLLRLRQACDHPLLVKRYNSNSLWKSSVEMAKKLPQEKRLCLLKCLEASLALCGICKDFPEVAVISVFGDEFCNNYSVDFGDEAEEYSHCSKAQPXLCTKSKASLDTLKRSFSHQPCDSXNNSCQSTLEESAVCSRGXSYDSSKIXAALEVLQSLSKPQCFASQNNSVQSTSGESTDGLGSSSSNNSVGVGEKAIVFSQWTRMLDILEACLKNSSIQYRRLDGTMSVTARDKAVKDFNTLPEVSVMIMSLKAASLGLNMVAACHVLMLDLWWNPTTEDQAIDRAHRIGQTRPVTVLRLTVRDTVEDRILALQQKKRKMVASAFGEDGTGGCQSRLTVDDLKYLFMM

SEQ ID NO: 8409 - protein, 548 aa, Glycine max
  unsure (1)..(548): unsure at all Xaa locations
XSARAYDDHAVSSKKRKCPPSSKSGKKGLDSAMLEAVARPLAKVAWFRVVLDEAQSIKNHRTQVARACWGLRAKRRWCLSGTPIQNAIDDLYSYFRFLRYDPYAVYTSFCSTIKIPISRSPSKGYRKLQAVLKTIMLRRTKATLLDGEPIISLPPKSVELKKVEFSPEERDFYSRLEADSRAQFQEYADAGTVKQNYVNILLMLLRLRQACDHPLLVKRYNSNSLWKSSVEMAKKLPQEKRLCLLKCLEASLALCGICNDPPEDAVVSVCGHVFCNQCICEYLTGDDNQCPAPNCKTRLSTPSVFSKVTLNSSFSDQPCDNLPDYSGCEVEESEFCSQAQPYDSSKIKAALEVLQSLSKPQCFASQNNSVQSTSGESTDGLGSSSSNNSVGVGEKAIVFSQWTRMLDILEACLKNSSIQYRRLDGTMSVTARDKAVKDFNTLPEVSVMIMSLKAASLGLNMVAACHVLMLDLWWNPTTEDQAIDRAHRIGQTRPVTVLRLTVRDTVEDRILALQQKKRKMVASAFGEDGTGGCQSRLTVDDLKYLFMM

SEQ ID NO: 8410 - protein, 219 aa, Glycine max
  unsure (1)..(219): unsure at all Xaa locations
GSLEEFQEEFKDINQEEQISRLHKMLAPHLLRRVKKDVMKELPPKKELILRIELSSKQKEYYKAILTRNYQILTRRGGAQISLINVVMELRKLCCHPYMLEGVEPDIDDAKEAFKQLLESSGKLQLLDKMMVKLREQGHRVLIYSQFQHMLDLLEDYCAYKNWQYERIDGKVGGAERQVRIDRFNAKNSSRFCFLLSTRAXGGLEINLATADTAIIYDX

SEQ ID NO: 8411 - protein, 194 aa, Glycine max
  unsure (1)..(194): unsure at all Xaa locations
XLEXRMHSSKFSSTDSCDLLICDEAHRLKNDQTITNRAFAGIVCKRRILLSGTPLQNDLEEFFAMVNFTNPGILGDIAHFRRYYEAPIICGREPAATAEEKKLGAEQSAELSVNVNRFILRRTNALLSNHLPPKIVEVVCCKLTPLQSELYKHFIQSKNVKRAITVELKQSKILVYITALKXLCNHSKLIXFDX

SEQ ID NO: 8412 - protein, 258 aa, Glycine max
  unsure (1)..(258): unsure at all Xaa locations
XLDGSSTIQDRRDMVRDFQHRSDIFVFLLSTRAGGLGINLTAADTVIFYESDWNPTLDLQAMDRAHRLGQTKDVTVYRLICKETVEEKILLRASQKSTVQNLVMTGGSVGGDLLAPEDVVSLLLDDVQLEQKLKEIPLQVKDKQKKKQPMRGIRVNEDGDASMEDLTSSVAQGTSDNDLSMDPEGSKSSNKKRKAFSDKPTSRPMNSQKMSEFSTTPMKPKRPKRIKKNVNEKFEDAFTGIAAXDPRADPISTSTKRF

SEQ ID NO: 8413 - protein, 490 aa, Glycine max
  unsure (1)..(490): unsure at all Xaa locations
XKNHRTQVARACWGLRAKRRWCLSGTPIQNAIDDLYSYFRFLRYDPYAVYTSFCSTIKIPISRSPSKGYRKLQAVLKTIMLRRTKGSLLDGEPIISLPPKSVELKKVEFSQEERDFYSKLEADSRAQFQEYADAGTVKQNYVNILLMLLRLRQACDHPLLVKRYNSTSRPKSSVEMAKKLPQEKRLCLLKCLEASLALCGICNDPPEDAVVSVCGHVFCNQCICEYLTGDDNQCPAPNCKTRLSTPSVFSKVTLNSSFSDQPCDNLPDYSGCEVEESEFCSQAQPYDSSKIKAALEVLQSLSKPQCFASQNNSVQSTSGESTDGLGSSSSNNSVGVGEKAIVFSQWTRMLDILEACLKNSSIQYRRLDGTMSVTARDKAVKDFNTLPEVSVMIMSLKAASLGLNMVAACHVLMLDLWWNPTTEDQAIDRAHRIGQTRPVTVLRLTVRDTVEDRILALQVSVGCSFWWKQKKQGAENFVAWPLLTLDMKII

SEQ ID NO: 8414 - protein, 217 aa, Glycine max
  unsure (1)..(217): unsure at all Xaa locations
NYFVQFRKIANHPLLIRRIYSDEDVIRFARKLHPMGAFGFECTLDRVIEELKNYNDFSIHRRQXHDYVLGMLRLSFSMDNXXALAELLPSLKEGGHRALIFSQWTSMLDILEWTLDVIGLTYKRLDGSTQVAERQTIVDTFNNDTSIFACLLSTRAGGQGLNLTGADTVVIHDMDFNPQIDRQAEDRCHRIGQTKPVTIHRDLSIILXLSHXHXKXV

SEQ ID NO: 8415 - protein, 456 aa, Glycine max
  unsure (1)..(456): unsure at all Xaa locations
VQIASQISRYRQSNSVEGLCALVSXLDKLNCLRREYFVQKYNNLSXLXYHVFENHHRYLRVQRLXRRGNSDEFRLVHTFSVNIFMVXMSPLWIYKYXSILDPKXCSFNTYVIKRLIFLLMSVLVVKXSCSKPYLQKRRKHERNXXKINNRYRQSIAFSIKKIVLLKILLDKLHESKHRVLIFRNLISKLDILXEYMSLXGFQSQWLDGSIKDELRQQAMDHFNAPGSDDFCFLLSTRAGGLGINLATADTVIIFDSDWNPQNDLQAMSRAHRIGQQEVVNIYRFVTSKSVEEDILERAKKKMVLDHLVIQKLNAEGRLEKKEAKKGGNFDKNELSAILRFGAEELFKEERNDEESKKQLLSMNIDEILERAENVEEKETDEXXNALLGAFKVANFCNDEDDGSXSCWIKPDAVLQAEEALAPRSARNIKSYQRLIHMKTNNNPNTTRPPGTGTACX

SEQ ID NO: 8416 - protein, 149 aa, Glycine max
  unsure (1)..(149): unsure at all Xaa locations
XKRQKLVNCFNDPSKDEFVFLLSSKAGGCGLNLIGGNRLVLFDPDWNPANDKQAAARVWRDGQKKRVYIYRFLSAGTIEEKVYQRQMSKEGLQKVIQQEQTDSLVAQGNLLSTENLRDLFTFHENIKSEXXMKTCNAVGVKQLMALEAX

SEQ ID NO: 8417 - protein, 138 aa, Glycine max
  unsure (1)..(138): unsure at all Xaa locations
XIGRPRGRLDGSTQVAERQTIVDTFNNDTSIFACLLSTRAGGQGLNLTGADTVVIHDMDFNPQIDRQAEDRCHRIGQTKPVTIHRLVTKGTVDENVYEIAKRKLVLDAAVLESMEEINXXGELPEKTMGEILSAILLS

SEQ ID NO: 8418 - protein, 206 aa, Glycine max
  unsure (1)..(206): unsure at all Xaa locations
XSSRIGSRAARRRQKGMTIALILSXPGRGNSENNDVENGDDNFITNKRKNANTLHKFEGGTLIVCPMALLSQWKDELETHSKEGSISIFVHYGGARTTDPWMISGHDVVLTTYGVLQAAYKNDGENSIYNKVKWYRVVLDEAHNIKAHRNQTAQSAFVLSSHSRWCLTGTPLQNSLEDLYSLLRFMRVEPWCNLAWWQKLIQRPYX

SEQ ID NO: 8419 - protein, 148 aa, Glycine max
  unsure (1)..(148): unsure at all Xaa locations
ARKGARVGTSTKLREYELQYILQDNGVLLTTYDIVRNNSKSLQGNNYFDDEDNEEGATWDYMILDEGHLIKNPSTQRAKSLLEIPSAHRIIISGTPLQNNLKELWALFXNFCCPELLGDHKWFKERFENPILRGNDKHASDREKRVGS

SEQ ID NO: 8420 - protein, 179 aa, Glycine max
  unsure (1)..(179): unsure at all Xaa locations
XREAAMAVQGKMVDSQRKKSKASLRKLEKQPEWLKGGELRDYQLEGLNFLVNSWRNDTNVILADEMGLGKTVQSVSMLGFLQNAQQIHGPFLVVVPLSTLSNWAKEFRKWLPDMNIIIYVGTRASREVCQQYEFYNEKKPGKPIKFNALLTTYEVVLXDKAVLSKIKWNYLMVDEAHRX

SEQ ID NO: 8421 - protein, 240 aa, Glycine max
  unsure (1)..(240): unsure at all Xaa locations
XHASGSIHPWLVKSAVCAEKFFTQAQLMELEKCKFDLRIGSKVKFVLSLIYRVVKKEKVLIFCHNIAPVKLFVEYFEKYFGWTKGREVLVLTGELELFERGRVMDKFEEPGGVAKILLASITACAEGISLTAAPRVIMLDSEWNPSKTKQAIARAFRPGQQKVVYVYQLLVTGSLEEDKYKRTTWKEWVSSMIFSEAFVEDPSQWQAEKIEDDILREMVAEDRSKSFHMIMKNEKASTNK

SEQ ID NO: 8422 - protein, 206 aa, Glycine max
  unsure (1)..(206): unsure at all Xaa locations
QLLKETEKYLQKLGSKLQEAKTAAGRFGQDVDETGNVSFLENSETENVDESDQAKHYMESNEKYYKMAHSIKESIAEQPSSLLGGKLREYQMNGLRWLVSLYNNHLNGILADEMGLGKTVQVISLICYLMEAKNDRGPFLVVVPSSVLPGWDSEINFWAPGSSXNVYAGPPEERRRLFKERIVHQKFNVLLTTYEYLMNKHDRPKX

SEQ ID NO: 8423 - protein, 132 aa, Glycine max
  unsure (1)..(132): unsure at all Xaa locations
XLSTRSGGVGINLVGADTVIFYDSDWNPAMDQQAQDRCHRIGQTREVHIYRLISESTIEENILKKANQKRALDNLVIQSGGYNTEVXLKRLDPMELFSGHRTLSIKNIVKEKDQNNGEGSVTNDDGEAALKX

SEQ ID NO: 8424 - protein, 242 aa, Glycine max
SYSDENSDYNVLAGEKMRYGNDLLQRKDDNGFFLKGWWNDLLHGKIYKEIDHSGKMVLLMEILTMSSDVGDKVLVFSQSIPTLDLIELYLSRIPRRSKRGKFWKKGKDWYRLDGRTESSERQKLVERFNEPLNKRVKCTLISTRAGSLGINLHAANRVVIVDGSWNPTYDLQAIYRSWRIGVDGSILLRGSLSQDGLYVFSNLLSSPLLEKLLPLFICLPFLICLLIGIMSVLVHSILVILG

SEQ ID NO: 8425 - protein, 173 aa, Glycine max
  unsure (1)..(173): unsure at all Xaa locations
XAREAAMAVQGKMVDSQRKKSKASLRKLEKQPEWLKGGELRDYQLEGLNFLVNSWRNDTNVILADEMGLGKTVQSVSMLGFLQNAQQIHGPFLVVVPLSTLSNWAKEFRKWLPDMNIIIYVGTRASREVHQQYEFYNEKKPGKPIKFNALLTTYEVVLKDKAVLSKIKWNYLM

SEQ ID NO: 8426 - protein, 205 aa, Glycine max
  unsure (1)..(205): unsure at all Xaa locations
XYXFFFFFAENTNGCLDSSSCENLEEQDVXXLDDQESSYVTLEGGLKIPDNIFEALFDYQKVGVQWLWELHCQRAGGIIGDEMGLGKTVQVLSFLGALHFSGMYKPSIIVCPVTLLRQWKREAKKWYPKFHVELLHDSAQDSAPRKKRAKSEETDYESNSKSDSDYEKRSKSTRKWESLINRVMRSESGLLITTYEQLRILGEQG

SEQ ID NO: 8427 - protein, 1187 aa, Oryza sativa (japonica cultivar-group)
MEDDDDDQRLLHSLGVTSADIHDIERRIISQATTDPADSSGPTINGGHQPDDALAKLHHKLRSVQIEIDAVASTIKGAKLKQPSGNKPHEHKGKDQPDHHGAGHLQQALAADRLTSLRKAKAQIQKEILQSHPSPSASNRKDKMLAMLVQDEPRHKKPPVGPKNIVKRPMKTVTYDDDNNFDAVLDGASAGFMETEREELIRKGLLTPFHKLKGFEKRVELPEPSHRQDDSAGQTEEAMEASRIARVAQSLKQIAQNRPATKLLDSESLPKLDAPAAPFQRLGKPLKRPVSPSSDEQEKKRPRNKTKRPLPGKKWRKANSIKESSLDDNDVGEAAVSVSDDDEDQVTEGSDELTDVTLEGGLRIPGTLYTQLFDYQKVGVQWLWELHCQRAGGIIGDEMGLGKTVQVLSFLGSLHNSGLYKPSIVVCPVTLLQQWRREASRWYPKFKVEILHDSANSSSKKSKRSSDSDSEASWDSDQEEAVTCSKPAKKWDDLISRVVSSGSGLLLTTYEQLRILGEKLLDIEWGYAVLDEGHRIRNPNAEITLVCKQLQTVHRIIMTGAPIQNKLSELWSLFDFVFPGKLGVLPVFEAEFSVPITVGGYANATPLQVSTAYRCAVVLRDLVMPYLLRRMKADVNAQLPKKTEHVLFCSLTTEQRATYRAFLASSEVEQIFDGNRNSLYGIDVLRKICNHPDLLEREHAAQNPDYGNPERSGKMKVVEQVLKVWKEQGHRVLLFTQTQQMLDIMENFLTACEYQYRRMDGLTPAKQRMALIDEFNNTDEIFIFILTTKVGGLGTNLTGANRIIIYDPDWNPSTDMQARERAWRIGQTRDVTVYRLITRGTIEEKVYHRQIYKHFLTNKVLKDPQQRRFFKARDMKDLFTLQDDDNNGSTETSNIFSQLSEDVNIGVPSDKQQDQLYAASATPTTSGTEPSSSRHGQGKEDHCPDQADEECNILKSLFDAQGIHSAINHDAIMNANDDQKLRLEAEATQVAQRAAEALRQSRMLRSHESFSVPTWTGRAGAAGAPSSVRRKFGSTLNTQLVNSSQPSETSNGRGQSLQVGALNGKALSSAELLARIRGTREGAASDALEHQLNLGSASNHTSSSSGNGRASSSSTRSMIVQPEVLIRQLCTFIQQHGGSASSTSITEHFKNRILSKDMLLFKNLLKEIATLQRGANGATWVLKPDYQ

SEQ ID NO: 8428 - protein, 894 aa, Oryza sativa (japonica cultivar-group)
MAPPQMYERRLLAAASLLLSADAQGQPPHAAAQLGVGVTAELKPHQVDGVAWLIRRYQLGVNVLLGDEMGLGKTLQAISLLSYLKIHSISPGPFLVLCPLSVTDGWLSEFNKFCPSLRVIQYVGDKLHRRDLRRMMFQDVQKSSSSSHSTELPFDVMMTTYDIALMDQEFLSQIPWHYVVIDEAQRLKNPSSVLYNVLEQRFIMPRRLLLTGTPIQNNLSELWALMHFCMPSIFGTLDQFLSTFKQSGDSLTGGETNKTDKQFKILKHVLRAFMLRRTKALLIQSGILALPSLTELTVMVPLTPLQKKLYLSVLRKELQTLLTFTGGLSRHQSLQNIVIQLRKASSHPYLFSGIEPEPYVEGEHLVQASGKLVMLDLILKKLHEVGHRVLLFAQMTQTLDILQDFLELRQYTYERLDGSVRAEERFAAIKSFSSQPTKGVVRDDNQSGAFVFMISTRAGGVGLNLIGADTVIFYEQDWNPQADKQALQRAHRIGQLNNVLSINLVSQRTIEEVIMRRAERKLKLSHSVIGEEDATYGKGKYVENEASDMRSIIFGLHLFDTSDTTAETMNDDTASETIKEETMLKLKSMSEKVVLMRSHEPSEKDERAFEINPNMTDNSGAVVTRVSDSVNVDPDFNEAAYLSWLEKFKESSHSKENTRAELERQRIAPEEKFLKREAIKKKVEEKRLAKWESLGYQTLKIKDPDILPNQNIPDSGSVQLVYGDCTNPSVVCPAKPAIIFSCVDNSGTWGHGGMFDALANLSTCIPDAYNRASEFDDLHLADLHLIQLDEAKCNRSLDAPLWVALAVVQSYNPRRKVPRSEISIPDLELCLSRVAFSAAQHSASIHMPRIGLQGGGGGGSQRSEWYTIERLLRKYSSLHGVDIFVYYYRRGNKH

SEQ ID NO: 8429 - protein, 2215 aa, Oryza sativa (japonica cultivar-group)
MKHLNDVRVGSKVARMYLVQANCVGGYKGRYFYECVECDLGGNLLCCDSCPRTYHLECLNPPLKRAPPGNWQCPRCRTKKVSLKLLDNADADTSKRERTRRMRTSTTSDSPSPSPQNKASFNTSRGAAFRDDEPGAKDNEVEKRKPLILHLKKRSTKELSTDTTSSKSGLLGKSSEEKQEKHGSALKVKKHLHPMELSPKKYKNKKQHNHRDSKRSEAKKVQYLASDVDSDSSMEPSTSLEHSESPPPKRKSLDGRTPASSTKKGKKKVKFVDKKHPENAVHITEKEHGGAGDKITTQGDLQVDRILGCRLQTSQIISPAHASSEQIDMAPPSASGAPEPSQALLKGLHEEIQSSNSDTNVTEDACADELANDGGENNLDCSDAQKESNVRSHGHKESLNAKEIMNTASACSADQIVTVKDAGAVQTYVTASVNGEYETVTDIPEEKNDTKHPVSKADTEVHTKQEHTPDSKLHGKIQETELKEHDGTTYEFLVKWVGKSNIHNSWISESELKALAKRKLENYKAKYGTGLINICKEQWCQPQRVIALRTSLDEIEEALIKWCALPYDECTWERLDEPTMVKYAHLVTQFKKFESQALDKDKGGSHAKPREHQEFNMLVEQPKELQGGMLFPHQLEALNWLRKCWYKSKNVILADEMGLGKTVSACAFLSSLCCEYKINLPCLVLVPLSTMPNWMAEFASWAPHLNVVEYHGSARARSIIRQYEWHEGDASQMGKIKKSHKFNVLLTTYEMVLVDAAYLRSVSWEVLIVDEGHRLKNSSSKLFSLLNTLSFQHRVLLTGTPLQNNIGEMYNLLNFLQPASFPSLASFEEKFNDLTTTEKVEELKNLVAPHMLRRLKKDAMQNIPPKTERMVPVELTSIQAEYYRAMLTKNYQVLRNIGKGGAHQSLLNIVMQLRKVCNHPYLIPGTEPESGSPEFLHEMRIKASAKLTLLHSMLKILHKDGHRVLIFSQMTKLLDILEDYLTWEFGPKTFERVDGSVSVAERQAAIARFNQDKSRFVFLLSTRSCGLGINLATADTVIIYDSDFNPHADIQAMNRAHRIGQSNRLLVYRLVVRASVEERILHLAKKKLMLDQLFVNKSESQKEVEDIIRWGTEELFRNSDVAVKDNNEASGAKNDVAEVEFKHKRKTGGLGDVYEDRCADGSAKFIWDENAITKLLDRSNVPSTVAESTDGDLDNDMLGTVKSIDWNDELNDDPGATEDIPNIDNDGCEQASEAKQDAANRVEENEWDKLLRVRWEQYQTEEEASLGRGKRLRKAVSYRETFATIPNEALSEDSDEEDEPKREYTAAGLALKEKYEKLRARQKERIAQRHVIKNYADDRLEEFMKLYDSSANPLRIVEDPNPVQPSGAKRLGESTAEMKQSSKKTKRYPEIPQELYAKLTGNAASSKHHPKAADISNSGTPHHLLPVLGLCAPNADQMNSYKGSVCGPSTKEQKRASGELANKPLLTPAVDHSSEQKHDGQPTPCKPMFPGSSEETLRRLNNIIPDSYFPFQPIPPISGKGIGDHVENPVSSIPSFQGKLGLPNFSLEDSIPLKHLKSVPDLFPNLSLGTSNEYLRNCVPELPNSSFLPSFMADIAGTSKQKNKFMADMSGLLPGLAINPVQQIHSSMPENHKKVLDKLMMRAQYSSSKFLKNASNKFLKKSLKPDYWSEDELDALWIGVRRHGRGNWEAMLRDPKLKFLSHRSHEELASRWILEEQKIIEEPMPTATRSSNSTSFPGISDAMMSRALNGSSFSKLRMEPPKLQSHLTDIQLGCNDIPTRFSHVEPTNYMNLSEGGPSLTPWQDFKNRSGHSGDFPGPLDKWEKPDMGLIPPFMPNPFMKESIGSLPINRHSSNSIQQNEVGSSSHESILHGFSDGQAKLFHEMQRRVKLGKLPIEMNLNHTKLSDPLAENSGDFESSKPNKLPHWLQEAVRAPPSKPPECELPATVSAIAQSVCLLLGEQKPAIPPFPIPGPRLSLPKDPRSAPKKRRVHKVQQASSLVDHSKTTVGQGDHNSTPSAPLSMEAAPASPAVIKSSDTPSLNLNSPSSSSAGSRGQDASTPSTFEEPERTMEVSEPASVAAATCPSRPEPPETGTHRIEFSAVDDMDTGSCRSPVRDTPDPDNQKSELSGSGNTPTELSVLPLVDAPGTSSEPAVVPVSSDEESTQEGVPGKAVSTGDQEKRTPPDESENSGAANPVSAAQTADEDKVDEMITDEH

SEQ ID NO: 8430 - protein, 1141 aa, Oryza sativa (japonica cultivar-group)
MPPARGGRRGRGRGRRGGRGGAASRARGENVVDVEPIKLGDDDAKVDPQTKSPNEEITSAEVCEVETSEASPLGAPEEDEGKPGSTRNLKRLRKTITIDSAAAEEHGAESDDEEFDVLATASCQELAPCRRSKRLRCKPTRKRSKPTGKRDLGGKESEDDVFANSSSSSQDDAGKLASRRSKRLRERLTSDYFDGDVDENCSAPRRGSKRLRNRLGPRNISYADDDSDTDDNRKKIVPCRRTSKRLQEKRKAHDVSEESYTEASSCMLSTSSSSDDELLHNSIKPGRRNSGGPSCSICKIGIACSFLIKCKNSTCSRSFHTFCLDPPLQEIIGTWECSWCKSNAAPAVKVTEVLTSKKIQRLVGHRRILQEADFQYQFLVKWQSLSHHHDCWVPLEWLHVSDPLRVQSYLNKNCLPKEVYSEDQRKLEWFEVDHAIACRRKFHHEGLCDVLATFQDNQDFDGYEFLVKWKGLDYCEATWEPCCTDGVQQAVSMLVRRHKNASKRVNISQTCLDGSKIEEVHCGALYDYQLQGLQWLIDNFKTRRSVILADEMGLGKTVQVVCFLYHIIKESLTASPALILAPKSILLQWEKEFCQWASDLNVIVYQGDRDSRKCIQVHEMYSSDGKPLFDALVTSYEFVQIDKAVLQKFKWSTIVIDEAHRMKKLDCNLAACLKRYCSEFRLLLTGTPLQNNIMELFSLLHYIDPDEFSDPKADGLFSPIESGRDLTMDEKVARIHNILKPRMLRRMKSDVLTDSMPVKKWVEVPCALADSQRELYINILERNYSKLNSAIRNGRKLSLNNILMELRKCCNHPVGLEVGQQATEDVFLSLIASSGKLQLLHKLLPRLKERGNRVLIFSQMTRMLDILEDFLCSLGYKYARIDGQTSLSARQESIEEYKNIDSETFIFLMSTRAGGMGVDLPGADRVIIYDPDFNPFMDLQAQSRAHRIGQTRPVVVYQLITKCSVEEKILQKSKQKLAIENMLMNSSKKPSADELQSILLHGAKTIVDRKISATSIHYDNEAIENLLKLDPSTGEKCSSDDNGYLGSIVSFAHGVEDEAPSSPKVEDLKVLKPATPKVDLGRGKRQRKVVNYADEVENEDSDDMYAPEGSSTSEFSSSSSDDETDSALQLQIVTVPDIDAD

SEQ ID NO: 8431 - protein, 1692 aa, Oryza sativa (japonica cultivar-group)
MAFFSNSGSRADSGGYNLNEKAEDEAAYESVGDRDVDLNSRQWNLNEKAEDAYHSDEEQYDGGRSGPNSSENKSVQNARKINGPSGPWGTNFLKDCGPTQTAKEEQLTSNRGMEYGSAASSHDDMDASGEDDELNRGHGEVPAEEMLSDDYYEQDGEEQSDSLLRGGMRRPSCSTSGAAAESVSSRQKKKPTKYNAYEDEDDDEYNDENDDEDDDDADDDPDDVDFEPESDTEKAADKDKFVDSENSDEEEDDELELSDDDEDDFVENKRQCKRLKVGGTKTSKGRKLPVQVQRKRGVSFTDEDSSGKDSDAPSDTDISHRAKKPDKLHQKTVGRKDVFSNVDSHEVRTSGRRRTARNISYAESEESDDSEEKLAKQQKVLKEDPEEEEGETIERILWHQPKGVAEEALRNGQSTQPTVISFTSDVDQSWDDVEFYIKWKGQSFLHCQWKTLSELQNVSGFKKVLNYMKRVTDELRYKRSLSREEVEVHDVGKEMELDLIKQYSQVERIFADRVSKVDGDDLVPEYLVKWQGLPYAESTEKDTDIEFAQDAIDEYKAREAATSILGKTVDFQRKKSKSLRRLDDQPEWLKGGKLRDYQLEGLNFLVNWRNDTNVILADEMGLGKTIQSVSMLGFLHNAQEINGPFLVVVPLSTLSNWAKEFRKWLPDMNVVVYVGNRASREICQQHEFFTNKKGGRHVKFHTLITTYEVILKDKAALSKIKWNYLMVDEAHRLKNCEASLYTTLLEFSTKNKLLITGTPLQNSVEELALLHFLDPSKFNSKDIFVERYKNLSSFNETELANLHKELRPHILRRVIKDVEKSLPPKIERILRVDMSPLQKYYKWILERNFQNLNKGVRGNQVSLLNIVVELKKCCNHPFLFESADHGYGGDSIGDRNKVERIVMSSGKLVLLDKLLMVRMLDILAEYLSLRGFQFQRLDGSTRADLRHQAMEHFNAPGSDDFCFLLSTRAGGLGINLATADTVIIFDSDWNPQNDLQVLDHLVIQKLNAEGRLEKKESKKGGSMFDKNELSAILRFGAEELFKEDKTDEETKKKLESMDIDEILERAEKVETKGGEGEEGNELLSAFKACSVHYHMTCDSDIMLKFYTSVANFSSGEDDATFWSRLIQPDASDMVEETLAPRAARNKKSYVEDHQLDKNSNRKRRGIDAQEKPRRRSSRTMDTAVSLPLIDGSAHQVREWSFGNLSKKDATRFVRAVKKFGNPSQIGLIVDDVGGAIAKSSVDQQLELFTLLIEGCQDAVKNNMDAKGTVLDFFGVAVKAHELIARVEELQFLARRIARYKDPVRQYRIQAPYKKPQWSASCGWTEDDARLMVGIHWYGYGNWEKIRLDPKLSLTAKIAPATLGERETFLPRAPNLDNRASALLQKEFANLRGKSSKAKGGPRQAIDNESNGGARSLRGRQKDTKIKEDNNSIKDDFKKRKVVEPEAREEGEISESEAETKYRQDKEEKWLEWCSEVLDDEQEILKRLDRLQNTSVNLPKEKVLSRIRKYLQIIGNKIGEIVDQHSESYKQSMAMRLWNYVANFSSMSGEQLHDLYLKLSQDQMEAGVGPSHGGNFASVPPNRGPKSNQLHPSRNQRSTRSVQYVSESFNNGENTGNSEAWKRRRRSEPDNQFDNQPLYQAPPIMTNGNRLQESSSSAGILGWAPVEMRRYGNERPKRGVHPSRFPPGHGPLL

SEQ ID NO: 8432 - protein, 821 aa, Oryza sativa (japonica cultivar-group)
MASTSRRGGGEDDDDEPYLLGFIVANAVGLQYYQGGRAITRRESVGLVREPHNPHDANAIRVDNARGEKIGHIGRRAAAALAPLLDAGHVAAAHGIVPKPASKRLYSLPCQVHLFARPPHAALVAAALAASGIDLIHVDHPEFALSESAIVQEQQTKRSRGDVDRLFSHVGKGGRARIAPMEAPRDVVVSELFEHQKAALGWLVHREESCDLPPFWEEDNDGGFKNVLTNQKTNERPPPLKGGIFADDMGLGKTLTLLSLIGRSKARNVGGKKARGAKRRKVEEAVEEESRTTLVVCPPSVFSSWVTQLEEHTKTGSLKVYLYHGERTKEKKELLKYDIVITTYSTLGQELEQEGSPVKEIEWFRVILDEAHVIKNSAARQTKAVIALNAERRWVVTGTPIQNSSFDLYPLMAFLRFQPFSIKSYWQSLIQLPLERKNNGIGLARLQSLLGAISLRRTKETESGSKSLVSIPPKTVLACYIELSAEEREYYDQMELEGKNKLREFGDRDSILRNYSTVLYFILRLRQLCNDIALCPLDLKSWLPGSGSSLEDVSKNPELLKKLASLVDDGDDFECPICLAPPAKTVITSCTHIYCQTCIMKILKSSSSRCPICRRSLCKEDLFIAPEIKHPDEDSSVNLDRPLSSKVQALLKLLRRSQSEDPLSKSVIFSQFRKMLILLEGPLKAAGFNILRLDGSMTAKKRSEVIRQFGCVGPDSPTVLLASLKAAGAGVNLTAASTVYLFDPWWNPGVEEQAMDRVHRIGQTKEVKVVRLIVKDSIEERMLELQERKKKLISGAFGRKKGGKEHKEIRVEELQMMMGMK

SEQ ID NO: 8433 - protein, 1492 aa, Oryza sativa (japonica cultivar-group)
MDENRKLSDDMSKKMEPIHSNGEAGEDKTIIIEPESDANKLEVETDARHGICEAHKAHEYGTMENDLHEEASTTDDDSENDSYEYLLRESDNEQTSESDAGEGDNEAPLTDEEVETLITEFLDAESKAAQAQESLEKESLEKIESEVRLELSESLQGNELESAVSTEMKQYKKEWESELDDLETHIAVLLEQLDAAGVELPSLYKSIESQVPNVCETEAWKNRAHWAGYQVPEEANKSIRKADEYLQSCRPVRRKHGRLLEEGASGFLAGKIPVGDDGSAQCHEKSWNAFNELTKSKEYAESSFGSSNWASVYLASTPQEAAALGLQFPGVDEVEEIAEVEGAVSDIKGVDEIELSEVQRRKYRKVPEEDDAKMTKRLQRHLKERRTRHLHKENIGLASSSNGCCELPPKKLKTYENGVSVELAKRTREDDVEFDNKRSKTVIIESDDDMQTDSKPDSAPSENADEIIDLDIFPSQSPKLGDKVRPKPFKCTICTEMLNVPEVHRHPVLDVIICGSCRFLVIEKNRLEDPVSGGYCTWCVKSEQLQSCSSCKLLFCRNCLSKNFGEEGLSEARVAGWQCCCCLPSQLEHLISDCDKALGGVESSDPENDFAELSVLESNGPFSKHKMKKRIRRIMDDEELGEETKLKIAMEKARQEHLKSMQEQSASKLKSNNIGISLEAPSEVSEYVGDGHIVNLAREEDEAPVRIPSSISAKLKPHQVSGIRFMWENVIQSVKKVKSGDKGFGCILAHNMGLGKTFQVITFLYTVMRCIQLGLRTALIVTPVNVLHNWKKEFIKWCPAELKPLRVYMLEDVPRCRANIQYLLKKWRIKGGVLLIGYSSFRNLSLGRSARDKTVANEITNALQMWVLIQSIYICHNQCGPDILVCDEAHIIKNRRADTTQALKQVRTQRRIALTGSPLQNNLMEYYCMVDFVREGYLGSSHEFRNRFQNPIENGQHTNSTSDDVKIMNQRSHILYEQLKGFVQRMDMNVVKNDLPEKKVFVVTVKLSQLQRKLYRRFLDVNGFSSSAASEKSFQRSGFFAKYQTLALIWNHPGLLQMAKQKGNLRQEDVESFLMDESSSDDNIENYLPNGEKLRSRNDQLSKKSSDVVNEESNWWENLLDENAYKEADYSGKMVLLLDILSSCSELGDKALVFSQSLSTLDLVEFYLSKLQVNGKEGKYWKQGKDWYRIDGSTPSSERQNLVERFNDPENIRVKCTLISTRAGSLGINLHSANRVILLDGSWNPTHDLQAIYRVWRYGQTKPVYAYRLMAHATMEEKIYKRQVTKEGLAARVVDRQQVSRTISKEEMLHLFEFGDEELLEQSGSTMNGHSKVGTEKPPTPNSSETTEHLPLDRLMVNLLHDHSRWIASYHEHETLLQENEEERLTKEEQDMAWLSYNKLLEVAPRKATHDAERKPSTVPTESSLIQPPKATSRSRQPQQPKITSNNQKKCNNLSHLLTLRSQGTKPGCSTSCKECGQDISWETLNRDGRSR

SEQ ID NO: 8434 - protein, 719 aa, Oryza sativa (japonica cultivar-group)
MAGLGGGWGGGYDDDDDWGLSAEQLDQLERDAYRKLAERKASSSAASTATSPLPSAAYSPVKNSHHHPASRVSQESCFGKGNMSKVSVHLFLHSTGVIAAKFQYHQKLVDAVHKIPKASWNGKERVWMFPHSSLSVAEEVLSTVPGIAVEVQKLDPLVKRALTASLYAGDLRDLYGKIPTDVESKLMPFQREGVRNVMLQILMAQTGYGARGLRFALQHGARTLIADEMGLGKTLQHDISGHSSTLPPSLGHGDMALLDSSVIVWYAGAIAVASCLHDAWPVLVISPSSLRLHWASVVLPQTGGSNKAGYRLVYSNTKGDFNLDGVFNVISYDVVPKIKDMLLDLDFKIVIADESHFLKNAQAKRTMHSLPVLQLSGVWSLATPPVNDNWAQKAKYVVLLSGTPALSRPIELFTQLQALYPTVYKNVNEYGNRYCKGASNHEELHNLMKATVMIRRLKKDVLSQLPVKRRQQLETVKIKIQSCDSQETMDSLKFAQKNLINKIYNDSAEAKIPAVLDYLGTIIEAECKFLIFAHHQSMLEAIHQHLLKKKVKCIRIDGQTPVPVRQTLVTDFQNKDDIKAAVLSIKAGGVGLTLTAASTVIFAELSWTPGDLIQAEDRAHRIGQVSSVNIYYLLANDTVDDIIWDVVQGKLENLGQMLDGQEKTLDVSQSDTRPSPSKQKTLDAYLKRCSNSTEADQPKLKNPSHAVFCITQLNARALQ

SEQ ID NO: 8435 - protein, 1272 aa, Oryza sativa (japonica cultivar-group)
MSIVYNIAMIKQEMSSCKIMVGNMQDQLRIYPLLAAFEVLLRHDARLITIKKNHQEDKCLCLFVVILYKNQCPGNAEKVITDRRAEVVTINDIFLLQKLQPEVHEGSMKWSFSKDRLSLNKGRLISARFSSEITHLIVLSILRGMEFNIKLVEGQIVYQIIKGDQAQWNLDSMAIPPGFGNTMEIISFQLRDEALRPTITNIPITHVKKNNITEDMRFTVKSEMDSELDRALDVEILYEHVDLRRSKRLKTQPDRFTSYDTPRFLSGYKKKEASSSPTKHVRGAVHCDSPVDDSKKEVESCCVEIPGNVTQKQTGVHSPMVDEKSNSPEGQHKNTTKRTTCSLVKEKASSPEGQHEKTTKRTTCALPVKEKASSPEGQHKNTIKRTTCSLPVKEEPSSVEIEEKSSKEQSAPEFHIPRTPAQNKEKHNRPPFSCKPKLFTSSGTLGVNCEPAFCQKVGGKRKRHMCEREYKQMIDQCIGNIESEMERDSMFNFDANMMNYVQHSYREEDFTWPPSADNQEVEEDELEELWKEMDYSLTTLALLEQKQVMAQSRINMLVDNFDGLRLDCLTLTDDYRCYYQKKEKFAESGSVNESTDYFGKVGGIPCHHECILDEELGLACRLCNVVCTEAKDIFPEMFNGNDYKDRPGCSNICLDDDILDPSLLANLAPELSELKNSGSVWSAISDLDPKLLPHQRKALDFLWKNLAGSIQVEGMDNSNVSTGGCVIAHTPGSGKTLLLISFLVSYMKAHPRSRPLVLTPKAAIHTWKREFEKWGISLPLHVFHHANRSGKPLGAMDSKLRSLLNNFHRPTWTNMRLMDSLDKLFKWHAHPSVLLMTYSSFLGMTKQDSKVRNRYREFIAEVLMNNPGLLILDEGHNPRSNKSKLRKLLMKVKTEFRILLSGTAFQNNFEEYFNTLCLARPRFIGDIMSELVPERKRETVGRRAKHQEAVARRAFVEKVGQKIESDNKHIRSDGISLLNKLTRGFIDSFEGAKLINLPGIHVYTVFMKPTDIQEEMLAKVTMPKLGSSRFPLEVELLITIGSIHPWLIKTTKAVSTFFSPAEVKKVERYKRDFAAGCKAKFVIDLLHKSSFRGERVLIFCHNVSPITFLVKLIEMVFGWRLGEEVLVLQGDQELPVRSDVMDKFNGDSAGKRKVLIASTTACAEGISLTGASRLVMLDSEWNHSKTRQAIARAFRRGQERTVYVYLLVASGTWEEEKYNSNRRKAWMSKMVFLGRYVDDSSQNRVTDIDDEVLKELADEDHTGTFHMIVKQD

SEQ ID NO: 8436 - protein, 1082 aa, Oryza sativa (japonica cultivar-group)
MEEAAAAAADFDGGFGGAGEDNLSMPLGDFMAFLDNEDWKEQQHEWRWAINGHQAVGIGEGQTGSSLVGNQGLEMPVDSTSSENAFQNHEDFLENSRNGNPEMHLPMDALNHAKTVDEEIVPPYEDYTNGLYYDSGCDMFAEQSGLSEVKCEGTGPMLGNSEQEGNHFTSVPMFDHSAVIPDIPYTELNIGDVPGSMQNGNGSCLTVQGEYLQGEYQEYPQPDYGSFDMANEIVLHDLPQNNQSYELEQLPQNICESSSMQVGSPDQYCDDTSLSDYYMDDVSSIESMSSEQNRSEDICFRRLQHNFQQSVCANPNLPRFGGRYRPHEERMTLRLALQPLLDAPLASSLLKIALSWMVQKERNGSSCSGGILADDQGLGKTVSTISLILTERSPVPSSAVKQEPCEAVTLDDDDEDDDAEPHLKKPALAHLADTCKPEATSSTIKTENPIANVKARPAAGTLVVCPTSVLRQWADELRNKVTSKANLTFLVYHGSNRTKDPNDLTKYDVVLTTYSIVSMEVPKQSSPDSDDEEKGKPDRYGAPVGSSGSKKRKTSSSKKNKSGSTPESKLPEKPLAKVAWFRVILDEAQSIKNYRTQVARACWGLRAKRRWCLSGTPIQNAVEDLYSYFRFLRYDPYAEYKKFCFMIKTPISRNPITGYKKLQVVLKTVMLRRTKATMLDGKPIISLPPKTVSLKTVDFTSEERAFYNTLEAESREQFKEYAAAGTVKQNYVNILLMLLRLRQACDHPHLVRGHESTSSWMSSLEMAKKLPVERQQSLLVCLQSCSAICALCNDAPEDAVVTICGHVFCNQCILEQLTGDDSVCPVSNCRVRLNSTSLFSRGTLECALSRSTCEFLSDDSCEDMVQGKQPRFDSSYASSKVRAALDILLSLPKLDLTHMSDDKNKIVHPDKINGNSTPSEYAGTKITEKAIVFSQWTRMLDLVEVHLKSSHLSYRRLDGTMSVAARDRAVKDFNTNPEVSVMIMSLKAASLGLNMVAACHVLLLDLWWNPTTEDQAVDRAHRIGQTRPVTVSRLTIKDTVEDRILALQEKKREMVASAFGEDKSGAHQTRLTVEDLNYLFMV

SEQ ID NO: 8437 - protein, 570 aa, uncultured crenarchaeote 4B7
MEKFGTLEFVLDRYSGTWCWKISGNRAVNMVSKLIPRGWYGDKPDEVIVSDNDGNIKKLKMINDRYTFELLSKSVWNRKIAPLIIKKIKIPKIEKLSQAVPSKQFRGTLLDFQREGLDFLIKSSGNALLADEMGLGKTVQTLAYLSKEKNSFPALIIAPLVTLTNWQREIQKFLKKKGKNGKIIEDGVPSSTMIRNGKLADIDEYDFYIINYELLNKRLPDLLNLGIRSLVCDEVQHLRSKTTQKYAAVKELAAAESVKYRVGLSGTPIYNRGSEIWPIVDILKPGLLGSFKEFCEYFCYVNEKGKAIVLENKRDTLRNQLTKHVMLRRKKSDVLKELKDKVRYPEMIHADEKFYKAELSKIWKKLEEEQKYAESAFDKSASYHRAIESERQAAGLAKLSHVTNFVTNIMEIEESVVVFCHHKAIHSLLHHSLSDYDPASIIGGQTDVVRQREIDRFQKGQTKLMIAGLRAGNVGINLTTAKYVIFAELDWSPAIHRQAEDRLHRIGQKNTVFAYYLVGKGTLDEHVAEILVDKSYEIDTILDKQGESFENKEKAKMILAQIHDKLGTKL

SEQ ID NO: 8438 - protein, 1400 aa, Dictyostelium discoideum
MSTIITTTNTSTANSNNSNNNNNNNNNNVNNNSKVSKLKCPTHFGYCRRIQPSSGKDKDRIYFKCKVLDCQFSKWFNTESDVELYNHQNKQTVPATPPQEHQQQQQQQQQNNLFSFNDDDIFASADKFYNPNKYNVNTNNGSNININNINNNNSIGKRRLSNSFDIMNEFNIDDSSIFEDDPIDTDYSTAPSSSKKRLVFDSSDNNNNSNNNNYNSNNNNLKSVSSNANGGNSLNVANIAPSANSMATTTTTFTSSNNNSPIKKLFNNSTLNKPIVNNVNNNNNNNNNNNNNNNNNNNNNNNNNNIINQQQHNVKNNNISPSKPQSKSSPILQSKQPEISFKPKVKPSEPTSPTSPTSPTSPTSPTSPTSPTSPTSPTAPTKITTPTKTTTPSSTNNMSIDFNDDIITDSYDEIFEKSKNERELRIQQQQHQQQQQQQQQQKQQQQKKQETQQQQQQQQQQEQPQFQPQQQPQPQQQRQKQKQNNDRIKCIPIEIEDEEDKVDIIDSKISNKQKPINKQKTRLAFDSDIIEIPDVTNEFNDTIKNNEDSNQINKRSYRVESIDTDLKWNNPNNKPMSKIKPKRNQAHQIIIDFQLYDLDIIGTTYPVPPIVGETEEILQQFKQSKGTRFEKEEIWKFPKSEYQNLVTMLQRLQSRTSSRFQLNTIPTEIFRYLHDPWYLEKQKLTKKQQLQHQQERAFQCKLPFDCTRIPVELFSTLLPFQMKSLSFCTQQLSGKCLIGDEMGLGKTIQALAISSYYRSEWPLLIICPSSLRLSWSKEVEKWFPSVDINVIMTGEDKANAMVNICSYDLVGRLLEKELLPRAFKAIICDESHYMKNSEAKRTKNVLKLVHTAKIRILLTGTPALSRPVELFPQMLALGASIYPTLNDFGLRYCNAFKGIYGWDYTGNSHLQELYVLIRGVMIRRLKNDVLKDLPPKVRIKVVVDTPTPKDVQNEVGSVFSKSNKLSMIQQFQKQPNANSIGGGGGGGQKDKIMHLYVETGRAKLKASSDYIINLIKKNEKFLVFAHHADIMNGLEEAIKSTGAGYIRIDGSTPAVQRQAFVTKFQNNASCKVALLSITAAGTGLTLTASNLVVFVELYWTPGVLRQAEDRIHRIGQTKTCYIHYLIGKNTLDDRIWPTICNKLEVLGETLDGQEEVLHTQNLDMRGRVNTINKYFIGKDGTIDLEKEDTDELVFSIIGDDPSVLQQQQFQQQLDDEDDEEESSNSKKSKNKSKKDQQQEKKNYQSLQFSQPPPPPIFKNQTTFRNINPNFKDYLNNKNNNNINNNNNNNNNNNNNNNNKNSNNYRNLKFHQYQNNFGTLNSHGNPNFNLHYNNNNNINNNINNNINNNNNNNNINNNKNNTNNPNNNDNNPNVITQYFQSNQGYDNNNNFNNISQYFSKK

SEQ ID NO: 8439 - protein, 604 aa, Dictyostelium discoideum
MIKRDIFSEEEEQIYQDLWKTAKTKFNNLFQSGSLLKNYAHVLEMLLRLRQVCDHPYLVQKKQDNNNDDAADNNDNNSLDSDNDDKNKIQNNLNHESDWSTFLDFINSKPNHYNQFELGKCLKKILGKGIKDQECTICMETLENPSITTCGHFFCTLCIQKNLIADTKLVPTINNTNNNNNNNNTNNNNANNNNNNNNNNNNNNNNNNNNNNNNNNNLSPTGTSPTQSTTSPTFSIPSLPIPNKTNLLSSSGGAMLISPSRSQSESPRYKTNHLNQSSNCVSNTPTPLQSPHSTPHSTPPMSPRIIKPSSTNLVSLSPKSSYENVPISKILNSSGGAQNLNTIINNLNTDQEKIFLCPICKQSIKQSTIKPISFKSSSNNNINNNNNNNNNNNNNNNNNNNNNNNNNNNNNNNNNNNNNLIKKKNIFNSNNWKSSTKIDSLLDELNKVFKNEPDSKCLIFSQWTSMLDLLEYPLNLNQFQFVRLDGKIPQKQREVAIKRFKEEPNVKIFLISIKAGGLGLNLVAASHVFLMDPWWNPSTEEQAIDRVYRIGQNKNVNVIRFLIKDSIEERILNLQKSKKDLAKEALNTMKKQTRIEELKMLFDD

SEQ ID NO: 8440 - protein, 344 aa, Dictyostelium discoideum
ILQVDGSTPAQNRNDYVNDFQNDPNCRVAVLSITAAGTGLTLTAATCVIFAELSWTPGVLFQAEDRAHRYGQTSSVLVQYLIALGTVDEMIWSLVESKKTLLGRVLDDEDGQSLNAEDAGQLEHGEQSVDDFIDSLIKKVEEQDQIRKKKYDDKQRRKEEKLLKLQLKNGSGGGGGEEDDNSDLDNSDDDEDDEYDNDDEDGIDEDDISDAIYDGSNFEDEMMSSKNKPKTSKKPAALKSSKAAASTVASSKSTTVKKTKDKDTTNPTKPSPSKVTKKKATTTTTTTTTTSSPKTTPNKPPKKNQIPVDFDEEFEDLCYVDLDQFKTSNQQSDGLDDFLFQPKD

SEQ ID NO: 8441 - protein, 882 aa, Hordeum vulgare
MAATAYERRLLAAADLVLSADGKSQLPRLSSADLGVTADLKPHQLDGVHWLIRRYHLGVNVLLGDEMGLGKTLQAISLLSYLKIKSIAPRPFLVLCPLSVTDGWLSEFGKFCPTLKVIQYVGDTAHRRHIRRTMHDDVQKSSHSNDLPFDVMLTSYDIALMDQDFLSQIPWLYVVIDEAQRLKNPSSVLYNVLEERFMMPRRLLLTGTPVQNNLSELWALMHFCMPSVFGPLDEFLSTFKEAGNLLSGSEANQANRQFKILKHILRAFMLRRTKALLIESGILELPPLTELTVMVPLAPLQKKIYLSVLRKELQTLLSFTGGSSRHQSLQNIVVQLRKACSHPYLFSGIEPEPYEEGEHLVQASGKLIVLDLVLEKLHRLGHRVVLFAQMTQTLDILQDFLELRNYTYERLDGSVRAEERFAAIRNFSSQATKGVVRDDNNPSGAFVFMISTRAGGVGLNLIGADTVIFYEQDWNPQADKQALQRTHRIGQLNHVLSINLVSQRTIEEVIMRRAERKLKLSHNIFGDKDATDGKGKDFGNEANDMRSIILGLHQFDPADTAAETINEETLAKLKSMSENVIKMRTHEPAEKDDRAFEINPDLTDGSGAMITRACDSISIDPGVDEAAYLSWVERFKEASHSIEDVPVELERQRPAPEDKLLKREANKKKAEEKRLARWKDLGYQTLGVKVPDNIPNQNISDSGSVQLVYGDCTDPSKVCAAKPAIIFSCVDNSGTWGHGGMFDALTSLSTYIPDAYHRASEVDDLHMGDLHLIELDEADCSRSLDAPLWVALAVVQSYNPKRKIPRSEISMSDLELCLSKAASSAAQRSASIHMPRIGQRSGSQRSEWYTIERLLRKYASLHGIDIFVYYFRRPSRQQPDSD

SEQ ID NO: 8442 - protein, 1122 aa, Oryza sativa
MAKPVKYDEEEEEVSSSGEEEEEQSDGAGSGSGEEEDEEEEEAPAAAAGEAAGGEEEEVDEEEIEAVTTGAGADEEEEESGAAAAAPGEGDEESQSTEDDEAVVGEDDDADEAEGGAVVGKREKARLKEMQKLKKQKIQEILDTQNAAVDADMNNKGKGRLKYLLQQTEIFAHFAKGNQSKEKKPRGRGRHASKMTEEEEDEEYLKEEEDALAGSGGTRLLSQPSCIKGKMRDYQLAGLNWLIRLYENGINGILADEMGLGKTLQTISLLGYLHEFRGITGPHMVVAPKSTLGNWIKEIQRFCPILRAVKFLGNPEERNHIRENLLQPGKFDVCVTSFEMAIKEKTTLKRFSWRYIIIDEAHRIKNENSLLSKTMRIYNTNYRLLITGTPLQNNLHELWSLLNFLLPEIFSSAETFDEWFQISGENDQQEVVQQLHKVLRPFLLRRLKSDVEKGLPPKKETILKVGMSQMQKQYYRALLQKDLEVINAGGERKRLLNIAMQLRKCCNHPYLFQGAEPGPPYTTGEHLVENAGKMVLLDKLLPKLKDRDSRVLIFSQMTRLLDILEDYLMYRGYQYCRIDGNTGGEDRDASIEAFNKPGSEKFVFLLSTRAGGLGINLATADVVVLYDSDWNPQADLQAQDRAHRIGQKKEVQVFRFCTEYTIEEKVIERAYKKLALDALVIQQGRLAEQKTVNKDDLLQMVRFGAEMVFSSKDSTITDEDIDRIIAKGEETTAELDAKMKKFTEDAIKFKMDDTAELYDFDDDKFGSLLNSIYILDFLKEENKLDFKKLVSDNWIEPPRRERKRNYSESEYFKQALRQGAPAKPREPRIPRMPHLHDFQFFNNQRLNELYEKEVRYLMQANQKKDTIDGEDEDQLEPLTAEEQEEKEQLLEEGFATWTRRDFNTFIRACEKYGRNDIRSIAAEMEGKTEEEVQRYAKVFKERYKELSDYDRIIKNIERGEARISRKDEIMRAIGKKLDRYKNPWLELKIQYGQNKGKFYNEECDRFMLCMVHKLGYGNWDELKAAFRMSPLFRFDWFVKSRTTQELARRCDTLIRLVEKENQEYDEQERQARKDKRMAKNMTPTKRSALRVSEGETTPSNSFKRRRQSLMDDYVGSGRRKRG

SEQ ID NO: 8443 - protein, 972 aa, Oryza sativa
MAKPVKYDEEEEEVSSSGEEEEEQSDGAGSGSGEEEDEEEEEAPAAAAGEAAGGEEEEVDEEEIEAAVVGKREKARLKEMQKLKKQKIQEILDTQNAAVDADMNNKGKGRLKYLLQQTEIFAHFAKGNQSKEKKPRGRGRHASKMTEEEEDEEYLKEEEDALAGSGGTRLLSQPSCIKGKMRDYQLAGLNWLIRLYENGINGILADEMGLGKTLQTISLLGYLHEFRGITGPHMVVAPKSTLGNWIKEIQRFCPILRAVKFLGNPEERNHIRENLLQPGKFDVCVTSFEMAIKEKTTLKRFSWRYIIIDEAHRIKNENSLLSKTMRIYNTNYRLLITGTPLQNNLHELWSLLNFLLPEIFSSAETFDEWFQISGENDQQEVVQQLHKVLRPFLLRRLKSDVEKGLPPKKETILKVGMSQMQKQYYRALLQKDLEVINAGGERKRLLNIAMQLRKCCNHPYLFQGAEPGPPYTTGEHLVENAGKMVLLDKLLPKLKDRDSRVLIFSQMTRLLDILEDYLMYRGYQYCRIDGNTGGEDRDASIEAFNKPGSEKFVFLLSTRAGGLGINLATADVVVLYDSDWNPQADLQAQDRAHRIGQKKEVQVFRFCTEYTIEEKVIERAYKKLALDALVIQQGRLAEQKTVNKDDLLQMVRFGAEMVFSSKDSTITDEDIDRIIAKGEETTAELDAKMKKFTEDAIKFKMDDTAELYDFDDDKKEENKLDFKKLVSDNWIEPPRRERKRNYSESEYFKQALRQGAPAKPREPRIPRMPHLHDFQFFNNQRLNELYEKEVRYLMVISQANQKKDTIDGEDEDQLEPLTAEEQEEKEQLLEEGFATWTRRDFNTFIRACEKYGRNDIRSIAAEMEGKTEEEVQRYAKVFKERYKELSDYDRIIKNIERGEARISRKDEIMRAIGKKLDRYKNPWLELKIQYGQNKGKFYNEECDRFMLCMVHVCSIIPSRFLHTFVFKRDMSN

SEQ ID NO: 8444 - protein, 1122 aa, Oryza sativa; identical to SEQ ID NO: 8442

SEQ ID NO: 8445 - protein, 1016 aa, Oryza sativa
  unsure (1)..(1016): unsure at all Xaa locations
QEEQGEEEEGFSGDEEEQEVEEEEEVDEEEIEAVTTGAGGDDDDEEVGDDGGAEEESQSTEDDELXXLEDATGNAEIGKRERAKLREMQKLKKHKIQEILDAQNKAIDADMMTEEEEDEEYLKEEEDALDGAGGTRLVSQPSCIKGKMRDYQLAGLNWLIRLYENGINGILADEMGLGKTLQTISLLGYLHEFRGITGPHMVVAPKSTLGNWMKEIQRFCPVLRAIKFLGNPEERNHIRENLLVPGKFDVCVTSFEMAIKEKTALKRFSWRYIIIDEAHRIKNENSLLSKTMRIYNTNYRLLITGTPLQNNLHELWSLLNFLLPEIFSSAETFDDWFQISGENDQHEVVQQLHKVLRPFLLRRLKSDVEKGLPPKKETILKVGMSEMQKQYYRALLQKDLEVVNAGGERKRLLNIAMQLRKCCNHPYLFQGAEPGPPYTTGDHLIENAGKMVLLDKLLPKLKERDSRVLIFSQMTRLLDILEDYLMYKGYQYCRIDGNTGGEDRDASIEAFNKPGSEKFVFLLSTRAGGLGINLATADVVILYDSDWNPQVDLQAQDRAHRIGQKKEVQVFRFCTEYTIEEKVIERAYKKLALDALVIQQGRLAEQKAVNKDELLQMVRFGAEMVFSSKDSTITXXXXXXXXXKGEEATAQLDAKMKKFTEDAIKFKMDDTAELYDFDDDKKDENKLDFKKLVTDNWIEPTSRRERKRNYSESDYFKQALRQGAPAKPREPRIPRMPHLHDFQFFNTQRLNELYEKEVKYLVLNQQANQKKDTVGEGDDEGMEPLTVEEQEEKEQLLEEGFSTWTRRDFNTFIRACEKYGRNDIKNISSEMEGKTEEEVQRYAKVFQERYKELNDYDRVIKNIEKGEARIYRKDEIMKAIGKKLDRYKNPWLELKIQYGQNKGKLYNEECDRFMLCMVHKLGYGNWDELKAAFRMSPLFRFDWFVKSRTTQELARRCETLIRLVEKENQEYDERERLARKDKKVVQNMSPAKRSSSRSLDTPPQSSSKRRRQSYTE

SEQ ID NO: 8446 - protein, 1137 aa, Oryza sativa
MGKPGKYGDGDDDDSEEEQLSPSSSAGEEEEEEVEEEEGEEQQEEQGEEEEGFSGDEEEQEVEGEADGEQVEEEEEEESSVGEEEAEAEGEEEEEEVEEEQGAGEEEEEEVDEEEIEAVTTGAGGDDDDEEVGDDGGAEEESQSTEDDEVAAGKDGGGEDGDKLEDATGNAEIGKRERAKLREMQKLKKHKIQEILDAQNKAIDADMMTEEEEDEEYLKEEEDALDGAGGTRLVSQPSCIKGKMRDYQLAGLNWLIRLYENGINGILADEMGLGKTLQTISLLGYLHEFRGITGPHMVVAPKSTLGNWMKEIQRFCPVLRAIKFLGNPEERNHIRENLLVPGKFDVCVTSFEMAIKEKTALKRFSWRYIIIDEAHRIKNENSLLSKTMRIYNTNYRLLITGTPLQNNLHELWSLLNFLLPEIFSSAETFDDWFQISGENDQHEVVQQLHKVLRPFLLRRLKSDVEKGLPPKKETILKVGMSEMQKQYYRALLQKDLEVVNAGGERKRLLNIAMQLRKCCNHPYLFQGAEPGPPYTTGDHLIENAGKMVLLDKLLPKLKERDSRVLIFSQMTRLLDILEDYLMYKGYQYCRIDGNTGGEDRDASIEAFNKPGSEKFVFLLSTRAGGLGINLATADVVILYDSDWNPQVDLQAQDRAHRIGQKKEVQVFRFCTEYTIEEKVIERAYKKLALDALVIQQGRLAEQKAVNKDELLQMVRFGAEMVFSSKDSTITDEDIDRIIAKGEEATAQLDAKMKKFTEDAIKFKMDDTAELYDFDDDKMCCHIWSDFVIIECTLFFLKDENKLDFKKLVTDNWIEPTSRRERKRNYSESDYFKQALRQGAPAKPREPRIPRMPHLHDFQFFNTQRLNELYEKEVKYLVQANQKKDTVGEGDDEDQLEPLTVEEQEEKEQLLEEGFSTWTRRDFNTFIRACEKYGRNDIKNISSEMEGKTEEEVQRYAKVFQERYKELNDYDRVIKNIEKGEARIYRKDEIMKAIGKKLDRYKNPWLELKIQYGQNKGKLYNEECDRFMLCMVHKLGYGNWDELKAAFRMSPLFRFDWFVKSRTTQELARRCETLIRLVEKENQEYDERERLARKDKKNMSPAKRSSSRSLDTPPQSSSKRRRQSYTEANAGSGRRRRG

SEQ ID NO: 8447 - protein, 1137 aa, Oryza sativa; identical to SEQ ID NO: 8446

SEQ ID NO: 8448 - protein, 1197 aa, Oryza sativa
MEGIRRCDDNKKRRRNASYGSVHLSIMLREYGDNGTCHELKLSYWRKEEGRCQATVEISADLSSFHAAPARAATRRNRFNIRSPQSPNSATPIQFNSPPPIRLSQISRNPSRHRRRRRLERGVMGKPGKYGDGDDDDSEEEQLSPSSSAGEEEEEEVEEEEGEEQQEEQGEEEEGFSGDEEEQEVEGEADGEQVEEEEEEESSVGEEEAEAEGEEEEEEVEEEQGAGEEEEEEVDEEEIEAVTTGAGGDDDDEEVGDDGGAEEESQSTEDDEVAAGKDGGGEDGDKLEDATGNAEIGKRERAKLREMQKLKKHKIQEILDAQNKAIDADMMTEEEEDEEYLKEEEDALDGAGGTRLVSQPSCIKGKMRDYQLAGLNWLIRLYENGINGILADEMGLGKTLQTISLLGYLHEFRGITGPHMVVAPKSTLGNWMKEIQRFCPVLRAIKFLGNPEERNHIRENLLVPGKFDVCVTSFEMAIKEKTALKRFSWRYIIIDEAHRIKNENSLLSKTMRIYNTNYRLLITGTPLQNNLHELWSLLNFLLPEIFSSAETFDDWFQISGENDQHEVVQQLHKVLRPFLLRRLKSDVEKGLPPKKETILKVGMSEMQKQYYRALLQKDLEVVNAGGERKRLLNIAMQLRKCCNHPYLFQGAEPGPPYTTGDHLIENAGKMVLLDKLLPKLKERDSRVLIFSQMTRLLDILEDYLMYKGYQYCRIDGNTGGEDRDASIEAFNKPGSEKFVFLLSTRAGGLGINLATADVVILYDSDWNPQVDLQAQDRAHRIGQKKEVQVFRFCTEYTIEEKVIERAYKKLALDALVIQQGRLAEQKAAELYDFDDDKMCCHIWSDFVIIECTLFFLKDENKLDFKKLVTDNWIEPTSRRERKRNYSESDYFKQALRQGAPAKPREPRIPRMPHLHDFQFFNTQRLNELYEKEVKYLVQANQKKDTVGEGDDEDQLEPLTVEEQEEKEQLLEEGFSTWTRRDFNTFIRACEKYGRNDIKNISSEMEGKTEEEVQRYAKVFQERYKELNDYDRVIKNIEKGEARIYRKDEIMKAIGKKLDRYKNPWLELKIQYGQNKGKLYNEECDRFMLCMVHKLGYGNWDELKAAFRMSPLFRFDWFVKSRTTQELARRCETLIRLVEKENQEYDERERLARKDKKNMSPAKRSSSRSLDTPPQSSSKRRRQSYTEANAGSGRRRRG

SEQ ID NO: 8449 - protein, 714 aa, Oryza sativa
  unsure (1)..(714): unsure at all Xaa locations
TPTMSEVRSVPGMKVEASPAAAAAATVDSPTSVLEDEEKADDFVDAVPSLPIDLEAKNGDASLITDAMKEEEEKLHDARVKAEEEEVARKREEAARLAFDPTRFNKLDELLSQTQLYSEFLLEKMETIADVCIHAEEEPVEEKKNGRGRKRKATSAPNQKKAKKAVAVMLTRSHEDCSPEDCTLTEEERWEKEQARLVPLMTGGKLKSYQIKGVKWLISLWQNGLNGILADQMGLGKTIQTIGFLAHLKGKGLDGPYLIIAPLSTLSNWVNEISRFVPSMTGLIYHGDKAARAEIRRKFMPKTTGPDFPLIVTSYEMAMSDAKHLAHYKWKYVIVDEGHRLKNSKCLLLRELKRLPMDNKLLLTGTPLQNNLAELWSLLNFILPDIFSSHXEFESWFDFSAKGGEEDQEDSEEKRKVDVVSKLHAILRPFFLRRMKEDVEHMLPRKKEIIIYANMTDHQKQIQNHLVEQTFDQYLHEKFLRKPGIKAKLNNLLIQLRKNCNHPDLLESAYDSSGLYPPVEKLLEQCGKFQLLNRLLSLLLARKHKVLIFSQWTKVLDIIEYYLETKGLQVCRIDGSVKLEERRRQIAEFNDLNSSMNIFILSTRAGGLGINLTSADTCILYDSDWNPQMDLQAMDRCHRIGQTRPVHVYRLATSHSVEGRIIKKAFGKLRLEHVVIGKGQFEQDRAKPNALDVSLDYFCTLKECRHHENPLXXT

SEQ ID NO: 8450 - protein, 1187 aa, Oryza sativa; identical to SEQ ID NO: 8427

SEQ ID NO: 8451 - protein, 2034 aa, Oryza sativa
  unsure (1)..(2034): unsure at all Xaa locations
AMAQSSSRLHRLLTLLDTGSTQATRFAAARQIGEIAKSHPQELNVLLKKVSPYLRSKNWDTRVAAAHAIGAIAENVKHTSVKDLFASAEAEKHASGLSGIGDVGSTLRHADTTATSELAFGSFDINRVLEFGSPLLASGGQEYDIANDNGKNPAERLARQKQNLRRRLGLDVCEQFMDFNDVIKDEDLLAQKNYWGANMQNNGFYSFNTGQNIQHLVASMVPRYPKHSNFRSRRLSARELNMLKRKAKSNAKDHTKAVPEDDDVVPKSSGPSNGASSDQVGSHNTCSVNCTNEDNLEYSENGRWPFQQFVDQLIHDMFDPIWEVRHGTIMALREILTHQGACAGVYFPDLNSPSDLDDKNNLDSLKRAHGIDLNEDIDSGQLEPVLKRQKKEESNPEVMDIQLDKEPSNGDYSXXTEASLSTEPTVSSGEPNLAHAKVESPFQVDGSANPSKVDPYXVHHLTKHSTPCPNXVLPISXENSKFIKLMKLANYSAVKNWEFLQDCAIRFLCVLSLDRFGDYVSDQVVAPVRETCAQALGAVLKYMHPTLVCHTLNILLQMQRRQEWEVRHGSLLGIKYLVAVRQEMLKDLLNYVLHACKAGLEDPDDDVRAVAAEALIPAAASLVRLNDQMLHSIVMLLWDILLDLDDLSPSTSSVMNLLAEIYSQPEMVPKMLGTTAIGGDNEFDLNSVTLVAGEEKMGSNDNPYVLAALTPRLWPFMRHSITSVRRSAVRTLERLLEVGNTRNXXAKLWLASILGDALQVVFQNLLLESNDEIIRSSERAWKLLLQCPTEDLESAASSYFSNWVQLATTPYGTALDSAKMFLPVALPRGSRSRAAAKIKSARLEHENTRMISFGSTGENTSQEKHSEASLSVSKIIVGSDSDKSVTHTRVLTSMALGLFASKLPEGSWQVVLGPLASDLMSLSGVQRQVASMVIVSWFKDLRKSDPAAVGTLLAFLSSLKGWMLDLLACSDPSFPTKDSPLPYAELARTYRKMRNEANNLFQSIESCALLKEYTSNLNFEADMLSVDDAINFTSKLLLPSEPDFSLDSDKIVLNNIESAKQGLLSTSGYLKCVQNNLHVTVSSLVASAVVWMAGLPSKLNPVILPLMAAVKREQEEILQDKAADALAELIFSCVGRKPGPNDKLTKNLCTLTCTDASETPQAAVINSIQVIEDQNLLSIGKRFSNHKSRGQMTSGGXXSKSEGFISRRGSELAFKHLCEKFGASLFEKLPKLWDCLTEFLKPETGDDLMKEDPSIAHCSSSQVVRSVTPHLAEPLRPQLLSLLPCILGCVRHPHVAVRLAAARCITSMAKSLTANVMVIVIENVIPMLSDSSSVCARQGAGMLLSLLVQGLAVELVPYAPFLVVPLLRCMSDPDGSVRQTVTHSFAALVPLLPLAKGSLLPDGLSERLSSSAEDAQFLEQLLDNSQIDDYKLSIDLSVELRRYQQEGINWLAFLRRFKLHGILCDDMGLGKTLQASAIVAADIAESRARNDEQDPKSLIICPSTLVAHWEYEIEKYIDSSIMKPLQYIGSSQDRIILRSQFDKFNVIITSYDIIRKDIDFLENVFWNYCVLDEGHIIKNSRSKITSAVKQLKAQHRLILSGTPIQNNVLELWSLFDFLMPGFLGTEKQFQATYGKPLLAAKDPKCSAKDAEAGILAMEALHKQVMPFLLRRTKDEVLSDLPEKIIQDRYCNLSLLQLKLYDKFSNSNAKQEISTIVKENELDQSTSQPKATRHVFQALQYLLKLCSHPLLVTGESPPDYLVDLLKEIGMGTGDELHDLHHSPKLVALQEILQECGIGSEISSPDASAAIGQHRVLIFAQHKALLDIIEKDLFQSHMRSVTYLRLDGSVEPEKRFEIVKAFNSDPTIDVLLLTTHVGGLGLNLTSADTLVFMEHDWNPMKDLQVKQTNNTPLLQAMDRAHRLGQRKVVNVHRLIMRGTLEEKVMSLQRFKVSVANAVINAENASLKTMNTDQLLDLFASTPASRKSGGDQSKDSKGXXSGGKGLKSILNGLDELWDQSQYADEYDLNQFLAKLNG

SEQ ID NO: 8452 - protein, 2146 aa, Oryza sativa
  unsure (1)..(2146): unsure at all Xaa locations
MTSKMKKFIKAHARFLKAQEEVKSVHQLELCRSQARFERLGDLLASDILKRGANEEGSSVNEDLNERSPNTAATKKRSIPYSTSEEAKAVKKRRERDSDTMTRSDKYRSDVTDFDKTSKGTEATKSLYLKKKLWEDEKSKYFVNLQVKGSPVRHVLPSTGMAAHAIDDLNEAIELEDTGSTQATRFAAARQIGEIAKSHPQELNVLLKKVSPYLRSKNWDTRVAAAHAIGAIAENVKHTSVKDLFASAEAEKHASGLSGIGDVGSTLRHADTTATSELAFGSFDINRVLEFGSPLLASGGQEYDIANDNGKNPAERLARQKQNLRRRLGLDVCEQFMDFNDVIKDEDLLAQKNYWGANMQNNGFYSFNTGQNIQHLVASMVPRRLSARELNMLKRKAKSNAKDHTKAVPEDDDVVPKSSGXXSNGASSDQDTVDAITDEDNLEYSENGRWPFQQFVDQLIHDMFDPIWEVRHGTIMALREILTHQGACAGVYFPDLNSPSDLDDKNNLDSLKRAHGIDLNEDIDSGQLEPVLKRQKKEESNPEVMDIQLDKEPSNGDYSXXTEASLSTEPTVSSGEPNLAHAKVESPFQVDGSANPSKVDPYXVHHLTKHSTPCPNXVLPISXENSKFIKLMKLANYSAVKNWEFLQDCAIRFLCVLSLDRFGDYVSDQVVAPVRETCAQALGAVLKYMHPTLVCHTLNILLQMQRRQEWEVRHGSLLGIKYLVAVRQEMLKDLLNYVLHACKAGLEDPDDDVRAVAAEALIPAAASLVRLNDQMLHSIVMLLWDILLDLDDLSPSTSSVMNLLAEIYSQPEMVPKMLGTTAIGGDNEFDLNSVTLVAGEEKMGSNDNPYVLAALTPRLWPFMRHSITSVRRSAVRTLERLLEVGNTRNXXAKLWLASILGDALQVVFQNLLLESNDEIIRSSERAWKLLLQVTDVLAFRCPTEDLESAASSYFSNWVQLATTPYGTALDSAKMFLPVALPRGSRSRAAAKIKSARLEHENTRMISFGSTGENTSQEKHSEASLSVSKIIVGSDSDKSVTHTRVLTSMALGLFASKLPEGSWQVVLGPLASDLMSLSGVQRQVASMVIVSWFKDLRKSDPAAVGTLLAFLSSLKGWMLDLLACSDPSFPTKDSPLPYAELARTYRKMRNEANNLFQSIESCALLKEYTSNLNFEADMLSVDDAINFTSKLLLPSEPDFSLDSDKIVLNNIESAKQGLLSTSGYLKCVQNNLHVTVSSLVASAVVWMAGLPSKLNPVILPLMAAVKREQEEILQDKAADALAELIFSCVGRKPGPNDKLTKNLCTLTCTDASETPQAAVINSIQVIEDQNLLSIGKRFSNHKSRGQMTSGGXXSKSEGFISRRGSELAFKHLCEKFGASLFEKLPKLWDCLTEFLKPETGDDLMKEDPSIAHINNIQVVRSVTPHLAEPLRPQLLSLLPCILGCVRHPHVAVRLAAARCITSMAKSLTANVMVIVIENVIPMLSDSSSVCARQGAGMLLSLLVQGLAVELVPYAPFLVVPLLRCMSDPDGSVRQTVTHSFAALVPLLPLAKGSLLPDGLSERLSSSAEDAQFLEQLLDNSQIDDYKLSIDLSVELRRYQQEGINWLAFLRRFKLHGILCDDMGLGKTLQASAIVAADIAESRARNDEQDPKSLIICPSTLVAHWEYEIEKYIDSSIMKPLQYIGSSQDRIILRSQFDKFNVIITSYDIIRKDIDFLENVFWNYCVLDEGHIIKNSRSKITSAVKQLKAQHRLILSGTPIQNNVLELWSLFDFLMPGFLGTEKQVMPFLLRRTKDEVLSDLPEKIIQDRYCNLSLLQLKLYDKFSNSNAKQEISTIVKENELDQSTSQPKATRHVFQALQYLLKLCSHPLLVTGESPPDYLVDLLKEIGMGTGDELHDLHHSPKLVALQEILQECGIGSEISSPDASAAIGQHRVLIFAQHKALLDIIEKDLFQSHMRSVTYLRLDGSVEPEKRFEIVKAFNSDPTIDVLLLTTHVGGLGLNLTSADTLVFMEHDWNPMKDXXQAMDRAHRLGQRKVVNVHRLIMRGTLEEKVMSLQRFKVSVANAVINAENASLKTMNTDQLLDLFASTPASRKASGSSGGDQSKDSKGKSGGKGLKSILNGLDELWDQSQYADEYDLNQFLAKLNG

SEQ ID NO: 8453 - protein, 664 aa, Oryza sativa
  unsure (1)..(664): unsure at all Xaa locations
XYEFLVKWVGKSNIHNSWISESELKALAKRKLENYKAKYGTGLINICKEQWCQPQRVIALRTSLDEIEEALIKWCALPYDECTWERLDEPTMVKYAHLVTQFKKFESQALDKDKGGSHAKPREHQEFNMLVEQPKELQGGMLFPHQLEALNWLRKCWYKSKNVILADEMGLGKTVSACAFLSSLCCEYKINLPCLVLVPLSTMPNWMAEFASWAPHLNVVEYHGSARARSIIRQYEWHEGDASQMGKIKKSHKFNVLLTTYEMVLVDAAYLRSVSWEVLIVDEGHRLKNSSSKLFSLLNTLSFQHRVLLTGTPLQNNIGEMYNLXNFLQXSSFPSLASFEEKFNDLTTTEKVEELKNLVAPHMLRRLKKDAMQNIPPKTERMVPVELTSIQAEYYRAMLTKNYQVLRNIGKGGAHQSLLNIVMQLRKVCNHPYLIPGTEPESGSPEFLHEMRIKASAKLTLLHSMLKILHKDGHRVLIFSQMTKLLDILEDYLTWEFGPKTFERVDGSVSVAERQAAIARFNQDKSRFVFLLSTRSCGLGINLATADTVIIYDSDFNPHADIQAMNRAHRIGQSNRLLVYRLVVRASVEERILHLAKKKLMLDQLFVNKSESQKEVEDIIRWGTEELFRKAMLQXXKDNNEASGAKNDVAEVSLSIKKNGXIGX

SEQ ID NO: 8454 - protein, 816 aa, Oryza sativa
  unsure (1)..(816): unsure at all Xaa locations
NAVHITEKEHGGAGDKITXXQGDLQVDRILGCRLQTSQIISPAHASSEQIDMAPPSASGAPEPKIQSSNSDTNVTEDACADELANDGGENNLDCSDAQKESNVRSHGHKESLNAKEIMNTASACSADQIVTVKDAGAVQTYVTASVNGEYVSKADTEVHTKQEHTPDSKLHGKIQETELKEHDGTTYEFLVKWVGKSNIHNSWISESELKALAKRKLENYKAKYGTGLINICKEQWCQPQRVIALRTSLDEIEEALIKWCALPYDECTWERLDEPTMVKYAHLVTQFKKFESQALDKDKGGSHAKPREHQEFNMLVEQPKELQGGMLFPHQLEALNWLRKCWYKSKNVILADEMGLGKTVSACAFLSSLCCEYKINLPCLVLVPLSTMPNWMAEFASWAPHLNVVEYHGSARARSIIRQYEWHEGDASQMGKIKKSHKFNVLLTTYEMVLVDAAYLRSVSWEVLIVDEGHRLKNSSSKLFSLLNTLSFQHRVLLTGTPLQNNIASFEEKFNDLTTTEKVEELKNLVAPHMLRRLKKDAMQNIPPKTERMVPVELTSIQAEYYRAMLTKNYQVLRNIGKGGAHQSLLNIVMQLRKVCNHPYLIPGTEPESGSPEFLHEMRIKASAKLTLLHSMLKILHKDGHRVLIFSQMTKLLDILEDYLTWEFGPKTFERVDGSVSVAERQAAIARFNQDKSRFVFLLSTRSCGLGINLATADTVIIYDSDFNPHADIQAMNRAHRIGQSNRLLVYRLVVRASVEERILHLAKKKLMLDQLFVNKSESQKEVEDIIRWGTEELFXESDVAVKDNNEASGAKNDVX

SEQ ID NO: 8455 - protein, 673 aa, Oryza sativa
  unsure (1)..(673): unsure at all Xaa locations
MAYNLPGRIFNMLYPHQREGLRWLWVLHCRGTGGILGDDMGLGKTMQVSAFLAGLFHSRLIKRVLVVAPKTLLTHWTKELSVVSLKDKIRDYSGPNANARNYELKYAFKEGGILLTTYDIVRNNFKMIKGNFTNDFDDEEETLWNYVILDEGHIIKNPKTQRAQSLFEIPCAHRIVISGTPIQNNLKEMWALFYFCCPEVLGDKEQFKARYEHAIIQGNDKNATNRQKHIGSNVAKELRERIKPYFLRRMKNEVFLDSGTGEDKKLAKKNELIIWLKLTSCQRQLYEAFLNSELVHSSMQGSPLAAITEAIILEGYKFLRIDGTTKISERERIVKDFQEGPGAPIFLLTTQVGGLGLTLTKAARVIVVDPAWNPSTDNQSVDRAYRIGQMKDVIVYRLMTSGTIEEKIYKLQVFKGALFRTATEHKEQTRYFSKRDIQELFSLPEQGFDVSLTQKQLQEEHGQQLVMDDSLRKHIQFLEQQGIAGVSHHSLLFSKTAILPTLNDNDGLDSSRRAMPMAKHYYKGASSDYVANGAAYAMKPKEFXXARTYSPNSTSTESPEEIKAKINRLSQTLANTVLVAKLPDRGDKIRRQINELDEKLTVIDHLEKIRMQIDDLHEEHMAKFDEMLERIKRMELADEGELIAKFGEMVERMRQRCDMDRLSLPLLSSTLVA

SEQ ID NO: 8456 - protein, 882 aa, Oryza sativa
  unsure (1)..(882): unsure at all Xaa locations
AMSLHSLKETLQSSSFSQPQSESQPRSPPPLLARRPPKTSLSQQLLRLDASSSSSSFSVSPPPPPRTSPTSDAAADDAPPLPEEEDEVPCIRPRAXXPSASXASLDSRGPYEPLALSPPGERPVVHKIYAAASLLATTVPSSINCRLLVHQRDGVRFLYNLYRNNHGGVLGDDMGLGKTIQTIAFLSAVIGKDNDHGDQLVEGRKIAPILILCPTSVIRNWENEFAEWARCSVAVYHGPNRDLVLQKVETQRLEIVITSFDTFRIHGKILCGISWDLVVVDEAHRLKNEKSKLYTACLEITTRKRFGLTGTIMQNKIMELFNLFDWIVPGCLGDREHFRVYYDEPLKHGQRFSAPERFVQVADKRKKHLVSVLSKFLLRRTKEETIGHLMLGKEDNIVFCRMSDVQKRVYRRMLQQPDVQILINKDLPCSCGSPLTQVECCKRTEPHGIIWSYLHRDNPEGCSLCPFCLVLPCLGKLQQISNHLELIKPNLKDEIEKQKKDAELAAAVFDTDIELVGGGAKSENFMGLSDAEHCGKMRALERLLSLWTLQGDKILLFSYSVRMLDILEKFLIRKGYCFSRFDGTTPMNARQLLIDEFNRCPSKQVFLISTRAGNLGVNLVSANRVVIFDPSWNPAQDLQAQDRSFRFGQRRHVTVFRLLGAGSLEELIYSRQIYKQQLSNIAVSGKIEKRYFEGVQDDKKFQGELFGICNLFRDLSDKLFTSEIIEMHGEHGKDTAETIGIREIVDTNIFGTQDQMKSSMPAIHNENKNLYHCGIVYAHRNEDVVNTRTNEASNCAEDKTVPRHLEELQSKKNETMHTIKAKSYSLVQKKKEFSRIASFMGMNDLEFSKWLLSVSPLQRHEVLDRYRNAKXAIGSMDNASLI

SEQ ID NO: 8457 - protein, 969 aa, Oryza sativa
  unsure (1)..(969): unsure at all Xaa locations
MQSWRRRQRWCRRRAQGRSSSSASMCWRCPVVLIDAGKPLPSPAVSSSLSPHSSSSTLCALFSDKTDETLCTWRXDATMRPPKTSLSQQLLRLDASSSSSSFSVSPPPPPRTSPTSDAAADDAPPLPEEEDEVPCIRPRAXXPSASXASLDSRGPYEPLALSPPGERPVVXXVPSSINCRLLVHQRDGVRFLYNLYRNNHGGVLGDDMGLGKTIQTIAFLSAVIGKDNDHGDQLVEGRKIAPILILCPTSVIRNWENEFAEWARCSVAVYHGPNRDLVLQKVETQRLEIVITSFDTFRIHGKILCGISWDLVVVDEAHRLKNEKSKLYTACLEITTRKRFGLTGTIMQNKIMELFNLFDWIVPGCLGDREHFRVYYDEPLKHGQRFSAPERFVQVADKRKKHLVSVLSKFLLRRTKEETIGHLMLGKEDNIVFCRMSDVQKRVYRRMLQQPDVQILINKDLPCSCGSPLXXQISNHLELIKPNLKDEIEKQKKDAELAAAVFDTDIELVGGGAKSENFMGLSDAEHCGKMRALERLLSLWTLQGDKILLFSYSVRMLDILEKFLIRKGYCFSRFDGTTPMNARQLLIDEFNRCPSKQVFLISTRAGNLGVNLVSANRVVIFDPSWNPAQDLQAQDRSFRFGQRRHVTVFRLLGAGSLEELIYSRQIYKQQLSNIAVSGKIEKRYFEGVQDDKKFQGELFGICNLFRDLSDKLFTSEIIEMHGDNTAETIGIREIVDTNISQDQMKSSMTAIHXXENKNLYHCGIVYAHRNEDVVNTRTNEASNCAEDKTVPRHLEELQSKKNETMHTIKAKSYSLVQKKKEFSRIASFMGMNDLEFSKWLLSVSPLQRHEVLDRYRNAKHNIVADRQRHTKCLNLKSLIFYNEGTTYILIKRLRRFYLYHPFDLIIRLNIHARTSENKYINQIDSCNRRIQGYRMDVTIQLLGSKPTCHLSQRSVKASPRRSNPGQITY

SEQ ID NO: 8458 - protein, 1403 aa, Oryza sativa
  unsure (1)..(1403): unsure at all Xaa locations
LLXLNLPPXSDVKFLHELLMQPLLNFKVPLPEDLDRYRRSSPNGSMSSQGGSLSDQYNGINDASHGLHRKRKRNLDGASDDDEVDAYSNQITEEHYRTMLSEHVQKYRRSKFKEDVFSSDPPQVIVPQKHKNGSARVTKYRSDTRNVAMLGGVEATAEYNGTKSTNAYGGFNKVVASLDSSYLDMGDNVSYKIPEGYDKLALSLNLPVFSDIRVEETFLNGTLDLRTLAAMLSTDQKFETTNRGGLAEPQPQYESLQERVKVXXKFSLQVTEDPXXAIPEGAAGRIRRFIISESGSLHVHYVKVLEKGDTYEIIERSLPKKQIIRKDPSEIAREESEKTIKLWHAIAVKGIPRHHRNFMALLKKRQVDAKRFSENCQREVKFKVSRSLKLMRSAAIRTRRLARDMLIFWKRVDKEQYELRKREEKEAAEALKREEELREAKRQQQRLNFLLSQTELYSHFMQNKAGESAPSDEASVPEEDEEDPEEAELKREALRAAQHAVSQQKRMTNAFDSETGRLRQSSDSGIPTDDLASMEPNKIDLLHPSTMPEKSSVQTPELFKGALKEYQLKGLQWLVNCYEQGLNGILADEMGLGKTVQAMAFLAHLAEDKNIWGPFLVVAPASVVNNWAEEVIRFCPDLKILPYWGPERMVLRKNINPKRLYRRDASFHILITNYQILVNEEKLLRRVKWQYMVLDEAQAIKSSSSQRWKTLLSFNCRNRLLLTGTPIQNNMAELWALLHFIMPTLFDSHEQFNEWFSKGIEGHAEHGGALNEHQLSRLHAILKPFMLRRVKIDVIAEMTKKKEEIVPCRLSSRQQVFYQAIKNKISLNELLDGSRGNLNDKKLLSLMNIVMQLRKVCNHPELFERNEGSSYFYFADIPNSLLSPAFGELQDVHYAGKRNPIMFEIPKLVYKGIVSNMEXCLCXGCGFLYGSFNRMFNIFSPSYIHQSAFPEAISPNNTVLLSGAFGFTRLINLSPVEASFLATCSLFNRLAFSAVRWNKKYTDELVDVFLDSESTDLESTHNDLTTVRAVVRLLLSPTKAESSFLRTKIETGPSDSPYEALVLSHHERLVSNIRLLRSTYAFIPPARAPPINVWCADRNFAYKLTDEMHDPLAKKLVLGFARTSEFNGPREPTSPHSLIEELHTDLPFPEPMLQLPYRIFGSSPPMSNFDPAKMLTDSGKLQTLDILLRRLRAENHRVLLFAQMTKMLDILEDYMNFRKFKYFRLDGSSAISDRRDMVRDFQNRNDIFVFLLSTRAGGLGINLTAADTVIFYEIDWNPTQDQQAMDRTHRLGQTKEDTIEEKILQRAKQKNAVQELVMKGKHVQDDHLMRQEDVVSLLIDDXXQISHKLKEISMQDRQKRRTKGIKVDKEGDLMLEDLDDQTSGAAEHDNTSSKKLPKEASKX

SEQ ID NO: 8459 - protein, 454 aa, Oryza sativa
  unsure (1)..(454): unsure at all Xaa locations
XSERLSSSAEDAQFLEQLLDNSQIDDYKLSIDLSVELRRYQQEGINWLAFLRRFKLHGILCDDMGLGKTLQASAIVAADIAESRARNDEQDPKSLIICPSTLVAHWEYEIEKYIDSSIMKPLQYIGSSQDRIILRSQFDKFNVIITSYDIIRKDIDFLENVFWNYCVLDEGHIIKNSRSKITSAVKQLKAQHRLILSGTPIQNNVLELWSLFDFLMPGFLGTEKQFQATYGKPLLAAKDPKCSAKDAEAGILAMEALHKQVMPFLLRRTKDEVLSDLPEKIIQDRYCNLSLLQLKLYDKFSNSNAKQEISTIVKENELDQSTSQPKATRHVFQALQYLLKLCSHPLLVTGESPPDYLVDLLKEIGMGTGDELHDLHHSPKLVALQEILQECGIGSEISSPDASAAIGQHRVLIFAQHXALLDIIEKDLVQSHLRSVXYLRLDGSVKPDQRTIEM

SEQ ID NO: 8460 - protein, 1108 aa, Oryza sativa
  unsure (1)..(1108): unsure at all Xaa locations
MERNGVAVNKAVFDTSQFPTRTVPTKNGAAEKFFFLSPLFPRTNPTPNPTQAREDKREISNPFLHRRRRRRRQNSEGSRSMASPPPFDICGDLDDDPTPPAPTPLAAPTPNGLNDRLLRLTRTHQRGPSQNPNPNPNPNPKPPPPPPPQEPEPAKVKLAGRRRLCKLSTAGDESAGDDDSIRDILDDLTTRLDSLSVDRPTARPRPHVSPLPCALHADPDPSQSQLNDGTKPSSSFVDCDDDDDDAGGAYGGFGVKEEVTRKVFKASSSFGGRGNDDKMKAKGAYAFDTVSRKTTTESKASKFFGDYDDEDDIDQDAENGKENHADDVGWEMERNGVEDRGLQDGAHWDRCNAQXXYNLPGRIFNMLYPHQREGLRWLWVLHCRGTGGILGDDMGLGKTMQVSAFLAGLFHSRLIKRVLVVAPKTLLTHWTKELSVVSLKDKIRDYSGPNANARNYELKYAFKEGGILLTTYDIVRNNFKMIKGNFTNDFDDEEETLWNYVILDEGHIIKNPKTQRAQSLFEIPCAHRIVISGTPIQNNLKXXLRERIKPYFLRRMKNEVFLDSGTGEDKKLAKKNELIIWLKLTSCQRQLYEAFLNSELVHSSMQGSPLAAITILKKICDHPLLLTKKAAEGVLEGMDAMLNNQEMGMVEKMAMNLADNDDDDVELQVGQDVSCKLSFMMSLLDFQEGPGAPIFLLTTQVGGLGLTLTKAARVIVVDPAWNPSTDNQSVDRAYRIGQMKDVIVYRLMTSGTIEEKIYKLQVFKGALFRTATEHKEQTRYFSKRNEQEYSSLPPHGFDASLTQHKMQVENGQQLVMDESLKKHIQFLEQQGIAGVNRHGVLFCKTETTATLGDDEQEGERRGAAMLLGSTFVEMSRKRVIDQVKEMSKKMDGLGDTMGRIVALEEEYAAELIGMLHENRWERSHLEKIRXXQIDDLHEEHMAKFDEMLERIKRMELADEVAPAHASCASSANAKHLEFALSSASSSTKYRYIIAYQRQLLGEDVVPEAGGEAMQEVGAADEAVHVQGHALLLLLLLPLGEDVVRPEAAVGGDGVGDGEGEVSGEVAVGEGVSSGEPGAAVPVAVGELYRQLAGIEAGGRAKQLGSLAS

SEQ ID NO: 8461 - protein, 553 aa, Oryza sativa
  unsure (1)..(553): unsure at all Xaa locations
XYQIRRRLLLTGTPIQNSLQELWSLLNFILPNIFNSSQNFEEWFNAPFAXXEVSLNDEEQLLIIHRLHQVLRPFLLRRKKDEVEKYLPVKTQVILKCDMSAWQKAYYEQVTSNGRVSLGSGRLKSKALQNLSMQLRKCCNHPYLFVEHYNMYQRQEIVRSSGKFELLDRLLPKLQRAGHRVLLFSQMTKLLDILEVYLQMYQFKYMRLDGSTKTEERGRLLADFNKKDSEYFLFLLSTRAGGLGLNLQTADTVIIFDSDWNPQMDQQAEDRAHRIGQKNEVRVFVLVSVGSIEEEILDRAKQKMGIDAKVIQAGLFNTTSTAQDRRALLQEILRRGTSSLGTDIPSEREINRLAARNDEEFWLVEKMDEERRQRENYKPRLMEGIEVPDWVFANDTLTEKIPADEPQNVLLTTKRRRKEVVYSDSFGDQWMKADDVVEETPRMAPRAKRSAYSSDVQEVDFSERRKRHKSLVNIADDASIPMWTPEKVRAGVSSYSKDENEDDAEDESTTSVLQGGSFTWKTLRRKRSSHFSNSSDSKGRSAFXSWDSGMLLP

SEQ ID NO: 8462 - protein, 423 aa, Oryza sativa
KGGRHVKFHTLITTYEVILKDKAALSKIKWNYLMVDEAHRLKNCEASLYTTLLEFSTKNKLLITGTPLQNSVEELWALLHFLDPSKFNSKDIFVERYKNLSSFNETELANLHKELRPHILRRVIKDVEKSLPPKIERILRVDMSPLQKQYYKWILERNFQNLNKGVRGNQVSLLNIVVELKKCCNHPFWFPGPQPGYGGDSIGDRNKVERIVMSSGKLVLLDKLLVRLRETNHRVLIFSQMVRMLDILAEYLSLRGFQFQRLDGSTRADLRHQAMEHFNAPGSDDFCFLLSTRAGGLGINLATADTVIIFDSDWNPQNDLQAMSRAHRIGQQETVNIYRFVTCKSVEEDILERAKKKMVLDHLVIQKLNAEGRLEKKESKKGGSMFDKNELSAILRFGAEELFKEDKTDEETKKKLESMDIDE

SEQ ID NO: 8463 - protein, 587 aa, Oryza sativa
  unsure (1)..(587): unsure at all Xaa locations
MSEVRSVPGMKVEASPAAAAAATVDSPTSVLEDDEISECKNGDVLDTTEAIAKNGDASLITDAMKEEEEKLHDARVKAEEEEVARKREEAARLAFDPTRFNKLDELLSQTQLYSEFLLEKMETIADVEGVQTHAEEEPVEEKKNGRGRKRKATSEYNDKKAKKAVAVMLTRSHEDCSPEDCTLTEEERFVPSMTGLIYHGDKAARAEIRRKFMPKTTGPDFPLIVTSYEMAMSDAKHLAHYKWKYVIVDEGHRLKNSKCLLLRELKRLPMDNKLLLTGTPLQNNLAELWSLLNFILPDIFSSHXEFESWFDFSAKGGEEDQEDSEEKRKVDVVSKLHAILRPFFLRRMKEDVEHMLPRKKEIIIYANMTDHQKQIQNHLVEQTFDQYLHEKSEIGLYPPVEKLLEQCGKFQLLNRLLSLLLARKHKWTKVLDIIEYYLETKGLQVCRIDGSVKLEERRRQIAEFNDLNSSMNIFILSTRAGGLGINLTSADTCILYDSDWNPQMDLQAMDRCHRIGQTRPVHVYRLATSHSVEGRIIKKAFGKLRLEHVVIGKGQFEQDRAKPNALDVSLDYFCTLKECRHHENPLX

SEQ ID NO: 8464 - protein, 1385 aa, Oryza sativa
  unsure (1)..(1385): unsure at all Xaa locations
MQPLLNFKVPLPEDLDRYRRSSPNGSMSSQGQGSLSDQYNGINDASHGLHRKRKRNLDGASDDDEVDAYSNQITEEHYRTMLSEHVQKYRRSKFKEDVFSSDPPQVIVPQKHKNGSARVTKYRSDTRNVAMLGGVEATAEYNGTKSTNAYGGFNKVVASLDSSYLDMGDNVSYKIPEGYDKLALSLNLPVFSDIRVEETFLNGTLDLRTLAAMLSTDQKFETTNRGGLAEPQPQYESLQERVKVXXKFSLQVTEDPXXAIPEGAAGRIRRFIISESGSLHVHYVKVLEKGDTYEIIERSLPKKQIIRKDPSEIAREESEKTIKLWHAIAVKGIPRHHRNFMALLKKRQVDAKRFSENCQREYELRKREEKEAAEALKREEELREAKRQQQRLNFLLSQTELYSHFMQNKAGESAPSDEASVPEEDEEDPEEAELKREALRAAQHAVSQQKRMTNAFDSETGRLRQSSDSGIPTDDLASMEPNKIDLLHPSTMPEKSSVQTPELFKGALKEYQLKGLQWLVNCYEQGLNGILADEMGLGKTVQAMAFLAHLAEILPYWGPERMVLXGKTSTPNVFIEGKKYLLSSFAFLPFIGAXKLNIDASFHILITNYQILVNEEKLLRRVKWQYMVLDEAQAIKSSSSQRWKTLLSFNCRNRLLLTGTPIQNNMAELWALLHFIMPTLFDSHEQFNEWFSKGIEGHAEHGGALNEHQLSRLHAILKPFMLRRVKIDVIAEMTKKKEEIVPCRLSSRQQVFYQAIKNKISLNELLDGSRGNLNDKKLLSLMNIVMQLRKVCNHPELFERNEGSSYFYFADIPNSLLSPAFGELQDVHYAGKRNPIMFEIPKLVYKGIVSNMEXCLCXGCGFLYGSFNRMFNIFSPSYIHQSAFPEAISPNNTVLLSGAFGFTRLINLSPVEASFLATCSLFNRLAFSAVRWNKKYTDELVDVFLDSESTDLESTHNDLTTVRAVVRLLLSPTKAESSFLRTKIETGPSDSPYEALVLSHHERLVSNIRLLRSTYAFIPPARAPPINVWCADRNFAYKLTDEMHDPLAKKLVLGFARTSEFNGPREPTSPHSLIEELHTDLPFPEPMLQLPYRIFGSSPPMSNFDPAKMLTDYMNFRKFKYFRLDGSSAISDRRDMVRDFQNRNDIFVFLLSTRAGGLGINLTAADTVIFYEIDWNPTQDQQAMDRTHRLGQTKEDTIEEKILQRAKQKNAVQELVMKGKHVQDDHLMRQEDVVSLLIDDTQISHKLKEISMQAKDRLKKRRTKGIKVDKEGDLMLEDLDDQTSGAAEHDNTSSKKKKSSQKKLPKLQDNGSVDKNAEAEGGEVEDEDTAPRPKRSKRLMKNLNEDKEPEQEPTTDGDNPAEAAENNISPDDNDTEEAKDRTPSA

SEQ ID NO: 8465 - protein, 578 aa, Oryza sativa
MRRGYEEIDDDEWSNHSFKPSRVLKRPRAPSRTRSLPRPSTPSVTTPGLPPPPPPPPPPPPSSSPTTTTISNLATAVADLSEEDDDLELADDDFDHPDPRPTRPRRATARRFVIKDDDDSDGDVGASEVDGVEAEEDDGVNWSELENEDDEDVVGKALRKCARISADLRQELYGSSTRNCESYAEIDDSSVRIVTQDDVDAACTSEESEFEPILKPYQLVGVNFLLLLHRKNIGGAILADEMGLGKTVQAVTYLTLLRHLYNDPGPHLIVCPASVLENWERELKKWCPSFSIIMFHGAGRTAYSKELSSLGKAGYPPPFNVLLVCYSLFERRSAQQKDDRKALKRWRWSCVLMDEAHVLKDKGSFRWRNLMAVAQHARQRLMLTGTPLQNDLHELWSLLEFMMPDIFATGDIDLKKLLNAEDHELISRIKSILGPFILRRLKSDVMQQLVPKIQHVNFVTMDSEQFQAYNYAIDEYRGACQARSAKSTSNFSNNVVGLIPKRQISNYFMQFRKIANHPLLIRRIYSDKDVDRIAKLLYPKGAFGFECSLERATQELRKYNDFAIHQVLFSYDDSGTKG

SEQ ID NO: 8466 - protein, 659 aa, Oryza sativa
MSMKCHEYHVVAKFYGGKVYNESPFFRKSICWRSLRGGAPVLPLLGGRPKFPSPRLLPPNSRAPRPPPPRLRPWLRLLQNPSPPAAAEAAAAPMRRGYEEIDDDEWSNHSFKPSRVLKRPRAPSRTRSLPRPSTPSVTTPGLPPPPPPPPPPPPSSSPTTTTISNLATAVADLSEEDDDLELADDDFDHPDPRPTRPRRATARRFVIKDDDDSDGDVGASEVDGVEAEEDDGVNWSELENEDDEDVVGKALRKCARISADLRQELYGSSTRNCESYAEIDDSSVRIVTQDDVDAACTSEESEFEPILKPYQLVGVNFLLLLHRKNIGGAILADEMGLGKTVQAVTYLTLLRHLYNDPGPHLIVCPASVLENWERELKKWCPSFSIIMFHGAGRTAYSKELSSLGKAGYPPPFNVLLVCYSLFERRSAQQKDDRKALKRWRWSCVLMDEAHVLKDKGSFRWRNLMAVAQHARQRLMLTGTPLQNDLHELWSLLEFMMPDIFATGDIDLKKLLNAEDHELISRIKSILGPFILRRLKSDVMQQLVPKIQHVNFVTMDSEQFQAYNYAIDEYRGACQARSAKSTSNFSNNVVGLIPKRQISNYFMQFRKIANHPLLIRRIYSDKDVDRIAKLLYPKGAFGFECSLERATQELRKYNDFAIHQ

SEQ ID NO: 8467 - protein, 697 aa, Oryza sativa
  unsure (1)..(697): unsure at all Xaa locations
MASKGPRSKLDHETRARRQKALEAPRGEPRRTKTHWDHLLGEMAWLAKEFDAERKWKLSMAKRIAQRANKGVVDQATKDERKQKVFYKNQLELEERKKKALDKQLDFLLGQTERYSTMLAENLVDVRLQNQENDSLQTNQRSQQELAQENINASSPTDVDNVEIDDDYNSSLGEEPKDDEHTIDEDEAQITEAERNEELAALQAEADLPLDDILKLYTKNKVQAFSVSRESSPVSDSDSKDLIKVFRVSDTFMVKCNGNISSVDAKLTELSVRSLVSTEMTEGTVVVRQSVGTWVVRSLGAGHGAMSSRGHGEAARGRRCNEXAERRADDEDYVANDEGKDDEATLSEEEELAKKEDCDPLDEVKLLQKESEIPLEELLARYQKDGYADDDTTELENSPALSVEDVNANMPVDDESADTVEVNRDLSADTMKLTRDQSAETVKGDVTDTKAMANGDNSDVIADAAAAARSAQPTGNTFSTTNVRTKFPFLLKHSLREYQHIGLDWLVAMYEKRLNGILADEMGLGKTIMTISLLAHLACEKGIWGPHLIVVPTSVMLNWETEFLKWCPAFKILTYFGSAKERKQKRQGWMKPNYFHVCITTYRLVIQDSKVFKRKKWKYLILDEAHLIKNWKSQRWQTLLNFNSKRRILLTGTPLQNDLMELWSLMHFLMPHVFQSHQEFKDWFCNPISGMVEGQDK

SEQ ID NO: 8468 - protein, 755 aa, Oryza sativa
  unsure (1)..(755): unsure at all Xaa locations
PKTXDSSLQNIGKMASKGPRSKLDHETRARRQKALEAPRGEPRRTKTHWDHLLGEMAWLAKEFDAERKWKLSMAKRIAQRANKGVVDQATKDERKQKEEEVRLRKVALNISKDVKKFWTKIEKLVFYKNQLELEERKKKALDKQLDFLLGQTERYSTMLAENLVDVRLQNQENDSLQTNQRSQQELAQENINASINSMLXTDNVEIDDDYNSSLGEEPKDDEHTIDEDEAQITEAERNEELAALQAEADLPLDDILKLYTKNKVSRESSPDGRDVFSDSDSKDLIKGYIYPLNQANGCNDESDHTSSDEGISSEEADDYQSYXXXXXXXTVCLISLCHSMTVWRSFKTRNIHSWISYHLHRFSLSHSFCGFFLYSYKLKDDEATLSEEEELAKKEDCDPLDEVNISIEHVKLLQKESEIPLEELLARYQKDGYADDDTTELENSPALSVEDVNANMPVDDESADTVEVNRDLSADTMKLTRDQSAETVKGDVTDTKAMANGDNSDVIADAAAAARSAQPTGNTFSTTNVRTKFPFLLKHSLREYQHIGLDWLVAMYEKRLNGILADEMGLGKTIMTISLLAHLACEKGIWGPHLIVVPTSVMLNWETEFLKWCPAFKILTYFGSAKERKQKRQGWMKPNYFHVCITTYRLVIQDSKVFKRKKWKYLILDEAHLIKNWKSQRWQTLLNFNSKRRILLTGTPLQNDLMELWSLMHFLMPHVFQSHQEFKDWFCNPISGMVEGQDKVNKEVIDRLHNV

SEQ ID NO: 8469 - protein, 904 aa, Oryza sativa
  unsure (1)..(904): unsure at all Xaa locations
NPLYLGTEGVSHSPPDAEFGEFPEERDWFLVGRSYVTGLSTNRGRRRLDAGELVHFSFPSLERTYVAEIVRFSTNRAGEIGKLSTEWTKCLVPLVSSSKVKIQGKIVFPTVELRLMQEILLYVSFYIHRSVFTASGNNSSWDLLAPANVDYSTNPLYRLFRLLKLRAFTKADITPEELAAGKRPRNLRNDEDEPMAIVGLENRRTAGQTFPEQGTDEQAISEAALNKIVGTAETYDLEEAEPPSTLVSVLKPYQKEALFWMSQLEKGIDGDQAKKTLHPCWSAYKIVDKRAPAVYVNVFTGEATTQFQSVTQSARGGILADAMGLGKTVMTIALILSNPRGELEQDKRGTRDRDTKAQTSRSSVRGGTLIICPMALLGQWKDELEAHSTPGALSVFVYYGGDRTTDLRFMAQHSVVLTTYGVLQSAHKNQDGSSIFHRIDWYRVVLDEAHTIKSPRTKAARAAYELTSHCRWCLTGTPLQNNLEDLFSLLCFLHVEPWGDASWWNKLIQRPYENGDERGLKLVRAILRPLMLRRTKETKDKMGNPILVLPPANIEIVECEQSEDERDFYEALFRRSKVQFDKFVAQGSVLNNYANILELLLRLRQCCDHPFLVISRADTQKYTDLDELAQRFLDGVQRDSARRSAPPSQAYVEEVVEEIRQGATTECPICLESASDDPVLTPCAHRMCRECLLSSWRTPSGGPCPLCRSPITKSELITLPSQCRFQVDPENNWKDSCKVIKLIKILEGLQEKXXEKSIVFSQFTSFFDLLEVPFNQKGIKFLRFDGKLSQKHREKVLKEFSESKDKLVLLMSLKAGGVGLNLTAASNVFLMDPWWNPAVEEQAIMRIHRIGQKRAVQVRRFIVKDTVEERMQKVQACKQRMISGALTDDEVRSARIEQLKMLFT

SEQ ID NO: 8470 - protein, 350 aa, Oryza sativa
  unsure (1)..(350): unsure at all Xaa locations
ICQQHEFFTNKKGGRHVKFHTLITTYEVILKDKAALSKIKWNYLMVDEAHRLKNCEASLYTTLLEFSTKNKLLITGTPLQNSVEELXXKDIFVERYKNLSSFNETELANLHKELRPHILRRVIKDVEKSLPPKIERILRVDMSPLQKQYYKWILERNFQNLNKGVRGNQVSLLNIVVELKKCCNHPFLFESADHGYGGDSIGDRNKVERIVMSSGKLVLLDKLLVRLRETNHRVLIFSQMVRMLDILAEYLSLRGFQFQRLDGSTRADLRHQAMEHFNAPGSDDFCFLLSTRAGGLGINLATADTVIIFDSDWNPQNDLQVLDHLVIQKLNAEGRLEKKESKKGGSMFDK

SEQ ID NO: 8471 - protein, 783 aa, Oryza sativa
  unsure (1)..(783): unsure at all Xaa locations
XRRESVGLVREPHNPHDANAIRVDNARGEKIGHIGRRAAAALAPLLDAGHVAAAHGIVPKPASXXRLYSLPCQVHLFARPPHAALVAAALAASGIDLIHVDHPEFALSESAIVQEQQTKRSRGDVDRLFSHVGKGGRARIAPMEAPRDVVVSELFEHQKAALGWLVHREESCDLPPFWEEDNDGGFKNVLTNQKTNERPPPLKGGIFADDMGLGKTLTLLSLIGRSKARNVGGKKARGAKRRKVEEAVEEESRTTLVVCPPSVFSSWVTQLEEHTKTGSLKVYLYHGERTKEKKELLKYDIVITTYSTLGQELEQEGSPVKEIEWFRVILDEAHVIKNSAARQTKAVIALNAERRWVVTGTPIQNSSFDLYPLMAFLRFQPFSIKSYWQSLIQLPLGKNNGIGLARLQVLLGAISLRRTKETESGSKSLVSIPPKTVLACYIELSAEEREYYDQMELEGKNKLREFGDRDSILRNYSTVLYFILRLRQLCNDIALCPLDLKSWLPGSGSSLEDVSKNPELLKKLASLVDDGDDFECPICLAPPAKTVITSCTHIYCQTCIMKILKSSSSRCPICRRSLCKEDLFIAPEIKXXPDEDSSVNLDRPLSSKVQALLKLLRRSQSEDPLSKSVIFSQFRKMLILLEGPLKAAGFNILRLDGSMTAKKRSEVIRQFGCVGPDSPTVLLASLKAAGAGVNLTAASTVYLFDPWWNPGVEEQAMDRVHRIGQTKEVKVVRLIVKDSIEERMLELQERKKKLISGAFGRKKGGKEHKEIRVEELQMMMGMK

SEQ ID NO: 8472 - protein, 222 aa, Oryza sativa
  unsure (1)..(222): unsure at all Xaa locations
VFPKYERRLLAAASLLLSADAQGQPPXTPPPNSEXGVTAELKPHQVDGVAWLIRRYQLGVNVLLGDFLGLGKTLQAISLLSYLKIHSISPGPFLVLCPLSVTDGWLSEFNKFCPSLRVIQYVGDKLHRRDLRRMMFQHSTELPFDVMMTTYDIALMDQEFLSQIPWHYVVIDEAQRLKNPSSVLYNVLEQRFIMPRRLLLTGTPIQNNLSGLWALMHFCMPX

SEQ ID NO: 8473 - protein, 772 aa, Oryza sativa
  unsure (1)..(772): unsure at all Xaa locations
KQLPQKHEHVIYCRLSRRQRNLYEDFIXSSETQATLASGNYFGMISIIMQLRKVCNHPDLFEGRPIISSFDMAGINMQISSSVGMVLDKGPFSQVDLSDMNFVFTQNEYNMTSWEEDEVAAIFSPSITLRGSGISRSTNDGQRSNGTNIFEEIHNSLWEERIKEANERAASIAWWNRVRCQKRPVYGTNIREVLTIKHPVSDILENLCHMEFSSSLANLVLSSVDRFKTMLDFIESFTFAIPAARAPAPLFWCNKGKSPVLIEPAYREKCMNEFSPVFSPIRPAIVRRQVYFPDRRLIQFDCGKLQELAILLRRLKSEGHRALIFTQMTKMLDILEEFINLYGYTYLRLDGSTQPEERQTLMQRFNTNPKFFLFILSTRSGGVGINLVGADTVIFYDSDWNPAMDQQAQDRCHRIGQTREVHIYRLISESTIEENILKKANQKRALDDLVIQRGSYNTEFFKKLDPMEFFSGHSSLHAENQQKDCSLSAGPSNGTNLALSNVDVEAAIRQAEDEADYMALKRLEQEEAVDNQEFSEEAAGRLEEDDLVNEDDTKPDEHTNEEHKYQCSDLVKDKHVALSINQLDEEKAITLAGGDGDIDMLADVKQMAAAAAAAGQASSSFENQLRPIDRYAMRFLELWDPIIDKAAINYQVNVEEEEWELERIEKLKEDLEAEIDEDQEPLSYESWDVDFATTAYRQHVEALAQKQVSSYFYSCEQERQAREAAKELEEKNDNSTQRKKSKKNKKKAAKFKSLKKGRLSSESEVMVEETSX

SEQ ID NO: 8474 - protein, 1432 aa, Oryza sativa
  unsure (1)..(1432): unsure at all Xaa locations
MDENRKLSDDMSKKMEPIHSNGEAGEDKTIIIEPESDANKLEVETDARHGICEAHKAHEYGTMENDLHEEASTTDDDSENDSYEYLLRESDNEQTSESDAGEGDNEAPLTDEEVETLITEFLDAESKLESAVSTEMKQYKKEWESELDDLETHIAVLLEQLDAAGVELPSLYKSIESQVPNVCETEAWKNRAHWAGYQVPEEANKSIRKADEYLQSCRPVRRKHGRLLEEGASGFLAGKIPVGDDGSAQCHEKSWNAFNELTKSKEYAESSFGSSNWASVYLASTPQEAAALGLQFPGVDEVEEIAEVEGAVSDIKGVDEIELSEVQRRKYRKVPEEDDAKMTKRLQRHLKERRTRHLHKXCCELPPKKLKTYXNGVSVELAKRTREDDVEFDNKRSKTVIIESDDDMQTDSKPDSAPSENADEIIDLDIFPSQSPKLGDKVRPKPFKCTICTEMLNVPEVHRHPVLDVIICGSCRFLVIEKNRLEDPVSGGYCTWCVKSEQLQSCSSCKLLFCRNCLSKNFGEEGLSEARVAGWQCCCCLPSQLEHLISDCDKALGGVESSDPENDFAELSVLESNEIFSKHKMKKRIRRIMDDEELGEETKLKIAMEKARQEHLKSMQEQSASKLKSNNIGISLEAPSEVSEYVGDGHIVNLAREEDEAPVRIPSSISAKLKPHQVSGIRFMWENVIQSVKKVKSGDKGFGCILAHNMGLGKTFQVITFLYTVMRCIQLGLRTALIVTPVNVLHNWKKEFIKWCPAELKPLRVYMLEDVPRCRLIILLKKWRIKGGVLLIGYSSFRNLSLGRSARDKTVANEITNALQCGPDILVCDEAHIIKNRRADTTQALKQVRTQRRIALTGSPLQNNLMEYYCMVDFVREGYLGSSHEFRNRFQNPIENGQHTNSTSDDVKIMNQRSHILYEQLKGFVQRMDMNVVKNDLPEKKVFVVTVKLSQLQRKLYRRFLDVNGFSSSAASEKSFQRSGFFAKYQTLALIWNHPGLLQMAKQKGNLRQEDVESFLMDESSSDDNIENYLPNGEKLRSRNDQLSKKSSDVESNWWENLLDENAYKEADYSGKMVLLLDILSSCSELGDKALVFSQSLSTLDLVEFYLSKLQVNGKEGKYWKQGKDWYRIDGSTPSSERQNLVERFNDPENIRVKCTLISTRAGSLGINLHSANRVILLDGSWNPTHDLQAIYRVWRYGQTKPVYAYRLMAHATMEEKIYKRQVTKEGLAARVVDRQQVSRTISKEEMLHLFEFGDEELLEQSGSTMNGHSKVGTEKPPTPNSSETTEHLPLDRLMVNLLHDHSRRWIASYHEHETLLQENEEERLTKEEQDMAWLSYNKLLEVAPRKATHDAERKPSTVPTESSLIQPPKATSRSRQPQQPKITSNNQKKCNNLSHLLTLRSQGTKPGCSTSCKECGQDISWETLNRDGRSR

SEQ ID NO: 8475 - protein, 1492 aa, Oryza sativa
MDENRKLSDDMSKKMEPIHSNGEAGEDKTIIIEPESDANKLEVETDARHGICEAHKAHEYGTMENDLHEEASTTDDDSENDSYEYLLRESDNEQTSESDAGEGDNEAPLTDEEVETLITEFLDAESKAAQAQESLEKESLEKIESEVRLELSESLQGNELESAVSTEMKQYKKEWESELDDLETHIAVLLEQLDAAGVELPSLYKSIESQVPNVCETEAWKNRAHWAGYQVPEEANKSIRKADEYLQSCRPVRRKHGRLLEEGASGFLAGKIPVGDDGSAQCHEKSWNAFNELTKSKEYAESSFGSSNWASVYLASTPQEAAALGLQFPGVDEVEEIAEVEGAVSDIKGVDEIELSEVQRRKYRKVPEEDDAKMTKRLQRHLKERRTRHLHKENIGLASSSNGCCELPPKKLKTYENGVSVELAKRTREDDVEFDNKRSKTVIIESDDDMQTDSKPDSAPSENADEIIDLDIFPSQSPKLGDKVRPKPFKCTICTEMLNVPEVHRHPVLDVIICGSCRFLVIEKNRLEDPVSGGYCTWCVKSEQLQSCSSCKLLFCRNCLSKNFGEEGLSEARVAGWQCCCCLPSQLEHLISDCDKALGGVESSDPENDFAELSVLESNEIFSKHKMKKRIRRIMDDEELGEETKLKIAMEKARQEHLKSMQEQSASKLKSNNIGISLEAPSEVSEYVGDGHIVNLAREEDEAPVRIPSSISAKLKPHQVSGIRFMWENVIQSVKKVKSGDKGFGCILAHNMGLGKTFQVITFLYTVMRCIQLGLRTALIVTPVNVLHNWKKEFIKWCPAELKPLRVYMLEDVPRCRANIQYLLKKWRIKGGVLLIGYSSFRNLSLGRSARDKTVANEITNALQMWVLIQSIYICHNQCGPDILVCDEAHIIKNRRADTTQALKQVRTQRRIALTGSPLQNNLMEYYCMVDFVREGYLGSSHEFRNRFQNPIENGQHTNSTSDDVKIMNQRSHILYEQLKGFVQRMDMNVVKNDLPEKKVFVVTVKLSQLQRKLYRRFLDVNGFSSSAASEKSFQRSGFFAKYQTLALIWNHPGLLQMAKQKGNLRQEDVESFLMDESSSDDNIENYLPNGEKLRSRNDQLSKKSSDVVNEESNWWENLLDENAYKEADYSGKMVLLLDILSSCSELGDKALVFSQSLSTLDLVEFYLSKLQVNGKEGKYWKQGKDWYRIDGSTPSSERQNLVERFNDPENIRVKCTLISTRAGSLGINLHSANRVILLDGSWNPTHDLQAIYRVWRYGQTKPVYAYRLMAHATMEEKIYKRQVTKEGLAARVVDRQQVSRTISKEEMLHLFEFGDEELLEQSGSTMNGHSKVGTEKPPTPNSSETTEHLPLDRLMVNLLHDHSRWIASYHEHETLLQENEEERLTKEEQDMAWLSYNKLLEVAPRKATHDAERKPSTVPTESSLIQPPKATSRSRQPQQPKITSNNQKKCNNLSHLLTLRSQGTKPGCSTSCKECGQDISWETLNRDGRSR

SEQ ID NO: 8476 - protein, 524 aa, Oryza sativa
  unsure (1)..(524): unsure at all Xaa locations
XIIYGPLIFFMQAIAVASCLHDAWPVLVISPSSLRLHWASVSTCXLNFLSFISTVTLCMREVXPFCFAVVXQMIQHWLNIPTEDILVVLPQTGGSNKAGYRLVYSNTKGDFNLDGVFNVISYDVVPKIKDMLLDLDFKIVIADESHFLKNAQAKRTMHSLPVLQKAKYVVLLSGTPALSRPIELFTQLQALYPTVYKNVNEYGNRYCKGVSTSSIESLLYELYQGFFGLYQGASNHEELHNLMKATVMIRRLKKDVLSQLPVKRRQQAFLDLSEKEMRHIRALFHELETVKIKIQSCDSQETMDSLKFAQKNLINKIYNDSAEAKIPAVLDYLGTIIEAECKFLIFAHHQSMLEAIHQHLLKKKVKCIRIDGQTPVPVRQTLVTDFQNKDDIKAAVLSIKAGGVGLTLTAASTVIFAELSWTPGDLIQAEDRAHRIGQVSSVNIYYLLANDTVDDIIWDVVQGKLENLGQMLDGQESWMCPRATLGPALPSRRRSTPTSSDAAIPQKLISPSSRTLGSDISQGF

SEQ ID NO: 8477 - protein, 371 aa, Oryza sativa
  unsure (1)..(371): unsure at all Xaa locations
XFFMMSLLQNLVSEGHNVLIFSQTRKMLNIIQEAIILEGYKFLRIDGTTKISERERIVKDFQEGPGAPIFLLTTQVGGLGLTLTKAARVIVVDPAWNPSTDNQSVDRAYRIGQMKDVIVYRLMTSGTIEEKIYKLQVFKGALFRTATEHKEQTRYFSKRDIQELFSLPEQGFDVSLTQKQLQEEHGQQLVMDDSLRKHIQFLEQQGIAGVSHHSLLFSKTAILPTLNDNDGLDSRRAMPMAKHYYKGASSDYVANGAAYAMKPKEFXXARTYSPNSTSTESPEEIKAKINRLSQTLANTVLVAKLPDRGDKIRRQINELDEKLTVIESSPEPLERKGPTEVICLDDLSVXCRACLFLLLKFHACMLVVTKA

SEQ ID NO: 8478 - protein, 322 aa, Oryza sativa
  unsure (1)..(322): unsure at all Xaa locations
TRLNNFHKQMDSTDKSDDDYSAIRPEWTTVDRILATRSSTGEREYYVKWKELTYDECTWENDSDIAVFQPQIERFNEIQSRRKKSTDXXCKSVTREIRQYKESPKFLSGGMLHLKHEYEGTLHPYQLEGLNFLRYSWYHNKRVILGDEMGLGKTIQSIAFLGSLSVDKLGPHLVVAPLSTLRNWEREFATWAPQMNVVMYFGSAASREIIRKYEFYYPKEKPKKLKKKKSSPSNEDKKQSRIKFDVLLTSYEMINMDSTVLKTIEWECMIVDEGHRLKNKDSKLFGQLKEYHTKHRVLLTGTPVQSSFEVSILLXTFRAAGX

SEQ ID NO: 8479 - protein, 483 aa, Oryza sativa
MAKPVKYDEEEEEVSSSGEEEEEQSDGAGSGSGEEEDEEEEEAPAAAAGEAAGGEEEEVDEEEIEAVTTGAGADEEEEESGAAAAAPGEGDEESQSTEDDEAVVGEDDDADEAEGGAVVGKREKARLKEMQKLKKQKIQEILDTQNAAVDADMISVIVGLFIWGRHASKMTEEEEDEEYLKEEEDALAGSGGTRLLSQPSCIKGKMRDYQLAGLNWLIRLYENGINGILADEMNNLHELWSLLNFLLPEIFSSAETFDEWFQISGENDQQEVVQQLHKMQKQYYRALLQKDLEVINAGEPGPPYTTGEHLVENAGKMVLLDKLLPKLKDRDSRVLIFSQMTRLLDILEDYLMYRGYQYCRIDGNTGGEDRDASIEAFNKPGSEKFVFLLSTRAGGLGINLATADVVVLYDSDWNPQADLQAQDRAHRIGQKKEVQVFRFCTEYTIEEKVIERAYKKLALDALVIQQGRLAEQKTVNKDDLLQM

SEQ ID NO: 8480 - protein, 283 aa, Oryza sativa
  unsure (1)..(283): unsure at all Xaa locations
PGLQDLIENAGKMVLLDKLLPKLKERDARVLIFSQMTRLLDILEDYLMYKGYQYCRIDGNTGGEDRDASIEAFNKPGSEKFVFLLSTRAGGLGINLATADVVILYDSDWNPQVDLQAQDRAHRIGQKKEVQVFRFCTEYTIEEKVIERAYKKLALDALVIQQGRLAEQKAVNKDELLQMVRFGAEMVFSSKDSTITDEDIDRIIAKGEEATAQLDAKMKKFTEDAIKFKMDDTAELYDFDDDKDENKLDFKKLVTDNWIEPTSRRERKRNYSESDYFKQALRX

SEQ ID NO: 8481 - protein, 525 aa, Oryza sativa
  unsure (1)..(525): unsure at all Xaa locations
MALGLFASKLPEGSWQVVLGPLASDLMSLSGVQRQVASMVIVSWFKDLRKSDPAAVGLPSKLNPSAEDAQFLEQLLDNSQIDDYKLSIDLSVELRRYQQEGINWLAFLRRFKLHGILCDDMGLGKTLQASAIVAADIAESRARNDEQDPKSLIICPSTLVAHWEYEIEKYIDSSIMKPLQYIGSSQDRIILRSQFDKFNFQATYGKPLLAAKDPKCSAKDAEAGILAMEALHKQALQYLLKLCSHPLLVTGESPPDYLVDLLKEIGMGTGDELHDLHHSPKLVALQEILQECGIGSEISSPDASAAIGQHRVLIFAQHKALLDIIEKDLFQSHMRSVTYLRLDGSVEPEKRFEIVKAFNSDPTIDVLLLTTHVGGLGLNLTSADTLVFMEHDWNPMKDXXQAMDRAHRLGQRKVVNVHRLIMRGTLEEKVMSLQRFKVSVANAVINAENASLKTMNTDQLLDLFASTPASRKASGSSGGDQSKDSKGKSGGKGLKSILNGLDELWDQSQYADEYDLNQFLAKLNG

SEQ ID NO: 8482 - protein, 304 aa, Oryza sativa
  unsure (1)..(304): unsure at all Xaa locations
MDSTDKSDDDYSAIRPEWTTVDRILATRKSSTGEREYYVKWKELTYDECTWENDSDIAVFQPQIERFNEIQSRRKKSTDXXCKSVTREIRQYKESPKFLSGGTLHPYQLEGLNFLRYSWYHNKRVILGDEMGLGKTIQSIAFLGSLSVDKLGPHLVVAPLSTLRNWEREFATWAPQMNVVMYFGSAASREIIRKYEFYYPKEKPKKLKKKKSSPSNEDKKQSRIKFDVLLTSYEMINMDSTVLKTIEWECMIVDEGHRLKNKDSKLFGQLKEYHTKHRVLLTGTPVQSSFEVSILLXTFRAAGX

SEQ ID NO: 8483 - protein, 735 aa, Oryza sativa
  unsure (1)..(735): unsure at all Xaa locations
XGSRRAPRPPPLVFSFGDDDPSPTDRSEQDAALDMLWADLDFTLESENIGTYYDDEGQEDSLLDHALAPITPCSRGKHEFIIDEQIGIRCKYCSLVNLEIRFIXTIAGLQFCRETCMAKQLLFEXXALMCPDLYEQTGTGDGQSQDFHINGTVWDLIPGVITDMYQHQREAFEFMWTNLVGDIRLNEIKHGAKPDVVGGCVICHAPGTGKTRLAIVFIQTYMKVFPDCRPVIIAPRGMLFAWEQEFKKWNVNVPFHIMNTTDYSGKEDRDICRLIKKEHRTEKLTRLVKLFSWNRGHGVLGISYGLYMKLTSXKRLAALEKTKXRTILLENPGLLVLDEGHTPRNERSVIWKTLGKVKTEKRIILSGTPFQNNFLELYNILCLVRPRFGEMFLTKTRVGRRHCVSKKQRDNLTSNVTDDNAEKVRSILKPFVHIHNGTILRTLPGLRECVIVLKPLPLQKSIIRKVENVGSGNNFEHEYVISLASTHPSLVNAINMTEEEASLIDKPMLXXRLRSNPYEGVKTRFVMEVVRLCEALKEKVLIFSQFIQPLELIKEHLRKIFKWREGKEILQMDGKILPRYRQNSIEVFNNPDSDARVLLASTRACCEGISLTGASRVVLLDVVWNPAVGRQAISRAFRIGQKKFVYTYNLITYGTGEGDKYDRQAEKDHLSKLVFSTEDEFSNVRNMLSKAVSEDKVLEEMTSHDQLKGMFLKIHYPPTESNIVFTYNQIAPELS

SEQ ID NO: 8484 - protein, 246 aa, Oryza sativa
  unsure (1)..(246): unsure at all Xaa locations
GLTSAWFDFSAKGGEEEQEDSEEKRKVDVVSKLHAILRPFLLRRMKEDVEHMLPRKKEIIIYANMTDHQKQIQNHLVEQTFDQYLHENVLRKPGIKAKLNNLLIQLRKNCNXHPDLXLESAYDSSXXLYPXPVEKLLEQCGKFQLLNRLLSLLLARKHKVLIFSQWTKVLDIIEYYLETKGLQVCRIDGSVKLEERRRQIAEFNDLNSSMNIFILSTRAGGLGINLTSADTCILYDSDWNPQMDLX

SEQ ID NO: 8485 - protein, 362 aa, Oryza sativa
  unsure (1)..(362): unsure at all Xaa locations
MEAPRDVVVSELFEHQKAALGWLVHREESCDLPPFWEEDNDGGFKNVLTNQKTNERPPPLKGGIFADDMGLGKTLTLLSLIGRSKARNVGGKKARGAKRRKVEEAVEEESRTTLVVCPPSVFSSWVTQLEEHTKTGSLKVYLYHGERTKEKKELLKYDIVITTYSTLGQELEQEGSPVKEIEWFRVILDEAHVIKNSAARQTKAVIALNAERRWVVTGTPIQNSSFDLYPLMAFLRFQPFSIKSYWQSLIQLPLGKNNGIGLARLQSLLEEREYYDQMELEGKNKLREFGDRDSILRNYSTVLYFILRLRQLCNDIALCPLDLKSWLPGSGSSLEEIKHPDEXIPQSILIALSSKEDADLAX

SEQ ID NO: 8486 - protein, 593 aa, Oryza sativa
  unsure (1)..(593): unsure at all Xaa locations
MAASVEAAAAAVVAPPASVGGDEVVVGGGGGGASEQARTLIGALNLLSRNLPLPPAVLHAVSSIYHGGDAWEGEGEEGGEEEDRADASPGADEGVTLIQELEDAVLKNQGPYMSYSELTALKEDRFNTSIQHRLTELEALCQWNDHTYVRVNRLFYAEQKTDITHWENAKMESLLDLQKKVRTDISAEYWLHKKCAHPDRQLFDWGMMRIRYPFTMYGIGDSFSMDADDINRKKRFSEDSLFGIWEQQRISRLEEEEKNQAEIRKRKFFSEILNAAREYQLQVPASYKRKKQRNDGVLAWHVRARQRINRMEKSRLQVLKAGDQEAYLRMVEESKNERLKLLLGKTNELLEGIGKAVQRQKDAEHVSRPDGSELPKGSESDDCSQISGLKVESPDEESPSDVDADHHSSADHSXXFNAGHRLDSTVHSIEEKVTEQPSALEGGXELRPYQLEGLQWMLSLFNNNLNGILADEMGLGKTIQTIALIAYLLERKEVTGPHFIIAPKAVLPNWSNEFKTWAPSIGTILYDGRPDDRKALREKNFAQRPLTVLLTPYDLVLGDLKFLKKVHWHYLIVDEGHRLKNHECALARTLVSX

SEQ ID NO: 8487 - protein, 822 aa, Oryza sativa
  unsure (1)..(822): unsure at all Xaa locations
MVFKQVLPMESRCLHLQCQQVVSLHMMDRGLNSHRIFPPSVPYNNSVNNFGVNGLGTQSHLNIEKRLFGRDERVVYDEALKQISQETTEENLPEGVMSVSLLKHQRIALAWMVSRENSSHCSGGILADDQGLGKTISTIALIQKERVEQSKFMSADVGSMKSVANLDEDDEVVIVMDKKQLKGESVNMLQDSTLFKKARVRPSPSSTLRSANRSTAGTLVVCPASVLRQWASELAAKVTESSKLSVLVYHGGSRTKDPTELTKYDVVVTTYTIVANEVPKQNXXDEDMEEKNSETYGLCPAFSIGNKRKXXDSEPKKKKKPKNSDADLDGGPLARVRWFRVVLDEAQTIKNHNTQVARACCGLRAKRRWCLSGTPIQNTIDDLYSYFRFLKYEPYSVYGSFRSMIKYQISRDATRGYKKLQAVLKIVLLRRTKETLIDGEPIIKLPPKTIQLSKIDFSKEERTFYMMLEEGSREKFKEYASAGTIRENFANILVLLLRLRQACDHPLLLKGKEKDLIDTGSVEVANKLPKETVINLLGQLEGDYAICSRCSDPPEDVVVATCGHVFCYQCVHKSLTSDENVCPSPSCGKKLSAQTVFSPGVLRFCIADKLESGATTSSSVEADVHQSGSYISSKIRATTDILNSIVNTPXXLTWSDTMESSPSEVAPSKAIVFSQWTGLLDLLELSLDSSRIKFRRLDGAMSLNLREAAVREFNTDPEVRVMLMSLKAGNLGLNMVAACHVIMIDPWWNPYAENQAVDRAHRIGQTRPVTVSRLTIKDTVEDRILALQEKKRKMVQSAFGEDKPGGSATRLPIDDLQYLFGI

SEQ ID NO: 8488 - protein, 782 aa, Oryza sativa
  unsure (1)..(782): unsure at all Xaa locations
XWLWVGRALLSHLAPEALRRLXESSGKMELLDKMMVKLKEQGHRVLIYSQFXQHMLDLLEDYLSYRKWSYERIDGKIGGAERQIRIDRFNAKNSTRFCFLLSTRAGGLGINLATADTVIIYDSDWNPHADLQAMARAHRLGQTSKVMIYRLVSRGTIEERMMQLTKKKMVLEHLVVGRLTKGTNIVQEELDDIIRHGSKELFDDENDEAGKSCQIHYDDAAIDRLLDRDQADGEEXXVEDEEEDEFLKGFKVANFEYIDEAKALAAKEEEARKKAEAEAANSDRANFWDKLLKDRYDVQKVEEHTTMGKGKRSRKQMAAADEDDITGLHDMSSEDDDYSYDDDVSDNDTSLQSGLAGRRGPYSKKKQRNVDSLPFMEGEGRALRVYGFNQIQRTQFLQTLMRYGFQNYDWKEFTPRLKGKSVEEIQRYAELVMIHLLEDINXXSGYYADGVPKEMRTDETLVRLANISLVEEKVAAMEQGKITKLFPSYLLYEFPSLVGGRVWKAEQDLLLLKALIKHGYARWQYISDDRDNGIFEAARQELRLPTANELISSHSNNETNGNLESTQEGQSNPTSMIHYRDTQRKIVEFIRKRYHLLERCLNLEYAVIKTKTPVPDDLAEQDFPGGHRPAVPDXXSEMLRELPVLEPISKEVAPEGTTDQSQVSHLYNKMCFVLEDSAVPALNSHFGDKAASSGLANSLHKFEAVCEDVSRILRSHENGTTPKEEVMLDASSKETTSPKDPATEVPSSASKEATPPVQDPVIEAVKEEPPTVKAEDKMEIDS

SEQ ID NO: 8489 - protein, 742 aa, Oryza sativa
  unsure (1)..(742): unsure at all Xaa locations
XLPKPHHTLPCSLLCSSLLKXRIALAWMVSRENSSHCSGGILADDQGLGKTISTIALIQKERVEQSKFMSADVGSMKSVANLDEDDEVVIVMDKKQLKGESVNMLQDSTLFKKARVRPSPSSTLRSANRSTAGTLVVCPASVLRQWASELAAKVTESSKLSVLVYHGGSRTKDPTELTKYDVVVTTYTIVANEVPKQNXXDEDMEEKNSETYGLCPAFSIGNKRKXXDSEPKKKKKPKNSDADLDGGPLARVRWFRVVLDEAQTIKNHNTQVARACCGLRAKRRWCLSGTPIQNTIDDLYSYFRFLKYEPYSVYGSFRSMIKYQISRDATRGYKKLQAVLKIVLLRRTKETLIDGEPIIKLPPKTIQLSKIDFSKEERTFYMMLEEGSREKFKEYASAGTIRENFANILVLLLRLRQACDHPLLLKGKEKDLIDTGSVEVANKLPKETVINLLGQLEGDYAICVLQDPPEDVVVATCGHVFCYQCVHKSLTSDENVCPSPSCGKKLSAQTVFSPGVLRFCIADKLESGATTSSSVEADVHQSGSYISSKIRATTDILNSIVNTPXXLTWSDTMESSPSEVAPSKAIVFSQWTGLLDLLELSLDSSRIKFRRLDGAMSLNLREAAVREFNTDPEVRVMLMSLKAGNLGLNMVAACHVIMIDPWWNPYAEDQAVDRAHRIGQTRPVTVSRLTIKDTVEDRILALQEKKRKMVQSAFGEDKPGGSATRLTIDDLQYLFGIFFFAL

SEQ ID NO: 8490 - protein, 440 aa, Oryza sativa
  unsure (1)..(440): unsure at all Xaa locations
PRFXCRRRDDGYEFLVKWKGLDYCEATWEPCCTDGVQQAVSMLVRRHKNASKRVNISQTCLDGSKIEEVHXXGALYDYQLQGLQWLIDNFKTRRSVILADEMGLGKTVQVVCFLYHIIKESLTASPALILAPKSILLQWEKEFCQWASDLNVIVYQGDRDSRKCIQVHEMYSSDGKPLFDALVTSYEFVQIDKAVLQKFKWSTIVIDEAHRMKKLDCNLAACLKRYCSEFRLLXXTMTRMLXXILEDFLCSLGYKYARIDGQTSLSARQESIEEYKNIDSETFIFLMSTRAGGMGVDLPGADRVIIYDPDFNPFMDLQAQSRAHRIGQTRPVVVYQLITKCSVEEKILQKSKQKLAIENMLISSKKPSADELQSILLHGAKTIVDRKISATSIHYDNEAIENLLKLDPSTGEKCSSDDNDETDSALQLQIVTVPDIDADX

SEQ ID NO: 8491 - protein, 379 aa, Oryza sativa
KVLEEVRTKKRIILSGTPFQKSFLELSNVLYLIRPKFARHFASKSFKKIGLEDYWTSLTLNNITEKKIDEIRQILDPIVHIHNGDILQKSLPGLRESVVILNPLPHQKEIITAMENTVTMGTLDAEYKISLASIHPFLVTCAKLSEKETSSVDVSLLKSLRPNPCVGVKTKFVLEIVRLCEAMKERVLVFSQYLEPLSLIMDQLSKMFNWTEGEEILLMSGNVLVQNREALMEAFNDMKSNAKVMLASTKACCEGITLIGASRVVLLDVVWNPSVGRQAIGRAYRIGQEKIVYTYNLITEGTKEKDKYDRQAKKDHMSKLLFSKEPHAAGFNLSQEVIFNDKILEAMTSHRELKDMFVNSILTNSKLTAKSGNLILMRL

SEQ ID NO: 8492 - protein, 200 aa, Oryza sativa
  unsure (1)..(200): unsure at all Xaa locations
DSAELVPNSARXESRARNDEQDPKSLIICPSTLVAHWEYEIEKYIDSSIMKPLQYIGSSQDRIILRSQFDKFNVIITSYDIIRKDIDFLENVFWNYCVLDEGHIIKNSRSXITSAVKHLKXQHRLXXSGXPIXNNXLEXWXLFDFLMPGFLGDXKNXXPSYLLGKPXXLXXXKNXKMXXPKGDXGNLXLPCXDESFFPXX

SEQ ID NO: 8493 - protein, 1081 aa, Oryza sativa
MEEAAAAAADFDGGFGGAGEDNLSMPLGDFMAFLDNEDWKEQQHEWRWAINGHQAVGIGEGQTGSSLVGNQGLEMPVDSTSSENAFQNHEDFLENSRNGNPEMHLPMDALNHAKTVDEEIVPPYEDYTNGLYYDSGCDMFAEQSGLSEVKCEGTGPMLGNSEQEGNHFTSVPMFDHSAVIPDIPYTELNIGDVPGSMQNGNGSCLTVQGEYLQGEYQEYPQPDYGSFDMANEIVLHDLPQNNQSYELEQLPQNICESSSMQVGSPDQYCDDTSLSDYYMDDVSSIESMSSEQNRSEDICFRRLQHNFQQSVCANPNLPRFGGRYRPHEERMTLRLALQFVLAVPLLRHQKIALSWMVQKERNGSSCSGGILADDQGLGKTVSTISLILTERSPVPSSAVKQEPCEAVTLDDDDEDDDAEPHLKKPALAHLADTCKPEATSSTIKTENPIANVKARPAAGTLVVCPTSVLRQWADELRNKVTSKANLTFLVYHGSNRTKDPNDLTKYDVVLTTYSIVSMEVPKQSSPDSDDEEKGKPDRYGAPVGSSGSKKRKTSSSKKNKSGSTPESKLPEKPLAKVAWFRVILDEAQSIKNYRTQVARACWGLRAKRRWCLSGTPIQNAVEDLYSYFRFLRYDPYAEYKKFCFMIKTPISRNPITGYKKLQVVLKTVMLRRTKATMLDGKPIISLPPKTVSLKTVDFTSEERAFYNTLEAESREQFKEYAAAGTVKQNYVNILLMLLRLRQACDHPHLVRGHESTSSWMSSLEMAKKLPVERQQSLLVCLQSCSAICALCNDAPEDAVVTICGHVFCNQCILEQLTGDDSVCPVSNCRVRLNSTSLFSRGTLECALSRSTCEFLSDDSCEDMVQGKQPRFDSSYASSKVRAALDILLSLPKLDLTHMSDDKNKIVHPDKINGNSTPSEYAGTKITEKAIVFSQWTRMLDLVEVHLKSSHLSYRRLDGTMSVAARDRAVKDFNTNPEVSVMIMSLKAASLGLNMVAACHVLLLDLWWNPTTEDQAVDRAHRIGQTRPVTVSRLTIKDTVEDRILALQEKKREMVASAFGEDKSGAHQTRLTVEDLNYLFMV

SEQ ID NO: 8494 - protein, 770 aa, Oryza sativa
  unsure (1)..(770): unsure at all Xaa locations
MCCHPKSRRLQHNFQQSVCANPNLPRFGGRYRPHEERMTLRLALQDILAVPLLRHQKIALSWMVQKERNGSSCSGGILADDQGLGKTVSTISLILTERSPVPSSAVKQEPCEAVTLDDDDEDDDAEPHLKKPALAHLADTCKPEATSSTIKTENPIANVKARPAAGTLVVCPTSVLRQWADELRNKVTSKANLTFLVYHGSNRTKDPNDLTKYDVVLTTYSIVSMEVPKQSSPDSDDEEKGKPDRYGAPVGSSGSKKRKTSSSKKNKSGSTPESKLPEKPLAKVAWFRVILDEAQSIKNYRTQVARACWGLRAKRRWCLSGTPIQNAVEDLYSYFRFLRYDPYAEYKKFCFMIKTPISRNPITGYKKLQVVLKTVMLRRTKGQMLDGKPIISLPPKTVSLKTVDFTSEERAFYNTLEAESREQFKEYAAAGTVKQNYVNILLMLLRLRQACDHPHLVRGHESTSSWMSSLEMAKKXHPLLIHXSVHHKLCXDAPEDAVVTICGHVFCNQCILEQLTGDDSVCPVSNCRVRLNSTSLFSRGTLECALSRSTCEFLSDDSCEDMSYASSKVRAALDILLSLPKLDLTHMSDDKNKIVHPDKINGNSTPSEYAGTKITEKAIVFSQWTRMLDLVEVHLKSSHLSYRRLDGTMSVAARDRAVKDFNTNPEVSVMIMSLKAASLGLNMVAACHVLLLDLWWNPTTEDQAVDRAHRIGQTRPVTVSRLTIKDTVEDRILALQEKKREMVASAFGEDKSGAHQTRLTVEDLNYLFMV

SEQ ID NO: 8495 - protein, 1082 aa, Oryza sativa; identical to SEQ ID NO: 8436

SEQ ID NO: 8496 - protein, 129 aa, Oryza sativa
  unsure (1)..(129): unsure at all Xaa locations
XRRLDGTMSVAARDRAVKDFNTNPEVSVMIMSLKAASLGLNMVAACHVLLLDLWWNPTTEDQAVDRAHRIGQTRPVTVSRLTIKDTVEDRILALQEKKREMVASAFGEDKSGAHQTRLTVEDLNYLFMV

SEQ ID NO: 8497 - protein, 428 aa, Oryza sativa
  unsure (1)..(428): unsure at all Xaa locations
YKYYKSXCHDVKSSTLLNFLLSWRLEQVCVEYCCYDPTKFPHASIEPLSHIKCYKVDVNLXVPFXLLEISQVXFLNADNCDPFQAYAAAGTLKQNYANILLMLLRLRQACDHPLLVKGHQSEYKGDGSIEMAKQLPKEMIINLLAKLEVGEFCSVCSDVPEXDAVVTMCGHVFCYQCIYERITTDENMCPSPNCGNTLSTDSVFSSGALRICMSGVSSSHASGSSSYDESAFSQTSYISSKIQAAIDILDSIINTYALTDSDTVESNPSRVVPVKAIVFSQWTGMLDLLGLSLNSNLIQYRRLDGTMSLNSRDKAVKDCNTDSEVRVMIMSLKAGNLGLNMVAACHVILLDLWWNPYAEDQAIDRAHRIGQTRPVTVSRLTIKDTVEDRILALQEKERPMVSSAFGEDKSGGHATRLTVDVLKYLFRF

SEQ ID NO: 8498 - protein, 556 aa, Triticum aestivum
  unsure (1)..(556): unsure at all Xaa locations
LILSCRYLIRRRLLLTGTPSQNSLQELWSLLNFILPNIFNSSGNFEEWFNAPFAXXDVSINDEEELLIIHRLHQVLRPFLLRRKKDEVEKYLPSKTQVILKCDFSAWQKAYYEQVASKGKVALGSGLKPKAVANLSMQLRKCCNHPYLFVEQYNMYQREEIVRASGKFELLDRLLPKLHRAGHRVLLFSQMTRLLNILEVYLQMYNFKYMRLDGSTKTEERGKLLADFNKKDSEYFIFLLSTRAGGLGLNLQTADTVIIFDSDWNPQMDQQAEDRAHRIGQKNEVRVFVLVSVGSIEEEILDRAKQKMGIDAKVIQAGLFNNTSTAQDRKALLQEILKRGTSTLGTDIPSEREINRLAARTEEEFWLFEKMDEERRRRENYKSRLMQGPEVPEWVYISETLAEKLLAEEAKNPVINTKRRRKEVVYSDSYVDQWMKSDEVYEDIPKMTPRAKRSAYLSDIQEVDLHDRASSNILTAPMAQATQPGHQRKEERVSSYSKDENEDDNDEDEVTAGGLQQGGSFTWNTLRRKRSSHSTNPSSDPKGRSAFXCPSDRSAI

SEQ ID NO: 8499 - protein, 440 aa, Triticum aestivum
  unsure (1)..(440): unsure at all Xaa locations
XDLAAKNGDVFFITEVMAKEGEEMDQGRIKLEEEEEARKREEAARQAFDPKAKFSKLDELLTQTQLYSEFLLEKMEQITDVKPTAVEIKDEEEPVEEQKKGRGRKRKAENSKPQYNDKKAKTAVVAMLSRSREDRSADDGTLTEEEKWEREQANLVPLLTGGKLKSYQIKGVKWLISLWQNGLNGILADQMGLGKTIQTIAFLAHLKGNGLHGPYMVIAPLSTLSNWLNELTRFAPSINGLIYHGDKVARTELRRKHMPKIVGPDFPTISASYEMAMFDAKFLANYKWKYVVVDEGHRLKNTKCKLXLRELRRIPMDNKLLLTGTPLQNNLAXELWSLLNFILPDIFSSHEDFESWFDFSGKADEELEEETDEKKRGLVVSKLHSILRPFLLRRLNEDVEHILSRKKEIIIYANMTEHQKQIQNHLIEQTFDDYLHESAX

SEQ ID NO: 8500 - protein, 325 aa, Triticum aestivum
  unsure (1)..(325): unsure at all Xaa locations
RGITGPHMVVAPKSTLGNWKKEIQRFCPVLRAVKFLGNPEERNHIRENLLAPGKFDVCVTSFEMAIKEKTALRRFSWRYIIIDEAHRIKNENSLLSKTMRLFSTNYRLLITGTPLQNNLHELWSLLNFLLPEIFSSAETFDEWFQISGENDQHEVVQQLHKVLRPFLLRRLKSDVEKGLPPKKETILKVGMSEMQKQYYRALLQKDLEVINAGGERKRLLNIAMQLRKCCNHPYLFQGAEPGPPYTTGDHLIENAGKMVLLDKLLPKLKARDSRVLIFSQMTRLLDILEDYLMYRGYQYCRIDGNTGGDDRDASIEAFNKPRREX

SEQ ID NO: 8501 - protein, 276 aa, Triticum aestivum
  unsure (1)..(276): unsure at all Xaa locations
XRIKNENSLLSKTMRLFSTNYRLLITGTPLQNNLHELWSLLNFLLPEIFSSAETFDEWFQITGETDQQEVVQQLHKVLRPFLLRRLKSDVEKGLPPKKEIILKGGMSQMQKQYYRGLLQKDLEVINAGGERKRLLNIAMQLRKCCNHPYLFQGAEPGPPYTTGDHLIETAGKMVLLDKLLPKLKDRDSRVLIFSQMTRLLDILEDYLIYRGYQFCRIDGSTGGQDRDASIDAFNKPGSEKFVFLLSTRAGGLGINLATADVVILYDSDWNPQADLX

SEQ ID NO: 8502 - protein, 192 aa, Triticum aestivum
  unsure (1)..(192): unsure at all Xaa locations
XHALRPPLXXGGTLIVCPMALLGQWKDELEAHSTPGAISVFVYYGGDRTGDLKLMAEHTVVLTTYGVLQSAHKADGSSAFHRIDWYRIVLDEAHTIKSPRTKAAQAAYMLSSQCRWCLTGTPLQNNLEDLYSLLCFLCVEPWCNSNWWQKLIQRPYENGDERGLKLVKAILRPXMLRRTKETKDKMGKPILX

SEQ ID NO: 8503 - protein, 214 aa, Triticum aestivum
  unsure (1)..(214): unsure at all Xaa locations
XGPHLIIVPNAVLVNWKSELLNWLPSASCIFYVGAKDQRQKLFSQEVFVKFNVLVTTYEFVMFDRSKLSRIDWKYIIIDEAQRMKDRESVLARDLDRYRCQRRLLLTGTPLQNDLKELWSLLNLLLPEVFDNRKAFQDWFSKPFQRDAPTPNEEDDWLETEKKVIIIHRLHQILEPFMLRRRVEDVEGSLPRKDSIVLRCKMSAIQGAIXXWIK

SEQ ID NO: 8504 - protein, 471 aa, Triticum aestivum
  unsure (1)..(471): unsure at all Xaa locations
XSQYDATKVRAVTRLLLSPKRADSSLLRTKFEIGLSDNPCEALVLSHHDRLVSNIRLLRSTYGFIPPARAPPINVCCSDRNFAYKLTDEMHDPWIKKLFLGFARISEFNGPRIPNGHNTLIQEVCTDLPIPEPMLQLPYRIFGSSPPMSNFDPAKMLTDSGKLHTLDKLLRQLRAENHRVLLFAQMTKMLDILEDYMNFRKFKYFRLDGSSAISDRRDMVRNFQNRNDIFVFLLSTRAGGLGINLTAADTVIFYEIDWNPTQDQQAMDRTHRLGQTKEVTVFRLICKDTIEENILQRAKQKNAVQELVMKGKQVQDDHLMRQEDVVSLLLDDXXQIAHKLKEISMQAKDRQKRRAKAIKVDKEGDLKLEDLDDPTEEPVEQDNTTSKKKKGSHKKPPKSQDNPDGDVPESGPVEDEEHIASLRPKRSKRLVRSTGEDKEPVAACDVEKPADAAENNDNNDAEELQYQTPSA

SEQ ID NO: 8505 - protein, 246 aa, Triticum aestivum
  unsure (1)..(246): unsure at all Xaa locations
XRILRIEMSPLQKQYYKWILERNFQNLNKGVRGNQVSLLNVVVELKKCCNHPFLFESADHGYGGDSIGDRNKVERIVMSSGKLVLLDKLLLRLRETNHRVLIFSQMVRMLDILSEYLSLRGFQFQRLDGSTRADLRHQAMEHFNAPGSDDFCFLLSTRAGGLGINLATADTVIIFDSDWNPQNDLQAMSRAHRIGQQDTGNIYRFVTCKSVEEDILERAKKKMVLDHLVIQKLNAEGRLEKKEPKR

SEQ ID NO: 8506 - protein, 250 aa, Triticum aestivum
  unsure (1)..(250): unsure at all Xaa locations
QCGICHELAEDVVVSSCPXKVIXAHALFSTGYLQHMNFPFKLTYLXENSRRKVPAYLKGGKRSGILGRLRLAEFKTSTKIDALREEIRNMIEHDGSAKGIASSQVTSFLDLIEFSLQRAGIKCVQLNGKMXTLVEKGRAIDAFINDPDCRIFLMSLKAGGVALNLTVASHVFLMDPWWNPAVESQAQDRIHRIGQFKPIRSTRFVIKDTVEERILQLQEKKQLVFDGTVGDSPEAMSKLTEADLKFLFQN

SEQ ID NO: 8507 - protein, 421 aa, Triticum aestivum
  unsure (1)..(421): unsure at all Xaa locations
XPVGIKHPIARNAVHGYKKLQTVLRIVLLRRTKETTINGEPIINLPPKTIKLQKVDFTKEERAFYLTLEERSRQQFKEYAAAGTVKQNYANILLLLLRLRQACDHPLLVKGHQSVFKGDGSIEMAKQLSKERVIDLLARLEVSALCAVCRDTPEDAVVAMCGHIFCYQCIYERITTDENMCPVPNCRNTLSTESVFSSGTLKICISGKTSTHAIASSSADDELFSQSSYISSKIQATVDILNSIINMHXXLTDSDTIESNPNRVSPVKAIVFSQWTGMLDLLEFSLNSNLIQYRRLDGTMSLNSRDKAVKDFNIDPEVRVMIMSLKAGNLGLNMVAACHVILLDLWWNPYAEDQAIDRAHRIGQTRPVTVSRLTITDTVEDRILSLQEEKRAMVNSAFGEDKSSAHATRLTVDDLRYLFRI

SEQ ID NO: 8508 - protein, 378 aa, Triticum aestivum
  unsure (1)..(378): unsure at all Xaa locations
XFSEFYLPTRDMTGASRETPSTKRFLVVFRRQSLRRRFRLRRVNPLGNYRRPRVAPPSLGADRSVRQLRCQVPRALPSLAASLLAIADXVLGRRPAAGSVRNCLRFPLRKNCGHPDLFHSAFDSNSLYPPVDKLLEQCGKFQLLDRLLNALIKRNHKVLIFSQWTKILDILDYYLSEKGLKVCRIDGNVKLEDRRNQIAAFNDLNSGMNVFILSTRAGGLGINLTSADTCILYDSDWNPQMDLQAMDRCHRIGQTQPVHVYRLATSNSVEGRIIKKAFGKLKLEHVVIGKGQFQQDAAKPNALDEGELLALLRDEQAEEDRMIQTDISDEDLLKVMDRSDLXXGARAAADAAPHFPLKGPGWEVVVAAGGGMLSALTS

SEQ ID NO: 8509 - protein, 291 aa, Triticum aestivum
  unsure (1)..(291): unsure at all Xaa locations
XQTCSSEVTTSTTVKTENHIVEIKARPAAGTLVVCPTSVLRQWAEELRNKVTSKANLSFLIYHGSNRTKDPNELTKYDVVLTTYSIVSKTKKATTEKSNLPEKPLARVAWFRVILDEAQSIKNYRTNVAGSCWNLRAKRXWCLSGTPIQNAVEDLFSYFKFLRYEPYCEYKHFCTMIKMPISRNPINGYKKLQVVLKTVMLRRTKATMLDGKPIISLPPKTITLKAVNFTSEERAFYNTLEAESRAQFKVYAAAGTVRQNYVNILLMLLRLRQACDHPHLVNESSWTSSLX

SEQ ID NO: 8510 - protein, 196 aa, Triticum aestivum
  unsure (1)..(196): unsure at all Xaa locations
XNKPXHLLXKTFDNYLLESTDXRPGLKMKLNNLMIQLRKNCAHPDLFNAAFDSTSLYPPTDKLLEQCGKFQLLDRLLESLLKQKHKVLIFSQWTKVLDIIEYYLYMKGLNICRIDGSVKLEDRMRQIAEFNDLNSSMNVFILSTRAGGLGINLASADTCILYDSDWNPQMDLQAMDRCHRIGQTRPLHVYRLATAX

SEQ ID NO: 8511 - protein, 97 aa, Triticum aestivum
  unsure (1)..(97): unsure at all Xaa locations
XLMSLKXAGGVGLNLTAASNVFLMDPWWNPAVEEQAIMRIHRIGQKRAVQVRRFIVRDTVEERMQQVQARKQRMIAGALTDEEVRSSRIEELKMLFK

SEQ ID NO: 8512 - protein, 114 aa, Triticum aestivum
  unsure (1)..(114): unsure at all Xaa locations
XVNDFKTVPEVSVMIMSLKAASLGLNMVAACHVLMLDLWWNPTTEDQAVDRAHRIGQTRPVTVSRLTVKDTVEDRILALQEKKREMVASAFGEDKSGGGQTRLTVDDLNYLFMV

SEQ ID NO: 8513 - protein, 220 aa, Triticum aestivum
  unsure (1)..(220): unsure at all Xaa locations
GLTSMWPHRLNVILGDQMGAGGVIPTLVFLDRLKENGQHGPYLIVSSLDSIGDWLRQIRLFPSMKELLYFGNQQGRATMRKQFARKAVGPDFPIILTTYNMVMVEKQWLAQYDWKYVVVDEGYQLKKREHEVLEAVKRQPMDHKLLLIREPFQNNLAELWSLLNFALLNAFSSREEFDSWFDKSGKEGEEQQIEEERRALLSKLHAILRPFLLRDMKGAX

SEQ ID NO: 8514 - protein, 138 aa, Triticum aestivum
TNFLLTTQVGGLGLTLTKAARVIVVDPAWNPSTDNQSVDRAYRIGQTKDVIVYRLMTSGTIEEKIYKLQVFKGALFRTATEQKEQTRYFSKRDIQELFSLPAQGFDVSLTQKQLQEEHGQQLVMDESLREHIEFLERQ

SEQ ID NO: 8515 - protein, 145 aa, Triticum aestivum
  unsure (1)..(145): unsure at all Xaa locations
XVRGRVGSESDVSWDSDQEEVTRMKPAQKWDDLISRVVNSGSGLLLTTYEQLRIIREKLLDVEWGYAVLDEGHRIRNPNAEVTLVCKQLQTVHRIIMTGAPIQNKLSELWSLFDFVFPGKLGVLPVFETEFSVPITVGGYANATP

SEQ ID NO: 8516 - protein, 207 aa, Triticum aestivum
  unsure (1)..(207): unsure at all Xaa locations
XTIMTISLLLSDSSKGRVTPQQRTQISGEASGLGETPIQSRDSVKNLASPFSISKLRKPKAPLIGGGNLVICPMTLLSQWKAEIEAHTKPDSLNIYVHYGQSRPKEASFIGQNDIVLTTYGVVASEFSTESSTENGGLYSVHWFRIVLDEAHTIKSSKSLISQAAAALTADRRRCLAGTPNQDNVEDRTQPXCLEFLKVEPWRNWVX

SEQ ID NO: 8517 - protein, 882 aa, Triticum monococcum
MAATAYERRLLAAADLVLSADGKSQLPRLSSADLGVTADLKPHQLDGVDWLIRRYHLGVNVLLGDEMGLGKTLQAISLLSYLKIKSIAPGPFLVLCPLSVTDGWLSEFGKFCPTLKVIQYVGDKPHRRQIRRTIHEDVQKSSHSDELPFDVMLTSYDIALMDQDFLSQVPWLYVVIDEAQRLKNPSSVLYNVLEERFMMPRRLLLTGTPVQNNLSELWALMHFCMPSVFGPLDEFLSTFKEAGNLLSGSEANKANRQFKILKHILRAFMLRRTKALLIESGILELPPLTELTVMVPLAPLQKKIYLSVLRKELQTLLSFTGGSSRHQSLQNIVVQLRKACSHPYLFSGIEPEPYEEGEHLVQASGKLIVLDLVLEKLHRLGHRVVLFAQMTQTLDILQDFLELRNYTYERLDGSVRAEERFAAIRNFSSQPTKGVVRDDSNPSGAFVFMISTRAGGVGLNLIGADTVIFYEQDWNPQADKQALQRTHRIGQLNHVLSINLVSQRTIEEVIMRRAERKLKLSHNIFGDKDATDGKGNDLGNEANDMCSIIFGLHQFDPADTAAETINEETLEKLKSMSENVIKMRTHEPSEKDDRAFEINPDLTEGSGLVITRACDSISIDPGVDEAAYLSWVEKFKEASHSIEDVPVELERQRPAPEDKLLKREANKKKAEEKRLAKWKDLGYQTLGVKVPDNIPNQNISDSGSVQLVYGDCTDPSKVCAAKPAIIFSCVDNSGTWGHGGMFDALTSLSTYIPDAYHRASEVDDLHMGDLHLIQLDEANCSRNLDAPLWVALAVVQSYNPKRKIPRSEISMSDLELCLSKAAFSAAQRSASIHMPRIGQRSGSQRSEWYTIERLLRKYASLHGIDIFVYYFRRPTRQQPDSD

SEQ ID NO: 8518 - protein, 832 aa, Zea mays
  unsure (1)..(832): unsure at all Xaa locations
PRVRLXLLKTGDQEAYMRMVEESKNERLKMLLDKTNELLEGIGKAVQRQKDAEHVSKPEGGSEVPKGSESEDCSQISGIKSESAEESTSDDDGDLPGPADESKFNAGRRLDVTVHSIEEKVTEQPSALEGGELRPYQLEGLQWMLSLFNNNLNGILADEMGLGKTIQTIALIAYLLEKKEVAGPHLIIAPKAVLPNWSNEFKTWAPSIGTILYDGRPEERRLLRDKNFDGEQFNVLLTHYDLILKDKKFLKKVHWHYLIVDEGHRLKNHECALARTLVSGYMIRRRLLLTGTPIQNSLQELWSLLNFILPNIFNSSQNFEEWFNAPFAXXDVSLNDEEQLLIIHRLHQVLRPFLLRRKKDEVEKYLPVKTQVILKCDMSAWQKAYYEQVTSREKVALGYGIRKKALQNLSMQLRKCCNHPYLFVEHYNMYQREEIVRASGKFELLDRLLPKLQRAGHRVLLFSQMTKLLDILEVYLQMYNFKYMRLDGSTKTEERGRLLADFNKKNSEYFMFLLSTRAGGLGLNLQTADTVIIFDSDWNPQMDQQAEDRAHRIGQKNEVRVFVLVSVGSIEEEILDRAKQKMGIDAKVIQAGLFNTTSTAQDRRALLQEILRRGTSSLGTDIPSEREINRLAARNDEEFRLFEKMDEERRLRENYKSRLMDGNEVPNWVYDNETLRKKTVADEFRNIIVGSKRRRKEVVYSDSFGDQWMKSDEGFEEIAKMTPRVKRTAYSPDIQVEYNERRKRPKSVENSADGASNPTRTPDKGRAGVSSYSKDETEDDGEDEVITSGLQKGNSFTWKTLGRKRSSHLSSSSDSKGRXHHSNVSCLDAFAR

SEQ ID NO: 8519 - protein, 1107 aa, Zea mays
  unsure (1)..(1107): unsure at all Xaa locations
MAKPVKYDDEEEISSSSAEEDDDQSAAAASGSGEEGDDDEEDAAALPTEEEEAEGEGQQEEEVDEEEIEAVTTGAGAEDGEDASAATAAEGEEESQSTEDDESVARDKDNGDETDAVVGKREKTRLKELQKMKKQKIQEILDTQNAAIDADMNNKGKGRLKYLLQQTEIFAHFAKGSQSNEKKPRGRGRHASKMTEEEEDEEYLKEEEDALAGAGGTRLVSQPSCIKGKMRDYQLAGLNWLIRLYENGINGILADEMGLGKTLQTISLLGYLHEFRGIAGPHMVVAPKSTLGNWMKEIQRFCPILRAVKFLGNPEERNHIRDNLLQPGKFDVCVTSFEMAIKEKSALRRFSWRYIIIDEAHRIKNENSLLSKTMRIYNTNYRLLITGTPLQNNLHELWALLNFLLPEIFSSAETFDEWFQISGENDQQEVVQQLHKVLRPFLLRRLKSDVEKGLPPKKETILKVGMSQMQKQYYRALLQKDLEVINAGGERKRLLNIAMQLRKCCNHPYLFQGAEPGPPYTTGEHLIENAGKMVLLDKLLPKLKERDSRVLIFSQMTRLLDILEDYLMYRGYQYCRIDGNTGGEDRDASIEAFNSPGSEKFVFLLSTRAGGLGINLATADVVVLYDSDWNPQADLQAQDRAHRIGQKKEVQVFRFCTEYTIEEKVIERAYKKLALDALVIQQGRLAEQKTVNKDDLLQMVRFGAEMVFSSKDSTITDEDIDRIIAKGEETTAELDAKMKKFTEDAIKFKMDDNAELYDFDDXXKDENKVDFKKLVSDNWIEPPRRERKRNYSESDYFKQALRQGAPAKPREPRIPRMPHLHDFQFFNNQRLNELYEKEVRYLMQANQKKDTIDGEDEDQLEPLTAEEQEEKEQLLEEGFASWTRRDFNTFIRACEKYGRNDIKSISSEMEGKTEEEVQRYARVFKERYKELSDYDRIIKNIERGEARISRKDEIMKAIGKKLDRYKNPWLELKIQYGQNKGKFYNEECDRFMLCMVHKLGYGNWDELKAAFRMSPLFRFDWFVKSRTTQELARRCDTLIRLVEKENQEYDEQERQARKEKRLAKNMTPTKRAALKNSEGENTPPSSFKRRRQSLMDDYVGSGKRKRG

SEQ ID NO: 8520 - protein, 1107 aa, Zea mays
  unsure (1)..(1107): unsure at all Xaa locations
MAKPVKYDDEEEISSSSAEEDDDQSAAAASGSGEEGDDDEEDAAALPTEEEEAEGEGQQEEEVDEEEIEAVTTGAGAEDGEDASAATAAEGEEESKSTDQDESVAHDKAIGAEIDAEGGEREKKILNEIQKFSKLKIRHKLDNKNPGSSADMIYKVNGLLEYRILHKEEIADFASGSGTLFVQPPSGIQEXTHDAEQAEDEEYLKEEEDALAGAGGTRLVSQPSCIKGKMRDYQLAGLNWLIRLYENGINGILADEMGLGKTLQTISLLGYLHEFRGIAGPHMVVAPKSTLGNWMKEIQRFCPILRAVKFLGNPEERNHIRDNLLQPGKFDVCVTSFEMAIKEKSALRRFSWRYIIIDEAHRIKNENSLLSKTMRIYNTNYRLLITGTPLQNNLHELWALLNFLLPEIFSSAETFDEWFQISGENDQQEVVQQLHKVLRPFLLRRLKSDVEKGLPPKKETILKVGMSQMQKQYYRALLQKDLEVINAGGERKRLLNIAMQLRKCCNHPYLFQGAEPGPPYTTGEHLIENAGKMVLLDKLLPKLKERDSRVLIFSQMTRLLDILEDYLMYRGYQYCRIDGNTGGEDRDASIEAFNSPGSEKFVFLLSTRAGGLGINLATADVVVLYDSDWNPQADLQAQDRAHRIGQKKEVQVFRFCTEYTIEEKVIERAYKKLALDALVIQQGRLAEQKTVNKDDLLQMVRFGAEMVFSSKDSTITDEDIDRIIAKGEETTAELDAKMKKFTEDAIKFKMDDNAELYDFDDXXKDENKVDFKKLVSDNWIEPPRRERKRNYSESDYFKQALRQGAPAKPREPRIPRMPHLHDFQFFNNQRLNELYEKEVRYLMQANQKKDTIDGEDEDQLEPLTAEEQEEKEQLLEEGFASWTRRDFNTFIRACEKYGRNDIKSISSEMEGKTEEEVQRYARVFKERYKELSDYDRIIKNIERGEARISRKDEIMKAIGKKLDRYKNPWLELKIQYGQNKGKFYNEECDRFMLCMVHKLGYGNWDELKAAFRMSPLFRFDWFVKSRTTQELARRCDTLIRLVEKENQEYDEQERQARKEKRLAKNMTPTKRAALKNSEGENTPPSSFKRRRQSLMDDYVGSGKRKRG

SEQ ID NO: 8521 - protein, 847 aa, Zea mays
  unsure (1)..(847): unsure at all Xaa locations
VLAWHVRARQRISRHAKNPINLLKTGDQEAYMRMVEESKNERLKMLLDKTNELLEGIGKAVQRQKDAEHVSKPEGGSEVPKGSESEDCSQISGIKSESAEESTSDDDGDLPGPADESKFNAGRRLDVTVHSIEEKVTEQPSALEGGELRPYQLEGLQWMLSLFNNNLNGILADEMGLGKTIQTIALIAYLLEKKEVAGPHLIIAPKAVLPNWSNEFKTWAPSIGTILYDGRPEERRLLRDKNFDGEQFNVLLTHYDLILKDKKFLKKVHWHYLIVDEGHRLKNHECALARTLVSGYQIRRRLLLTGTPIQNSLQELWSLLNFILPNIFNSSQNFEEWFNAPFAXXDVSLNDEEQLLIIHRLHQVLRPFLLRRKKDEVEKYLPVKTQVILKCDMSAWQKAYYEQVTSREKVALGFGLRSKALQNLSMQLRKCCNHPYLFVEHYNMYQREEIVRASGKFELLDRLLPKLQRAGHRVLLFSQMTKLLDVLEIYLQMYNFKYMRLDGSTKTEERGRLLADFNKKDSEYFMFLLSTRAGGLGLNLQTADTVIIFDSDWNPQMDQQAEDRAHRIGQKNEVRVFVLVSVGSIEEEILDRAKQKMGIDAKVIQAGLFNTTSTAQDRRALLQEILRRGTSSLGTDIPSEREINRLAARNDEEFRLFEKMDEERRLRENYKSRLMDGNEVPNWVYDNETLRKKTVADEFRNIIVGSKRRRKEVVYSDSFGDQWMKSDEGFEEIAKMTPRVKRTAYSPDIQVEYNERRKRPKSVENSADGASNPTRTPDKGRAGVSSYSKDETEDDGEDEVITSGLQKGNSFTWKTLGRKRSSHLSSSSDSKGRXHHSNVSCLDAFAR

SEQ ID NO: 8522 - protein, 779 aa, Zea mays
MGTLSMSDASPIPAKNWDASPVKLEAQGGDAILGMKEEERLLELVKDEQADGILDSLPIDLEAKNGDASLITEAMKKEEEQLEDTRIKVQEEEEARKREEAARLAFDPETQYNKLDELLTKTQLFSEFLLENMDRIADESVETQAEQPQVEEKKKGRGRKRKAKPQYNDKKAKTAVAAMLTRSREERLAEDSTLSEEERWEKEQANLVPLLTGGKLKSYQIKGVKWLISLWQNGLNGILADQMGLGKTIQTIGFLAHLKGKGMHGPYLIIAPLSTLSNWVNEISRFTPSLVSIIYHGGKAARAEIRRKFMPTNVGPDFPIVVTSYEMAMFDAKFLAAYKWKYVVVDEGHRLKNAKCLLLKQLKRIPMDNKLLLTGTPLQNNLAELWSLLNFILPDIFSSHQEFESWFDFSGGNEETDEKKRLHVVSKLHAILRPFLLRRMKEDVEQMLPRKKEIIIYANMTEQQKQIQHHLIEKTFDNYLHEESDIILKRPGIRARLHNLMIQLRKNCNHPDLLESPVDSTGLYPPVEKLLEQCGKFQLFDRLLNFLMAQKHKVLVFSQWTKVLDIIEYYLDSKGHAVCRIDGNVKLEERRRQIAEFNDVNSSMRIFLLSTRAGGLGINLTAADTCILYDSDWNPQMDLQAMDRCHRIGQTRPVHVYRLATSHSVEGRMIKRAFGKLKLEHVVIGKGQFEQDRAKPSALDEGELLALLKDEQTEEDRIVQTDISNEDLQRLMDRSDLMGPPPGAGGANAASPLVPLKGPGWEVVVPAKSGGGMLSSLTS

SEQ ID NO: 8523 - protein, 796 aa, Zea mays
  unsure (1)..(796): unsure at all Xaa locations
XLPKLWDCLTEFLRPHSWADRMRIRTHSHXINNIQVVRSISPHLAEPLRPQLLNLLPSILGCVRHPHVAVRLAAARCITSMAKSLTDDVMVLVIENVIPMLSDLSSVCARQGAGILLSLLVQGLAVELVPYAPFLVVPLLKCMSDPDGSVRQTVTHSFAALVPLLPLSRGASLPCGLSERLSSSAEDVQFLEQLLDNTQIDDFKLNIDLNVELRRYQQEGINWLAFLRRFKLHGILCDDMGLGKTLQASAIVASDIAEARARNDEXXILTSLIICPSTLVAHWEYEIEKYIDSSILKPLQYVGSSQDRVTLRSQFDKVNVIITSYDIIRKDIDFLGNITWNYCVLDEGHIIKNSRSKITFAVKQLKAQHRLILSGTPIQNNVLELWSLFDFLMPGFLGTEKQFQAAYGKPLLAAKDSKCSAKDAEAGILAMEALHKQVMPFLLRRTKDEVLSDLPEKIIQDRYCDLSLLQLKLYDKFSSSNAKDEISTIVKANELEESAXXQPKATRHVFQALQYLLKLCSHPLLVTGXEPPKSSCGSSEXNRSGICSELHELHHSPKLVALQEILQECGIGSEISSPDASTAVGQHRVLIFAQHKAFLDIIEKDLFQSHMRSVTYLRLDGSVDPEKRFEIVKAFNSDPTIDVLLLTTHVGGLGLNLTSADTLVFVEHDWNPMKDXXQAMDRAHRLGQRKVVNVHRLIMRGTLEEKVMSLQRFKVSVANAVINAENSSLKTMNTDQLLDLFTSTPXXSRKASDEQSKRKSGGKGLKSILNGLDELWDQSQYADEYDLNQFLAKLNG

SEQ ID NO: 8524 - protein, 780 aa, Zea mays
  unsure (1)..(780): unsure at all Xaa locations
MGTLSMSDASPIPAKNWDASPVKLEAQGGDTILGMKEEERLLELVKDEQADGILDSLPIDLEAKNGDASLITEAMKKEEEQLEDTRIKVQEEEEARKREEAARLAFDPETCSISMDELLTKTQLFSEFLLENMDRIADESVETQAEQPQVXEEKKKGRGRERKAKPQYIDKKAKTAVAAMLTRSREERLAEDSTLSEEERWEKEQANLVPLLTGGKLKSYQIKGVKWLISLWQNGLNGILADQMGLGKTIQTIGFLAHLKGKGMHGPYLIIAPLSTLSNWVNEISRFTPSLVSIIYHGGKAARAEIRRKFMPTNVGPDFPIVVTSYEMAMFDAKFLAAYKWKYVVVDEGHRLKNAKCLLLKQLKRIPMDNKLLLTGTPLQNNLAELWSLLNFILPDIFSSHQEFESWFDFSGGNDXETDEKKRLHVVSKLHAILRPFLLRRMKEDVEQMLPRKKEIIIYANMTEQQKQIQHHLIEKTFDNYLHEESDIILKRPGIRARLHNLMIQLRKNCNHPDLLESPVDSTGLYPPVEKLLEQCGKFQLFDRLLNFLMAQKHKVLVFSQWTKVLDIIEYYLDSKGHAVCRIDGNVKLEERRRQIAEFNDVNSSMRIFLLSTRAGGLGINLTAADTCILYDSDWNPQMDLQAMDRCHRIGQTRPVHVYRLATSHSVEGRMIKRAFGKLKLEHVVIGKGQFEQDRAKPSALDEGELLALLKDEQTEEDRIVQTDISDEDLQRLMDRSDLMGPPPGXRANARPPLVPLKGPGWEVVVPAKSGGGMLSSLTS

SEQ ID NO: 8525 - protein, 683 aa, Zea mays
  unsure (1)..(683): unsure at all Xaa locations
XMGLGKTIQPIALIAYLLENKEVAGPHLIIAPKAVLPNWSNEFKTWAPSIGTILYDGRPEERKLLREKNFDGLQFNVLLTHYDLILKDKKFLKKVHWHYLIVDEGHRLKNHECALARTLVSGYQIRRRLLLTGTPIQNSLQELWSLLNFILPNIFNSSQNFEEWFNAPFAXXDVSLNDEEQLLIIHRLHQVLRPFLLRRKKDEVEKYLPVKTQVILKCDMSAWQKAYYEQVTSREKVALGFGLRSKALQNLSMQLRKCCNHPYLFVEHYNMYQREEIVRASGKFELLDRLLPKLQRAGHRVLLFSQMTKLLDVLEIYLQMYNFKYMRLDGSTKTEERGRLLADFNKKDSEYFMFLLSTRAGGLGLNLQTADTVIIFDSDWNPQMDQQAEDRAHRIGQKNEVRVFVLVSVGSIEEEILDRAKQKMGIDAKVIQAGLFNTTSTAQDRRALLQEILRRGTSSLGTDIPSEREINRLAARTDEEFWLFEKMDEERRLRENYKSRLMDGNEVPDWVFANNDLPKRTVADEFQNIMVGAKRRRKEVVYSDSFGDQWMKSDEGFEDIPKATQRSKKTAYSSDIQVEFSERRKRPRSVENSADGVSNPTWTPDKGRAGVSSYSKDETEDDGEDEVITSGLQKGNSFTWNTLGRRRSSHFSSSSDSRGXXQHSNGNIHECYGLDLLVDGIPL

SEQ ID NO: 8526 - protein, 626 aa, Zea mays
  unsure (1)..(626): unsure at all Xaa locations
XTRPLITTYDIVRNNYKLIRGNSYNNSNDDDDEEGTLWNYVILDEGHLIKNNKTQRAQSLYEIPCAHRIVISGTPIQNNLKEMWTLFNFCCPDVLGDKQQFKIRYETAILRGNDKNATAREKHVGSNVAKELRERIKPYFLRRLKSEVVFDTGASEEKTLAKKNELIVWLKLTPCQRKLYEAFLNSELVHLALQPKASPLAAITILKKICDHPLLLTKKGAEGVLEGMGEMLNDQDIGMVEKMAMNLADMAHDDNALEVGQDVSCKLSFIMSLLRNLVGEGHHVLIFSQTRKMLNLIQEAIILEGYAFLRIDGTTKVSDRERIVKDFQEGCGAPVFLLTTQVGGLGLTLTKATRVIVVDPAWNPSTDNQSVDRAYRIGQTKNVIVYRLMTSATIEEKIYKLQVLKGALFRTATEQKEQTRYFSKSEIQELFSLPQQGFDVSLTHKQLQEEHGQQVVLDESLRKHIQFLEQQGIAGVSHHSLLFSKTATLPTLSENELDSKPRGMPMMPQQYYKGSSSDYVANGASFALKPKDESFTVRNYIPSNRSAESPEEIKARINRLSQTLSNAVLLSKLPDGGEKIRRQINELDEKLTSAEKGLKEGGTEVISLDXXDPRHGESALGKSKVF

SEQ ID NO: 8527 - protein, 627 aa, Zea mays
  unsure (1)..(627): unsure at all Xaa locations
XTRPLITTYDIVRNNYKLIRGNSYNNSNDDDDEEGTLWNYVILDEGHLIKNNKTQRAQSLYEIPCAHRIVISGTPIQNNLKEMWTLFNFCCPDVLGDKQQFKIRYETAILRGNDKNATAREKHVGSNVAKELRERIKPYFLRRLKSEVVFDTGASEEKTLAKKNELIVWLKLTPCQRKLYEAFLNSELVHLALQPKASPLAAITILKKICDHPLLLTKKGAEGVLEGMGEMLNDQDIGMVEKMAMNLADMAHDDNALEVGQDVSCKLSFIMSLLRNLVGEGHHVLIFSQTRKMLNLIQEAIILEGYAFLRIDGTTKVSDRERIVKDFQEGCGAPVFLLTTQVGGLGLTLTKATRVIVVDPAWNPSTDNQSVDRAYRIGQTKNVIVYRLMTSATIEEKIYKLQVLKGALFRTATEQKEQTRYFSKSEIQELFSLPQQGFDVSLTHKQLQEEHGQQVVLDESLRKHIQFLEQQGIAGVSHHSLLFSKTATLPTLSENELDSKPRGMPMMPQQYYKGSSSDYVANGASFALKPKDESFTVRNYIPSNRSAESPEEIKARINRLSQTLSNAVLLSKLPDGGEKIRRQINELDEKLTSAEKGLKEGGTEVISLDXLIQDMESLCSAKVKCFE

SEQ ID NO: 8528 - protein, 569 aa, Zea mays
  unsure (1)..(569): unsure at all Xaa locations
XLLRLHMMGCSSGLCISYMIRRRLLLTGTPIQNSLQELWSLLNFILPNIFNSSQNFEEWFNAPFAXXDVSLNDEEQLLIIHRLHQVLRPFLLRRKKDEVEKYLPVKTQVILKCDMSAWQKAYYEQVTSREKVALGYGIRKKALQNLSMQLRKCCNHPYLFVEHYNMYQREEIVRASGKFELLDRLLPKLQRAGHRVLLFSQMTKLLDILEVYLQMYNFKYMRLDGSTKTEERGRLLADFNKKNSEYFMFLLSTRAGGLGLNLQTADTVIIFDSDWNPQMDQQAEDRAHRIGQKNEVRVFVLVSVGSIEEEILDRAKQKMGIDAKVIQAGLFNTTSTAQDRRALLQEILRRGTSSLGTDIPSEREINRLAARNDEEFRLFEKMDEERRLRENYKSRLMDGNEVPNWVYDNETLRKKTVADEFRNIIVGSKRRRKEVVYSDSFGDQWMKSDEGFEEIAKMTPRVKRTAYSPDIQVEYNERRKRPKSVENSADGASNPTRTPDKGRAGVSSYSKDETEDDGEDEVITSGLQKGNSFTWKTLGRKRSSHLSSSSDSKGRXHHSNVSCLDAFAR

SEQ ID NO: 8529 - protein, 335 aa, Zea mays
  unsure (1)..(335): unsure at all Xaa locations
XATWQNILHELWALLNFLLPEIFSSRETFDEWFQISGENDQQEVVQQLHKVLRPFLLRRLKSDVEKGLPPKKETILKVGMSQMQKQYYRALLQKDLEVINAGGERKRLLNIAMQLRKCCNHPYLFQGAEPGPPYTTGEHLIENAGKMVLLDKLLPKLKERDSRVLIFSQMTRLLDILEDYLMYRGYQYCRIDGNTGGEDRDASIEAFNSPGSEKFVFLLSTRAGGLGINLATADVVVLYDSDWNPQADLQAQDRAHRIGQKKEVQVFRFCTEYTIEEKVIERAYKKLALDALVIQQGRLAEQKTVNKDDLLQMVRFXGAEMVFSSKDSTLTDEDX

SEQ ID NO: 8530 - protein, 536 aa, Zea mays
  unsure (1)..(536): unsure at all Xaa locations
LFSLLNSLSFRHXRVLLTGTPLQNNIGEMYNLLNFLQPTSFPSLSSFEEKFNDLTTAEKVEELKKLVAPHMLRRLKKDAMQNIPPKIERMVPVELTSIQAEYYRAMLTKNYQVLRNIGKGGAHQSLLNIVMQLRKVCNHPYLIHGTEPESGSPEFLHEMRIKASAKLTLLHSMLKILHKEGHRVLIFSQMTKLLDILEDYLTLEFGPKTFERVDGSVSVAERQAAIARFNQDKTRFVFLLSTRSCGLGINLATADTVIIYDSDFNPHADIQAMNRAHRIGQSNRLLVYRLVVRASVEERILQLAKKKLMLDQLFVNKSESQKEVEDIIRWGTEELFGSSDSVDGKDSNEASGSVADVEFKHRRKTGGLGDVYEDKCIGGSTKLVWDENAILKLLDRSNLPSSVAESTDGDLDNDMLGTVKSIDWNDELNDHPGTNEDIAPIDNDGSELASESKQGATNRLEENEWDKLLRVRWEQYQIEEEASLGRGKRLRKAVSYRETFATLPNEALSEGSDEGDEPKREYTAAGLVLKEKKKKX

SEQ ID NO: 8531 - protein, 454 aa, Zea mays
  unsure (1)..(454): unsure at all Xaa locations
NSARGVDEAHRLKNCEASLYTTLLEFSTKNKLLITGTPLQNSVEELWALLHFLDPVKFNSKDSFVERYKNLSSFNETELANLHKELRPHILRRVIKDVEKSLPPKIERILRVEMSPLQKQYYKWILERNFQNLNKGVRGNQVSLLNIVVELKKCCNHPFLFESADHGYGGDSIGDRNKVERIVMSSGKLVLLDKLLVRLRETNHRVLIFSQMVKMLDILAEYLSLRGFQFQRLDGSTRADLRHQAMEHFNAPGSDDFCFLLSTRAGGLGINLATADTVIIFDSDWNPQNDLQAMSRAHRIGQQETVNIYRFVTCKSVEEDILERAKKKMVLDHLVIQKLNAEGRLEKKESKKGGSIFDKNELSAILRFGAEELFKEDKTDEEAKRNLESLDIDEILERAEKVETKGGEGEEGNELLSAFKVANFSSGEDDATLWSRLIQPDPAGRLDRSTRTEX

SEQ ID NO: 8532 - protein, 296 aa, Zea mays
  unsure (1)..(296): unsure at all Xaa locations
XTVQAMAFLSHLAEDKNIWGPFLVVAPASVVNNWAEELIRFCPDLKILPYWGPERMILRKNINPKRLYRRDASFHILITNYQILVNEEKLLRRVKWQYMVLDEAQAIKSSSSQRWKTLLSFSCRNRLLLTGTPIQNNMAELWALLHFIMPTLFDSHEQFNEWFSKGIEGHAEHGGALNEHQLSRLHAILKPFMLRRVKIDVIAEMTKKKEEIVPCKLSSRQQVFYQAIKNKISLNELLAGSRGSLNDKKLLSLMNIVMQLRKVVGCYSIFLKNPSLTXILLNVTPFLVLIGCYFSX

SEQ ID NO: 8533 - protein, 680 aa, Zea mays
  unsure (1)..(680): unsure at all Xaa locations
QEVVQQLHKVLRPFLLRRLKSDVEKGLPPKKETILKVGMSQMQKQYYRALLQKDLEVINAGGERKRLLNIAMQLRKCCNHPYLFQGAEPGPPYTTGEHLVENAGKMVLLDKLLPKLKERDSRVLIFSQMTRLLDILEDYLMYRGYQYCRIDGNTGGEDRDASIEAFNKPGSEKFVFLLSTRAGGLGINLATADVVVLYDSDWNPQADLQAQDRAHRIGQKKEVQVFRFCTEYTIEEKVIERAYKKLALDALVIQQGRLAEQKTVNKDDLLQMVRFGAEMVFSSKDSTITDEDIDRIIAKGEETTAELDAKMKKFTEDAIKFKMDDNAELYDFDDXXKDENKVDFKKLVSDNWIEPPRRERKRNYSESDYFKQALRQGAPTKPREPRIPRMPHLHDFQFFNNQRLNELYEKEVRYLMQANQKKDTIDGEDEDQLEPLTAEEQEEKEQLLEEGFASWTRRDFNTFIRACEKYGRNDIKSISSEMEGKTEEEVQRYAKVFKERYKELTDYDRIIKNIERGEARISRKDEIMKAIGKKLDRYKNPWLELKIQYGQNKGKFYNEECDRFMLCMVHKLGYGNWDELKAAFRMSPLFRFDWFVKSRTTQELARRCDTLIRLVEKENQEYDEQERQARKEKRLAKNTTPTKRAALRNSEGESAPLSSFKRRRQSLMDDYVGSGRRKRG

SEQ ID NO: 8534 - protein, 637 aa, Zea mays
  unsure (1)..(637): unsure at all Xaa locations
AKTLNPCWSAYNIADRRAPPVYVNLFTGQATTQFPSMTETVRGGILADAMGLGKTVMTIALILSNPRGEFSNCIKGDTRYLGDRATRXXIHXXTSSVRGGTLVVCPMSLLGQWKDELEAHSAQGALSVFVHYAGDKTSSLMLMAQHDVVLTTYGVLSAACKTXXCNSIFHRMDWYRIVLDEAHTIKSPKTKSAQAAYRLKSECRWCLTGTPLQNNLEDLYSLLCFLHVEPWCNAKWWQRLIQKPYENGDDRGLKLVRAILRPLMLRRTKETKDKIGNPILVLPPARIEVVECEQTDHERDFYEALFRRSKVQFDKFVAQGSVLNNYANILELLLRLRQCCDHPFLVISRADPKKYADLNQLAQQFLEGVQQSSSGRQNVVPSLAYVEGVVEEIRQGATMECPICLESASDDPVLTPCAHRMCGECLVSSWRTPEGGPCPLCRRHISKSDLIVLPAQSRFQVDAKNNWKDSCKVKTLVTMLESLQRKQEKSIVFSQFTSFFDLLEIRFTQKGIKFLRFDGKLSQKHKEKVLKEFSESQDKLVLMMSLKAGGVGLNLTAASNVFMMDPWWNPAVEEQAIMRIHRIGQKREVRVRRFIVKGTVEERMQQVQMRKQRMVSGALTDEEIRGARIEHLKMLFK

SEQ ID NO: 8535 - protein, 567 aa, Zea mays
  unsure (1)..(567): unsure at all Xaa locations
XSLSSRRPLASWAGPVSKHKKPKAPLYXGGSNLIICPMTLISQWKAEIEAHTKPGTANIYVHYGQNRPKDASIIGQSDIVLTTYGVVSSEFSIDGSTENGALYSVHWFRVVLDEAHMIKSSKSLISLAAAALTADRRWCLTGTPIQNNLEDLYSLFRFLKVEPWRNWALWNKLVQKPYEEGDERGLKLLQSILKPIMLRRTKNCTDKEGRPILNLPPANIEVKYCVLSEAEKDFYEALFRRSKVKFDQFVEQGRVLHNYASILELLLRLRQCCDHPFLVMSRGDTKEYADLNKLAKRFLRGGNGAVNGDSCIPSRAYIEQVVQELQKDEGECPICLEAFEDAVLTPCAHRLCRECLLSSWRSATAGLCPVCRMSMSKQDLITAPTDNRFQIDVEKNWVESSKISALLQELEALRSSGAKSIVFSQWTAFLDLLQIPLSRNNFSFARLDGTLNLQQREKVIKEFSEDKGILVLLMSLKAGGVGINLTAASNAFVMDPWWNPAVEEQAVMRIHRIGQTKTVSIRRFIVKGTVEERMEAVQARKQRMISGALTDQEVRTARIEELKMLFS

SEQ ID NO: 8536 - protein, 255 aa, Zea mays
  unsure (1)..(255): unsure at all Xaa locations
XGLEKTVQVLSFLGSLHNSGMYKPSIVVCPVTLLQQWQREASRWYPKFKVEILHDSANGSSKKSKAYSDSDSEGSWDSDQEEVRRAKPAKKWDDLISRVVNSGSGLLLTTYEQLRILGEKLLDIEWGYAVLDEGHRIRNPNAEITLVCKQLQTVHRIIMTGAPIQNKLSELWSLFDFVFPGKLGVLPVFETEFSVPITVGGYANATPLQVSTAYRCAIVLRDLIMPYLLRRMKVDVNAQLPKKTEHVLFCSLTAX

SEQ ID NO: 8537 - protein, 332 aa, Zea mays
  unsure (1)..(332): unsure at all Xaa locations
XEQMLPRKKEKSIYANMTEVQKRIQDHLVEKTFDVYLNDESDIVLRRPGIKTKLNSLFIQLRKNCAHPDLLEAAFGTTSLYPPVNKLLEQCGKFQLLDRLLTSLLARKHKVLIFSQWTKVLDILEYYLDSKGLGVCRIDGSVNLEERRRQIAEFNDLNSSLNVFILSTRAGGLGINLTSADTCILYDSDWNPQMDQQAMDRCHRIGQTRPVHVYRLATSYSVEERIIKKAFGKLKLEHVVIGKGQFEQERAKPNALEEGELLALLRDEQDEEDRMIQTDISDEDLLKLMDRSDLSGPPGAADAAPLIPLKGPGWEVVVPTKSGGGMLSSLTS

SEQ ID NO: 8538 - protein, 332 aa, Zea mays; identical to SEQ ID NO: 8537
  unsure (1)..(332): unsure at all Xaa locations

SEQ ID NO: 8539 - protein, 521 aa, Zea mays
PTRPSWVTQLEEHLKAGSLKVYMYHGERTRDKKELLKYDLVLTTYSILGTEFEQEDSPVKDIEWFRVILDEAHVIKNSAARQTKAVIALNAERRWVVTGTPIQNSSFDLYPLMAFLRFQPFSIKSYWQSLIQRPLEKGSKAGLSRLQNLLGAISLRRIKEMDDGNKSMVELPSKTVLACYIDLSAEEREYYDQMEQEGRNKMQEFGDRDSILSNYSTVLYFILRLRQLCDDVALCPLDMKAWFPASSIEDVSKHPELLKKLALLVDDGDDFDCPICLSPPTKTVITSCTHIYCQTCILKILKSSSSRCPICRRTLSKEDLFLAPEVKHPDEDGSGNLESDRPLSSKVQALLKLLTASQNEDPSSKSVVFSQFRKMLILLEAPLRRAGFKTLRLDGSMSAKKRLQVIQEFSHGGSDSPTVLLASLKAAGAGVNLTAASTVYLFDPWWNPGVEEQAMDRVHRIGQKKEVKVIRLIVKGSIEERILALQERKKRLISGAFGKKGGKNEKEMRVEELRMMLGLGK

SEQ ID NO: 8540 - protein, 799 aa, Zea mays
  unsure (1)..(799): unsure at all Xaa locations
XDTSDTDFVADSGDAVENDDSDEEFAPDKDTPPAPAVPEAALPRREKRRRGKKARRDAPPLPWEEWQVANDSWLDERNAADGGVEATDATVAAVPTADPAPEVVLRLLRFQKEWLAWALAQEASVTRGGILADEMGMGKTIQAISLVLTARRLRPPDHHSAVGCTLVVCPVVAVIQWTEEIERHTASGSVRVLIYHGAKRVTQSFDFNSYDFVITTYSTIEADYRKHIMPPKTRCQYCNKLFYPNKMKVHLMYHCGPNAKRTEAQAKQQSKRKWDSSKEKVKEXXRRVHKKGDEVNKDFQESDELGRQLRGQSPLHSVRWERVILDEAHFIKDRRCNTARAVFALESECKWALSGTPLQNRVGELYSLIRFLQIFPYSYYFCKDCSCEILDTSMKKQCXXCGHSSVRHFCWWNKYISTPIQYGSTSFEGKRAMTLLKEKVLKGIVLRRTKKGRAADLALPPKIVTLRRDSFDKNEMEFYEALYTQSVTQFDAYVDAGTLMNNYAHIFDLLTRLRQAVDHPYLVAYSKTAGHPEGMKNEGNESMESQCGICHNLAEDVVVTSCDHAFCKTCLIDYSAALGNVSCPSCSIPLTVDLTAQNSVGKVTRSVKGRKCSGILSRLRLVDFKTSTKIDALREEIRNMIEHDGSAKGIVFSQFTSFLDLIQFSLERSGIKCVQLNGAMNITEKGRAIDTFTHDADCRVFLMSLKAGGVALNLTVASHVFLMDPWWNPAVENQAQDRIHRIGQFKPIKSTRFVIKDTVEERILQLQQKKQLVFEGTVGDSPDAMSKLTEADLKFLFQI

SEQ ID NO: 8541 - protein, 376 aa, Zea mays
  unsure (1)..(376): unsure at all Xaa locations
XHASDALEVGQDVSCKLSFIMSLLRNLVGEGHHVLIFSQTRKMLNLIQEAIILEGYAFLRIDGTTKVSDRERIVKDFQEGCGAPVFLLTTQVGGLGLTLTKATRVIVVDPAWNPSTDNQSVDRAYRIGQTKNVIVYRLMTSATIEEKIYKLQVLKGALFRTATEQKEQTRYFSKSEIQELFSLPQQGFDVSLTHKQLQEEHGQQVVLDESLRKHIQFLEQQGITGVSHHSLLFSKTATLPTLSENDALDSKRGMPMMPQQYYKGSSSDYVANGASFALKPKDESFTVRNYIPSNRSAESPEEIKARINRLSQTLSNAVLLSKLPDGGEKIRRQINELDEKLTSAEKGLKEGGTEVISLDXXDPRHGESALGKSKVF

SEQ ID NO: 8542 - protein, 162 aa, Zea mays
  unsure (1)..(162): unsure at all Xaa locations
DPLKGKGMHGPYLIIAPLSTLSNWVNEISRFVPSVSSIIYHGDKVARAEIRRKFMPKTAGPDFPIIVTSYEIAMLDARFLAHYRWTYVVVDEGHRLKNSKCKLLREMKRIPMANKLLLTGTPLQNNLAELWSLLNFILPDIFSSNEEFESWYDSQNHFRXXD

SEQ ID NO: 8543 - protein, 709 aa, Zea mays
  unsure (1)..(709): unsure at all Xaa locations
XGRELSSSRPILKPFMLRRVKIDVIAEMTKKKEEIVPCKLSSRQQVFYQAIKNKISLNELLAGSRGSLNDKKLLSLMNIVMQLRKVCNHPELFERNEGSSYFNFADIPNSLLSPPFGELQDVHYAGKRNPIIFEIPKLVYEGIISNTENSGNICGFQNGYLNRLFNIFLPSNIYRSAIPEVSSSKESLLSSGAFGFTRLSNLCPVEASFLATASLFERLVFSVMQWNRNYTAEILDEFLDSEDTGIQSSQNDSTKVRAVARLLLSSTKAKPSLLRTKIGTGPIDGPYEALVLSHRDRLASNIRLLRSAYAFIPPARAPPINVWCADRNFAYKFTDEMYDPWAKKLFLGFARTSEFNGPRQPIAPHPLIQELNTDLPIIEPMLQLPYRIFGSSPPMSNFDPAKMLTDSGKLHTLDMLLRRLRAEGHRVLLFAQMTKMLDILEDYMNFRKFKYFRLDGSSAISDRRDMVRDFQNRNDIFVFLLSTRAGGLGINLTAADTVIFYEIDWNPTQDQQAMDRTHRLGQTKEVTVYRLICKDTIEEKILQRAKQKNAVQELVMKGKHVQDDHLMRQEDVVSLLIDDXXQIAHKLKEISMQAKDRQKRRRAKGIKVDKEGDLTLEDLDDATAEAVDQDKTTSKKKKSSHKKHTNTHDNDKGRCGRSSGESENEQMPESRPKRSKRLMKSITDDKELAAAADHXETGKXSGKSLSPXL

SEQ ID NO: 8544 - protein, 696 aa, Zea mays
  unsure (1)..(696): unsure at all Xaa locations
XHSAPRHSTLVDVQLSRLRPILKPFMLRRVKIDVIAEMTKKKEEIVPCKLSSRQQVFYQAIKNKISLNELLAGSRGSLNDKKLLSLMNIVMQLRKVCNHPELFERNEGSSYFNFAEIPNSLLSPPFGELQDVHYAGKRNPIIFEIPKLVYEGIISNMENSGNICGFQNGYLNRLFNIFLPSNIYRSAIPEVSSSKESLLSSGAFGFTRLSNLCPVEASFLATASLFERLVFSVMQWNRNYTAEILDEFLDSEDTGIQSSQNDSTKVRAVARLLLSSTKAKPSLLRTKIGTGPIDGPYEALVLSHRDRLASNIRLLRSAYAFIPPARAPPINVWCADRNFAYKFTDEMYDPWAKKLFLGFARTSEFNGPRQPIAPHXLIQELNTDLPIIEPMLQLPYRIFGSSPPMSNFDPAKMLTDSGKLHTLDMLLRRLRAEGHRVLLFAQMTKMLDILEDYMNFRKFKYFRLDGSSAISDRRDMVRDFQNRNDIFVFLLSTRAGGLGINLTAADTVIFYEIDWNPTQDQQAMDRTHRLGQTKEVTVYRLICKDTIEEKILQRAKQKNAVQELVMKGKHVQDDHLMRQEDVVSLLIDDXXQIAHKLKEISMQAKDRQKRRRAKGIKVDKEGDLTLEDLDDATAEAVDQDXNDQQKETSSSKRSKLTRKXKNLAPAQLFTEINAPELPKKQCXQCCPRTKVLQAVC

SEQ ID NO: 8545 - protein, 233 aa, Zea mays
  unsure (1)..(233): unsure at all Xaa locations
XIRHEGMFKEMIVHRXXNVLLTTYEYLMNKHDRPKLSKIQWHYIIIDEGHRIKNASCKLNADLKLYRSSHRILLTGTPLQNNLEELWALLNFLLPNIFNSSEDFSQWFNKPFESNGDNSPDEALLSEEENLLIINRLHQVLRPFVLRRLKHKVENELPEKIERLVRCEASAYQKLLMTRVEENLGGIGAVKVRFVHNSVMELXNIXHHPYLSQLHXERDEGYLPXHFTTSILX

SEQ ID NO: 8546 - protein, 322 aa, Zea mays
  unsure (1)..(322): unsure at all Xaa locations
XXDSFKANQPVXDPFLQLPYRIGGSSPPMSNFDPAKMLTDSGKLHTLDMLLRRLRVEGHRVLLFAQMTKMLDILEDYMNFRKFKYFRLDGSSAISDRRDMVRAFQNRNDIFVFLLSTRAGGLGINLTAADTVIFYEIDWNPTQDQQAMDRTHRLGQTKEVTVYRLICKDTIEEKILQRAKQKNAVQELVMKGKHVQDDHLMRQEDVVSLLIDDXXQIAHKLKEISMQAKDRQKRRRAKGIKVDKEGDLTLEDLDDATXEAVDQDKTTSKKEPRNSDSRYSAHGGCHVRAPAQLFTETNAPELPKKQVXRQCCPRTKVLQAVC

SEQ ID NO: 8547 - protein, 257 aa, Zea mays
  unsure (1)..(257): unsure at all Xaa locations
LKRIPMDNKLLLTGTPLQNNLAELWSLLNFILPDIFSSHQEFESWYNFSRFDFSGGNEETDEKKRLHVVSKLHAILRPFLLRRMKEDVEQMLPRKKEIIIYANMTEQQKQIQHHLIEKTFDNYLHEESDIILKRPGIRARLHNLMIQLRKNCNHPDLLESPVDSTGLYPPVEKLLEQCGKFQLFDRLLNFLMAQKHKVLVFSQWTKVLDIIEYYLDSKGHAVCRIDGNVKLEERRRQVIPFPHLSFGCFLFYMAEXX

SEQ ID NO: 8548 - protein, 339 aa, Zea mays
  unsure (1)..(339): unsure at all Xaa locations
PRVVTLRRDSFDKSEMEFYEALYTQSVTXFDAYVDAGTLMNNYAHIFDLLTRLRQAVDHPYLVAYSKTAGHPEGMKNEGNESMESQCGICHNLAEDVVVTSCDHAFCKTCLIDYSAALGNVSCPSCSIPLTVDLTAQNSVGKVTRSVKGRKCSGILSRLRLVDFKTSTKIDALREEIRNMIEHDGSAKGIVFSQFTSFLDLIQFSLERSGIKCVQLNGAMNITEKGRAIDTFTHDADCRVFLMSLKAGGVAKNLTVASHVFLMDPWWNPAVENQAQDRIHRIGQFKPIKSTRFVIKDTVEERILQLQQKKELVFEGTVGDSSYAMSKLTEADLKFLFQI

SEQ ID NO: 8549 - protein, 369 aa, Zea mays
  unsure (1)..(369): unsure at all Xaa locations
XQKKRAFYCGDVGEGCRQKFKGYDAAGTIRXENYANILVLLLRVXQACDHPLLLKGHESDLGEGNSIERGKQLPKETVTNLLEKVEKGAGICSICNDPPEDAVVTTCGHVFCYQCVHERLTSDGHVCPYALCGNKLSFRSVFTPAVLKLCISPKPEFGEETSCSTAADKPSSICESSYISSKIRAAVEILNSIIKTPALTAGDTTESIPSMAPPVKAIVFSQWTGMLDLLELSLSRNGIQFRRLDGAMSLDLREKEVNGFKTDPEVRVMLMSLKAGNLGLNMVAACHVIMLDPWWNPYAEDQAVDRAHRIGQTRPVTVSRFTVKDTVEDRILALQEKKREMVESAFGEDGSRGTATKLTVEDLRYLFMV

SEQ ID NO: 8550 - protein, 663 aa, Zea mays
  unsure (1)..(663): unsure at all Xaa locations
KNSARGSHDGLDDYWKDFALAVESTKLDEVDEAAIEKEDNGKMEDIDCNHDIRIHEDLGHVCRVCGMIVRRADSIIDYQWKKASRRRTNGYGGHSKDADEIDCGTVKLSEDFIVADIAIHPRHARIMKPHQLEGFNFLVKNLIGDKPGGCILAHAPGTGKTFMLISFIQSFMARYPSARPLVVLPKGILGIWKTEIKRWQVQDIPVYDFYSVKAEKRVEQLQILKSWEDKMSILFLGYKQFSTIVTDDGGSNVTAACRDRLLKVPNLLILDEGHTPRNRETNVLESLNRVETPRKVVLSGTLFQNHVEEVFNILNLVRPKFLRMESSRPTARRIMSQVEIVGRSSKGLADGAFTKAVEETLLNDENFKRKAHVIRGLRELTKDVLHYYKGDILDELPGLVDFSVFLKLTPKQKDIIYKLEAHDRFKRNAVGSALYIHPCLSELSDRANTFRDDLVDSLVDSITVRDGVKANFFMNILSLANSAGEKVLAFSQYISPMIFFERLLVKKKGWHVGKEIFMISGDTSQEDRELATDHFNNSADAKIMFGSIKACGEGXISLVGASRVVILDVHLNPSVTRQAIGRAFRPGQQKKVFVYRLVAADSDEVKVHETAFKKEVIPKLWFEWSEHCTTEDFKLGQIDIDDSGDELLDTKAIRKDIKALYRR

SEQ ID NO: 8551 - protein, 221 aa, Zea mays
  unsure (1)..(221): unsure at all Xaa locations
VDEGHRLLNKDSKLFGQRKDYNTKHRVLLTGTPVQNNLDELFMLMHFLEGESFGSITDLQEEFKDINQDKQIEKLHGMLKPHLLRRFKKDVMKELPPKKELILRVELTRKQKEYYKPILTKNYDVLARRNGGHTSLINVVMELRKLCCHGFMIDEPDLEPANPEEGLKTLLYSSGKMQLLHKMMEKLXXQXHRSLIYSQFHHMLDLLEDYLNYRKWTYERX

SEQ ID NO: 8552 - protein, 151 aa, Zea mays
  unsure (1)..(151): unsure at all Xaa locations
XWRYIIIDEAHRIKNENSLLSKTMRIYNTNYRLLITGTPLQNNLHELWALLNFLLPEIFSSAETFDEWFQISGENDQQEVVQQLHKVLRPFLLRRLKSDVEKGLPPKKEAILKVGMSQMQKQYYRALLQKDLEVINAGGERKRLLNIAMQX

SEQ ID NO: 8553 - protein, 188 aa, Zea mays
  unsure (1)..(188): unsure at all Xaa locations
XCDLLICDEAHRLINDQTLTNKALAALPCSRRILLSGAPMQNDLEEFFSMVNFTNPGVLGDASYFRRYYEAPIICGREPTASAEEKKLGSERSAELSAKVNQFILRRTNALLSNHLPPKIIEVVCCKLTPLQTTLYNHFIHSKNIKRLISEETKQSKILAYITALKKLCNHPKVNXFNISTGDAFILQ

SEQ ID NO: 8554 - protein, 958 aa, Zea mays
  unsure (1)..(958): unsure at all Xaa locations
XIYDWIKSTGTIRVDPEDEKRRAQRNPMYQVKTYKNLNNKCMELRKVCNHPLLSYPFLNHGKDFMIRSCGKLWNLDRILIKLHKSGHRVLLFSTMTKLLDIMEDYLQWRRLVYRRIDGTTSLEDRESAIVDFNRPGSDCFIFLLSIRAAGRGLNLQSADTVVIYDPDPNPQNEEQAVARAHRIGQTREVKVIYMEAVVDNISSYQKEDELRNGGSGDLEDDLAGKDRYMGSIESLIRNNIQQYKIDMADEVINAGRFDQRTTHEERRMTLETLLHDEERYQDSVHDVPSLQEVNRMIARTESEVELFDQMDEDFDWTGDMTKHHQVPKWLRVNSNEVDAVVASLSKKPSRNMSSGGIALDTNETLEKRRGRPRGTGKYSIYREIDDEDLEESDEDSEERNTASLPEEGRVGEFEDEEDNDDSVPDNKDESEEEEPMNDDVYEFTEGLRGRKANRMEEAGSTGSSSGSRRLPPPVPSSSSKKIGSLSALDARPGTLSKRTPDDLEEGEIAMSGDSHMDLQQSGSWNHERDDGEDEQVLQPKIKRKRSIRLRPKPNAEKQEDRSGEGAFPQRAARXARRGSSYSETEXRNMSSRKVSPASRSGKLSHLSGSGEGSAELSKENWSSKAIDSTAPEFGGTKMSDSMQRKCKNVISKLWRRIDKEGHQMIPNISSWWRRNENSSFRGPAGSTLDLQKIEQRVDGLEYGAVTEFIADMQQMLKSVVQHFSYRHEVRIEAETLHNLFFNIMKIAFPDSDFMEAKNAMSFSNPGSGAAAAPSSSKHAAPSLKRSRAXVPVPVPVKQSSSMARDTAAGTISLARRSRPAGPTAPGQRETPDMAHPSDMFIVKKKRQERARSGIGSPSSSXPRRRTSXSPANPGRPGPAPSPRGARTPXSRGIHRHTRLSSRCRWGSGGAHSDHQAGASSSVQWAKPAKRLRTDRGQRRPSLTVGSSLASYGCVNAST

SEQ ID NO: 8555 - protein, 741 aa, Zea mays
  unsure (1)..(741): unsure at all Xaa locations
NISREKSEDDLPEGVLAVPLLRHQKMALAWMVSKENSSHCAGGILADDQGLGKTVSTIALIQKQRMEQSKFMFVDSDRLKSEALNLDEDDEGEQTVSNEPKKDQGACSLSTSAGTKKAKVSTSSASTSRSMTRPAAGTLVVCPASVLKQWSNELTDKVSESAKLSVLVYHGGARTKDPRELAKYDVVVTTYTIVANEVPKQMADDDADQKNSEEXXSASNKRKPSANMQTKAKKKKKKLKDSNXXDLDSGPIARVRWFRVVLDEAQTIKNFRTVVARACCGLRAKRRWCLSGTPIQNAIDDLFSYFRFLKYDPYCTYNSFCTMIKHPIARDAINGYKKLQAVLKVVLLRRTKETVINGKPIINLPPKTINLNKVDFTQEERSFYLMLEERSRQQFKAFAAAGTLKQNYANILLMLLRLRQACDHPILVKGNQSEYGGDGSIEMAKKLPKEVVIDLLAKLEVGSTLCGLCNDTPEDAIVTICGHVFCYQCIHERITTDENMCPAPNCSRTLGLELLFSSGALKICISGKSSSAVASSSSDNESSFSQSSFVSSKIQAAIDILNSIIXHGSXXTESYTMESSRSGLGPVKAIVFSQWTGMLDLLELSLNINCIQYRRLDGTMSLNLREKNVKDFNTDPEVRVMIMSLKAGNLGLNMVSACHVILLDLWWNPYAEDQAVDRAHRIGQTRPVTVSRLTVKDTVEDRILALQEEKRTMVNSAFGDDKAGGHATRLTVEDLRYLFRI

SEQ ID NO: 8556 - protein, 159 aa, Zea mays
  unsure (1)..(159): unsure at all Xaa locations
RXQSWLGCYNRVSLSSYSVRMLDILEKFLIRKGYCFSRFDGTTPMNARQSLVDEFNRSPSKQVFLISTRAGNLGVNLVSANRVVIFDPSWNPAQDLQAQDRSFRYGQRRHVTVFRLLGAGSLEELIYSRQIYKQQLSNIAVSGKIERRYFEGVQDSVFS

SEQ ID NO: 8557 - protein, 341 aa, Zea mays
  unsure (1)..(341): unsure at all Xaa locations
XSKKQKDKFSDKYEKGVWASLTSNVTDDNAEKVRSILKPFVHIHNGNILRTLPGLRESVIILKPLPLQKSIIKKVENIGSGNNFEHEYVISLASTHPSLVTAINMSEEEASLIDKPMLAKVRSNPYEGVKTRFVIEVVRLSEALREKVLIFSQFIQPLELIKEHLRKFFKWREGKEILQMDGKILPRYRQASIEAFNNPNNDSRVLLASTRACCEGISLTGASRIVLLDVVWNPAVGRQAISRAFRIGQKKFVYTYNLITYGTGEGDKYDRQAEKDHLSKLVFSTEDEFNNVRNMLSKAVSEDKVLEEMTSHDQLKGMFLKIHYPPTESNIVYSYNQIATE

SEQ ID NO: 8558 - protein, 382 aa, Zea mays
  unsure (1)..(382): unsure at all Xaa locations
XPRVRQNDLHELWSLLEFMMPDIFATGDVDLKKLLNAEDRELISQIKSILGPFILRRLKSDVMQQLVPKIQHVKFVVMGTEQSEAYKNAINEYRAACQARSAKSSDGISNNVAGLIPKRQISNYFTQFXRKIANHPLLIRCIYGDKDVDRIXRLRYPKGAFGFQCSLVRAIQGLKNYSDFNIHQLLLSYGDVGTKGALKDEHVFASAKCQALGELLPSLANDGHRVLIFSQWTTMLDILEWALEIIGVTYRRLDGGTAVTERQTIVDTFNNDLSIFACLLSTRAGGQGLNLVGADTVIIHDMDFNPQMDRQAEDRCHRIGQQKPVTIYRLVTKDSVDENIYEIARRKLVLDAAILHSGAELDNSTDVPEKTMGEILASLLLV

SEQ ID NO: 8559 - protein, 156 aa, Zea mays
  unsure (1)..(156): unsure at all Xaa locations
XQGMWVELSGKMHVLARXLGHLRQKTDDRIVLVSNYTQTLDLFVQLCRERRYPYVRLDGSTSINKRQKLVNQFNDLSRDEFVFLLSSKAGGCGLNLVGGNRLVLFDPDWNPANDKQAAARVWRDGQKKRVYIYRFLSTGTIEEKVYQRQMSKEGLX

SEQ ID NO: 8560 - protein, 644 aa, Zea mays
  unsure (1)..(644): unsure at all Xaa locations
XDAWVKGGVLLIGYSSFRNLSLGKHVKDKNSANEITYALQCGPDILVCDEAHMIKNRRADITQALKQVRTQRRIALTGSPLQNNLMEYYCMVDFVREGFLGSTHEFRNRFQNPIENGQHTNSTSDDVKIMNQRSHILFEQLKGFVQRKSMNVVKNDLPPKKVFVITVLCLQLQRKLYKRFLDVHGFSSSGYSEKSHRSFLAKYQTLSQVWNHPGLLQMAKEQRGNLRRGVAGRCVGWGESSSDDNVENYLPNGEKQKDKADQQSKKSNIIMNEESNWWEELLEENAYGKADYSGKMTLLLDILSKSSELGDKVLVFSQSLTTLDLVEFYLAXLQINGKEGKHWKRGKDWYRLDGSTPSSDRQNLVEMFNDLENTRVKCTLISTRAGSLGINLHAANRVVLLDGSWNPTHDLQAIYRVWRYGQTKPVYAYPLMAHQTMDQFIYKRQVTKEGLAARVVDRQQVSRTISKEEMLHLFEFGEEELMEQNENGSTMIEKPSTSNTIKTSVPVPVDSLMLSLLSEQTRWISGYHEHEALLQENEEEKLTKEEQDLALSEWESLRKAASDPERKSSTVPTYPNPVRPLKPASRSRQLQQPKANSNNQKKCTNLTHLLTLRSHGTKAGCTTTCNECGQEISWETLNRDGRSR

SEQ ID NO: 8561 - protein, 579 aa, Zea mays
ELTKYDVVLTTYSIVSMEVPKQSNPDSDGEEKGKPDPYGAPVSSSGSKKRKASSSKKTKNKSVAESCLPEKPLAKVAWFRVILDEAQSIKNYRTQVARACWGLRAKRRWCLSGTPIQNAVEDLYSYFRFLRYNPYAVYKQFCTLIKIPISRNPNNGYKKLQAVLKPVMLRRTKATMLDGEPIISLPPKTVSLKTVDFTSEERGFYNTLEVESREQFKEYAAAGTVKQNYVNILLMLLRLRQACDHPHLVRGYDSCSSWMSSLEMVKKLPMERQHKLLICLQSCSAFCALCNDAPEDPVVTLCGHVFCNQCILEQLTGDDSVCPVSNCRVRLNTSSLFSRGTLECSLSKLASDFKSDDTCMEMIHAEKRPGMDSSYASSKLRAALDILLSLPKIDPTIDSKCSIGIESEKFDGKGISEQTDTKLTEKAIVFSQWTRMLDLLEVHLKASHVTYRRLDGTMSVAARDKAVNDFNMVPEVTVMIMSLKAASLGLNMVAACHVLMLDLWWNPTTEDQAVDRAHRIGQKRPVTVSRLTIKDTVEDRILALQEKKREMVASAFGEDKSGSRQTRLTVEDLNYLFMV

SEQ ID NO: 8562 - protein, 334 aa, Zea mays
  unsure (1)..(334): unsure at all Xaa locations
XHASGGYDSCSSWMSSLEMVKKLPMERQHKLLICLQSCSALCALCNDAPEPPVRPRVRPRVRPRVRPRVRTGDDSVCPVSNCRVRLNTSSLFSRGTLECSLSKLASDFKSDDTCMEMIHAEKRPGMDSSYASSKLRAALDILLSLPKIDPTIDSKCSIGIESEKFDGKGISEQTDTKLTEKAIVFSQWTRMLDLLEVHLKASHVTYRRLDGTMSVAARDKAVNDFNMVPEVTVMIMSLKAASLGLNMVAACHVLMLDLWWNPTTEDQAVDRAHRIGQKRPVTVSRLTIKDTVEDRILALQEKKREMVASAFGEDKSGSRQTRLTVEDLNYLFMV

SEQ ID NO: 8563 - protein, 334 aa, Zea mays
  unsure (1)..(334): unsure at all Xaa locations
XHASGGYDSCSSWMSSLEMVKKLPMERQHKLLICLQSCSALCALCNDAPEDPVVTLCGHVFCNQCILEQLTGDDSVCPVSNCRVRLNTSSLFSRGTLECSLSKLASDFKSDDTCMEMIHAEKRPGMDSSYASSKVRAALDILLSLPKIDPTIDSKCSIGIESEKFDGKGISEQTDTKLTEKAIVFSQWTRMLDLLEVHLKASHVTYRRLDGTMSVAARDKAVKDFNMVPEVTVMIMSLKAASLGLNMVAACHVLMLDLWWNPTTEDQVVDRAHRIGQKRPVTVSRLTIKDTVEDRILALQEKKREMVASAFGEDKSGSRQTRLTVEDLNYLFMV

SEQ ID NO: 8564 - protein, 187 aa, Zea mays
  unsure (1)..(187): unsure at all Xaa locations
XPXLYHCNSYGSILSMNGAFEVFEGTLHPYQLEGLNFLRYSWFHNKRVILGDEMGLGKTIQSIAFLASLFEDKFGPHLVVAPLSTLRNWEREFATWAPQMNVVMYFGAAASRDIIRKYEFYYPKEKLKKLKKKKSSPSNEDKKQSRIRFDVLLTSYEMINMDSSILKNIEWECLVLLFCFSIISLSX

SEQ ID NO: 8565 - protein, 254 aa, Zea mays
  unsure (1)..(254): unsure at all Xaa locations
NNDLGTTSVTVLCHIXIFWFNLILVXFAATWQNNLHELWALLNFLLPEIFSSAETFDEWFQISGENDQQEVVQQLHKVLRPFLLRRLKSDVEKGLPPKKETILKVGMSQMQKQYYRALLQKDLEVINAGGERKRLLNIAMQLRKCCNHPYLFQGAEPGPPYTTGEHLIENAGKMVLLDKLLPKLKERDSRVLIFSQVCFPIPCRFECIIYLASVCXEISDTTLDGEHVHSAPHXKLGCPRIFICLTXHHPAGMQ

SEQ ID NO: 8566 - protein, 179 aa, Zea mays
  unsure (1)..(179): unsure at all Xaa locations
CMPAVASSSSDNESSSISQSSFVSSKIQAAIDILNSIIVMDPLTESYTMESSRSGLGPVKAIVFSQWTGMLDLLELSLNINCIQYRRLDGTMSLNLREKNVKDFNTDPEVRVMIMSLKAGNLGLNMVSACHVILLDLWWNPYAEDQAVDRAHRIGQTRPVTVSRLTVKDTVEDRILALX

SEQ ID NO: 8567 - protein, 354 aa, Zea mays
  unsure (1)..(354): unsure at all Xaa locations
XKAQYVVLLSGTPALSRPIELFTQIQALYPTVYKSVSEYGNIYCKGGFFGLYQGASNHEELHNLMKATVMIRRLKKDVLSQLPVKRRQQLETLKVKIESSDSKEMIDSLRFAYQNIVNKIYTDSAVAKIPAVLDFLGTMIEEGCKFLIFAHHQPMIDAIEKHLLKKKVKCIKIDGKTPLTTRQTLVTDFQNNDDVKAAVLSIKAGGYGITLTAASTVIFAELSWTPGDIIQAEDRAHRIGQVSSVNVYYLLSNGTIDDLMWDVVQGKLENLGQMLDGQEKTLEVSQRDCRPSPSKKQKTLVGFLKRPSASTSAEEGMXPALKQPRIXGAVVACERTRSGHRQPAATMVFGSITL

SEQ ID NO: 8568 - protein, 370 aa, Zea mays
  unsure (1)..(370): unsure at all Xaa locations
XSVPVSYGLRVVQASGKLIVLDLILKKLHECGHRVLLFAQMTQTLDILQDFLELRNYTYERLDGSVRAEERFAAIRNFSSQSTKGLIRDDNRSEAFVFMISTRAGGVGLNLIGADTVIFYEQDWNPQADKQALQRAHRIGQLNHVLSINLVSQRTMKKVIMRRADRKLKLSHNIIGEEDGTDGKGGDPGIEASDMRSIIFGLHLFDPADTATETIDEDITAETFSVEKLAKLKTMSEKVVMMRSHESSEKDERAFEINPNMTDDSGTVIRRASDSIRIDPGLNEAAYLSWVKKFKEASISSEDATVGFGRQRAAPEEKLLKHDVNKQKIEEKRLAKWESLGYQTLAVKEPDITASQNISDAXGSIQFGYG

SEQ ID NO: 8569 - protein, 469 aa, Zea mays
ELTKYDVVLTTYSIVSMEVPKQSNPDSDGEEKGKPDPYGAPVSSSGSKKRKASSSKKTKNKSVAESCLPEKPLAKVAWFRVILDEAQSIKNYRTQVARACWGLRAKRRWCLSGTPIQNAVEDLYSYFRFLRYNPYAVYKQFCTLIKIPISRNPNNGYKKLQAVLKPVMLRRTKATMLDGEPIISLPPKTVSLKTVDFTSEERGFYNTLEVESREQFKEYAAAGTVKQNYVNILLMLLRLRQACDHPHLVRGYDSCSSWMSSLEMVKKLPMERQHKLLICLQSCSAFCALCNDAPEDPVVTLCGHVFCNQCILEQLTGDDSVCPVSNCRVRLNTSSLFSRGTLECSLSKLASDFKSDDTCMEMIHAEKRPGMDSSYASSKLRAALDILLSLPKIDPTIDSKCSIGIESEKFDGKGISEQTDTKLTEKAIVFSQWTRMLDLLEVHLKASHVTYRRLDGTMSVAARDKAVND

SEQ ID NO: 8570 - protein, 728 aa, Zea mays
  unsure (1)..(728): unsure at all Xaa locations
DLLEDYLSYRKWTYERIDGKISGADRQIRIDRFNAKNSTRFCFLLSTRAGGLGINLATADTVIIYDSDWNPHADLQAMARAHRLGQTSKVMIYRLVSRGTIEERMMQLTKKKILLEHLVVGRLTKANNVNQEELDDIIRYGSKELFEDENDESRQIHYDEAAIERLLDRDQVDGDESVEDEEEDGFLKGFKVANFEYIDEAKAQAEKEEARRKAAAEAENSERNYWDELLKDRYDVQKVEEHTAMGKGKRSRKQMAAADEDDIHDLSSEDEDYSLEDDISDNDTSLQGNISGKRGQYSKRKSRNVDSIPLMEGEGRTLRVLGFNHAQRAMFLQTLNRFGFQNYDWKEYLPRLKGKSVEEIQRYAELVMAHLVEEINXXSDYFSDGVPKEMMRVDDVLVRIANISLIEEKMAATGPGKITNIFPNYLLYEFQGLSGGRIWKAEHDLLLLRGILKHGYARWQYISDDRENGLFEAARRELHLPSVNEIIGAQLNEANGNLEGAQEGQANTTSMSHYKEIQRKIVEFLRKRYHLMERALNMEYAVIKKKIPVPDDITEQGVPXXGHAPFIPDISELLRELPNLEPISTNELVSEGTAGQLQVPHLYNKMCGVLEESGAYALSSFFGDKSASSSLANSLRQFETVCENVVEALRPHQNGTGSXPSKRNWXMQPPKQQQQQLLNKIQAMXAPHGQSSTAKADMEIDVXVPEWXERESPSNHYVYCGQNVRYIL

SEQ ID NO: 8571 - protein, 228 aa, Zea mays
  unsure (1)..(228): unsure at all Xaa locations
XKLEPCPRLASTRQIISVWTETACYSISPTGAGSLEELIYSRQIYKQHSNIAVSGKIERRYFEGVQDDKNRRPSKQVFLISTRAGNLGVNLVSANRVVIFDPSWNPAQDLQAQDRSFRYGQRRHVTVFRLLGAGSLEELIYSRQIYKQQLSNIAVSGKIERRYFEGVQDDKKFQGELFGICNLFRDLSDKLFTSEIIEMHGEHGKSSATEATGIREIVDTDLFXFTRE

SEQ ID NO: 8572 - protein, 168 aa, Zea mays
  unsure (1)..(168): unsure at all Xaa locations
XISSVIRDLPPKQKQVLKVVLNPRHQKVYQTHLQRERQKILGLIEDVNKNRFTIFQSLTLLRQLSLDPSLIDPSLSGIRASKLDVLFEQLQDLVAEGHRALIFSQFTGFLGKVRERLIEENIEFCYLDGSTRNRADVVSEFKNGAAQKLKISLKAGGFGLNLPRRLGV

SEQ ID NO: 8573 - protein, 177 aa, Zea mays
  unsure (1)..(177): unsure at all Xaa locations
IRXSRCIKIDGKTPLTTRQTLVTDFQNNDDVKAAVLSIKAGGYGITLTAASTVIFAELSWTPGDIIQAEDRAHRIGQVSSVNVYYLLSNGTIDDLMWDVVQGKLENLGQMLDGQEKTLEVSQRDCRPSPSKKQKTLVGFLKRPSASTSAEEGMXPALNEAASDLRRGRGLXANQIRS

SEQ ID NO: 8574 - protein, 268 aa, Zea mays
  unsure (1)..(268): unsure at all Xaa locations
XTRPXVDFSVFLKLTPKQKDIVHKLEMHDRFKRSAVGSALYIHPCLSGLSDRAHTLRDDSVDSLMDSINVRDGVKANFFMNILSLANSAGEKVLAFSQYILPMTFFERLLVKKKGWHVGREIFMISGDTSQEDREAAVDRFNISADAKVLFGSIRACGEGISIVGASRVVILDVHLNPSVTRQAIGRAFRPGQQKKVFVYRLVAADSDEVKVHETAFKKEVIQKLWFEWSEQCTTEDFKLGQVDIDDSGDELLDTRAIRQDIKALYRR

SEQ ID NO: 8575 - protein, 168 aa, Zea mays
DLLELILYSFHMFLLQNNLHELWAFLNFLLPEVFSSAETFDEWFQISGENDQQEVVQQLHKVLRPFLLRRLKSDVEKGLPPKKETILKVGMSQMQKQYYKALLQKDLEVVNGGGERKRLLNIAMQLRKCCNHPYLFQGAEPGPPYTTGDHKVTNAGKIYITSRSFRKV

SEQ ID NO: 8576 - protein, 506 aa, Autographa californica nucleopolyhedrovirus
MDNYKLQLQEFFDQAPDNDDPNFEHQTPNLLAHQKKGIQWMINREKNGRPNGGVLADDMGLGKTLSVLMLIAKNNSLQLKTLIVCPLSLINHWVTENKKHDLNFNILKYYKSLDADTVEHYHIVVTTYDVLLAHFKLIKQNKQSSLFSTRWHRVVLDEAHIIKNCKTGVHNAACALTATNRWCITGTPIHNKHWDMYSMINFLQCRPFNNPRVWKMLNKNNDSTNRIKSIIKKIVLKRDKSEISSNIPKHTVEYVHVNFNEEEKTLYDKLKCESEEAYVKAVAARENENALSRLQQMQHVLWLILKLRQICCHPYLAMHGKNILETNDCFKMDYMSSKCKRVLDLVDDILNTSNDKIILVSQWVEYLKIFENFFKQKNIATLMYTGQLKVEDRILAETTFNDAANTQHRILLLSIKCGGVGLNLIGGNHIVMLEPHWNPQIELQAQDRISRMGQTKNTYVYKMLNVEDNSIEKYIKQRQDKKIAFVNTVFEETLLNYEDIKKFFNL

SEQ ID NO: 8577 - protein, 1953 aa, Schizosaccharomyces pombe
MTTRLDRLVVLLDSGSTSVVRETAAKQIGDIQKVHPDELYNLLGRVVPYLKSKNWDTRVAAAKAIGGIVENVPVWNPNRTSPVKKEETEDLPSFNGDTEEKPFIKTEEGAPASSQSQVVVSSNLTSNSEVSKLEEERLSTRSHSQEIKPIVDFGPDEETAKELNTELKGKFENSLLSFESFDIANVLKAGKKLLGSASRDYDVNPANYSTHYLQQLSNLKSRLDLAGEYLDDSIMNDLGDNVGSNSKGSPTTSIPEHKTSINNNKPEDTPTPSENVHLSARQRNALKRKARQMKNSQKVRVIDVAPTLVHQQNSTSSADKKTGADYNFTAQSRSDRLVVEHKAPIVPSAAVAVTSDSVWPFETLVELLLIDMFDPSWEIRHGACMGLREIIRYAGFGYGRVVGKSEAENEQLNKKYFDDLLCRIACVFALDRFGDYLADQVVAPIRESVSQVLGVALIYVPNDSVFSMYKVLHSLVFQNELGLTNTVWEAAHGGMLGIKYLVAVKYPLFFSHSDYLDSLINTVIHGLANHDDDVRAVSALTLLPIADKLVQEKLSSCKNLLKVLWDCLDDVKDDLSSSTSCVMDLLSSLCSFTEVMNLMQETANSDPEFSFETLVPRLFHLMRYTLTGVRRSVVYALTKFISVQTSCSWITGLTLRLCFQNVLLEQQEDISKSSCELAQRVMDILYRDGPESFSKLLYSHIEPMLKVSITPIGSFRRPYPLDTTLIVKPSGQPYAPSTSRERNNNISELSNSRTKHRAKDDPKGSFCFSVDEPMLNGDVEFVGEERMLKARLRASSLLGRIIGRWKRDEILLFFKPFLQACLTSSFSTPVVLGSRLIESFFEVEDNDLTIQKDELYHLLCDQFATVPRENYANLVSQLHVVRAQCNALLNTFLDVGRLSRSKIPSLAVVVKGDPEAGPIAFGIADAEKLVGPTYENLCKLLSPSQKAQSSKALNEIKYLIIDEISIYKIAKERQDIQCSASIASAMVTYDKLPKKLNSIIKGIMESIKKEQFSCLQMHSASAMMKLISACYKESRQVISEKIVRNLCAYVCMDTTETPIFHDSGKNGILSLHSIGTSDDNDEQVSGKLVDDSDDVSNDRKSSLSSVSDKDAAVLQRMGAQLTLQQMAQNFGSSLFSRVPVLSQCLFVPLQQYAESGFPSEVDQASCTVGQDLLDAMSILRFLVAYLDSGLQSEIVSTLPHLLATLQSNYSAVRNMASKCFAAITESNAAGSKALHLLVEDVVPLLGDASSTIHRQGAIECIYHVVQRLGVRILPYILYLIIPLLGRMSDADQDVRVLATTSFATLVKLVPLEAGLPDPPDLPQYLLDSREKERKFLEQMLNPSKVEAFSIPVPISADLRKYQQEGVNWLAFLNKYELHGILCDDMGLGKTLQTICIVASDHYNRQKLFEESGSPKFAHVPSLIVCPSTLAGHWQQELSTYAPFLKVSAYVGPPAERAKIRSKMKKSDVVVTSYDICRNDVDELVKIDWNYCVLDEGHVIKNARAKLTKAVKSLRSYHRLILSGTPIQNNVLELWSLFDFLMPGFLGTEKTFQERFVRPIAASRDAKSSSKERERGTLALEAIHKQVLPFMLRRLKEDVLADLPPKIIQDYYCDMSDLQRKLLNDFVSQLNINEELEDDETEKTQGTRKKKSQKAHIFQALQYMRKLCNHPALILTEKHPKRNAIVKQLAKENSGLHDLKHAPKLTALGQLLRDCGLGNSSVNSNGIDSALTNAVSEHRVLIFCQLKDMLDMVEKDLLQATMPDVTYMRLDGSVEPTKRQEAVTKFNNDPSIDVLLLTTHVGGLGLNLTGADTVIFVEHDWNPMRDLQAMDRAHRIGQKKVVNVYRLITRGCLEEKIMGLQRFKMNVASTVVNQQNAGLSSIGTDQILDLFNTTADEQQTVQNIDKEESEDAAGRGLSGTSKKALEGLPEMWDESQYDEFNLDGFISTLPKDAS

SEQ ID NO: 8578 - protein, 635 aa, Schizosaccharomyces pombe
PDLPQYLLDSREKERKFLEQMLNPSKVEAFSIPVPISADLRKYQQEGVNWLAFLNKYELHGILCDDMGLGKTLQTICIVASDHYNRQKLFEESGSPKFAHVPSLIVCPSTLAGHWQQELSTYAPFLKVSAYVGPPAERAKIRSKMKKSDVVVTSYDICRNDVDELVKIDWNYCVLDEGHVIKNARAKLTKAVKSLRSYHRLILSGTPIQNNVLELWSLFDFLMPGFLGTEKTFQERFVRPIAASRDAKSSSKERERGTLALEAIHKQVLPFMLRRLKEDVLADLPPKIIQDYYCDMSDLQRKLLNDFVSQLNINEELEDDETEKTQGTRKKKSQKAHIFQALQYMRKLCNHPALILTEKHPKRNAIVKQLAKENSGLHDLKHAPKLTALGQLLRDCGLGNSSVNSNGIDSALTNAVSEHRVLIFCQLKDMLDMVEKDLLQATMPDVTYMRLDGSVEPTKRQEAVTKFNNDPSIDVLLLTTHVGGLGLNLTGADTVIFVEHDWNPMRDLQAMDRAHRIGQKKVVNVYRLITRGCLEEKIMGLQRFKMNVASTVVNQQNAGLSSIGTDQILDLFNTTADEQQTVQNIDKEESEDAAGRGLSGTSKKALEGLPEMWDESQYDEFNLDGFISTLPKDAS

SEQ ID NO: 8579 - protein, 1680 aa, Schizosaccharomyces pombe
MFAVQGNQKFPKGLTKDNIQSLYQQWQVMRNQGATEENNPEFAQISSILRMVQRAHYARMQQMRNQSSEFPDAENTNLRKQQDTLPTTGFNNLPEGKAGMQTLPGRPASNGPTPPNPGNGNVGLNNPSYMNSQASPNIMNAPLQRDTSVPPAPSMVHPHTNTNANSNNLKVYANQLSQQNTSNPTYHNAYDMASMMKNGSRMNNSFPPTTPYPPANDTTVNSSLPHSFASPSSTFEQPHTVQSRAPSVDTTSSSHSFSARNIPANVSMQQQMGRRGSIPVNPSTFSASSPPSGSMLASPYNGYQNDAASFAHSKLPSSANPNTPFNSTATVDVGAAGSHFPYPQPSNLDAINAKTYFQSSSNSPAPYVYRNNLPPSATSFQPSSSRSPSVDPNTVKSAQHIPRMSPSPSASALKTQSHVPSAKVPPTSKLNHAQLAMLKSQIVAYNCLNSPNGQVPPAVQQAIFGRVYGASNEVSPSMPFQQNVPQMSSVKKDTPTRDANMRTSKAPYIQNIPNQFQRRAYSATIPVKNESLAKPSVSPMPLQQSTGKTEVAKRAQFPTNVNYSSCVDPRTYVKTPIPFSKFSSSENLSLIPSLLPPSISWDDVFLSSEIAIACSIANRIDFLEKENRPKSVNKKILQQDKSKSMIELRCLRLLEKQRSLRETINSVIPHSDSLAAGNLRLMFRNVKRQTMQEANLVLALAEKQKTEHAMRQKEKLLTHLRSIMLHRKSIVTKVDKQNKAKTQRCKDIINFHAHLEKEEKKRIERSARQRLQALRADDEAAYLQLLDKAKDTRITHLLKQTDQYLENLTRAVRIQQSNIHSGNTSGKGSNSAELEAPISEEDKNLDYFKVAHRIHEEVEQPKIFVGGTLKDYQLKGLEWMLSLYNNNLNGILADEMGLGKTIQTIAFITYLIEKKNQQGPFLIIVPLSTLTNWIMEFEKWAPSVKKIAYKGPPQLRKTLQSQIRSSNFNVLLTTFEYIIKDRPLLSRIKWVHMIIDEGHRIKNTQSKLTSTLSTYYHSQYRLILTGTPLQNNLPELWALLNFVLPKIFNSIKSFDEWFNTPFANTGGQDKIGLNEEEALLIIKRLHKVLRPFLFRRLKKDVEKELPDKVEKVIKCPLSGLQLKLYQQMKKHGMLFVDGEKGKTGIKGLQNTVMQLKKICNHPFIFEDVERAIDPSGTNVDLLWRAAGKFELLDRILPKLFLTGHKTLMFFQMTQIMTIMEDYLRSKNWKYLRLDGSTKSDDRCSLLAQFNDPKSDVYIFMLSTRAGGLGLNLQTADTVIIFDTDWNPHQDLQAQDRAHRIGQTKEVRILRLITEKSIEENILSRAQYKLDLDGKVIQAGKFDNKSTPEEREAFLRSLLEHDGDDDHDLTYGELQDDELNELISRTDEELVLFKKLDKERAATDIYGKGKPLERLLTVNELPDFYKVEVDSFAVQSSSELEDQYLERKRRRRNSISYTELTLDELNTVDDPSSTLMPRKRGRPRKKTNSGSSLSTPLSQESSLARSGRKNTPSYKQKALRRYCMEIFERLYNLQSEDGRFVNGLFLYPPNRKLYPDYYIIIKRPIALGKIKRNIKNDRYGDVGELIADFMLMFNNAYTYNEEHSIVYEDAKLMEKTLKEVIEDLEKNNSLHAYEEEALNEEQASLVFLENSEAELPLDSGIVSAEDDKVITYEDSSSSYSE

SEQ ID NO: 8580 - protein, 1199 aa, Schizosaccharomyces pombe
MRAEKQYTRNEVEETIVRWKKLKESGATEHDNTEYAQLCDVLRSAQSEIEARRDLKGHIKRCFSSVDKNTEKLILKQQVLAYKKLSQNLPAPDDCILSVLLRLSKDEQLLQSIVKQPLQNSKVDGKVRRDFGSCQITPSAKQQRKYLQYQISEDDAIKNRMFRRMSDLESYPAVMRDVAELKDDNERLNLDTIKRNALVELKKLRLIKQQESLRHQVMHCQPHLRTIVNAVERMSCRRPKLVPQATRLTEVLERQQRSDRERRLKQKQCDYLQTVCAHGREINVRTKNAQARAQKANRAVLAYHSHIEKEEQRRAERNAKQRLQALKENDEEAYLKLIDQAKDTRITHLLRQTDHYLDSLAAAVKVQQSQFGESAYDEDMDRRMNPEDDRKIDYYNVAHNIREVVTEQPSILVGGKLKEYQLRGLQWMISLYNNHLNGILADEMGLGKTIQTISLITHLIEKKRQNGPFLVIVPLSTLTNWTMEFERWAPSIVKIVYKGPPQVRKALHPQVRHSNFQVLLTTYEYIIKDRPLLSRIKWIYMIIDEGHRMKNTQSKLTNTLTTYYSSRYRLILTGTPLQNNLPELWALLNFVLPRIFNSIKSFDEWFNTPFANTGGQDKMELTEEESLLVIRRLHKVLRPFLLRRLKKDVEAELPDKVEKVIRCQMSGLQQKLYYQMKKHGMLYVEDAKRGKTGIKGLQNTVMQLKKICNHPFVFEDVERSIDPTGFNYDMLWRVSGKFELLDRILPKLFRSGHRILMFFQMTQIMNIMEDYLHYRQWRYLRLDGSTKADDRSKLLGVFNDPTAEVNLFLLSTRAGGLGLNLQTADTVIIFDSDWNPHQDLQAQDRAHRIGQTKEVRIYRLITEKSVEENILARAQYKLDIDGKVIQAGKFDNKSTPEEREAFLRSLLENENGEEENDEKGELDDDELNEILARGDDELRLFKQMTEDLERESPYGKNKEKERLIQVSELPEFYQREEPEKTTDLLQEEPLGRGARRRTPVVYDEAVRDAQWMAEMDMESEARPTRGRPKRNIASVDETPALTLNGKPKKKRGPAPDTLTSEHRSLLRRVCLEIYKAVNELEDDNGRPLNKLFLELPSKKLYPDYYMIIKSPIALDAIRKHINGTFYKTLEAMKSDLMTMFNNARTYNEEGSFVYEDANKMQTAMETKIEELEEDGTLATLRGMEAEATSQLEDRIENEA

SEQ ID NO: 8581 - protein, 973 aa, Schizosaccharomyces pombe
MSVNEDLSHLGVFSVDQENLERDVTNTASEYIAHESREIEKKRLQKVRKEISSVKEKIRRLDERIDSRLTKISVKENFRKQLSKFRDTLQSLQSDENDIKRRLNNEDSANAPGIGAFSTEELERQELIRTGKVTPFRNLSGLQKEVDFDDESSIREAVIKSEGTYYETAPHLSSEPSNIDHGIIPRDEKDEYVTVDAVTEKVVTAAIDDGDDLVYRQRLNAWCANRKELRDQASASENNKDRGEFEGKDEWLLPHPSKKGQTFEGGFTIPGDIRPHLFRYQVTCVQWLWELYCQEAGGIIGDEMGLGKTIQIVSFLSSLHHSGKFQKPALIVCPATLMKQWVNEFHTWWAPLRVVVLHATGSGQRASREKRQYESDASESEAEESKTSIKLRGASSSFHRYAKNLVESVFTRGHILITTYAGLRIYGDLILPREWGYCVLDEGHKIRNPDSEISISCKQIRTVNRIILSGTPIQNNLTELWNLFDFVFPGRLGTLPVFQNQFALPINIGGYANASNVQVQTAYKCACMLRDLISPYLLRRMKLDVAADLPKKSEQVLFCKLTPLQRKAYQDFLQGSDMQKILNGKRQMLYGIDILRKICNHPDLVTREYLLHKEDYNYGDPEKSGKLKVIRALLTLWKKQGHRTLLFSQTRQMLDILEIGLKDLPDVHYCRMDGSTSIALRQDLVDNFNKNEYFDVFLLTTRVGGLGVNLTGADRVILFDPDWNPSTDAQARERAWRLGQKKDVVVYRLMTAGTIEEKIYHRQIFKQFLTNKILKDPKQRRFFKMTDLHDLFTLGDNKTEGTETGSMFLGSERVLRKDNSSRNGNEAEDIPARDRKKHKIHDKGKKVNSSKVFEKMGIASMEKYKPPQESNVTKTNSDSTLGDDSVLDDIFASAGIQSTLKHDDIMEASQTESILVEKEATRVANEALRAVSSFRRPPRQLIPPQQSTNVPGTSKPSGPITSSTLLARLKQRR

SEQ ID NO: 8582 - protein, 852 aa, Schizosaccharomyces pombe
MIQQPTTAKPRISTSSKLNTVLSKNKENVPGKLFKKFKCPSLVISEKRKELPLRKKPRVNYSEYGSVDGKYDSAYVSENVSGLATIKEANRLILNHERRDPSTVIKKQFSVPKPIKGHEDISKLCAHRPPPTLGMKRKVDFIPRPLYDPADEFAIVLYDPTTDADEIIPDIKEVLAEKRKKDELLKNRKGKKEISDSEPESDHDSCVSTDTVASCSTEQSLITSNTSKHRRPNKSLKDLLGIQKEKPPPPPVAVVIDPKLARILRPHQIEGVKFLYKCVTGRIDRCANGCIMADEMGLGKTLQCIALLWTLLKQSPQAGKPTIEKAIITCPSSLVKNWANELVKWLGKDAITPFILDGKSSKQELIMALQQWASVHGRQVTRPVLIASYETLRSYVEHLNNAEIGMLLCDEGHRLKNSDSLTFTALDKLNVQRRVILSGTPIQNDLSEYFSLLNFANPGLLGSRQEFRKNYEIPILKGRDADGTEKDKENGDAKLAELAKIVNRFIIRRTNDILSKYLPVKYEHVVFCNLSEFQLSLYKHFITSPEINKILRGTGSQPLKAIGLLKKICNHPDLLNLTEDLEGCEALFPPGFIPRELRGRDRNIDSSLSGKMLVLERMLYQIKQETDDKIVLISNYTSTLDLFEQLCRARGYKALRLDGTMNVNKRQRLVDTFNDPEKDAFVFLLSSKAGGCGINLIGANRLILFDPDWNPAADQQALARVWRDGQKKDCFVYRFIATGTIEEKIFQRQSHKQSLSSCVVDEAQDVERHFSLDNLRQLFQLNDHTVCETHETYKCKRCRDGKQFIRAPAMLYGDTSTWNHFTNPTLDRIEDHLLKREAGKQQVSTVFQYKSH

SEQ ID NO: 8583 - protein, 852 aa, Schizosaccharomyces pombe
MIQQPTTAKPRISTSSKLNTVLSKNKENVPGKLFKKFKCPSLVISEKRKELPLRKKPRVNYSEYGSVDGKYDSAYVSENVSGLATIKEANRLILNHERRDPSTVIKKQFSVPKPIKGHEDISKLCAHRPPPTLGMKRKVDFIPRPLYDPADEFAIVLYDPTTDADEIIPDIKEVLAEKRKKDELLKNRKGKKEISDSEPESDHDSCVSTDTVASCSTEQSLITSNTSKHRRPNKSLKDLLGIQKEKPPPPPVAVVIDPKLTRILRPHQIEGVKFLYKCVTGRIDRCANGCIMADEMGLGKTLQCIALLWTLLKQSPQAGKPTIEKAIITCPSSLVKNWANELVKWLGKDAITPFILDGKSSKQELIMALQQWASVHGRQVTRPVLIASYETLRSYVEHLNNAEIGMLLCDEGHRLKNSDSLTFTALDKLNVQRRVILSGTPIQNDLSEYFSLLNFANPGLLGSRQEFRKNYEIPILKGRDADGTEKDKENGDAKLAELAKIVNRFIIRRTNDILSKYLPVKYEHVVFCNLSEFQLSLYKHFITSPEINKILRGTGSQPLKAIGLLKKICNHPDLLNLTEDLEGCEALFPPGFIPRELRGRDRNIDSSLSGKMLVLERMLYQIKQETDDKIVLISNYTSTLDLFEQLCRARGYKALRLDGTMNVNKRQRLVDTFNDPEKDAFVFLLSSKAGGCGINLIGANRLILFDPDWNPAADQQALARVWRDGQKKDCFVYRFIATGTIEEKIFQRQSHKQSLSSCVVDEAQDVERHFSLDNLRQLFQLNDHTVCETHETYKCKRCRDGKQFIRAPAMLYGDTSTWNHFTNPTLDRIEDHLLKREAGKQQVSTVFQYKSH

SEQ ID NO: 8584 - protein, 1367 aa, Schizosaccharomyces pombe
MEPEHSNYDLKNHPTSVQESTLNGSAVTDPQFGNTTNSLPSMNGLLNHENSFASQQSLSSSAFDDSEMVTSTANSTVVSSALSTPKIDDAQNSDDVRVDGTRRSSRAKRPVYRDFSYTEIDEHEIPIPKKRKRKPAPKQKKSVASDDEDAYDKRHRFSINSASGTEIRTSLRSSKGKSVNYNEQEFYDDFEDEEEEVEEQVEEEYEPIIDFVLNHRKRADAQDDGPKSSYQYLIKWQEVSHLHNTWEDYSTLSSVRGYKKVDNYIKQNIIYDREIREDPTTTFEDIEALDIERERKNMLFEEYKIVERIVASETNEEGKTEYFVKWRQLPYDNCTWEDSDVIYSMAPNEVYQFLQRENSPYLPYKGVFYNTRPPYRKLEKQPSYMKGGEIRDFQLTGINWMAYLWHRNENGILADEMGLGKTVQTVCFLSYLVHSLKQHGPFLIVVPLSTVPAWQETLANWTPDLNSICYTGNTESRAILESMNSRKLKFNILLTTYEYILKDKQELNNIRWQYLAIDEAHRLKNSESSLYETLSQFRTANRLLITGTPLQNNLKELASLVNFLMPGKFYIRDELNFDQPNAEQERDIRDLQERLQPFILRRLKKDVEKSLPSKSERILRVELSDMQTEWYKNILTKNYRALTGHTDGRGQLSLLNIVVELKKVSNHPYLFPGAAEKWMMGRKMTREDTLRGIIMNSGKMVLLDKLLQRLKHDGHRVLIFSQMVRMLNILGEYMSLRGYNYQRLDGTIPASVRRVSIDHFNAPDSPDFVFLLSTRAGGLGINLNTADTVIIFDSDWNPQADLQAMARAHRIGQKNHVNVYRFLSKDTVEEDILERARRKMILEYAIISLGVTEKSKNSKNDKYDAQELSAILKFGASNMFKATENQKKLENMNLDDILSHAEDRDSSNDVGGASMGGEEFLKQFEVTDYKAEDLNWDDIIPEEEMERIEEEERMLAAQRAKEEERERREEEERENDEDHPSRTYKRTTKSITKRQQRREEMVREKEIRLLYRAMIKFGLVDERFDTIVKEAELQATDPKRIYSLSADMVKACDEAVERLGADDTKNKQPRKAILIEFKGVKNINAETVTLRVKDLTHLHRAYKGLDPLKQIIGYPIRSVHSWNCSWGIKEDSMLLAGINKHGFGCWQAIKNDPDLGLHDKIFLDEAKNDKESRYVPSAVHLVRRGEYLLSVVREHPDLFVVKTDQPTKRKYNRKAPTKSSTRQTTLDGSISNTKKSSRTKKKKEEETNRGDETSPEGTVGEDEVEEEPRQAEPPKRALRSNSGKAASNKRTTRNSMKTHSAMDTLTAVAALDAELDNMSNEKAKEEVDHVKSENGESVNEPNTEDLSLETEENTTVSDISPLVKNEA

SEQ ID NO: 8585 - protein, 1373 aa, Schizosaccharomyces pombe
MEPEHSNYDLKNHPTSVQESTLNGSAVTDPQFGNTTNSLPSMNGLLNHENSFASQQSLSSSAFDDSEIVTSTANSTVVSSALSTPKIDDAQNSDDVRVDGTRRSSRAKRPVYRDFSYTEIDEHEIPIPKKRKSKPAPKQKKSVASDDEDAYDKRHRFSINSASGTEIRTSLRSSKGKSVNYNEQEFYDDFEDEEEEVEEQVEEEYEPIIDFVLNHRKRADAQDDDPKSSYQYLIKWQEVSHLHNTWEDYSTLSSVRGYKKVDNYIKQNIIYDREIREDPTTTFEDIEALDIERERKNMLFEEYKIVERIVASETNEEGKTEYFVKWRQLPYDNCTWEDADVIYSMAPNEVYQFLQRENSPYLPYKGVFYNTRPPYRKLEKQPSYIKGGEIRDFQLTGINWMAYLWHRNENGILADEMGLGKTVQTVCFLSYLVHSLKQHGPFLIVVPLSTVPAWQETLANWTPDLNSICYTGNTESRANIREYEFYLSTNSRKLKFNILLTTYEYILKDKQELNNIRWQYLAIDEAHRLKNSESSLYETLSQFRTANRLLITGTPLQNNLKELASLVNFLMPGKFYIRDELNFDQPNAEQERDIRDLQERLQPFILRRLKKDVEKSLPSKSERILRVELSDMQTEWYKNILTKNYRALTGHTDGRGQLSLLNIVVELKKVSNHPYLFPGAAEKWMMGRKMTREDTLRGIIMNSGKMVLLDKLLQRLKHDGHRVLIFSQMVRMLNILGEYMSLRGYNYQRLDGTIPASVRRVSIDHFNAPDSPDFVFLLSTRAGGLGINLNTADTVIIFDSDWNPQADLQAMARAHRIGQKNHVNVYRFLSKDTVEEDILERARRKMILEYAIISLGVTEKSKNSKNDKYDAQELSAILKFGASNMFKATENQKKLENMNLDDILSHAEDRDSSNDVGGASMGGEEFLKQFEVTDYKAEDLNWDDIIPEEEMERIEEEERMLAAQRAKEEERERREEEERENDEDHPSRTYKRTTKSITKRQQRREEMVREKEIRLLYRAMIKFGLVDERFDTIVKEAELQATDPKRIYSLSADMVKACDEAVERLGADDTKNKQPRKAILIEFKGVKNINAETVTLRVKDLTHLHRAYKGLDPLKQIIGYPIRSVHSWNCSWGIKEDSMLLAGINKHGFGCWQAIKNDPDLGLHDKIFLDEAKNDKESRYVPSAVHLVRRGEYLLSVVREHPDLFVVKTDQPTKRKYNRKAPTKSSTRQTTLDGSISNTKKSSRTKKKKEEETNRGDETSPEGTVGEDEVEEEPRQAEPPKRALRSNSGKAASNKRTTRNSMKTHSAMDTLTAVAALDAELDNMSNEKAKEEVDHVKSENGESVNEPNTEDLSLETEENTTVSDISPLVKNEA

SEQ ID NO: 8586 - protein, 1283 aa, Schizosaccharomyces pombe
MFAVQGNQKFPKGLTKDNIQSLYQQWQVMRNQGATEENNPEFAQISSILRMVQRAHYARMQQMRNQSSEFPDAENTNLRKQQDTLPTTGFNNLPEGKAGMQTLPGRPASNGPTPPNPGNGNVGLNNPSYMNSQASPNIMNAPLQRDTSVPPAPSMVHPHTNTNANSNNLKVYANQLSQQNTSNPTYHNAYDMASMMKNGSRMNNSFPPTTPYPPANDTTVNSSLPHSFASPSSTFEQPHTVQSRAPSVDTTSSSHSFSARNIPANVSMQQQMGRRGSIPVNPSTFSASSPPSGSMLASPYNGYQNDAASFAHSKLPSSANPNTPFNSTATVDVGAAGSHFPYPQPSNLDAINAKTYFQSSSNSPAPYVYRNNLPPSATSFQPSSSRSPSVDPNTVKSAQHIPRMSPSPSASALKTQSHVPSAKVPPTSKLNHAQLAMLKSQIVAYNCLNSPNGQVPPAVQQAIFGRVYGASNEVSPSMPFQQNVPQMSSVKKDTPTRDANMRTSKAPYIQNIPNQFQRRAYSATIPVKNESLAKPSVSPMPLQQSTGKTEVAKRAQFPTNVNYSSCVDPRTYVKTPIPFSKFSSSENLSLIPSLLPPSISWDDVFLSSEIAIACSIANRIDFLEKENRPKSVNKKILQQDKSKSMIELRCLRLLEKQRSLRETINSVIPHSDSLAAGNLRLMFRNVKRQTMQEANLVLALAEKQKTEHAMRQKEKLLTHLRSIMLHRKSIVTKVDKQNKAKTQRCKDIINFHAHLEKEEKKRIERSARQRLQALRADDEAAYLQLLDKAKDTRITHLLKQTDQYLENLTRAVRIQQSNIHSGNTSGKGSNSAELEAPISEEDKNLDYFKVAHRIHEEVEQPKIFVGGTLKDYQLKGLEWMLSLYNNNLNGILADEMGLGKTIQTIAFITYLIEKKNQQGPFLIIVPLSTLTNWIMEFEKWAPSVKKIAYKGPPQLRKTLQSQIRSSNFNVLLTTFEYIIKDRPLLSRIKWVHMIIDEGHRIKNTQSKLTSTLSTYYHSQYRLILTGTPLQNNLPELWALLNFVLPKIFNSIKSFDEWFNTPFANTGGQDKIGLNEEEALLIIKRLHKVLRPFLFRRLKKDVEKELPDKVEKVIKCPLSGLQLKLYQQMKKHGMLFVDGEKGKTGIKGLQNTVMQLKKICNHPFIFEDVERAIDPSGTNVDLLWRAAGKFELLDRILPKLFLTGHKTLMFFQMTQIMTIMEDYLRSKNWKYLRLDGSTKSDDRCSLLAQFNDPKSDVYIFMLSTRAGGLGLNLQTADTVIIFDT

SEQ ID NO: 8587 - protein, 1388 aa, Schizosaccharomyces pombe
MSTSAIALALSSSKAIEQLDHVQTETPNLKQEMSESPSNSGVASKRKLQSTEWLDPELYGLRRSGRTRSNPGRYVDTDDQEDVFPSKHRKGTRNGSSFSRHRTIRDLDDEAESVTSEESESDDSSYGGTPKKRSRQKKSNTYVQDEIRFSSRNSKGVNYNEDAYFESFEEEEEEEMYEYATEVSEEPEDTRAIDVVLDHRLIEGHDGSTPSEDYEFLIKWVNFSHLHCTWEPYNNISMIRGSKKVDNHIKQVILLDREIREDPTTTREDIEAMDIEKERKRENYEEYKQVDRIVAKHLNSDGSVEYLVKWKQLLYDFCTWEASSIIEPIAATEIQAFQEREESALSPSRGTNYGNSRPKYRKLEQQPSYITGGELRDFQLTGVNWMAYLWHKNENGILADEMGLGKTVQTVAFLSYLAHSLRQHGPFLVVVPLSTVPAWQETLALWASDMNCISYLGNTTSRQVIRDYEFYVDGTQKIKFNLLLTTYEYVLKDRSVLSNIKWQYMAIDEAHRLKNSESSLYEALSQFKNSNRLLITGTPLQNNIRELAALVDFLMPGKFEIREEINLEAPDEEQEAYIRSLQEHLQPYILRRLKKDVEKSLPSKSERILRVELSDLQMYWYKNILTRNYRVLTQSISSGSQISLLNIVVELKKASNHPYLFDGVEESWMQKINSQGRRDEVLKGLIMNSGKMVLLDKLLSRLRRDGHRVLIFSQMVRMLDILGDYLSLRGYPHQRLDGTVPAAVRRTSIDHFNAPNSPDFVFLLSTRAGGLGINLMTADTVIIFDSDWNPQADLQAMARAHRIGQKNHVMVYRLLSKDTIEEDVLERARRKMILEYAIISLGVTDKQKNSKNDKFSAEELSAILKFGASNMFKAENNQKKLEDMNLDEILEHAEDHDTSNDVGGASMGGEEFLKQFEVTDYKADVSWDDIIPLTEREKFEEEDRLREEEEALKQEIELSSRRGNRPYPSSAVESPSYSGTSERKSKKQMLKDEVLLEKEIRLLYRAMIRYGSLEHRYNDIVKYADLTTQDAHVIKKIAADLVTASRKAVSAAEKDLSNDQSNNKSSRKALLITFKGVKNINAETLVQRLNDLDILYDAMPTSGYSNFQIPMHVRSVHGWSCQWGPREDSMLLSGICKHGFGAWLEIRDDPELKMKDKIFLEDTKQTDNSVPKDKENKEKKVPSAVHLVRRGEYLLSALREHHQNFGIKSSPAISTNGKTQPKKQTANRRQSGKPNVKSAQKIESATRTPSPAISESRKKPSSKDTKIETPSREQSRSQTASPVKSEKDDGNVSLNAEQKARCKELMYPVRKHMKRLRKDSSGLGRAELVKLLTECLTTIGKHIEKTVNDTPSEEKATVRKNLWMFACYFWPKEEVKYTSLISMYEKMK

SEQ ID NO: 8588 - protein, 1418 aa, Schizosaccharomyces pombe
MPKEDDSLCKIVVRREPLDVLLPYYDASETTVQKILHENDSTLSVKFLAGVEALIKKDELDKYKNGKACLRVWLKHKSRKRYHGYMTSTDKDEEEKNDYLLKSNGSKVLRDSTRTKKFKFGKEFHCALNPSFVSDETASDSATSSSSDTNKKVNRKEHNELSLSHLSFNDTSDFGSSDLSSSEIESTENDNKAPYFSLLYSDGFDFIKFLHVCVCVKCHGREHRSSGKNFVYCDHCSNVYHYDCSPLPSLNKETRNYSQQNGFICPLCSKNSKDVLCNTGFVSGVSSGQDLVIPPSLADRESLSILVNYCKSIRFRCFRCRRVEYFFYLDSNPLSIQRTITHFIKKLVCNECSMHPCDIEEIIAWRTLNSLYPSKATLSNNFVSTSDLSFWSREYFVRSKGKSYLHCFWCSASWLAGISLAKKKNFDGLENASYDATKPIIPVSYTIIDKVWDVQYRSGKNARTAKYKTKKHQLKAISEVTFAFVSWRGLTYYMSNWEPPPKETDRNRWKAWLKGYSDLLECLWIEKAPTASINIDLPFTNLEWHSQPSFIKGGTLMPYQLKGLNWLYLRWYTHHPCILADEMGLGKTVQVISFISVLFYRHKCFPVLVIVPHATVANWERELKKWAPFLQINVLVGSEKNRSLVRDYRLINQKDPKHVSTHVLVISASNVEREISLLRKFQWKVLIVDEGQRLKNDQSSLFYYLSSVKSDFKLLLTGTPLQNNVRELFNLLQFLNPMKINAAELEKRYSIIDTEKVTELHQILKPFFLRRVKSEVLDNFPTKVEVIIPLSMTPVQKGLYKSILSKNLSLLRNITGYANTSSSGGQRTTSLNNILMQLRKTLAHPYIYSPDIEDRNLPYELAMRSLEEASCKFLILRLLVPKLITRGHRILLFSQFIQQLDILEDWFEYKNIAYARFDGASSEMERQSAIDSFNAPNSELSCFLLSTRAGGVGINLASADTVIILDPDFNPHQDMQAIARAHRYGQKKKVLVFVLTTRDSVEEKIIQNAQKKLVLDHLIVESLDQNHNSEKDLESILRHGARALFEEAGDEPSIKYNEYSVELLISEAEKQEDTSTDESDIKSNKFGFFRVWDNKHISSNHYEVKENVLVDEEDVWSVILKQREKDAMLEKTDETTSNRRLRAHHKIHYGEDLNIYDNSDDTDYTVNDRSSPGSPFPIETETISSITDTLSDKQKLKYDSSVNIENLNDESDSQKSADVHFDSILAKSLLATTPKEDEFNKTLSTINLEVANKLTSSEYINDSEMQLIDDPVFYPPYEIIEKNHQLVGRSLSKAVLDNFFLLSSLSDNVRCRCCGIKHLPAHCPLSIVPLEICFLCGTPHFSGRDTCPMLRNKEAIYRLKDSLSKSREPFHIKKQAMARLNSFLQKKEEPTVSSSAKTNELSSKVIIKESIINEAKTL

SEQ ID NO: 8589 - protein, 944 aa, Schizosaccharomyces pombe
MKRKDNKELICIPSSSPPSTPIREENYYLLTSSPIECSPIQQLDLSGSFKNYSTTSSRANGKKFGQLAMQSRIFFDTTDHKKYVESSYAAYDPHDQPPERDVSLKESSNKINPSNFFDSEQITKINAVKKRFPALDSEMIIATLEKFNWRENITIHKLTFQKLLGRGNSTINKSAQKLNNQPIEKSSVDKENAKRKRYVEEGTKQGQKKKPLRVIELSDEETNEDDLLGQSPTACTTDANIDNSIPENSDKIEEVSIESSGPSEVEDEMSEYDVRVLNFLNESTLQEIVEVSGCESKVVEYFISKRPFPSLEKAEALCQRNAHAATGKRKKSDGRNVGRKLVNSTYEVLQGFDAVDSLIAKCERYGAMISNTMRSWHNLFDDKKMEQFLNTSTGSISYEYNSQQPSSIASGITLKSYQIVGLNWLCLMYKAKLSGILADEMGLGKTCQVISFLASLKEKGIQNRHLVVVPSSTLGNWLREFEKFCPSLRVESYSGTQSERINKRYYLMDTDFDVLVTTYQLASGSRDDRSFLRKQRFDISIFDEGHYLKNRMSERYKHLMNIPANFRLLITGTPLQNNLKELISLLAFMLPKVFDNNMQGLDIIYKIKTTSDGDIERAYLSQERISRAKTIMNPFILRRRKENVLSDLPPKIQHVEYCHMEETQLSLYLSVLELKNLVNANRENILMQLRKAALHQLLFRSQYNLETLSLMSKRILREDAYLDANPQYIFEDMEVMSDFELHKLADQYRHLHPFALKGKPWMDSAKVKKLCSLLKKSRPNERILIFSQFTQVLDILEYVLNTLDLEFLRLDGSTPVETRQQLIDDFHTNENYKVFLLSTKSGGFGINLTCANIVILFDCSFNPFDDMQAEDRAHRVGQTRPVHVYRLITKNTIEENIRRLANTKLTLESSLTTDSEKIQKEISGELMKSLQMDGRVDTMDGSVV

SEQ ID NO: 8590 - protein, 922 aa, Schizosaccharomyces pombe
MDGKRKIEHTADGTHYDATSNVKRKPIFPPFIADSLSEATEKANVMGGGMNSRLQILSEMSKRVQATAPISSLEHFKQLSDISPSFTSSANSINQPYNYSGSLENLVPTPSAGTPSQFMDAQNPYGAVYNALSQFSETEPKMPSYMDDEEASDSLPLSLSSQSLSSQVTNQKPAPHRLTMRERYAANNLTNGLQFTLPLSSRKTYEPEADDDSNDDMYSDDDSNADRWASRIDTAALKEEVLKYMNRCSTQDLADMTGCTLAEAEFMVAKRPFPDLESALVVKQPRPVIPKGRRGRREKTPLGPRLVGICMEIMRGYFVVDALIRQCEQLGGKIQRGIEAWGLSNTATSDEGETSLVNFDQMKSFGTPANSSFITTPPASFSPDIKLQDYQIIGINWLYLLYELKLAGILADEMGLGKTCQTIAFFSLLMDKNINGPHLVIAPASTMENWLREFAKFCPKLKIELYYGSQVEREEIRERINSNKDSYNVMLTTYRLAATSKADRLFLRNQKFNVCVYDEGHYLKNRASERYRHLMSIPADFRVLLTGTPLQNNLKELISLLAFILPHVFDYGLKSLDVIFTMKKSPESDFERALLSEQRVSRAKMMMAPFVLRRKKSQVLDALPKKTRIIEFCEFSEEERRRYDDFASKQSVNSLLDENVMKTNLDTNANLAKKKSTAGFVLVQLRKLADHPMLFRIHYKDDILRQMAKAIMNEPQYKKANELYIFEDMQYMSDIELHNLCCKFPSINSFQLKDEPWMDATKVRKLKKLLTNAVENGDRVVLFSQFTQVLDILQLVMKSLNLKFLRFDGSTQVDFRQDLIDQFYADESINVFLLSTKAGGFGINLACANMVILYDVSFNPFDDLQAEDRAHRVGQKKEVTVYKFVVKDTIEEHIQRLANAKIALDATLSGNAETVEAEDDDD

SEQ ID NO: 8591 - protein, 1288 aa, Schizosaccharomyces pombe
MTYEESEKNKNGLSSYIKKEGSSDLKVRVRFREPKLLVTHSGHITEQPKYEHLEQYLDSYVSLEDGDHDPKEAKELVFREVQLRHRINEFRKKGYFTAEAPVELKKAPSSNNIPISYRDNLLSHVNGYARSMHNDRKVRASRSRRISGMILAHFKRLSGADEKKAKEEDKRIRLLAKRTAWEIRKKWKVIEREVRRRRAERAAEAQRVAGKEQLANILKHSTDLLEARIERANINISAQTSESAVDWNYLLKTSDDLLSVDELKLKYSNPDLIKNIEREEEAEETSDDEPLSSEDEENEDEDITEESNLRKRKVSDKTRVVNKHPPSLRRSRRFFAKKSYNHVSDLDGEVIVMKKEDITDGVSTKKDLNDGDQNEVPLHDTGSSSSLSLLYNEDVASKKKRRVNDDGLARKKSIAGISEQRKFDEPNGSPVLHANKIQVPFLFRGTLREYQQYGLEWLTALHDSNTNGILADEMGLGKTIQTIALLAHLACEKENWGPHLIIVPTSVMLNWEMEFKKFLPGFKILTYYGNPQERKEKRSGWYKPDTWHVCITSYQLVLQDHQPFRRKKWQYMILDEAHNIKNFRSQRWQSLLNFNAEHRLLLTGTPLQNNLVELWSLLYFLMPAGVTQNNSAFANLKDFQDWFSKPMDRLIEEGQDMNPEAMNTVAKLHRVLRPYLLRRLKTEVEKQMPAKYEHVVYCQLSKRQRFLYDDFINRARTREILASGNFMSIINCLMQLRKVCNHPNLHEERPIVTSFALRRSAIADLEIKDLLVRKRLLHEEPMTKLDLSTLRLIRTDSEAFDTFVSDELNSLCATNAYNRISTFLRMQIDEECKPCQFKKSNFKEHFQNKIYQEQLDKLNFQKYLNESKCSHSPIYGSNLIRLAEKLPKHSTSIDYTLYAKDDPLYLLNTTKALRSCILSTEERASNMKEIIQRFACITPKAVVVDLPELFCKTIPRDLLYEVSRKINPLHQASTRLAIAFPDKRLLQYDCGKLQVLDRLLKDLVSNGHRVLIFTQMTKVLDILEQFLNIHGHRYLRLDGATKIEQRQILTERFNNDDKIPVFILSTRSGGLGINLTGADTVIFYDSDWNPQLDAQAQDRSHRIGQTRDVHIYRLISEYTVESNMLRRANQKRMLDKIVIQGGEFTTEWFRKADVLDLFDLDDESLKKVKADSDSGSTKNEENWEVALAAAEDEEDVQAAQVARKESALEQTEFSETSTPQAMLTKDSTPLSSDSATPGFERDSTEEQSNTNDMDEDRSELEEDLDETVGHIDEYMISFLEQEGTSDEW

SEQ ID NO: 8592 - protein, 768 aa, Schizosaccharomyces pombe
MKRRATFQCPLIESTIKHQSTNYTKTETATTSHEVSENANEHKGKSNIDINKIAYYNVVWRKITMKKHKTWEGDGFLVREDSNLTLYNSDFTRLGSCHSRVPQIKEGELLRISGKEISTISALPKPRHDPTVLGALVMSRPKTWDPRTHVDVVIDPFLSKHLYSHQREGVSFLYDCLLGMEGKCGYSAILADEMGLGKTLQTITVVWTLLKQSYYANRSSTINNAMVVAPVTLLKNWENEFYNWLGHERIHVYIARCAEDFQEFTSNKTYSIIITGYETVCTYLRNYGCGIDIDLLICDEAHRLKSMSSQTWITLNKLKTRKRLLLTGTPLQNDLSEYFSMVNFIIPGSLGTPNSFKAQYERPILRSRSMNASSRDISLGAARLQRLFEFTSNFTLRRKANILAKHLPPRTDIVLFIKPTHQQENVYGHVLDGFKSSVDQKGYYLKILTRLSKICNSTILLRNEKENFLSTELQDKHVFEQENMLLSSSKLQILAALLKSFQRGCQKAVIVSQYKETLELIELFLSILHVRFCKLLGSTPFSERDLIVHNFNTSSFKEFSVLLLSSKAGGCGLNLTGSTRLIIYEPSWNPAQDLQALSRIYRSGQKRPVCIYTFLSSGMLDERIFIRQNTKQGLSSSFIDSDASQKKNFFTGEDIKTLFSYSKTETCLTYELAFDSDEIDSLTKKKDPLTKIDHTIDSPNTKEKDKEISSWKKASEYMDTNLGKKCPENAFQGWTWQFPNDLSIMNGVEDYIPLEPLPINCLMHKKFE

SEQ ID NO: 8593 - protein, 780 aa, Schizosaccharomyces pombe
MKRRATFQCPLIESTIKHQSTNYTKTETATTSHEVSENANEHKGKSNIDINKIAYYNVVWRKITMKKHKTWEGDGFLVREDSNLTLYNSDFTRLGSCHSRVPQIKEGELLRISGKEISTISALPKPRHDPTVLGALVMSRPKTWDPRTHVDVVIDPFLSKHLYSHQREGVSFLYDCLLGMEGKCGYSAILADEMGLGKTLQTITVVWTLLKQSYYANRSSTINNAMVVAPVTLLKNWENEFYNWLGHERIHVYIARCAEDFQEFTSNKTYSIIITGYETVCTYLRNYGCGIDIDLLICDEGIDLFINSLLILAHRLKSMSSQTWITLNKLKTRKRLLLTGTPLQNDLSEYFSMVNFIIPGSLGTPNSFKAQYERPILRSRSMNASSRDISLGAARLQRLFEFTSNFTLRRKANILAKHLPPRTDIVLFIKPTHQQENVYGHVLDGFKSSVDQKGYYLKILTRLSKICNSTILLRNEKENFLSTELQDKHVFEQENMLLSSSKLQILAALLKSFQRGCQKAVIVSQYKETLELIELFLSILHVRFCKLLGSTPFSERDLIVHNFNTSSFKEFSVLLLSSKAGGCGLNLTGSTRLIIYEPSWNPAQDLQALSRIYRSGQKRPVCIYTFLSSGMLDERIFIRQNTKQGLSSSFIDSDASQKKNFFTGEDIKTLFSYSKTETCLTYELAFDSDEIDSLTKKKDPLTKIDHTIDSPNTKEKDKEISSWKKASEYMDTNLGKKCPENAFQGWTWQFPNDLSIMNGVEDYIPLEPLPINCLMHKKFE

SEQ ID NO: 8594 - protein, 1040 aa, Schizosaccharomyces pombe
MRNNTAFEQFTLNPCEQIPLDDKHNIGFNKNNTPDYSSSASSDQLLKNDINRHEMERRIAFLNRKQALFNAFMHDSSSSLNTMESNIEKVNGLFPNDNSVIALKPNEEKLNSSLSVENNDSTYTDATLIAPKIGLDRPNINAITIDVDGHSLQNEISSSTDKLSPSQSDALFEQKQDSLFWNDNAVIVVSDSESDDNNVRTKSSLNDHDKVNMKEKRNLELAFMNSKRKKLELPSLPVLSTAGPSYTNSLALPPFHHHNNYKMFNTTHTLEDDKFLQGKGTSNNPISLSDEEDNEINFQNKRYGSDSVILPGGLLHDSKLPEPGKHLFHLQWYHDRFHNIEGFNLSDSNNQKVQDDQQQQLEELFKDLDEQLVNDPTIREGTPAGLIPTLMEHQKEGLMWLKRLEESSKKGGILADDMGLGKTVQALALLVTRPPESKSVKTTLIITPVSLLQQWHNEILTKIAPSHRPTVYIHHGSSKKHKIAEQLMSYDIVLTTYNVIAYEFKNKMAYDKSIEDNAPIKKFEHLPFFEAEWYRVILDEAQTIKNRNTLAARGCCLLESTYRWCLSGTPMQNGVEEFYSLIKFLRIKPYSDWSSFSKDFTIPLSSNINTSAPMKRFRGLLKAVLLRRTKNTKIDGKPILTLPPKTAVKSETDLSSSEMEFYNTLQSGAQIQMRKYLQEGTITTHYGSLLVLLLRLRQACCHPWLIVAREAAVDDNDSFQAKNRAIYNQIYPEAVNRLKLIETLQCSLCMDVVAELLIIVPCGHFLCRECLTHVITSSEDMAKQTSNENISPKCSVCEEYIDTERLLSYALFRRYSGMAPIVDADNKLRTENISELLPKQYSNILENRQMGMKIFTDPKHWTTSTKIEKALNAVKEIIKKQPTDKILIFSQFVSFLELFTVPFRQEGIKYLMYTGGLSTAERNQALINFEVDPNVRVLLISLKAGNVGLNLTCANHVIILDPFWNPYIEEQAVDRAHRIGQDKPVNILRIVTNNTIEERVLALQDRKRELIDSALGEKGLREISRLNTKELSFLFGMSSR

SEQ ID NO: 8595 - protein, 1063 aa, Schizosaccharomyces pombe
MDPSRETFDGSTRDSYKPPNGAEMMGQSELNTQNRIPYNTSANNRNWQIPLYWQQRGNEFQASPPPPLGYVTPEYGATGTPVNANNASRVDYATTAANVPEEYANDYSSELAYIHNVNDMPHVDGLSNHSPATQPDLFETPAQSDPILFSSYPHAAQARVDPSISKDLYNMVPRPDANTVSPHAARSASSLPVPKEASETPFRDASTDLFDEHAHAAPMHSSISISTLLSDSDRYEPHVSLTENISPVMAPSIDARLSQTILRGLPPAQKLSPNSSQSQITHNRRKHKLPLNATTNNSVVLTPDTSPLLDSDEVVSDDDSNEQQTMMMKFNYLQHLRNKRDEAVHAEKRRLLDIRGSIHDRLVCRYENRYNKLHASEYNHHHDWAVRQAIREEVAAVEAAKIRADEEKKKKEREEQVRLLQESADKDAEMNEASTATSENEDLKDDLSLADLSSKKTANSQATENNNTPSKAKVKAESKVRSKAKSDKSRAKLSSDTNKDSEKNDNNDASLQSAGVASDGESSPETPLTKASKSKKAKASKLANDTSKNANGETKSTPKKSKKKTSKAQQEANSTTAEGKEKLSGDSTETGNSTNKEASTEDTKANATASAPNKKKKTVETLQQQVIKEIARKEIPRVYKIIQQNQYNRSTNARKTSQLCGREARRWQFRTIKNNKDMQTKAKRAMRETMVFWKRNERVERDLRKKAEREALDRAKKEEELRESRRQARKLDFLITQTELYSHFVGRKMDREQDLPSATNTASVSEINFDSDEEEDIRRLAVESAQEAVQKAREHSQLFDANRQQSPNNSSSDMNEGEMNFQNPTLVNAFEVKQPKMLMCKLKEYQLKGLNWLANLYEQGINGILADEMGLGKTVQSISVMAYLAETHNIWGPFLVIAPASTLHNWQQEITRFVPKLKCIPYWGSTKDRKILRKFWCRKNMTYDENSPFHVVVTSYQLVVLDAQYFQSVKWQYMILDEAQAIKSSSSSRWKSLLAFKCRNRLLLTGTPIQNTMQELWALLHFIMPSLFDSHNEFSEWFSKDIESHAQSNTQLNEQQLKRLHMI

SEQ ID NO: 8596 - protein, 897 aa, Schizosaccharomyces pombe
MDSLSAYPPQSTFQQLQNDEELARRLQDEWNSSSPSSAPSSSSSQNQVELDEQFARSLQNSQSSSYSLPPFDHPPSKNPTSSSLSTRKRWRQKRLWSFKNFPFRPPTRLTSTPSNSSSLPSIPSSSSTPSISSIPHTTSSVSNDIPSVLGSSDHPIDLDNPEHLTPPSSFITAKQLSRLPTPLPPPSSSSLPTGTISTNSFCPYERKVQPEHVTKELHQLLQHNTPSPFDTIDLQLKNEQVQSAGLLVSLLPHQVEGHAWMESMEQSSKCGGVMADDMGLGKTIQTIALLLTQKSQDPLRKTNLIVVSVALLHQWAEELSTKVHPSKKLSVYIHHGSTKKNLDSYELSQYDVVLTTYSMLAYEMKQNDAFNNNNPATATPPPACSLLETSWYRIVLDEAHTIRNRDTLAAKCCVKLDAKYRWCLSGTPIQNHIDEFYSLLKFLRIKPYCVWSLFAKDISRPLKSYRADIVEAALKRLRILLASTVFRRTKETRVNNLPIVNLPPKTIRTVSVNLLPEERALYNEQMSSAQSLVDNYFNNDHDLSRYGFLLVSLLRLRQFCCHPWLVKSSSLDNSFRIRDSENVRNACKSLDPLTIERIATLQDFNCSVCLDPCLAPVFIIPCGHFTCQECMSMLVGQKYGSSSTSTIIAKCPMCRGNIVQDSLVDATILQAIHGPLNSLKQLELDMNQSFSEQESIKLRWENRIDQMFTKKFGKRASEWKSSSKLNQARQTILDIIGSKRNEKILVYSQFSQYLCLVSHMLKLENIRHVRYDGTMSANQRQKSLHSFNNDKDVLVMLVSLKAGSVGLNLTIANHVILQEPFYNPSIEDQAIDRVHRLGQQKPVTVYRFITKDTIEERIVSVQRKKRQLVKEALDSNENNPLSRLDKEELLYLFGLNS

SEQ ID NO: 8597 - protein, 1284 aa, Schizosaccharomyces pombe
MLPYNSNYLSDNGKRKFSDENPQSEVYGSSQTGLPSSYGNPQSYGTPPVQQSSAMYGVNNSMGGGMYNTSENTQFMNTDYSQTSSYASTPMSNAYSRDAPAAINNNFGYSYVGQSSQPVPSYNPLPSYNTASLPNAGIPAAMPGMPSGYPGTVPIPQGGYNAHYSSPYNNGYPIGAVNPTSAIPAQPPAQPVNNVLPSYVRSNSRSSARSTARSAPRSTQRSRSSSANPVTTPPVNNTLLTPPAPPVELPPVTTTSPNAIIRSVQWIRSFVPQAPIHQVINTLAQTKWDETAALSILSQKYLSCDLGIPIQEHKRFKQSPVASNMPTYGSSNRTVQSQKRSIRDKYIQMPNDSTQASLMPSYTRKTSNASKKLTTEEDEFYDSEEEPEAIVHRDTSALERTVLNFINSSTAKELSDTASCPLSHSKLLLEHRPFQTLAEACIIKHPDDVPSKPGRRGRRREKNPMGQKIVNACMETMEGYYAIDNLIAKCEFLGNRISKGMASWGIKLEMSNGELNIVDMESVPTEAADNSDFPKFVTEQPKTLASDVQLKSYQLVGVNWLHLLYQQKLSGILADEMGLGKTCQVVAFFALLLEQGHHGPHLVVVPSSTLENWLRELARFCPSLRVEPYYGSQQERANIREAIEENEIKYDILVTTYQLATNNKEDRSFLKHQNFDVCVYDEGHYLKNRMSERYKHLMNLNANFRLLLTGTPLQNNLKELVSLLAFILPNMFDSDMDDLDVIFKAKPTADADIEQALLSKQRISRAKTMMTPFVLRRRKNQVLNDLPKKTQIIEHCKLSENQLEIYNRYAALQKNQQLRRDDKRNKRSKNDEESDGKSLSAGHVLMQLRKAANHALLFRKFYDDEKLKQMAKDIMQEEQYKNANEQYIYEDMEVMSDFELHRLCRSFPTLQSYTLKDDPWMDSGKIRVLKELLPKMKEEGSRILLFSQFTQMLDILEQVLDTLKISYVRLDGSTQVEVRQDIIDQFHKEEDVTVFLLSTKAGGFGINLACANVVILYDCSYNPFDDLQAEDRAHRVGQVREVTVIRLITDNTIEEYIQKLANTKLALDMSLSSDGKDREEIGERLVQDMLDEENNGNNTKPEITGNESDGEFKVSSSNNSKQTDAEETNTGVPLEGSQPNSVEKTDLADGDEKANIKTEMKSETVEGDNKELRETMKGENVQTDSNAAVPSSKSSTEEPNESVLSGHLDLDTEASPVVSTIEKTTKGDVSVTEEQQSANIDGQLEKPEIEESKKPDVLNQVSLSIEEEKPKNKESEVDNNAAKD

SEQ ID NO: 8598 - protein, 830 aa, Schizosaccharomyces pombe
MEKASKNKESGVKKANNSFLQNFGVNTAGKENESTSLPRLPKSEDESIPKQSIKSKNKKKTQHFLSDAFESLKRQEIDTNEKEVIVSAPITSKPAQVFYSKKLERKDEGIRKWEKDPFAPISVKSGAWKKPYTKVPEVSINKATSKRTDLINDKPIVIPIPRASTSTLYFGKHNKPTSENRKGPIGIPTEEILTSQNTQAMLHKLFENNVLDNVKDDSMQRQSSFIPGMHIRLLDHQVQGLTWLKSRETVSKSSASGGILADDMGLGKTIQMIALILSHPLPKKKHSIKSTLVVAPLSLIKQWESEVQTKSKLTAIVYHGASRYKLLKVIHEYDVVITTYQILVSEWVSHNTTGTDGKSPTEAKSYEKKKPSLFAFYWWRIILDEAHTIKNKSSKSALACCALQGINRWCLTGTPLQNNVDELYSLVKFLHINPFNDQSVWKDQISLPLCQGEENLVFKRLRMLLSVIMLRRTKTLLEANAGKDGTGGALKLSKRLVYKVICKFEESERDFYSNLARNMERTMSNFVNSGKLGKNYTNILCLLLRLRQACNHPQSLNFQFEQDVDAFNALDGAANTNKLASDQDVDDLANLLETVEIGSRKKSFCTICMAELPPDFHEKKCKDCSRNFKELDKGIQDPNDKTLYKSSKIREILKILSLDEQEEDDTVRGLRKTIIFSQFTTFLDIIDLHLRKAGIGFVRYDGRMNNRAREKSLDLLRSDSGTQVLLCSLKCGALGLNLTCASRVILCDVWWNPAIEEQAIDRVHRIGQRRDVLVYKLVVENTIEEKIVELQNLKRDLAKQALGDGKKSVFTSKKLTLNDLLFLFNKRAAA

SEQ ID NO: 8599 - protein, 861 aa, Schizosaccharomyces pombe
MGTSCNKINSNSNKGKENMHFVLDDNGDSKGNASNQQVERDDKLDMETTRWNGKEFEEPLSTNKKLIIQSNNTSSQHSTPPLSISDTSTHTGSSTDNVEANPNTGFSSARKRSLRSSNLKKKFVPLSSPEESNESEFIDDDESDEVASIIDIKEDETFDSKVEIPEAAPSSSTESDEESIPLSYQSKRRRVSARASSSASSSSRTQAKSIPSHERTHYRLIRQHPELEHVWEKLEEEAPREVKQIEQPKELVLNLLPFQREGVYWLKRQEDSSFGGGILADEMGMGKTIQTIALLLSEPRGKPTLVVAPVVAIMQWKEEIDTHTNKALSTYLYYGQARDISGEELSSYDVVLTSYNVIESVYRKERSGFRRKNGVVKEKSLLHQMEFYRIILDEAHGIKSRTCNTARAVCGLRTTRKICLSGTPLQNRIGELFSLLRFLRADPFAYYYCLQCECKSLHWRFSDRSNCDECGHKPMSHTCYFNAEMLKPIQKFGYEGPGKLAFKKVHSLLKHIMLRRTKLERADDLGLPPRVVEVRKDLFNEEEEDVYQSLYMDSKRKFNTYLAEGVVLNNYANIFQLITRMRQMADHPDLVLASKRKTVDIENQENIVCKICDEVAQDAIESRCHHTFCRLCVTEYINAAGDGENVNCPSCFIPLSIDLSAPALEDFSEEKFKNASILNRIDMNSWRSSTKIEALVEELYLLRKKDRTLKSIVFSQFTSMLDLIHWRLRKAGFNCVKLDGGMTPKARAATIEAFSNDINITIFLVSLKAGGVALNLTEASQVFMMDPWWNGAVQWQAMDRIHRIGQKRPIKVITLCIENSIESKIIELQEKKAQMIHATIDQDEKALNQLSVEDMQFLFSN

SEQ ID NO: 8600 - protein, 963 aa, Schizosaccharomyces pombe
MHISTLKVDQLQNEAVDINSNDTIDSINWKNTRNNHTTQASLQADNNDEQSNGQAPFSTTYSEINNIHDVPGNQDEWSSSPIAGIIVESEDEEVVENNLHSQMGTSCNKINSNSNKGKENMHFVLDDNGDSKGNASNQQVERDDKLDMETTRWNGKEFEEPLSTNKKLIIQSNNTSSQHSTPPLSISDTSTHTGSSTDNVEANPNTGFSSARKRSLRSSNLKKKFVPLSSPEESNESEFIDDDESDEVASIIDIKEDETFDSKVEIPEAAPSSSTESDEESIPLSYQSKRRRVSARASSSASSSSRTQAKSIPSHERTHYRLIRQHPELEHVWEKLEEEAPREVKQIEQPKELVLNLLPFQREGVYWLKRQEDSSFGGGILADEMGMGKTIQTIALLLSEPRGKPTLVVAPVVAIMQWKEEIDTHTNKALSTYLYYGQARDISGEELSSYDVVLTSYNVIESVYRKERSGFRRKNGVVKEKSLLHQMEFYRIILDEAHGIKSRTCNTARAVCGLRTTRKICLSGTPLQNRIGELFSLLRFLRADPFAYYYCLQCECKSLHWRFSDRSNCDECGHKPMSHTCYFNAEMLKPIQKFGYEGPGKLAFKKVHSLLKHIMLRRTKLERADDLGLPPRVVEVRKDLFNEEEEDVYQSLYMDSKRKFNTYLAEGVVLNNYANIFQLITRMRQMADHPDLVLASKRKTVDIENQENIVCKICDEVAQDAIESRCHHTFCRLCVTEYINAAGDGENVNCPSCFIPLSIDLSAPALEDFSEEKFKNASILNRIDMNSWRSSTKIEALVEELYLLRKKDRTLKSIVFSQFTSMLDLIHWRLRKAGFNCVKLDGGMTPKARAATIEAFSNDINITIFLVSLKAGGVALNLTEASQVFMMDPWWNGAVQWQAMDRIHRIGQKRPIKVITLCIENSIESKIIELQEKKAQMIHATIDQDEKALNQLSVEDMQFLFSN

SEQ ID NO: 8601 - protein, 854 aa, Schizosaccharomyces pombe
MGTSCNKINSNSNKGKENMHFVLDDNGDSKGNASNQQVERDDKLDMETTRWNGKEFEEPLSTNKKLIIQSNNTSSQHSTPPLSISDTSTHTGSSTDNVEVKSQYRFSSARNVIKVLEFEKVVPLSSPEESNESEFIDDDESDEVASIIDIKEDETFDSKVEIPEAAPSSSTESDEESIPLSYQSKRRRVSARASSSASSSSRTQAKSIPSHERTHYRLIRQHPELEHVWEKLEEEAPREVKQIEQPKELVLNLLPFQREGVYWLKRQEDSSFGGGILADEMGMGKTIQTIALLLSEPRGKPTLVVAPVVAIMQWKEEIDTHTNKALSTYLYYGQARDISGEELSSYDVVLTSYNVIESVYRKERSGFRRKNGVVKEKSLLHQMEFYRIILDEAHGIKSRTCNTARAVCGLRTTRKICLSGTPFENRIGELFSLLRFLRADPFAYYYCLQCECKSLHWRFSDRSNCDECGHKPMSHTCYFNAEMLKPIQKFGYEGPGKLAFKKVDSLSMVRRTKLERRIPWIPPRVVEVRRLFNEEEEDVYQSLYMDSKRKFNTYLAEGVVLNNYANIFQLITRMRQMADHPDLVLASKRKTVDIENQENIVCKICDEVAQDAIESRCHHTFCRLCVTEYINAAGDGENVNCPSCFIPLSIDLSAPALEDFSEEKFKNASILNRIDMNSWRSSTKIEALVEELYLLRKKDRTLKSIVFSQFTSMLDLIHWRLRKAGFNCVKLDGGMTPKARAATIEAFSNDINITIFLVSLKAGGVALNLTEASQVFMMDPWWNGAVQWQAMDRIHRIGQKGRIKVITLCIENSIESKIIELQEKKAQMIHATIDQDEKALNQLSVEDMQFLFSN

SEQ ID NO: 8602 - protein, 570 aa, Schizosaccharomyces pombe
SEWFSKDIESHAQSNTQLNEQQLKRLHMILKPFMLRRVKKNVQSELGEKIEKEVYCDLTQRQKILYQALRRQISIAELLEKAILGGDDTVASIMNLVMQFRKVCNHPDLFEREDVRSPLSLATWSKSIYINREGNFLDVPYNTRNFITFSIPRLLYEQGGILSVPGLNTSRGFETKYLYNLMNIWNPEYTNDSIKSNPEGSPFSWLRFVDESPQTLFQTFQNPVVHYLDEAEASSSLKEEQLCRQEFCYGKDYSNVRKMLLLPKSITKVDVLGSDFKEDSPFYHLTHVLEESDSQLDLTLLDSVLVQRASAPPIDIYCPGSRQFTVLQSRFQRDHLWSHYLYQPLKGEEDLIINNQAVSKLPIPRKPLLPSFGIAKGSYSNVRIPSMLRFIADSGKLSKLDKLLVELKANDHRVLIYFQMTRMIDLMEEYLTFRQYKYLRLDGSSKISQRRDMVTEWQTRPELFVFLLSTRAGGLGINLTAADTVIFYDSDWNPSIDSQAMDRAHRIGQQKQVTVYRFITRGTIEERIVIRAKEKEEVQKVVISGGETRPTKQMDLKGNSREMVSWLLEE

SEQ ID NO: 8603 - protein, 688 aa, Schizosaccharomyces pombe
MHISTLKVDQLQNEAVDINSNDTIDSINWKNTRNNHTTQASLQADNNDEQSNGQAPFSTTYSEINNIHDVPGNQDEWSSSPIAGIIVESEDEEVVENNLHSQMGTSCNKINSNSNKGKENMHFVLDDNGDSKGNASNQQVERDDKLDMETTRWNGKEFEEPLSTNKKLIIQSNNTSSQHSTPPLSISDTSTHTGSSTDNVEANPNTGFSSARKRSLRSSNLKKKFVPLSSPEESNESEFIDDDESDEVASIIDIKEDETFDSKVEIPEAAPSSSTESDEESIPLSYQSKRRRVSARASSSASSSSRTQAKSIPSHERTHYRLIRQHPELEHVWEKLEEEAPREVKQIEQPKELVLNLLPFQREGVYWLKRQEDSSFGGGILADEMGMGKTIQTIALLLSEPRGKPTLVVAPVVAIMQWKEEIDTHTNKALSTYLYYGQARDISGEELSSYDVVLTSYNVIESVYRKERSGFRRKNGVVKEKSLLHQMEFYRIILDEAHGIKSRTCNTARAVCGLRTTRKICLSGTPLQNRIGELFSLLRFLRADPFAYYYCLQCECKSLHWRFSDRSNCDECGHKPMSHTCYFNAEMLKPIQKFGYEGPGKLAFKKVHSLLKHIMLRRTKLERADDLGLPPRVVEVRKDLFNEEEEDVYQSLYMDSKRKFNTYLAEGVVLNNYANIFQLITRMRQMAD

SEQ ID NO: 8604 - protein, 1133 aa, Schizosaccharomyces pombe
MKRKVQKIIDEAPLEENSPPRFFDSDVEADSKPNDLTAANSIVDLKTNSQHENANAAGKEYGDSGVSESWVLDFLSVTGEKTISEFLAQKIWKTSNGDLNVAVDMYFDESFNIKNSNPDSESQKDTDASLTQMDQLSNTVSVKDLSINRNTNKKALNAVSPSLNLSSNSSVQDVSIDKEEMMKKQSRNALTPLDFIMKKNELMKYIGCFGVEAYSTASGTRTLQAGERIYLERQKLSIKSQSRNSRKKSKLLSINSSCYSNIVRFCNSDHHEIGKLPTEVASVISTLMEQGFWSFEAICIYSDNIIRFGSNVTLQVYCFINVNHPSLNRSPFTLATNSMQEEEEHLKASFAQNKRDHLLRLFTWIALEPDLEDCNTKESIHIDDILKTSSLPEARDESNSDLTPSSTEDEEDVVSDQLAILYDKVKTSGAELPSAPKPSTFALDLREYQKQALYWMCCKEEGVQSDGSAPKLHPLWSRFRFPKDSEFPEFFKCSSDDDNTHFYVNLYTGETTMLFPNSMPYHRGGILADEMGLGKTIEVLSLIHSRPCFSTDEIPEAFRHSKPSLPVASRTTLVVAPMSLLDQWHSEACKVSQGTKFRSMIYYGSEKPLDLKSCVIDTSTAPLIIITSYGVLLSEFSQQSHSSGLFSVHWFRVVLDEGHNIRNRESKTAKACHSISSQNRWVITGTPIVNKLDDLYSLIKFMRYEPWCNYTYWQTFVSLPYQSKDVLKALNVVQSILEFLVLRRTKETKDRNGNSIVTLPPKTVKIEYLDFSDSERKIYDSLYTKAKSTVNANIVAGTLFRNYTTILGLLLRLRQACCDPVLLSNMTINSETFDDFEFSVEQFNSLINQFVVTGKPIPSDILKIDTLKSFEALITECPICCNEPIQNPLLLNCKHACCGDCLSEHIQYQKRRNIIPPLCHTCRQPFNEQDVYKPFFVKNNGTQSTLLVGEEVKWKYWNRLQSVKLNGLLGQLRQLTHSSEPEKVVIFSQFTTFLDIIADVLESEKMGYARFDGTMSQQMRSTALETFRNDPDVNVLIISLKAGGVGLNLTCANHVFIMDPWWSWSVEAQAIDRIHRLGQEKPVFVTRYIVRDTVEERMLKIQERKNFITGTLGMSEGKQQVQSIEDIKMLFEY

SEQ ID NO: 8605 - protein, 1070 aa, Schizosaccharomyces pombe
MKRKVQKIIDEAPLEENSPPRFFDSDVEADSKPNDLTAANSIVDLKTNSQHENANAAGKEYGDSGVSESWVLDFLSVTGEKTISEFLAQKIWKTSNGDLNVAVDMYFDESFNIKNSNPDSESQKDTDASLTQMDQLSNTVSVKDLSINRNTNKKALNAVSPSLNLSSNSSVQDVSIDKEEMMKKQSRNALTPLDFIMKKNELMKYIGCFGVEAYSTASGTRTLQAGERIYLERQKLSIKSQSRNSRKKSKLLSINSSCYSNIVRFCNSDHHEIGKLPTEVASVISTLMEQGFWSFEAICIYSDNIIRFGSNVTLQVYCFINVNHPSLNRSPFTLATNSMQEEEEHLKASFAQNKRDHLLRLFTWIALEPDLEDCNTKESIHIDDILKTSSLPEARDESNSDLTPSSTEDEEDVVSDQLAILYDKVKTSGAELPSAPKPSTFALDLREYQKQALYWMCCKEEGVQSDGSAPKLHPLWSRFRFPKDSEFPEFFKCSSDDDNTHFYVNLYTGETTMLFPNSMPYHRGGILADEMGLGKTIEVLSLIHSRPCFSTDEIPEAFRHSKPSLPVASRTTLVVAPMSLLDQWHSEACKVSQGTKFRSMIYYGSEKPLDLKSCVIDTSTAPLIIITSYGVLLSEFSQQSHSSGLFSVHWFRVVLDEGHNIRNRESKTAKACHSISSQNRWVITGTPIVNKLDDLYSLIKFMRYEPWCNYTYWQTFVSLPYQSKDVLKALNVVQSILEFLVLRRTKETKDRNGNSIVTLPPKTVKIEYLDFSDSERKIYDSLYTKAKSTVNANIVAGTLFRNYTTILGLLLRLRQACCDPVLLSNMTINSETFDDFEFSVEQFNSLINQFVVTGKPIPSDILKIDTLKSFEALITECPICCNEPIQNPLLLNCKHACCGDCLSEHIQYQKRRNIIPPLCHTCRQPFNEQDVYKPFFVKNNGTQSTLLVGEEVKWKYWNRLQSVKLNGLLGQLRQLTHSSEPEKVVIFSQFTTFLDIIADVLESEKMGYARFDGTMSQQMRSTALETFRNDPDVNVLIISLKAGGVGLNLTCANHVFIMDPWWSWSVEAQA

SEQ ID NO: 8606 - protein, 1375 aa, Schizosaccharomyces pombe
MDRTKRRKIEKEASLLNERNNLLESDFANCYRAFQHQLKLDQQIWRGPEDELNRLKSTIYPVVFWVDGSEKLHAYSFTQRKISLAKNLIPLFSVDLNKDTYSALKAPLKIWSKLWEDNRRLKKIIKYTSYVTVKGSELILSFGISILDSFLAPQDAILSSGSSSSYTALLDYTFLPSEDEEYSCLDINTALFYDCARKLAKSLRFANVSRDPRLSSELLPFQMRVLEWMKRREEEKFLTSNDLPPLWYHCKSLFDDRMVYVNHVYGYMTFSKEKTYLLASGDIRGGILADEMGMGKTLEVLGLVLHHQLPISLTDTCTFDQVVGKNVKYSKATLIITPSTILDQWLSEIDLHVPSLKVFHYQGIRKSNGLKSAKIFLDCDIVVTSYSDLRFELLYTESHSRTLRHEKRHVSPKSPLIDVCWWRICVDEAQMVETSQSNVAQMIYRIPRVNCWTVSGTPVRSEVDDLFGLLFLLRYSPMYLYKKQAWMQIIEKKRVREFCDLFGSLVCRHSKQDVEEELKLPPQHRICMTTRLSVVEETNYQDLLSEAAKSLHFFKDRNLDLCDEESMRRWLVRLRQACCHPQVGFGNKSAFGGGPMKSINDVLVFMLEQTNSTFSSLNRKLYSDKIIVGQIYDHIKDYNKALAIWSEVRIPVELAVKELENVIYNSKYEDHGKNLPINYFGLDHFIHLRVWYVLLHKIYFFIASAYFSLKNEKFENEFYLLAQDLRRKIMSDVIIKTSKHLEEFSEKFIPKKLVKIPRLQKSYAKGLITGHGIIEDYNRLYKELNDQKEVLIKFRDRLIHLMKLPLLDQESDPTGDEYEESLNAQSEISYCIDVYRQMLSDRVAAVSGTINTFVSHETELEKYKLIESIKKSEKSLDKQAEERDKKYLLYFEEREEARPKADQYGSLINIVSRLLDASNRSTSSFETSKNMEEYERIDAMAKEQSRICQKLEKELSIIQLTYNSRIEYYKQLQEISDSLMPPPVSNISLNNYVKDDEKKQKFLNSVIIKASVILEKEISEKQDEASQTTNVAELVNQKISEMNIPGHIHLLRELEEEKSNTQRKIAHFESRRRYLTNLYEHIVLKAESHQICIICRDIIKQGFITTCGHLYCSFCLEAWLKHSSSCPMCKTKLNKNNAYYIGESRDIYSRQEFVTGFNKRDERLEILDDEAYRQISNMELKESFGSKIDTISKHLLYLKHNELYPKVVVFSQWLDVLDVLHKSFEANGIVFIRFDGKSKNTCLKRFKEERSLQVLTLHARSQSSGLTLTNATHVFMCEPLLNSGIEMQAISRVHRIGQTRPTFVYYYIVEDTVEGHILNLSLTKHEQLDKLGLDVPLVGNINRTTEASSGGEQVDAAEIKDCLKMALKRLTTEDS

SEQ ID NO: 8607 - protein, 180 aa, Schizosaccharomyces pombe
MGLGKTIQMIALILSHPLPKKKHSIKSTLVVAPLSLIKQWESEVQTKSKLTAIVYHGASRYKLLKVIHEYDVVITTYQILVSEWVSHNTTGTDGKSPTEAKSYEKKKPSLFAFYWWRIILDEAHTIKNKSSKSALACCALQGINRWCLTGTPLQNNVDELYSLVKFLHINPFNDQSVWKD

SEQ ID NO: 8608 - protein, 104 aa, Schizosaccharomyces pombe
DPDVNVLIISLKAGGVGLNLTCANHVFIMDPWWSWSVEAQAIDRIHRLGQEKPVFVTRYIVRDTVEERMLKIQERKNFITGTLGMSEGKQQVQSIEDIKMLFEY

SEQ ID NO: 8609 - protein, 430 aa, Schizosaccharomyces pombe
DPKSDVYIFMLSTRAGGLGLNLQTADTVIIFDTDWNPHQDLQAQDRAHRIGQTKEVRILRLITEKSIEENILSRAQYKLDLDGKVIQAGKFDNKSTPEEREAFLRSLLEHDGDDDHDLTYGELQDDELNELISRTDEELVLFKKLDKERAATDIYGKGKPLERLLTVNELPDFYKVEVDSFAVQSSSELEDQYLERKRRRRNSISYTELTLDELNTVDDPSSTLMPRKRGRPRKKTNSGSSLSTPLSQESSLARSGRKNTPSYKQKALRRYCMEIFERLYNLQSEDGRFVNGLFLYPPNRKLYPDYYIIIKRPIALGKIKRNIKNDRYGDVGELIADFMLMFNNAYTYNEEHSIVYEDAKLMEKTLKEVIEDLEKNNSLHAYEEEALNEEQASLVFLENSEAELPLDSGIVSAEDDKVITYEDSSSSYSE

SEQ ID NO: 8610 - protein, 1867 aa, Saccharomyces cerevisiae
MTSRVSRLDRQVILIETGSTQVVRNMAADQMGDLAKQHPEDILSLLSRVYPFLLVKKWETRVTAARAVGGIVAHAPSWDPNESDLVGGTNEGSPLDNAQVKLEHEMKIKLEEATQNNQLNLLQEDHHLSSLSDWKLNEILKSGKVLLASSMNDYNVLGKADDNIRKQAKTDDIKQETSMLNASDKANENKSNANKKSARMLAMARRKKKMSAKNTPKHPVDITESSVSKTLLNGKNMTNSAASLATSPTSNQLNPKLEITEQADESKLMIESTVRPLLEQHEIVAGLVWQFQGIYELLLDNLMSENWEIRHGAALGLRELVKKHAYGVSRVKGNTREENNLRNSRSLEDLASRLLTVFALDRFGDYVYDTVVAPVRESVAQTLAALLIHLDSTLSIKIFNCLEQLVLQDPLQTGLPNKIWEATHGGLLGIRYFVSIKTNFLFAHGLLENVVRIVLYGLNQSDDDVQSVAASILTPITSEFVKLNNSTIEILVTTIWSLLARLDDDISSSVGSIMDLLAKLCDHQEVLDILKNKALEHPSEWSFKSLVPKLYPFLRHSISSVRRAVLNLLIAFLSIKDDSTKNWLNGKVFRLVFQNILLEQNPELLQLSFDVYVALLEHYKVKHTEKTLDHVFSKHLQPILHLLNTPVGEKGKNYAMESQYILKPSQHYQLHPEKKRSISETTTDSDIPIPKNNEHINIDAPMIAGDITLLGLDVILNTRIMGAKAFALTLSMFQDSTLQSFFTNVLVRCLELPFSTPRMLAGIIVSQFCSSWLQKHPEGEKLPSFVSEIFSPVMNKQLLNRDEFPVFRELVPSLKALRTQCQSLLATFVDVGMLPQYKLPNVAIVVQGETEAGPHAFGVETAEKVYGEYYDKMFKSMNNSYKLLAKKPLEDSKHRVLMAINSAKESAKLRTGSILANYASSILLFDGLPLKLNPIIRSLMDSVKEERNEKLQTMAGESVVHLIQQLLENNKVNVSGKIVKNLCGFLCVDTSEVPDFSVNAEYKEKILTLIKESNSIAAQDDINLAKMSEEAQLKRKGGLITLKILFEVLGPSILQKLPQLRSILFDSLSDHENEEASKVDNEQGQKIVDSFGVLRALFPFMSDSLRSSEVFTRFPVLLTFLRSNLSVFRYSAARTFADLAKISSVEVMAYTIREILPLMNSAGSLSDRQGSTELIYHLSLSMETDVLPYVIFLIVPLLGRMSDSNEDVRNLATTTFASIIKLVPLEAGIADPKGLPEELVASRERERDFIQQMMDPSKAKPFKLPIAIKATLRKYQQDGVNWLAFLNKYHLHGILCDDMGLGKTLQTICIIASDQYLRKEDYEKTRSVESRALPSLIICPPSLTGHWENEFDQYAPFLKVVVYAGGPTVRLTLRPQLSDADIIVTSYDVARNDLAVLNKTEYNYCVLDEGHIIKNSQSKLAKAVKEITANHRLILTGTPIQNNVLELWSLFDFLMPGFLGTEKMFQERFAKPIAASRNSKTSSKEQEAGVLALEALHKQVLPFMLRRLKEDVLSDLPPKIIQDYYCELGDLQKQLYMDFTKKQKNVVEKDIENSEIADGKQHIFQALQYMRKLCNHPALVLSPNHPQLAQVQDYLKQTGLDLHDIINAPKLSALRTLLFECGIGEEDIDKKASQDQNFPIQNVISQHRALIFCQLKDMLDMVENDLFKKYMPSVTYMRLDGSIDPRDRQKVVRKFNEDPSIDCLLLTTKVGGLGLNLTGADTVIFVEHDWNPMNDLQAMDRAHRIGQKKVVNVYRIITKGTLEEKIMGLQKFKMNIASTVVNQQNSGLASMDTHQLLDLFDPDNVTSQDNEEKNNGDSQAAKGMEDIANETGLTGKAKEALGELKELWDPSQYEEEYNLDTFIKTLR

SEQ ID NO: 8611 - protein, 1129 aa, Saccharomyces cerevisiae
MAYMLAIANFHFFKFYTRMRKKHENNSCNEKDKDENLFKIILAIFLQEKKKYDCISSGSIMTASEEYLENLKPFQVGLPPHDPESNKKRYLLKDANGKKFDLEGTTKRFEHLLSLSGLFKHFIESKAAKDPKFRQVLDVLEENKANGKGKGKHQDVRRRKTEHEEDAELLKEEDSDDDESIEFQFRESPAYVNGQLRPYQIQGVNWLVSLHKNKIAGILADEMGLGKTLQTISFLGYLRYIEKIPGPFLVIAPKSTLNNWLREINRWTPDVNAFILQGDKEERAELIQKKLLGCDFDVVIASYEIIIREKSPLKKINWEYIIIDEAHRIKNEESMLSQVLREFTSRNRLLITGTPLQNNLHELWALLNFLLPDIFSDAQDFDDWFSSESTEEDQDKIVKQLHTVLQPFLLRRIKSDVETSLLPKKELNLYVGMSSMQKKWYKKILEKDLDAVNGSNGSKESKTRLLNIMMQLRKCCNHPYLFDGAEPGPPYTTDEHLVYNAAKLQVLDKLLKKLKEEGSRVLIFSQMSRLLDILEDYCYFRNYEYCRIDGSTAHEDRIQAIDDYNAPDSKKFVFLLTTRAGGLGINLTSADVVVLYDSDWNPQADLQAMDRAHRIGQKKQVKVFRLVTDNSVEEKILERATQKLRLDQLVIQQNRTSLKKKENKADSKDALLSMIQHGAADVFKSGTSTGSAGTPEPGSGEKGDDIDLDELLLKSENKTKSLNAKYETLGLDDLQKFNQDSAYEWNGQDFKKKIQRDIISPLLLNPTKRERKENYSIDNYYKDVLNTGRSSTPSHPRMPKPHVFHSHQLQPPQLKVLYEKERMWTAKKTGYVPTMDDVKAAYGDISDEEEKKQKLELLKLSVNNSQPLTEEEEKMKADWESEGFTNWNKLEFRKFITVSGKYGRNSIQAIARELAPGKTLEEVRAYAKAFWSNIERIEDYEKYLKIIENEEEKIKRVKMQQEALRRKLSEYKNPFFDLKLKHPPSSNNKRTYSEEEDRFILLMLFKYGLDRDDVYELVRDEIRDCPLFELDFYFRSRTPVELARRGNTLLQCLEKEFNAGIVLDDATKDRMKKEDENGKRIREEFADQTANEKENVDGVESKKAKIEDTSNVGTEQLVAEKIPENETTH

SEQ ID NO: 8612 - protein, 1143 aa, Saccharomyces cerevisiae
MQKPARGGCRNTLLWPNMLAIANFHFFKFYTRMRKKHENNSCNEKDKDENLFKIILAIFLQEKKKYDCISSGSIMTASEEYLENLKPFQVGLPPHDPESNKKRYLLKDANGKKFDLEGTTKRFEHLLSLSGLFKHFIESKAAKDPKFRQVLDVLEENKANGKGKGKHQDVRRRKTEHEEDAELLKEEDSDDDESIEFQFRESPAYVNGQLRPYQIQGVNWLVSLHKNKIAGILADEMGLGKTLQTISFLGYLRYIEKIPGPFLVIAPKSTLNNWLREINRWTPDVNAFILQGDKEERAELIQKKLLGCDFDVVIASYEIIIREKSPLKKINWEYIIIDEAHRIKNEESMLSQVLREFTSRNRLLITGTPLQNNLHELWALLNFLLPDIFSDAQDFDDWFSSESTEEDQDKIVKQLHTVLQPFLLRRIKSDVETSLLPKKELNLYVGMSSMQKKWYKKILEKDLDAVNGSNGSKESKTRLLNIMMQLRKCCNHPYLFDGAEPGPPYTTDEHLVYNAAKLQVLDKLLKKLKEEGSRVLIFSQMSRLLDILEDYCYFRNYEYCRIDGSTAHEDRIQAIDDYNAPDSKKFVFLLTTRAGGLGINLTSADVVVLYDSDWNPQADLQAMDRAHRIGQKKQVKVFRLVTDNSVEEKILERATQKLRLDQLVIQQNRTSLKKKENKADSKDALLSMIQHGAADVFKSGTSTGSAGTPEPGSGEKGDDIDLDELLLKSENKTKSLNAKYETLGLDDLQKFNQDSAYEWNGQDFKKKIQRDIISPLLLNPTKRERKENYSIDNYYKDVLNTGRSSTPSHPRMPKPHVFHSHQLQPPQLKVLYEKERMWTAKKTGYVPTMDDVKAAYGDISDEEEKKQKLELLKLSVNNSQPLTEEEEKMKADWESEGFTNWNKLEFRKFITVSGKYGRNSIQAIARELAPGKTLEEVRAYAKAFWSNIERIEDYEKYLKIIENEEEKIKRVKMQQEALRRKLSEYKNPFFDLKLKHPPSSNNKRTYSEEEDRFILLMLFKYGLDRDDVYELVRDEIRDCPLFELDFYFRSRTPVELARRGNTLLQCLEKEFNAGIVLDDATKDRMKKEDENGKRIREEFADQTANEKENVDGVESKKAKIEDTSNVGTEQLVAEKIPENETTH

SEQ ID NO: 8613 - protein, 1120 aa, Saccharomyces cerevisiae
MTTQQEEQRSDTKNSKSESPSEVLVDTLDSKSNGSSDDDNIGQSEELSDKEIYTVEDRPPEYWAQRKKKFVLDVDPKYAKQKDKSDTYKRFKYLLGVTDLFRHFIGIKAKHDKNIQKLLKQLDSDANKLSKSHSTVSSSSRHHRKTEKEEDAELMADEEEEIVDTYQEDIFVSESPSFVKSGKLRDYQVQGLNWLISLHENKLSGILADEMGLGKTLQTISFLGYLRYVKQIEGPFLIIVPKSTLDNWRREFLKWTPNVNVLVLHGDKDTRADIVRNIILEARFDVLITSYEMVIREKNALKRLAWQYIVIDEAHRIKNEQSALSQIIRLFYSKNRLLITGTPLQNNLHELWALLNFLLPDIFGDSELFDEWFEQNNSEQDQEIVIQQLHSVLNPFLLRRVKADVEKSLLPKIETNVYVGMTDMQIQWYKSLLEKDIDAVNGAVGKREGKTRLLNIVMQLRKCCNHPYLFEGAEPGPPYTTDEHLIFNSGKMIILDKLLKRLKEKGSRVLIFSQMSRLLDILEDYCYFRDFEYCRIDGSTSHEERIEAIDEYNKPNSEKFVFLLTTRAGGLGINLVTADTVILFDSDWNPQADLQAMDRAHRIGQKKQVHVYRFVTENAIEEKVIERAAQKLRLDQLVIQQGTGKKTASLGNSKDDLLDMIQFGAKNMFEKKASKVTVDADIDDILKKGEQKTQELNAKYQSLGLDDLQKFNGIENQSAYEWNGKSFQKKSNDKVVEWINPSRRERRREQTTYSVDDYYKEIIGGGSKSASKQTPQPKAPRAPKVIHGQDFQFFPKELDALQEKEQLYFKKKVNYKVTSYDITGDIRNEGSDAEEEEGEYKNAANTEGHKGHEELKRRIEEEQEKINSAPDFTQEDELRKQELISKAFTNWNKRDFMAFINACAKYGRDDMENIKKSIDSKTPEEVEVYAKIFWERLKEINGWEKYLHNVELGEKKNEKLKFQETLLRQKIEQCKHPLHELIIQYPPNNARRTYNTLEDKFLLLAVNKYGLRADKLYEKLKQEIMMSDLFTFDWFIKTRTVHELSKRVHTLLTLIVREYEQPDANKKKRSRTSATREDTPLSQNESTRASTVPNLPTTMVTNQKDTNDHVDKRTKIDQEA

SEQ ID NO: 8614 - protein, 1703 aa, Saccharomyces cerevisiae
MNIPQRQFSNEEVNRCYLRWQHLRNEHGMNAPSVPEFIYLTKVLQFAAKQRQELQMQRQQQGISGSQQNIVPNSSDQAELPNNASSHISASASPHLAPNMQLNGNETFSTSAHQSPIMQTQMPLNSNGGNNMLPQRQSSVGSLNATNFSPTPANNGENAAEKPDNSNHNNLNLNNSELQPQNRSLQEHNIQDSNVMPGSQINSPMPQQAQMQQAQFQAQQAQQAQQAQQAQQAQARLQQGRRLPMTMFTAEQSELLKAQITSLKCLVNRKPIPFEFQAVIQKSINHPPDFKRMLLSLSEFARRRQPTDQNNQSNLNGGNNTQQPGTNSHYNNTNTDNVSGLTRNAPLDSKDENFASVSPAGPSSVHNAKNGTLDKNSQTVSGTPITQTESKKEENETISNVAKTAPNSNKTHTEQNNPPKPQKPVPLNVLQDQYKEGIKVVDIDDPDMMVDSFTMPNISHSNIDYQTLLANSDHAKFTIEPGVLPVGIDTHTATDIYQTLIALNLDTTVNDCLDKLLNDECTESTRENALYDYYALQLLPLQKAVRGHVLQFEWHQNSLLTNTHPNFLSKIRNINVQDALLTNQLYKNHELLKLERKKTEAVARLKSMNKSAINQYNRRQDKKNKRLKFGHRLIATHTNLERDEQKRAEKKAKERLQALKANDEEAYIKLLDQTKDTRITHLLRQTNAFLDSLTRAVKDQQKYTKEMIDSHIKEASEEVDDLSMVPKMKDEEYDDDDDNSNVDYYNVAHRIKEDIKKQPSILVGGTLKDYQIKGLQWMVSLFNNHLNGILADEMGLGKTIQTISLLTYLYEMKNIRGPYLVIVPLSTLSNWSSEFAKWAPTLRTISFKGSPNERKAKQAKIRAGEFDVVLTTFEYIIKERALLSKVKWVHMIIDEGHRMKNAQSKLSLTLNTHYHADYRLILTGTPLQNNLPELWALLNFVLPKIFNSVKSFDEWFNTPFANTGGQDKIELSEEETLLVIRRLHKVLRPFLLRRLKKDVEKELPDKVEKVVKCKMSALQQIMYQQMLKYRRLFIGDQNNKKMVGLRGFNNQIMQLKKICNHPFVFEEVEAQINPTRETNDDIWRVAGKFELLDRILPKLKATGHRVLIFFQMTQIMDIMEDFLRYINIKYLRLDGHTKSDERSELLRLFNAPDSEYLCFILSTRAGGLGLNLQTADTVIIFDTDWNPHQDLQAQDRAHRIGQKNEVRILRLITTNSVEEVILERAYKKLDIDGKVIQAGKFDNKSTSEEQEALLRSLLDAEEERRKKRESGVEEEEELKDSEINEILARNDEEMAVLTRMDEDRSKKEEELGVKSRLLEKSELPDIYSRDIGAELKREESESAAVYNGRGARERKTATYNDNMSEEQWLRQFEVSDDEKNDKQARKQRTKKEDKSEAIDGNGEIKGENIDADNDGPRINNISAEDRADTDLAMNDDDFLSKKRKAGRPRGRPKKVKLEGSENSEPPALESSPVTGDNSPSEDFMDIPKPRTAGKTSVKSARTSTRGRGRGRGRGRGRGRGRGRPPKARNGLDYVRTPAAATSPIDIREKVAKQALDLYHFALNYENEAGRKLSDIFLSKPSKALYPDYYMIIKYPVAFDNINTHIETLAYNSLKETLQDFHLIFSNARIYNTEGSVVYEDSLELEKVVTKKYCEIMGDNSQLDFTEFDEQYGTRPLVLPPVVTSSVAESFTDEADSSMTEASV

SEQ ID NO: 8615 - protein, 1703 aa, Saccharomyces cerevisiae
MNIPQRQFSNEEVNRCYLRWQHLRNEHGMNAPSVPEFIYLTKVLQFAAKQRQELQMQRQQQGISGSQQNIVPNSSDQAELPNNASSHISASASPHLAPNMQLNGNETFSTSAHQSPIMQTQMPLNSNGGNNMLPQRQSSVGSLNATNFSPTPANNGENAAEKPDNSNHNNLNLNNSELQPQNRSLQEHNIQDSNVMPGSQINSPMPQQAQMQQAQFQAQQAQQAQQAQQAQQAQARLQQGRRLPMTMFTAEQSELLKAQITSLKCLVNRKPIPFEFQAVIQKSINHPPDFKRMLLSLSEFARRRQPTDQNNQSNLNGGNNTQQPGTNSHYNNTNTDNVSGLTRNAPLDSKDENFASVSPAGPSSVHNAKNGTLDKNSQTVSGTPITQTESKKEENETISNVAKTAPNSNKTHTEQNNPPKPQKPVPLNVLQDQYKEGIKVVDIDDPDMMVDSFTMPNISHSNIDYQTLLANSDHAKFTIEPGVLPVGIDTHTATDIYQTLIALNLDTTVNDCLDKLLNDECTESTRENALYDYYALQLLPLQKAVRGHVLQFEWHQNSLLTNTHPNFLSKIRNINVQDALLTNQLYKNHELLKLERKKTEAVARLKSMNKSAINQYNRRQDKKNKRLKFGHRLIATHTNLERDEQKRAEKKAKERLQALKANDEEAYIKLLDQTKDTRITHLLRQTNAFLDSLTRAVKDQQKYTKEMIDSHIKEASEEVDDLSMVPKMKDEEYDDDDDNSNVDYYNVAHRIKEDIKKQPSILVGGTLKDYQIKGLQWMVSLFNNHLNGILADEMGLGKTIQTISLLTYLYEMKNIRGPYLVIVPLSTLSNWSSEFAKWAPTLRTISFKGSPNERKAKQAKIRAGEFDVVLTTFEYIIKERALLSKVKWVHMIIDEGHRMKNAQSKLSLTLNTHYHADYRLILTGTPLQNNLPELWALLNFVLPKIFNSVKSFDEWFNTPFANTGGQDKIELSEEETLLVIRRLHKVLRPFLLRRLKKDVEKELPDKVEKVVKCKMSALQQIMYQQMLKYRRLFIGDQNNKKMVGLRGFNNQIMQLKKICNHPFVFEEVEDQINPTRETNDDIWRVAGKFELLDRILPKLKATGHRVLIFFQMTQIMDIMEDFLRYINIKYLRLDGHTKSDERSELLRLFNAPDSEYLCFILSTRAGGLGLNLQTADTVIIFDTDWNPHQDLQAQDRAHRIGQKNEVRILRLITTNSVEEVILERAYKKLDIDGKVIQAGKFDNKSTSEEQEALLRSLLDAEEERRKKRESGVEEEEELKDSEINEILARNDEEMAVLTRMDEDRSKKEEELGVKSRLLEKSELPDIYSRDIGAELKREESESAAVYNGRGARERKTATYNDNMSEEQWLRQFEVSDDEKNDKQARKQRTKKEDKSEAIDGNGEIKGENIDADNDGPRINNISAEDRADTDLAMNDDDFLSKKRKAGRPRGRPKKVKLEGSENSEPPALESSPVTGDNSPSEDFMDIPKPRTAGKTSVKSARTSTRGRGRGRGRGRGRGRGRGRPPKARNGLDYVRTPAAATSPIDIREKVAKQALDLYHFALNYENEAGRKLSDIFLSKPSKALYPDYYMIIKYPVAFDNINTHIETLAYNSLKETLQDFHLIFSNARIYNTEGSVVYEDSLELEKVVTKKYCEIMGDNSQLDFTEFDEQYGTRPLVLPPVVTSSVAESFTDEADSSMTEASV

SEQ ID NO: 8616 - protein, 1085 aa, Saccharomyces cerevisiae
MEDKEQQDNAKLENNESLKDLGVNVLSQSSLEEKIANDVTNFSNLQSLQQEETRLERSKTALQRYVNKKNHLTRKLNNTTRISVKQNLRDQIKNLQSDDIERVLKDIDDIQSRIKELKEQVDQGAENKGSKEGLQRPGETEKEFLIRTGKITAFGHKAGFSLDTANREYAKNDEQKDEDFEMATEQMVENLTDEDDNLSDQDYQMSGKESEDDEEEENDDKILKELEDLRFRGQPGEAKDDGDELYYQERLKKWVKQRSCGSQRSSDLPEWRRPHPNIPDAKLNSQFKIPGEIYSLLFNYQKTCVQWLYELYQQNCGGIIGDEMGLGKTIQVIAFIAALHHSGLLTGPVLIVCPATVMKQWCNEFHHWWPPLRTVILHSMGSGMASDQKFKMDENDLENLIMNSKPSDFSYEDWKNSTRTKKALESSYHLDKLIDKVVTDGHILITTYVGLRIHSDKLLKVKWQYAVLDEGHKIRNPDSEISLTCKKLKTHNRIILSGTPIQNNLTELWSLFDFIFPGKLGTLPVFQQQFVIPINIGGYANATNIQVQTGYKCAVALRDLISPYLLRRVKADVAKDLPQKKEMVLFCKLTKYQRSKYLEFLHSSDLNQIQNGKRNVLFGIDILRKICNHPDLLDRDTKRHNPDYGDPKRSGKMQVVKQLLLLWHKQGYKALLFTQSRQMLDILEEFISTKDPDLSHLNYLRMDGTTNIKGRQSLVDRFNNESFDVFLLTTRVGGLGVNLTGANRIIIFDPDWNPSTDMQARERAWRIGQKREVSIYRLMVGGSIEEKIYHRQIFKQFLTNRILTDPKQKRFFKIHELHDLFSLGGENGYSTEELNEEVQKHTENLKNSKSEESDDFEQLVNLSGVSKLESFYNGKEKKENSKTEDDRLIEGLLGGESNLETVMSHDSVVNSHAGSSSSNIITKEASRVAIEAVNALRKSRKKITKQYEIGTPTWTGRFGKAGEIRKRDPLKNKLTGSAAILGNITKSQKEASKEARQENYDDGITFARSKEINSNTKTLENIRAYLQKQNNFFSSSVSILNSIGVSLSDKEDVIKVRALLKTIAQFDKERKGWVLDEEFRNNNAS

SEQ ID NO: 8617 - protein, 1085 aa, Saccharomyces cerevisiae
MEDKEQQDNAKLENNESLKDLGVNVLSQSSLEEKIANDVTNFSNLQSLQQEETRLERSKTALQRYVNKKNHLTRKLNNTTRISVKQNLRDQIKNLQSDDIERVLKDIDDIQSRIKELKEQVDQGAENKGSKEGLQRPGETEKEFLIRTGKITAFGHKAGFSLDTANREYAKNDEQKDEDFEMATEQMVENLTDEDDNLSDQDYQMSGKESEDDEEEENDDKILKELEDLRFRGQPGEAKDDGDELYYQERLKKWVKQRSCGSQRSSDLPEWRRPHPNIPDAKLNSQFKIPGEIYSLLFNYQKTCVQWLYELYQQNCGGIIGDEMGLGKTIQVIAFIAALHHSGLLTGPVLIVCPATVMKQWCNEFQHWWPPLRTVILHSMGSGMASDQKFKMDENDLENLIMNSKPSDFSYEDWKNSTRTKKALESSYHLDKLIDKVVTDGHILITTYVGLRIHSDKLLKVKWQYAVLDEGHKIRNPDSEISLTCKKLKTHNRIILSGTPIQNNLTELWSLFDFIFPGKLGTLPVFQQQFVIPINIGGYANATNIQVQTGYKCAVALRDLISPYLLRRVKADVAKDLPQKKEMVLFCKLTKYQRSKYLEFLHSSDLNQIQNGKRNVLFGIDILRKICNHPDLLDRDTKRHNPDYGDPKRSGKMQVVKQLLLLWHKQGYKALLFTQSRQMLDILEEFISTKDPDLSHLNYLRMDGTTNIKGRQSLVDRFNNESFDVFLLTTRVGGLGVNLTGANRIIIFDPDWNPSTDMQARERAWRIGQKREVSIYRLMVGGSIEEKIYHRQIFKQFLTNRILTDPKQKRFFKIHELHDLFSLGGENGYSTEELNEEVQKHTENLKNSKSEESDDFEQLVNLSGVSKLESFYNGKEKKENSKTEDDRLIEGLLGGESNLETVMSHDSVVNSHAGSSSSNIITKEASRVAIEAVNALRKSRKKITKQYEIGTPTWTGRFGKAGKIRKRDPLKNKLTGSAAILGNITKSQKEASKEARQENYDDGITFARSKEINSNTKTLENIRAYLQKQNNFFSSSVSILNSIGVSLSDKEDVIKVRALLKTIAQFDKERKGWVLDEEFRNNNAS

SEQ ID NO: 8618 - protein, 1359 aa, Saccharomyces cerevisiae
MLQEQSELMSTVMNNTPTTVAALAAVAAASETNGKLGSEEQPEITIPKPRSSAQLEQLLYRYRAIQNHPKENKLEIKAIEDTFRNISRDQDIYETKLDTLRKSIDKGFQYDEDLLNKHLVALQLLEKDTDVPDYFLDLPDTKNDNTTAIEVDYSEKKPIKISADFNAKAKSLGLESKFSNATKTALGDPDTEIRISARISNRINELERLPANLGTYSLDDCLEFITKDDLSSRMDTFKIKALVELKSLKLLTKQKSIRQKLINNVASQAHHNIPYLRDSPFTAAAQRSVQIRSKVIVPQTVRLAEELERQQLLEKRKKERNLHLQKINSIIDFIKERQSEQWSRQERCFQFGRLGASLHNQMEKDEQKRIERTAKQRLAALKSNDEEAYLKLLDQTKDTRITQLLRQTNSFLDSLSEAVRAQQNEAKILHGEEVQPITDEEREKTDYYEVAHRIKEKIDKQPSILVGGTLKEYQLRGLEWMVSLYNNHLNGILADEMGLGKTIQSISLITYLYEVKKDIGPFLVIVPLSTITNWTLEFEKWAPSLNTIIYKGTPNQRHSLQHQIRVGNFDVLLTTYEYIIKDKSLLSKHDWAHMIIDEGHRMKNAQSKLSFTISHYYRTRNRLILTGTPLQNNLPELWALLNFVLPKIFNSAKTFEDWFNTPFANTGTQEKLELTEEETLLIIRRLHKVLRPFLLRRLKKEVEKDLPDKVEKVIKCKLSGLQQQLYQQMLKHNALFVGAGTEGATKGGIKGLNNKIMQLRKICNHPFVFDEVEGVVNPSRGNSDLLFRVAGKFELLDRVLPKFKASGHRVLMFFQMTQVMDIMEDFLRMKDLKYMRLDGSTKTEERTEMLNAFNAPDSDYFCFLLSTRAGGLGLNLQTADTVIIFDTDWNPHQDLQAQDRAHRIGQKNEVRILRLITTDSVEEVILERAMQKLDIDGKVIQAGKFDNKSTAEEQEAFLRRLIESETNRDDDDKAELDDDELNDTLARSADEKILFDKIDKERMNQERADAKAQGLRVPPPRLIQLDELPKVFREDIEEHFKKEDSEPLGRIRQKKRVYYDDGLTEEQFLEAVEDDNMSLEDAIKKRREARERRRLRQNGTKENEIETLENTPEASETSLIENNSFTAAVDEETNADKETTASRSKRRSSRKKRTISIVTAEDKENTQEESTSQENGGAKVEEEVKSSSVEIINGSESKKKKPKLTVKIKLNKTTVLENNDGKRAEEKPESKSPAKKTAAKKTKTKSKSLGIFPTVEKLVEEMREQLDEVDSHPRTSIFEKLPSKRDYPDYFKVIEKPMAIDIILKNCKNGTYKTLEEVRQALQTMFENARFYNEEGSWVYVDADKLNEFTDEWFKEHSS

SEQ ID NO: 8619 - protein, 1352 aa, Saccharomyces cerevisiae
MLQEQSELMSTVMNNTPTTVAALAAVAAASETNGKLGSEEQPEITIPKPRSSAQLEQLLYRYRAIQNHPKENKLEIKAIEDTFRNISRDQDIYETKLDTLRKSIDKGFQYDEDLLNKHLVALQLLEKDTDVPDYFLDLPDTKNDNTTAIEVDYSEKKPIKISADFNAKAKSLGLESKFSNATKTALGDPDTEIRISARISNRINELERLPANLGTYSLDDCLEFITKDDLSSRMDTFKIKALVELKSLKLLTKQKSIRQKLINNVASQAHHNIPYLRDSPFTAAAQRSVQIRSKVIVPQTVRLAEELERQQLLEKRKKERNLHLQKINSIIDFIKERQSEQWSRQERCFQFGRLGASLHNQMEKDEQKRIERTAKQRLAALKSNDEEAYLKLLDQTKDTRITQLLRQTNSFLDSLSEAVRAQQNEAKILHGEEVQPITDEEREKTDYYEVAHRIKEKIDKQPSILVGGTLKEYQLRGLEWMVSLYNNHLNGILADEMGLGKTIQSISLITYLYEVKKDIGPFLVIVPLSTITNWTLEFEKWAPSLTTIIYKGTPNQRHSLQHQIRVGNFDVLLTTYEYIIKDKSLLSKHDWAHMIIDEGHRMKNAQSKLSFTISHYYRTRNRLILTGTPLQNNLPELWALLNFVLPKIFNSAKTFEDWFNTPFANTGTQEKLELTEEETLLIIRRLHKVLRPFLLRRLKKEVEKDLPDKVEKVIKCKLSGLQQQLYQQMLKHNALFVGAGTEGATKGGIKGLNNKIMQLRKICNHPFVFDEVEGVVNPSRGNSDLLFRVAGKFELLDRVLPKFKASGHRVLMFFQMTQVMDIMEDFLRMKDLKYMRLDGSTKTEERTEMLNAFNAPDSDYFCFLLSTRAGGLGLNLQTADTVIIFDTDWNPHQDLQAQDRAHRIGQKNEVRILRLITTDSVEEVILERAMQKLDIDGKVIQAGKFDNKSTAEEQEAFLRRLIESETNRDDDDKAELDDDELNDTLARSADEKILFDKIDKERMNQERADRKAQGLRVPPPRLIQLDELPKVFREDIEEHFKKEDSEPLGRIRQKKRVYYDDGLTEEQFLEAVEDAIKKRREARERRRLRQNGTKENEIETLENTPEASETSLIENNSFTAAVDEETNADKETTASRSKRRSSRKKRTISIVTAEDKENTQEESTSQENGGAKVEEEVKSSSVEIINGSESKKKKPKLTVKIKLNKTTVLENNDGKRAEEKPESKSPAKKTAAKKTKTKSKSLGIFPTVEKLVEEMREQLDEVDSHPRTSIFEKLPSKRDYPDYFKVIEKPMAIDIILKNCKNGTYKTLEEVRQALQTMFENARFYNEEGSWVYVDADKLNEFTDEWFKEHSS

SEQ ID NO: 8620 - protein, 1468 aa, Saccharomyces cerevisiae
MAAKDISTEVLQNPELYGLRRSHRAAAHQQNYFNDSDDEDDEDNIKQSRRKRMTTIEDDEDEFEDEEGEEDSGEDEDEEDFEEDDDYYGSPIKQNRSKPKSRTKSKSKSKPKSQSEKQSTVKIPTRFSNRQNKTVNYNIDYSDDDLLESEDDYGSEEALSEENVHEASANPQPEDFHGIDIVINHRLKTSLEEGKVLEKTVPDLNNCKENYEFLIKWTDESHLHNTWETYESIGQVRGLKRLDNYCKQFIIEDQQVRLDPYVTAEDIEIMDMERERRLDEFEEFHVPERIIDSQRASLEDGTSQLQYLVKWRRLNYDEATWENATDIVKLAPEQVKHFQNRENSKILPQYSSNYTSQRPRFEKLSVQPPFIKGGELRDFQLTGINWMAFLWSKGDNGILADEMGLGKTVQTVAFISWLIFARRQNGPHIIVVPLSTMPAWLDTFEKWAPDLNCICYMGNQKSRDTIREYEFYTNPRAKGKKTMKFNVLLTTYEYILKDRAELGSIKWQFMAVDEAHRLKNAESSLYESLNSFKVANRMLITGTPLQNNIKELAALVNFLMPGRFTIDQEIDFENQDEEQEEYIHDLHRRIQPFILRRLKKDVEKSLPSKTERILRVELSDVQTEYYKNILTKNYSALTAGAKGGHFSLLNIMNELKKASNHPYLFDNAEERVLQKFGDGKMTRENVLRGLIMSSGKMVLLDQLLTRLKKDGHRVLIFSQMVRMLDILGDYLSIKGINFQRLDGTVPSAQRRISIDHFNSPDSNDFVFLLSTRAGGLGINLMTADTVVIFDSDWNPQADLQAMARAHRIGQKNHVMVYRLVSKDTVEEEVLERARKKMILEYAIISLGVTDGNKYTKKNEPNAGELSAILKFGAGNMFTATDNQKKLEDLNLDDVLNHAEDHVTTPDLGESHLGGEEFLKQFEVTDYKADIDWDDIIPEEELKKLQDEEQKRKDEEYVKEQLEMMNRRDNALKKIKNSVNGDGTAANSDSDDDSTSRSSRRRARANDMDSIGESEVRALYKAILKFGNLKEILDELIADGTLPVKSFEKYGETYDEMMEAAKDCVHEEEKNRKEILEKLEKHATAYRAKLKSGEIKAENQPKDNPLTRLSLKKREKKAVLFNFKGVKSLNAESLLSRVEDLKYLKNLINSNYKDDPLKFSLGNNTPKPVQNWSSNWTKEEDEKLLIGVFKYGYGSWTQIRDDPFLGITDKIFLNEVHNPVAKKSASSSDTTPTPSKKGKGITGSSKKVPGAIHLGRRVDYLLSFLRGGLNTKSPSADIGSKKLPTGPSKKRQRKPANHSKSMTPEITSSEPANGPPSKRMKALPKGPAALINNTRLSPNSPTPPLKSKVSRDNGTRQSSNPSSGSAHEKEYDSMDEEDCRHTMSAIRTSLKRLRRGGKSLDRKEWAKILKTELTTIGNHIESQKGSSRKASPEKYRKHLWSYSANFWPADVKSTKLMAMYDKITESQKK

SEQ ID NO: 8621 - protein, 898 aa, Saccharomyces cerevisiae
MARRRLPDRPPNGIGAGERPRLVPRPINVQDSVNRLTKPFRVPYKNTHIPPAAGRIATGSDNIVGGRSLRKRSATVCYSGLDINADEAEYNSQDISFSQLTKRRKDALSAQRLAKDPTRLSHIQYTLRRSFTVPIKGYVQRHSLPLTLGMKKKITPEPRPLHDPTDEFAIVLYDPSVDGEMIVHDTSMDNKEEESKKMIKSTQEKDNINKEKNSQEERPTQRIGRHPALMTNGVRNKPLRELLGDSENSAENKKKFASVPVVIDPKLAKILRPHQVEGVRFLYRCVTGLVMKDYLEAEAFNTSSEDPLKSDEKALTESQKTEQNNRGAYGCIMADEMGLGKTLQCIALMWTLLRQGPQGKRLIDKCIIVCPSSLVNNWANELIKWLGPNTLTPLAVDGKKSSMGGGNTTVSQAIHAWAQAQGRNIVKPVLIISYETLRRNVDQLKNCNVGLMLADEGHRLKNGDSLTFTALDSISCPRRVILSGTPIQNDLSEYFALLSFSNPGLLGSRAEFRKNFENPILRGRDADATDKEITKGEAQLQKLSTIVSKFIIRRTNDILAKYLPCKYEHVIFVNLKPLQNELYNKLIKSREVKKVVKGVGGSQPLRAIGILKKLCNHPNLLNFEDEFDDEDDLELPDDYNMPGSKARDVQTKYSAKFSILERFLHKIKTESDDKIVLISNYTQTLDLIEKMCRYKHYSAVRLDGTMSINKRQKLVDRFNDPEGQEFIFLLSSKAGGCGINLIGANRLILMDPDWNPAADQQALARVWRDGQKKDCFIYRFISTGTIEEKIFQRQSMKMSLSSCVVDAKEDVERLFSSDNLRQLFQKNENTICETHETYHCKRCNAQGKQLKRAPAMLYGDATTWNHLNHDALEKTNDHLLKNEHHYNDISFAFQYISH

SEQ ID NO: 8622 - protein, 1131 aa, Saccharomyces cerevisiae
MSGSHSNDEDDVVQVPETSSPTKVASSSPLKPTSPTVPDASVASLRSRFTFKPSDPSEGAHTSKPLPSGSPEVALVNLAREFPDFSQTLVQAVFKSNSFNLQSARERLTRLRQQRQNWTWNKNASPKKSETPPPVKKSLPLANTGRLSSIHGNINNKSSKITVAKQKTSIFDRYSNVINQKQYTFELPTNLNIDSEALSKLPVNYNKKRRLVRADQHPIGKSYESSATQLGSAREKLLANRKYGRHANDNDEEEEESMMTDDDDASGDDYTESTPQINLDEQVLQFINDSDIVDLSDLSDTTMHKAQLIASHRPYSSLNAFVNTNFNDKDTEENASNKRKRRAAASANESERLLDKITQSIRGYNAIESVIKKCSSYGDLVTSQMKKWGVQVEGDNSELDLMNLGEDDDDDNDDGNNDNNNSNNNNTAGADATSKEKEDTKAVVEGFDETSAEPTPAPAPAPVERETKRIRNTTKPKVVEDEDDDVDLEAIDDELPQSEHEDDDYEEEDEDYNDEEEDVEYDDGDDDDDDDDEFVATRKNTHVISTTSRNGRKPIVKFFKGKPRLLSPEISLKDYQQTGINWLNLLYQNKMSCILADDMGLGKTCQVISFFAYLKQINEPGPHLVVVPSSTLENWLREFQKFAPALKIEPYYGSLQEREELRDILERNAGKYDVIVTTYNLAAGNKYDVSFLKNRNFNVVVYDEGHMLKNSTSERFAKLMKIRANFRLLLTGTPLQNNLKELMSLLEFIMPNLFISKKESFDAIFKQRAKTTDDNKNHNPLLAQEAITRAKTMMKPFILRRRKDQVLKHLPPKHTHIQYCELNAIQKKIYDKEIQIVLEHKRMIKDGELPKDAKEKSKLQSSSSKNLIMALRKASLHPLLFRNIYNDKIITKMSDAILDEPAYAENGNKEYIKEDMSYMTDFELHKLCCNFPNTLSKYQLHNDEWMQSGKIDALKKLLKTIIVDKQEKVLIFSLFTQVLDILEMVLSTLDYKFLRLDGSTQVNDRQLLIDKFYEDKDIPIFILSTKAGGFGINLVCANNVIIFDQSFNPHDDRQAADRAHRVGQTKEVNITTLITKDSIEEKIHQLAKNKLALDSYISEDKKSQDVLESKVSDMLEDIIYDENSKPKGTKE

SEQ ID NO: 8623 - protein, 1514 aa, Saccharomyces cerevisiae
MTTSRKSHAKDKKAGGEQDLADLKFRYDLLTNELFHLREFVSLVDYDPTHFNDSESFQKFLRETHLSLEERGEKFTDDVAKKGTNGDLTRRRRNLRTSTVVSSETTNEKKGDIELKLESIAPLVRNKCEELKYKLSDHSNRKSIVPQKRPIQHLKKREAAKSLKFKSERKENPLPLHEHIAEERYDHIAKVEEPSEAFTIKCPSDDSSFENTSEHYSDNFYFTTSSEEEDIKKKRGRKKKKPRIKLVVHPPKQTITNPLHVVKPGYESLHEYIASFKSLEDDLTLEEYNKYIDEQRRLLSRLKKGIENGALKYDKETDSLQPITSKEIKTIITYKPDPISYFYKQQDLQIHTDHLINQGIHMSKLFRSSTKARIARAKKVSQMIEQHFKHVAGAEERKAKEEERHKKSLARFAVQAVKKRWNMAEKAYRILRKDEEEQLKRIEGKQHLSKMLEKSTQLLEAQLNQVNDDGRSSTPSSDSNDVLSESDDDMDDELSTSSDEDEEVDADVGLENSPASTEATPTDESLNLIQLKEKYGHFNGSSTVYDSRNKDEKFPTLDKHESSSSESSVMTGEESSIYSSSENESQNENDRESDDKTPSVGLSALFGKGEESDGDLDLDDSEDFTVNSSSVEGEELEKDQVDNSAATFERAGDFVHTQNENRDDIKDVEEDAETKVQEEQLSVVDVPVPSLLRGNLRTYQKQGLNWLASLYNNHTNGILADEMGLGKTIQTISLLAYLACEKENWGPHLIVVPTSVLLNWEMEFKRFAPGFKVLTYYGSPQQRKEKRKGWNKPDAFHVCIVSYQLVVQDQHSFKRKRWQYMVLDEAHNIKNFRSTRWQALLNFNTQRRLLLTGTPLQNNLAELWSLLYFLMPQTVIDGKKVSGFADLDAFQQWFGRPVDKIIETGQNFGQDKETKKTVAKLHQVLRPYLLRRLKADVEKQMPAKYEHIVYCKLSKRQRFLYDDFMSRAQTKATLASGNFMSIVNCLMQLRKVCNHPNLFEVRPILTSFVLEHCVASDYKDVERTLLKLFKKNNQVNRVDLDFLNLVFTLNDKDLTSYHAEEISKLTCVKNFVEEVNKLRETNKQLQEEFGEASFLNFQDANQYFKYSNKQKLEGTVDMLNFLKMVNKLRCDRRPIFGKNLIDLLTKDRRVKYDKSSIIDNELIKPLQTRVLDNRKIIDTFAVLTPSAVSLDMRKLALGLNDDSSVGENTRLKVMQNCFEVSNPLHQLQTKLTIAFPDKSLLQYDCGKLQKLAILLQQLKDNGHRALIFTQMTKVLDVLEQFLNYHGYLYMRLDGATKIEDRQILTERFNTDSRITVFILSSRSGGLGINLTGADTVIFYDSDWNPAMDKQCQDRCHRIGQTRDVHIYRFVSEHTIESNILKKANQKRQLDNVVIQEGDFTTDYFSKLSVRDLLGSELPENASGGDKPLIADADVAAKDPRQLERLLAQAEDEDDVKAANLAMREVEIDNDDFDESTEKKAANEEEENHAELDEYEGTAHVDEYMIRFIANGYYY

SEQ ID NO: 8624 - protein, 1489 aa, Saccharomyces cerevisiae
MSLAVLLNKEDKDISDFSKTTAGKSAKKNSRERVADVAPTRVLDKKQAYLSQLNSEFNRIKRRDSIEQLYQDWKFINLQEFELISEWNQQSKDWQFDNTNDSQDLHFKKLYRDMSMINKEWAEYQSFKNANLSDIINEKDADEDEEDDEDELEDGEEDMEEDEASTGRHTNGKSMRGNGIQKSRKKDAAAAAAIGKAIKDDQTHADTVVTVNGDENEDGNNGEDEDNDNDNENNNDNDNDNENENDNDSDNDDEEENGEEDEEEEEIEDLDEEDFAAFEEQDDNDDEDFNPDVEKRRKRSSSSSSSTKLSMNSLSLITSKKINKNITINSDRPKIVRELIKMCNKNKHQKIKKRRFTNCIVTDYNPIDSKLNIKITLKQYHVKRLKKLINDAKREREREEALKNNVGLDGNDLDNDEDGSESHKRRKLNNNTANGADDANKRKFNTRHGLPTYGMKMNAKEARAIQRHYDNTYTTIWKDMARKDSTKMSRLVQQIQSIRSTNFRKTSSLCAREAKKWQSKNFKQIKDFQTRARRGIREMSNFWKKNEREERDLKKKIEKEAMEQAKKEEEEKESKRQAKKLNFLLTQTELYSHFIGRKIKTNELEGNNVSSNDSESQKNIDISALAPNKNDFHAIDFDNENDEQLRLRAAENASNALAETRAKAKQFDDHANAHEEEEEEDELNFQNPTSLGEITIEQPKILACTLKEYQLKGLNWLANLYDQGINGILADEMGLGKTVQSISVLAHLAENHNIWGPFLVVTPASTLHNWVNEISKFLPQFKILPYWGNANDRKVLRKFWDRKNLRYNKNAPFHVMVTSYQMVVTDANYLQKMKWQYMILDEAQAIKSSQSSRWKNLLSFHCRNRLLLTGTPIQNSMQELWALLHFIMPSLFDSHDEFNEWFSKDIESHAEANTKLNQQQLRRLHMILKPFMLRRVKKNVQSELGDKIEIDVLCDLTQRQAKLYQVLKSQISTNYDAIENAATNDSTSNSASNSGSDQNLINAVMQFRKVCNHPDLFERADVDSPFSFTTFGKTTSMLTASVANNNSSVISNSNMNLSSMSSNNISNGKFTDLIYSSRNPIKYSLPRLIYEDLILPNYNNDVDIANKLKNVKFNIFNPSTNYELCLFLSKLTGEPSLNEFFRVSTTPLLKRVIERTNGPKNTDSLSFKTITQELLEVTRNAPSEGVMASLLNVEKHAYEREYLNCIQRGYHPNVSAPPVTIEVLGSSHVTNSINNELFDPLISQALSDIPAITQYNMHVKKGIPVEDFPKTGLFPEPLNKNFSSNISMPSMDRFITESAKLRKLDELLVKLKSEGHRVLIYFQMTKMMDLMEEYLTYRQYNHIRLDGSSKLEDRRDLVHDWQTNPEIFVFLLSTRAGGLGINLTAADTVIFYDSDWNPTIDSQAMDRAHRLGQTRQVTVYRLLVRGTIEERMRDRAKQKEQVQQVVMEGKTQEKNIKTIEVGENDSEVTREGSKSISQDGIKEAASALA

SEQ ID NO: 8625 - protein, 958 aa, Saccharomyces cerevisiae
MAVISVKPRRREKILQEVKNSSVYQTVFDSGTTQMQIPKYENKPFKPPRRVGSNKYTQLKPTATAVTTAPISKAKVTVNLKRSISAGPTLNLAKKPNNLSSNENTRYFTIMYRKPTTKKHKTWSGDGYATLKASSDKLCFYNEAGKFLGSSMLPSDSDSLFETLFKAGSNEVQLDYELKENAEIRSAKEALSQNMGNPSPPTTSTTETVPSTKNDGGKYQMPLSQLFSLNTVKRFKSVTKQTNEHMTTVPKTSQNSKAKKYYPVFDVNKIDNPIVMNKNAAAEVDVIVDPLLGKFLRPHQREGVKFMYDCLMGLARPTIENPDIDCTTKSLVLENDSDISGCLLADDMGLGKTLMSITLIWTLIRQTPFASKVSCSQSGIPLTGLCKKILVVCPVTLIGNWKREFGKWLNLSRIGVLTLSSRNSPDMDKMAVRNFLKVQRTYQVLIIGYEKLLSVSEELEKNKHLIDMLVCDEGHRLKNGASKILNTLKSLDIRRKLLLTGTPIQNDLNEFFTIIDFINPGILGSFASFKRRFIIPITRARDTANRYNEELLEKGEERSKEMIEITKRFILRRTNAILEKYLPPKTDIILFCKPYSQQILAFKDILQGARLDFGQLTFSSSLGLITLLKKVCNSPGLVGSDPYYKSHIKDTQSQDSYSRSLNSGKLKVLMTLLEGIRKGTKEKVVVVSNYTQTLDIIENLMNMAGMSHCRLDGSIPAKQRDSIVTSFNRNPAIFGFLLSAKSGGVGLNLVGRSRLILFDNDWNPSVDLQAMSRIHRDGQKKPCFIYRLVTTGCIDEKILQRQLMKNSLSQKFLGDSEMRNKESSNDDLFNKEDLKDLFSVHTDTKSNTHDLICSCDGLGEEIEYPETNQQQNTVELRKRSTTTWTSALDLQKKMNEAATNDDAKKSQYIRQCLVHYKHIDPARQDELFDEVITDSFTELKDSITFAFVKPGEICLREQ

SEQ ID NO: 8626 - protein, 778 aa, Saccharomyces cerevisiae
MSRCSNAALMTVVEDAVGARVAARTRNMSNGVNYREKEVNDLTADISDSDSDLDSEDNKHGKGDNDTAPIWLQDDVHSDEDIQLDSEDDSDTEAVQAQVVDKLAKDTKSEQKSLDDELSEMDTKTVSLKLKKLNEFVRQSQVYSSIIADTLLHRSNEVANANTKDNSNSDDEEHSSKKRKTKKKSITDFFKKQKKNEDTTTQNGAPDDAAIKQPRLLKNCILKPYQLEGLNWLITLYENGLNGILADEMGLGKTVQSIALLAFIYEMDTKGPFLVTAPLSTLDNWMNEFAKFAPDLPVLKYYGTNGYKERSAKLKNFFKQHGGTGIVITSYEIILRDTDLIMSQNWKFLIVDEGHRLKNINCRLIKELKKINTSNRLLLTGTPLQNNLAELWSLLNFIMPDIFADFEIFNKWFDFDSLNLGSGSNSEALNKLINDELQKNLISNLHTILKPFLLRRLKKVVLANILPPKREYIINCPMTSAQEKFYKAGLNGKLKKTMFKELIKDFFTLNDEYIGHVSNRSIRDFINYKLSGNETSNTDNKINPTLLQMDKLYKKNLQMEISNKKLQNMMMQLRQIIDSTFLFYFPYLHPEDLTLETLLKTSGKLQILQKLIPPLISEGHKVLIYSQFVNMLDLIEDWCDLNSFATFRIDGSVNNETRKDQLEKFNSSKDKHNIFLLSTRAAGLGINLVGADTVVLFDSDWNPQVDLQAMDRCHRIGQESPVIVYRLCCDNTIEHVILTRAANKRNLERMVIQMGKFNNLKKLALNEGFFFEGKQSGC

SEQ ID NO: 8627 - protein, 790 aa, Saccharomyces cerevisiae
MQEGGFIRRRRTRSTKKSVNYNELSDDDTAVKNSKTLQLKGNSENVNDSQDEEYRDDATLVKSPDDDDKDFIIDLTGSDKERTATDENTHAIKNDNDEIIEIKEERDVSDDDEPLTKKRKTTARKKKKKTSTKKKSPKVTPYERNTLRLYEHHPELRNVFTDLKNAPPYVPQRSKQPDGMTIKLLPFQLEGLHWLISQEESIYAGGVLADEMGMGKTIQTIALLMNDLTKSPSLVVAPTVALMQWKNEIEQHTKGQLKIYIYHGASRTTDIKDLQGYDVVLTTYAVLESVFRKQNYGFRRKNGLFKQPSVLHNIDFYRVILDEAHNIKDRQSNTARAVNNLKTQKRWCLSGTPLQNRIGEMYSLIRFLNINPFTKYFCTKCDCASKDWKFTDRMHCDHCSHVIMQHTNFFNHFMLKNIQKFGVEGPGLESFNNIQTLLKNIMLRRTKVERADDLGLPPRIVTVRRDFFNEEEKDLYRSLYTDSKRKYNSFVEEGVVLNNYANIFTLITRMRQLADHPDLVLKRLNNFPGDDIGVVICQLCNDEAEEPIESKCHHKFCRLCIKEYVESFMENNNKLTCPVCHIGLSIDLSQPALEVDLDSFKKQSIVSRLNMSGKWQSSTKIEALVEELYKLRSNKRTIKSIVFSQFTSMLDLVEWRLKRAGFQTVKLQGSMSPTQRDETIKYFMNNIQCEVFLVSLKAGGVALNLCEASQVFILDPWWNPSVEWQSGDRVHRIGQYRPVKITRFCIEDSIEARIIELQEKKANMIHATINQDEAAISRLTPADLQFLFNN

SEQ ID NO: 8628 - protein, 674 aa, Saccharomyces cerevisiae
MVTSYQMVVTDANYLQKMKWQYMILDEAQAIKSSQSSRWKNLLSFHCRNRLLLTGTPIQNSMQELWALLHFIMPSLFDSHDEFNEWFSKDIESHAEANTKLNQQQLRRLHMILKPFMLRRVKKNVQSELGDKIEIDVLCDLTQRQAKLYQVLKSQISTNYDAIENAATNDSTSNSASNSGSDQNLINAVMQFRKVCNHPDLFERADVDSPFSFTTFGKTTSMLTASVANNNSSVISNSNMNLSSMSSNNISNGKFTDLIYSSRNPIKYSLPRLIYEDLILPNYNNDVDIANKLKNVKFNIFNPSTNYELCLFLSKLTGEPSLNEFFRVSTTPLLKRVIERTNGPKNTDSLSFKTITQELLEVTRNAPSEGVMASLLNVEKHAYEREYLNCIQRGYHPNVSAPPVTIEVLGSSHVTNSINNELFDPLISQALSDIPAITQYNMHVKKGIPVEDFPKTGLFPEPLNKNFSSNISMPSMDRFITESAKLRKLDELLVKLKSEGHRVLIYFQMTKMMDLMEEYLTYRQYNHIRLDGSSKLEDRRDLVHDWQTNPEIFVFLLSTRAGGLGINLTAADTVIFYDSDWNPTIDSQAMDRAHRLGQTRQVTVYRLLVRGTIEERMRDRAKQKEQVQQVVMEGKTQEKNIKTIEVGENDSEVTREGSKSISQDGIKEAASALA

SEQ ID NO: 8629 - protein, 1619 aa, Saccharomyces cerevisiae
MAAVPTIDLTLADSDNEDIFHSFSSSTSVDKIDIRKENGKLRMAGLEVAQSNDDAARQAFHVFKTNISNNETFDTILSKSKTITDSTFNNEKSSNEVKQQQVLKEETMGSSNDEKKTQESSPSAEMIKLFYENDDVPLSDSFKQKEEGKRINQDEQVKENICGISSSYVSKDYDGVEDDFEPNTCQDSNLDFQEEKLNLNNKPSQQQFSDPETKDNSLKSENKDQIKGVTTTSYRDLPIESSAFQDSETQNNSKNTIPNIVNEKRTPALPSNLSSVESSLKNETAKVEGKTTVRLPGLQNNVALLEQEQSELFKHFSEQPVDISDFGRKIKRKHSGDFADNKILKRPILPSKNMDHTTHNSHDSEQKNSSIIILSDEDESGAGINDIESPLKVSEPNTADALRSSVPEVISLLDLPNIDLNNSVIKEASGSNSIPTSETDAQSSSSSVLQGTIMTEQATQSSQHECNSSLDTLKKNHQKLLKDLNSRESELRNALSCCKTNSEILRRKLSRREKEVSDAEKHWQLLLTSMARGGRTISSTQQILVDEAENQLNKLKEKRQLTKSKLDSINLKMYNYNEQWKSFVHSKNINLQKSLAALERSARDSKASATVNKRNECLAEKEKLDQMLKEGTLSFSTYKQLTGEIQQKLNDLKLGDQRTTDINSVLPIVRQPLAKRDLFIKSIDTAKDLLAKNTSRTEMTKRILYRHLDNLVSYKNFFEDGRSLIDINRRHVAHESAQILFTNGVKMPIVFETLQDYGIKFSNPAIVNPDRRAQYFKSIEVARDLISKSTRSEDAKRKITRFLNIIEEFRKDIDTGFPPTPLKREGVGKAVVGLRQQGLKMDRLYENLRRYKIPITSEELLQQSYLFPVNADQRPPSNWNIVENTEDTSSTANDLSMQDEFHISNMHAAEDQEQIRALLENVKQSESIIDGEALTPEDMTVNLLKHQRLGLHWLLQVENSAKKGGLLADDMGLGKTIQAIALMLANRSEESKCKTNLIVAPVSVLRVWKGELETKVKKRAKFTTFIFGGSGNGKVKHWRDLARYDAVLVSYQTLANEFKKHWPKKLDGEQNQLPAVPHIQALNRLKTSNEYYSPFFCNDSTFYRILLDEGQNIKNKNTRASKACCTINGMYRWVLSGTPIQNSMDELYSLIRFLRIPPYHKEQRFKLDIGRFFQRNKQYQYDNEDRKNALRKVRVLLNAIMLRRSKADKIDGKPLLELPPKIVEVDESRLKGEELKFYTALESKNQALAKKLLNNSTRGSYSSVLTLLLRLRQACCHSELVVMGEKKAEGTKVANGKSFEDDWLRLYYKITHMSGEAQAQVITSMNSMTCFWCMEQLEPEAMSVLTGCGHLICDTCIEPFIEESSMLPQAKKTKGGAFAIPCKDCQRLTNEKDIVSHKLYDQVINQGFTEEDLHAEYLSEMEKQKIQQKNVYVPNFESLEPSTKIEQCIQVIQRVFDESATEKIIIFSQFTTFFEILEHFLKNKLNFPYLKYIGSMNAQRRSDVINEFYRDPEKRILLISMKAGNSGLTLTCANHVVIVDPFWNPYVEEQAQDRCYRISQTKKVQVHKLFIKDSVEDRISELQKRKKEMVDSAMDPGKIKEVNSLGRRELGFLFGLNAL

SEQ ID NO: 8630 - protein, 662 aa, Saccharomyces cerevisiae
MNLNQLKTFYKAAQSSESLKSLPETEPSRDVFKLELRNYQKQGLTWMLRREQEFAKAASDGEASETGANMINPLWKRFKWPNDMSWAAQNLQQDHVNVEDGIFFYANLHSGEFSLAKPILKTMIKGGILSDEMGLGKTVAAYSLVLSCPHDSDVVDKKLFDIENTAVSDNLPSTWQDNKKPYASKTTLIVVPMSLLTQWSNEFTKANNSPDMYHEVYYGGNVSSLKTLLTKTKNPPTVVLTTYGIVQNEWTKHSKGRMTDEDVNISSGLFSVNFYRIIIDEGHNIRNRTTVTSKAVMALQGKCKWVLTGTPIINRLDDLYSLVKFLELDPWRQINYWKTFVSTPFESKNYKQAFDVVNAILEPVLLRRTKQMKDKDGKPLVELPPKEVVIKRLPFSKSQDLLYKFLLDKAEVSVKSGIARGDLLKKYSTILVHILRLRQVCCHPSLIGSQDENDEDLSKNNKLVTEQTVELDSLMRVVSERFDNSFSKEELDAMIQSLKVKYPDNKSFQSLECSICTTEPMDLDKALFTECGHSFCEKCLFEYIEFQNSKNLGLKCPNCRNQIDACRLLALAQTNSNSKNLEFKPYSPASKSSKITALLKELQLLQDSSAGEQVVIFSQFSTYLDILEKELTHTFSKDVAKIYKFDGRLSLKERTSVLADFR

SEQ ID NO: 8631 - protein, 1169 aa, Saccharomyces cerevisiae
MSHIEQEERKRFFNDDLDTSETSLNFKSENKESFLFANSHNDDDDDVVVSVSDTTEGEGDRSIVPVRREIEEEGQNQFITELLRIIPEMPKDLVMELNEKFGSQEEGLSLALSHYFDHNSGTSISKIPSSPNQLNTLSDTSNSTLSPSSFHPKRRRIYGFRNQTRLEDKVTWKRFIGALQVTGMATRPTVRPLKYGSQMKLKRSSEEISATKVYDSRGRKKASMASLVRIFDIQYDREIGRVSEDIAQILYPLLSSHEISFEVTLIFCDNKRLSIGDSFILQLDCFLTSLIFEERNDGESLMKRRRTEGGNKREKDNGNFGRTLTETDEELESRSKRLALLKLFDKLRLKPILDEQKALEKHKIELNSDPEIIDLDNDEICSNQVTEVHNNLRDTQHEEETMNLNQLKTFYKAAQSSESLKSLPETEPSRDVFKLELRNYQKQGLTWMLRREQEFAKAASDGEASETGANMINPLWKQFKWPNDMSWAAQNLQQDHVNVEDGIFFYANLHSGEFSLAKPILKTMIKGGILSDEMGLGKTVAAYSLVLSCPHDSDVVDKKLFDIENTAVSDNLPSTWQDNKKPYASKTTLIVVPMSLLTQWSNEFTKANNSPDMYHEVYYGGNVSSLKTLLTKTKTPPTVVLTTYGIVQNEWTKHSKGRMTDEDVNISSGLFSVNFYRIIIDEGHNIRNRTTVTSKAVMALQGKCKWVLTGTPIINRLDDLYSLVKFLELDPWRQINYWKTFVSTPFESKNYKQAFDVVNAILEPVLLRRTKQMKDKDGKPLVELPPKEVVIKRLPFSKSQDLLYKFLLDKAEVSVKSGIARGDLLKKYSTILVHILRLRQVCCHPGLIGSQDENDEDLSKNNKLVTEQTVELDSLMRVVSERFDNSFSKEELDAMIQRLKVKYPDNKSFQSLECSICTTEPMDLDKALFTECGHSFCEKCLFEYIEFQNSKNLGLKCPNCRNQIDACRLLALVQTNSNSKNLEFKPYSPASKSSKITALLKELQLLQDSSAGEQVVIFSQFSTYLDILEKELTHTFSKDVAKIYKFDGRLSLKERTSVLADFAVKDYSRQKILLLSLKAGGVGLNLTCASHAYMMDPWWSPSMEDQAIDRLHRIGQTNSVKVMRFIIQDSIEEKMLRIQEKKRTIGEAMDTDEDERRKRRIEEIQMLFE

SEQ ID NO: 8632 - protein, 392 aa, Saccharomyces cerevisiae
CSHVIMQHTNFFNHFMLKNIQKFGVEGPGLESFNNIQTLLKNIMLRRTKVERADDLGLPPRIVTVRRDFFNEEEKDLYRSLYTDSKRKYNSFVEEGVVLNNYANIFTLITRMRQLADHPDLVLKRLNNFPGDDIGVVICQLCNDEAEEPIESKCHHKFCRLCIKEYVESFMENNNKLTCPVCHIGLSIDLSQPALEVDLDSFKKQSIVSRLNMSGKWQSSTKIEALVEELYKLRSNKRTIKSIVFSQFTSMLDLVEWRLKRAGFQTVKLQGSMSPTQRDETIKYFMNNIQCEVFLVSLKAGGVALNLCEASQVFILDPWWNPSVEWQSGDRVHRIGQYRPVKITRFCIEDSIEARIIELQEKKANMIHATINQDEAAISRLTPADLQFLFNN

SEQ ID NO: 8633 - protein, 753 aa, Desulfitobacterium hafniense
MSGKNLQTLTFPDHQKDFFASEAIPLIEQMGSVAIDPQLAEKFVREELQARIYFDRMGDYGIRARLEFHYGDHIINPFTSQTGANRQEAADAQILIRNIERERKILGIFEQAEFIVSQGVISLEDDEKLFAFITTWLPQLQDCAETFYSDDFKLTIRTSTSFSGRVRLDESSDLLEISFQYSDIDRDELTHIFHSLQVKRNYYRLRDGSFLDLRQPELESMAMFLEHLNLRGEDLNEQTLRLPKFRAMYIDSFLRQANLPGIQRNKAFKQLVQSILEPQDGEYDPPPSLMSVLRDYQKTGFRWLKTLAAYGLGGILADDMGLGKTLQTLAFILSEKLSSPALVVAPTSLIYNWQAEGEKFAPGLHILVVDGSPQERQEQLKGLDQADLVVTSYALLRRDIETFAQVDFSYCFLDEAQNIKNPQTLNAKSVQRIKAKSYFALTGTPIENSLAELWSLFNFCLPGYLLSHQEFQKKYSTPIIKDGDPLALRELSRHIKPFILRRLKKDVLKELPPKIETEIKAALTEEQRKIYLAYLQQTKSQIAQELATHGFAKSQIQILAALTRLRQICSHPGMFIDNYTGESGKMLLFQELLEDSLAGGHRVLVFSQFTSMLDIIGEYLHSENIDYFYLSGSTKALERSRMAASFNNGEGQVFLISLKAGGTGLNLTGADTVIHFDPWWNPAVEDQATDRAHRIGQQNSVQVIKLLTQGTIEEKVNALQAKKKKLIDSVIQPGETMLSKLTEKELRELFELN

SEQ ID NO: 8634 - protein, 858 aa, Aspergillus fumigatus
MDELEQGSPMSGVENGKREQVEDVEEMDVKSKALMHLLNTSEVFVAIMADKMKKQQEEARLEAAKQQQQRQQKLTEDQKKPTATRSVARRETRARAKQPSADETTPAVSEQADEKTATSSRRGRGKKGASAMNGNSIASYFKKVDMEDPEDKPTVQEALEHAADEYEANPSALGGQDLVATQQPELVTGGRMRKYQLEGLEWLKSLWMNGLCGILADEMGLGKTVQAISLIAFFKEKNVSGPFLIAAPLSTVSNWVDEFAKWTPSIKTVLYHGSKDERATIRRNLMKLKDQRSADFPVVCTSYEICMNDRKFLAQYQWRYIIVDEGHRLKNMNCKLIKELLSYNSANRLLITGTPLQNNITELWSLLHFLLPEIFNDLNSFQSWFDFSSMLDSSGQTDVIERRKRTLVSTMHSILKPFLLRRVKSDVETALPKKREYILYAPLTAEQKDLYREILNGTGRQYLEDKAAERLLAKNERLSRSASLKRSAESSNASTPNKSLKSSRDSTPASVASSTRRRRAPQNYKELSDREFNAQLRRLEQGLEDDLDIQQSPTDTEQEEIERANTIKLAKKEIAQKKLQNPVMQARLACNSPHNFYWPWSDDPAAIDETLVTASGKMLLLDRLVPCLLKKGHKILIFSQFKTQLDILQDWATQLRGWNCCRIDGAISQTDRQAQIKAFNSDPGYKIFLLSTRAGGQGINLVAADTVILYDSDWNPQQDLQAQDRAHRIGQTKPVIVYRLATKGTVEQTLLEKADSKRRLERLVIQKGKFRSLLDSSSVNHSDVEELKKALGEDEFERFETGADPTALLSQKDLEILTDRSEEAYARAEKGLEHTGRAFKAVETKKEGNSLMAQITGK

SEQ ID NO: 8635 - protein, 1127 aa, Neurospora crassa
MAPRSRQPVNDDDASMPDAPETSNAPASEMEVDETPDYTDSDTNPNTTESSVAGEPVDGHCSHVSNFGPPPQLPGGLLFAILTRLQEDDSLRRFRYLLGLTDLFRHFIETNPNPKVREIMAEIDRQNAEDAKSKKGAGRQGGATSDRRRRTEAEEDAELLKDEKVGGSAETVFRESPAFIQGTMRDYQIAGLNWLISLHENGISGILADEMGLGKTLQTISFLGYLRHIMDTPGPHLVIVPKSTLDNWKREFAKWTPEVNVLVLQGAKEERQQLIQDRLVDENFDVCITSYEMILREKAHLKKFAWEYIIIDEAHRIKNEESSLAQVIRVFNSRNRLLITGTPLQNNLHELWALLNFLLPDVFGDSEAFDQWFSGQDRDQDTVVQQLHRVLRPFLLRRVKSDVEKSLLPKKEVNVYIGMSEMQVKWYQKILEKDIDAVNGAGGKRESKTRLLNIVMQLRKCCNHPYLFEGAEPGPPYTTDEHLVYNAGKMLVLDKLLKRLQKQGSRVLIFSQMSRLLDILEDYCVFRQYKYCRIDGGTAHEDRIAAIDEYNKPDSDKFVFLLTTRAGGLGINLTSADIVILYDSDWNPQADLQAMDRAHRIGQTKQVVVYRFVTDNAIEEKVLERAAQKLRLDQLVIQQGRAQIAAKAAANKDELLSMIQHGAEKVFQSKGGFGALPENGAELGDDDIDAILAAGENRTKELNAKYEKLGLDDLQKFTSESAYEWNGEDFAARKKDIGINWINPAKRERKEQIYSIDKYYKQALQTGGRTADTKPKAPRAPKQVPVHDYQFYPLRLRELQDRETAYYRKEIGYKVPLPDGDDETVEEREAERALDQQEIDNATPLTEEEQAEKQKLAEQGFGDWNRRDFQQFINGSGRYGRNDYEGIAQEVDSKTPAEIKAYAKVFWQRYTEIADYNKYLKVIEDGEERMRKIEHQRKMLRKKMSQYRVPLQQLKINYTVSTTNKKVYTEEEDRFLLVMLDKYGVDSEGIYEKIRDEIRESPLFRFDWFFLSRTPIEISRRCNTLLTTIVKEFEDEPSNTTKAKVNGVNGKLKREANDEDNDEDSVLGLAPAKKKTKANGVKNKALDNVKSASGSKATSAAPSRASSVASTESKATKGKAAPKGKKK

SEQ ID NO: 8636 - protein, 1893 aa, Neurospora crassa
MASRLDRLVTLIETGSTRLIRDAAVDQLATWQKEHPDELFNLLSRVVPYLRHKDWETRSTAAKAIGKIIENAPQYDPNADEEPDAAMKDEDSNSFIKKEEGPPKLSLSEEEQFSLMTLDVINILKYGRSLLRIGDKSDWGLAALDPQSRLNHQKRTLNGRLGLLGREFKDEEIPVINDAILSPATPLDPAAANGFGRHDSVGSAQTQNGETAGLSARQLNVLKRKRKKEAQKAAQGKSGFGDLSLRRNTTAGSEGFDDTPMVDADSKGGKMNDYFSLDRPADIEEDTKVVSEYKGPIIPIKSEIEADDNLEGVEWPYERLCDFLKVDLFDPQWETRHGAAMGLREVIRVHGAGAGRLMAKSRSENNELNRKWLDDLACRLCCVLMLDRFTDYSSDTSVAPIRETVGQTLGSVLRHCPPATVHAIYELLFRMVMQKDLQLNHHEWAICHGGMIGLRYVVAVRKDLLLQDTAMIDGVILAVMEGLANQDDDVRSVSAATLIPMAKEFVKMRSDALPDLINIVWESLSNLGDDLSASTGKIMDLLATLCSFPEVLETMKHSASHDEERSFTLLVPRLYPFLRHTITSVRLAVLKALMTFAKLGGDTTQGWLGGRILRLIFQNILVERDQETLNASVDLWAALVRTLANNNPAILADEFGPHVDTLMQLTLHPIGVSRNPIPMNASLFQKPSGGTYSMPGLVAGGNRRSSPPEGADRTVKRRRKSTKVDEPPPTSHTHDVDGHMMQGDVDLVGMDVLIRSRVSAAKAMGLVMALVPPSTVEAYDASIIPALSSAYSSTQLTASIVIDEYAKNSASSQASTRFVQPLLAIIEQERPSHYRDLVTYVQRVRSQSQQLLNLCRDHGKVSQSKLPTLAVVVQGEPEAGPGAFSIANAEKVVNEDFERLKKIMAPGQRLIAVKDLNDARDLVVTAIEEAKAAKEARDTRIRAAAACALVSMEVLPKKPSPLIKAIMDSVKGEENNLLQGRSATSVARLVQLFTESGRRGPGDKIVANLVKYTCVETAETPEFPQHAHKTNVILSMSKEEDRAEHEDPIKYALEAKKAHITRRGAKQALEVLSQTYGPELLSRVPSLRTFMEEPLVRAFSGELPAEARDPSSTFGQEIVDALSIIRTMTPTLHTALHSFVMQQVPFVIKALQSQLSVFRYMAAKCMATICSVITVDGMTALVEKVLPSINNPVDLNFRQGAIEVIYHLIAVMGDAILPYVIFLIVPVLGRMSDSDDNIRLIATTSFATLVKLVPLEAGIPDPPGLSEELLRGRDRERTFIQQLLDPKKVEPFQIPVAIKAELRSYQQEGVNWLHFLNKYHLHGILCDDMGLGKTLQTICIVASDHHQRAEEFAKTGAPDVRRLPSLIVCPPTLSGHWQQEIKNYAPFLSVTTYVGPPAERKAMKDTLDKTDIVITSYDVCRNDIDVIKKYSWNYVVLDEGHLIKNPKAKITIAVKQLASNHRLILTGTPIQNNVLELWSLFDFLMPGFLGAEKVFLDRFAKPIANSRYSKASSKEQEAGALAIEALHKQVLPFLLRRLKEEVLNDLPPKILQNYYCDLSDLQRKLFEDFTKREAKKITEEAGRDDKEAKAHIFQALQYMRKLCNSPALVMKPGHKQYDDTQKFLAKRNTSLEDPVHAPKLTALRDLLVDCGIGVEGQESSDPLYTPIKPHRALIFCQMKEMLDMVQNTVLKTMLPSVSHLRLDGSVDPTRRQDIVNKFNSDPSYDVLLLTTSVGGLGLNLTGADTVIFVEHDWNPQKDLQAMDRAHRIGQKKVVNVYRLITRGTLEEKILSLQRFKIDVASTVVNQQNAGLATMDTDQILDLFNLGDAGPNLITEGKNKDNLEGREEDMVDIETGDVRQPGKKAAWLEGLGELWDNSQYEESFDLDGFLKTMQ

SEQ ID NO: 8637 - protein, 1455 aa, Neurospora crassa
MAGVQMPAAVAQHPQMVMAANMSGQQIQEVYARYQQLKKQGVPQNDPEFMKLHNIILAVSRRQQQQQQQQQMQRQQQQQQQQQQQQMAGGAVNGGQPGRAPGPQQTDGVSGAQIPKTPAAKPVGMPTGQPQGGVPYTKAQIQLLKDQIKAFQALSRNQGVPAALQKQLYEFRARRNSAQVAQAVSNASAAQTNSSTPTQDTPKTGSSNGQEEADSTPKARELKTVKLPLEAGLVKNSINYLEHGRRKNRLIIPGIFPTGVDFEQLRADREKIVFNRMSARYAELKSLPGNLAHWDTSKDEVVADDTAKRKAIIEMKKLALTMYRRMKKQSVREARVTEKLEKQQRDARENRERKKHVEFLQAVQNHKVEIQNVASIQRNKLQKMGRLMYAHHFNIEKEEQKRVERTAKQRLQALKANDEEAYLKLLDQAKDTRITHLLRQTDGFLHQLASSVRAQQREAAERYGDDLQNIPEEESDVDEDEESSRKIDYYAVAHRIKEEVTEQASILVGGTLKEYQLKGLQWMLSLYNNNLNGILADEMGLGKTIQTISLVTYLIEKKQQNGPYLVIVPLSTLTNWNLEFDKWAPSVAKIVYKGPPNTRKLQQEKIRRGEFQVLLTTYEYIIKDRPLLSKIKWFHMIIDEGHRMKNANSKLSATIQQFYSTRFRLILTGTPLQNNLAELWSMLNFVLPNIFKSAKTFDEWFNTPFANTGGQDKMELTEEEQILVIRRLHKVLRPFLLRRLKKDVEKDLPDKTEKVIKCKFSALQQRLYKQMVTHQKILVSDGKGGKTGARGLSNMIMQLRKLCNHPFVFDEVENQMNPTNTSNDLLWRTAGKFELLDRVLPKYKATGHRVLMFFQMTAIMDIMEDFLRFRGIQYLRLDGTTKAEDRSELLRLFNAPDSPYFMFLLSTRAGGLGLNLQTADTVIIYDSDWNPHQDLQAQDRAHRIGQKNEVRILRLISSASVEEKILERARFKLDMDGKVIQAGRFDNKSSETDRDAMLRTLLETADMAEVGEQEEMDDEELNMILARNEDELVTFQQLDDERARDPLYGTAPGCKGIPRLMAEKELPDIYLQEGNPIEEEEAVSLGRGARERTKVKYDDGLTEEQWLMAVDDDDDSPEAAAARKAARKERREQNRLKKMAILNNASGSVDASPSVSRASTEEVEVAPPTPKKRGRKPGSKNLEKRPREDGDDEPPVTKKRRGPGGRPKAVSNGDSRMSAEMRTKLQQSMRRIFDGLMNLEVEDDEPAEQLDGDKDEDEGPPTRLIIGPFVKLPPKREWPDYYLMITNPICMKDIEKKMKKEDYHSLSDMRKDLELLVRNCRTFNEETSMICIDANRIEAHFKDQFEKELNDHPELRTLEDPSSSTFSVGASSTKDGSVAPSTITNFTETPQPSSAPPVLAPAPTQPTRIKLVSSSTSYNNAASSSSAMTSAVNSMSVSQVMNGTSAADSEAGDED

SEQ ID NO: 8638 - protein, 1150 aa, Neurospora crassa
MDPDTTQLSKTTEALPELTPNVEHTEAMTLDNKNSAADTQSAPNADELDEEAALKKLTENVRDQDDLERDITLQASRALIEAEDKRDQKRIEKAEATRTRLENQKKTQQQKLRPGITNPTARLRIQQEIARIDAEIELCDKDIADFRARIEQRNQQGETGTLAPATGKILPNETQREYLIRTGKITPFAKFGGPRPAEVEGDLANAIVDAEDEAVAEELEEKENDGPRSHQNLRLPGFADENEVATVAVADDFSLRPRKRRRVQPPPESDDEFVLGESGSEAASPEADASDDYDDYEMAGTTLKKRKKAVREADGDDKVDLTGIDDGNEKVYQARLKGWVTRRSNARRARQQRLGQPIDKDDDGTEEWFKPAPDQPDHQFENGLKLPGDIYPALFDYQKTSVQWLAELYAQQVGGIVGDEMGLGKTAPATVLRQWVNEFHRWWPPLRVSILHSSGSGMLNVRNEGALDDREDDYGKRKPKKSSQAAKKIVDRVVKHGHVLVTTYAGLQTYGDILIPVDWGYAVLDEGHKIRNPNTAITIYCKELRTPNRVILSGTPMQNNLTELWSLFDFIYPMRLGTLVAFRNQFEIPIKLGGYANATNLQIMTAQKCAETLKETISPYLLQRLKVDVAADLPKKSEQVLFCKLSKPQREAYELFLKSDDMTAILNRTRQSLYGIDILRKICNHPDLLDPRLKDDPSYKWGSTSKSGKMAVVKSLLPMWKRLGHKTLLFCQGTQMLDIIEAFVRRQDGINYLRMDGKTPVKDRQTLVDQFNNDPDLHLFLLTTKVGGLGTNLTGANRVIIFDPDWNPSTDVQARERAWRLGQKKEVTIYRLMTAGTIEEKIYHRQIFKQFLSNKVLKDPKQQTSFNLNDLHDLFSLSSYEDGKTETAELFKGSEVKRLPSGPTEIVLPGNDTPVLRAPGASKPVEVKDESTSEDETSNLRHLEGVAGLETFNDDGPAPAPNEEDRLMEGIFARSIHSALEHDEIMNGKKPTVKADRRILQAEADRVAAQAALALRRAGEEARNVPIGTVTWTGEYGEAGRPAPRHERGGFSSVGVRGAAGGAGPSRASRPATPSDKRNLKAEDFERMIPAFIKRHGGRVPSKSLVDHFNHYCTGARQADMFKIALEKVAKLEKKGSSMRGIWTVRPEYH

SEQ ID NO: 8639 - protein, 1642 aa, Neurospora crassa
MSTSPESGPVFGHVSPPADDSHFNFTNDTESTSDLSDVNAAEADPNDDADAQSYQPADEAVSPIQKPELTFEEASDSASDNDASDDGDFDAPDSPRSAQSNEVVSASSSRTVVKRKVAHATEDDYIRENPALYGLRRSSRPTQRRAQIIDSDEEDEPSESDATPVSRKPAKRRRVERSLPASKRGTPARQPSIDDSDSDTYGGAKARSFQRKVRRQQEQDPALAFSEKRWSSRRAAQVSAGAYQESDAEEDEEDDSELTPNYWSANVEDNSPYIEKILGHRPKEGVEVTVDSTRHDFEYFIKWQGQSYPHNTWETTETVAGFRGFRRLENYYKKVVEYELEMQFGGDDISPEQKEQWYLDREREQEALEDYTKVERVVAVRDGDEGTEYYIKWKGLQYDECTWEAESLVAELAQDKINQFLDRCNRSWQSDRKQTNPDTRSRMTKLEKQPDYIKGGELREFQMKGLNFLALNWVRGNNVILADEMGLGKTVQSVSFLSWLRNERGQEGPFLVVAPLSVIPAWCDTFNHWAPDLNYVVYLGPEAARSNIRDYELFVDGNPKKTKFNVLVTSYDYILADADHLKNIKWQVLAVDEAHRLKNRESQLYIKLNNFGVPCKVLITGTPIQNNLAELSALLDFLNPGKVVIDEELEALSTADNKGPTDEEQDEARRIRTQEKLRELHQSIAPFILRRTKETVESDLPPKTEKIIRVELSDVQLDYYKNILTRNYAALSDASNGHKQSLLNIMMELKKVSNHPYMFQGAEERVLNGSTRREDQIKGLITSSGKMMLLDQLLAKLRKDGHRVLIFSQMVKMLDILGDYLRVRGYQFQRLDGTIPAGPRRMAINHFNAEGSDDFCFLLSTRAGGLGINLMTADTVIIYDSDWNPQADLQAMARAHRIGQKRPVNVYRLVAKQTIEEEVVKRARNKLFLEYLTIQAGVTDEGKALKEQFKERGLKMDEAKTAEDISMILKMRSQNLFEQSSNQQKLEQLDIDAILENAEVTKTDVDDKINLSSGGIDWDNWMQVTDVKVDDLALDWDQIIPAEQLAAIKAEENRKKEEEYLAKTIEENAPRKAALKGSKKSAENDRAERLAKKRQREREEQEELEEQRALLSDPKRPLNEKETRNLIRAFFRYGSLDDREEEVVQDARLSDRDRDFLKSIIEDLVVISRRAVDANNERLREEEARAGKPLAKKDKKAVLVDFGEVRKVNAETVVERPPQLKLLRRVLREHADILSFRLPEASKAAAYTCDWGAREDAMLLIGIDRYGFGAWTQIRDDPELQMHDKFFLEEHRVDKREERKKTEAVGIQSPGAVHLVRRSEYLLSVLLAKHSNDAAAKKAVENHHRSKKLLTNNGHRRGEASSISGSPAPLGVKKPDHKRKYTDDYEERSSKHRRVEDERRGTDSKLDKKKDKAPKVDPETLEKWKRDRQKAVERFHELAKLNNDEIDSSDNFQLVWSLLRPLKANMERIMYSKERFPAAKERAKILGEEIRAFGNFLKQLEEKNPLDGLEPQFWEFLSSIWPIGEVKVSGRRLQRMFGDLCKKDSENKEDRSQNLKKPSRQDLEDGEIASDRDDRRSRDPYRDDRREDRREERREEPKRRPNYYENGDRLNFYRHRRDIDRGAPIRHSWQSSRSPSQQQRPY

SEQ ID NO: 8640 - protein, 831 aa, Neurospora crassa
MVSTPKAASKDNSTNSLALTQRSKFPTPQSLDKLTKPFKCPGSATRTVAVDRPARKRRKIDYKGAGGEDDEDGADKPYTNADRLALANRDANKFPVFAVKDKSQVFRKAFSVPLINKNTTAYNPNRPPPTLGLRQGAVFVAKPLHDPCDEFAIVLYDPTVDDKPKDTAPEAIEEKKEEPEVKVDAPLVHKSLAEILGIKKKVEGEHPRVPVVIDPRLAKVLRPHQIEGVRFMYRCVTGMIDEKANGCIMADEMGLGKTLQCITLLWTLLKQSPDAGKSTIQKAIVACPSSLVRNWANELVKWLGADAITPFAIDGKASKEELTRQLRQWAIASGRSVTRPVIIVSYETLRLNVDELKGTPIGLMLCDEGHRLKNGDSQTFSALNSLNVSRRVILSGTPIQNDLSEYFALISFANPDLLGTRLEFRKRFEIPILRGRDADASEAERKRGDECLVELLAIVNKFIIRRTNDILSKYLPVKYEHVVFCNLAPFQLDLYNYFVASPDIQALLRGKGSQPLKAINILKKLCNHPDLLDLSADLPGCEQYWPEDYVPKEARGRDRDVKPWYSGKMQVLDRMLARIRADTNDKIVLISNYTQTLDLFERLCRNRQYGCLRLDGTMNVNKRQKLVDKFNDPEGDEFVFLLSSKAGGCGLNLIGANRLVLFDPDWNPAADQQALARVWRDGQKKDCFVYRFIATGTIEEKIFQRQSHKQSLSSCVVDSAEDVERHFSLDSLRELFTYRPGTKSDTHDTFKCKRCKPDGRQYMKAQAMLYGDTSTWNHFVNHWEGEDAAGKSGKGGDPNGGSGGMKSIHDHLLRQEVGERDVSAVFQYISH

SEQ ID NO: 8641 - protein, 1178 aa, Neurospora crassa
MAENAIVLSDDDPTLSFDEDFRPQSSASATTTSLGKRKLSVSFEEKVDWSDDSDDGEKLKARRNAKRRATSGSVRGRGSKGKGRGGKKTAAATNRSRHDEIIELNQPTVRKEEETDYAEAFIPDYLLERRRKFNKDRELLRNAGLKLPPDYHDIYFSDDEKGTRYEQRPKFEESSGIKPCRPYKDVELEYSAGIIPACIAQYLRDYQVEGVKFLHQKFVYQRGCILGDDMGLGKTVQVAAFLTAAFGKTGDERDAKRMRKMRRAGDLWYPRVIIVCPGSLIQNWKNELDRWGWWHVDVFHGSNREDVLQAAKSGRIEVMITTYDTYRNCHEAVNTVEWDCVVADECHILKNTVSETTRAMDKINAMCRIGLTGTAIQNRYEELWTLLNWTNPGYFGTRAEWNESITKPLTAGQSHDATLKQLSIARTTAKKLVQNLLPEFFLRRMKSLIAHQLPKKSDKVVFCPLTDVQRDAYENFLEGEHVTFILNAYQPCKCHSGRAGGFCCYKTLSDGRTWKSYVFPSIITLQKIANHLTLLIPSSSDPKEKQRSELNVLQTCAPDTWKELYNNRESMLSLANPEFCGKWKILRKLLRFWHESGDKVLVFSHSVRLLRILQHLFHNTSYNVSFLDGALSYEERQRVVDEFNTDPRQFVFLISTKAGGVGLNITSANKVVIFDPHWNPSYDLQAQDRAYRIGQIRDVDVFRLVSAGTIEEIVYARQIYKQQQANIGYNASNERRYFKGVQRDKNRKGELFGLENLFTFHADQVVLRDIVNKTNIAEAKAGVNLTDIDMEKAVKDEDEELDFIKKESEDKDDDTGMSSLAKLVTAEEPDKLLEASKSKKPKSDAIAAILASAGVEYTHENSEVIGTSKVEAQLSRRAELAANAADSQLFPGANNALFADSTESSDGGDDDDDDEDQEDLNGPARKKMLRMHYKFNPPEDVKRRQFCSMAREFGFQNATDFALVVESWTQEQRRNCLDTFYRRREVKLLEQEMAKMEAEKETEDDDDENDESTMVKTDDDDDDETVDLEKAVANEEILVLGESKPNAGVEVTRGEIAEKRAVAGAAERGEEGDPLRGTGALGYGVRSLPNARAGASASPVPKAEAGERRTDETATIVSEAGKPVDSGASSVAVKTEGVEEPRTVTVGAGTSFDNTAAAGQKKVTTIFLYDDEDEDDEL

SEQ ID NO: 8642 - protein, 834 aa, Neurospora crassa
MSASMVSTPKAASKDNSTNSLALTQRSKFPTPQSLDKLTKPFKCPGSATRTVAVDRPARKRRKIDYKGAGGEDDEDGADKPYTNADRLALANRDANKFPVFAVKDKSQVFRKAFSVPLINKNTTAYNPNRPPPTLGLRQGAVFVAKPLHDPCDEFAIVLYDPTVDDKPKDTAPEAIEEKKEEPEVKVDAPLVHKSLAEILGIKKKVEGEHPRVPVVIDPRLAKVLRPHQIEGVRFMYRCVTGMIDEKANGCIMADEMGLGKTLQCITLLWTLLKQSPDAGKSTIQKAIVACPSSLVRNWANELVKWLGADAITPFAIDGKASKEELTRQLRQWAIASGRSVTRPVIIVSYETLRLNVDELKGTPIGLMLCDEGHRLKNGDSQTFSALNSLNVSRRVILSGTPIQNDLSEYFALITVANPDLLGTRLEFRKRFEIPILRGRHADASEAERKRGDECLVELLAIVNKFIIRRTNDILSKYLPVKYEHVVFCNLAPFQLDLYNYFVASPDIQALLRGKGSQPLKAINILKKLCNHPDLLDLSADLPGCEQYWPEDYVPKEARGRDRDVKPWYSGKMQVLDRMLARIRADTNDKIVLISNYTQTLDLFERLCRNRQYGCLRLDGTMNVNKRQKLVDKFNDPEGDEFVFLLSSKAGGCGLNLIGANRLVLFDPDWNPAADQQALARVWRDGQKKDCFVYRFIATGTIEEKIFQRQSHKQSLSSCVVDSAEDVERHFSLDSRELFTYRPGTKSDTHDTFKCKRCKPDGRQYMKAQAMLYGDTSTWNHFVNHWEGEDAAGKSGKGGDPNGGSGGMKSIHDHLLRQEVGERDVSAVFQYISH

SEQ ID NO: 8643 - protein, 1486 aa, Neurospora crassa
MTSTTFLEFQGFFGPAPVLLCLGPGISLPPQPAYDDYRFDDELEGLGLRKRKRRYEDDEELYEENSGDDYGGRHSLHDYGFVNGAKRSTRTSARASSERSIAYESGTESRALRPRSAKKYRDYDRDELQNSDDDDGFFVVTSDIVKTRGRKKRKSTAKLKTTMGDGDSDIEFESKRRSSRANKSKKSMKEIFDDDDDDDIFYVQDTKPTAPRIASVREVFKPAPVDFKDAHRPKKTPKQEEKLREENDGVDPIMPVDPKLVNNPLNVLFRCSKCHRGWHYEHLPHPNDTRDPAISDPLNLRNHRLQEYQTTWRCKECIDTEDLKIDKVVAWRPTHIKPSQYVRGQTILNFNEDEIEYLVKWENKSYAHCVWMPGPWIYGVSKGNMRLSFIKRALGEGMEDQASRDEPADALLKWTEKDAIHDSWLTPDIILDVQYAAKSIEDTKKYKAMSLADRMEYDLSRIFHVVKIFVKFEGLGYDDAVWDTPPPADSSMYDAYLEAYREYLNGKHFKSEPWRNQKERIEAFRQMEFNGAIEVKKQPPGLTRGKLMTYQLEGLNWMLYNFRHDRSVILADEMGLGKTVQVVALLSSMIQDNPKIWPFLIVVPNATCANWRREIKKWAPDLRVVAYYGGRVSQTLALQYELFPNGTKDMKAHVVIMSYDSIKDTDTRSRFNSVKWAGLIVDEAQALKNDENSLYKALSVMNIPFKLLLTGTPLQNNKRELFNLLQFIDPKLKAEELDEEFKDITKENLPKLHELIRPYFLRRTKAMVLTFLPPMAQIILPVSMTVLQEKLCKSIMERNPQLIRAIFSANGKLKSQDRGSLSNILMQLRKCLCHPFVYSQSIEDRNLSPEVTKRNLIEASSKLLLLEVMLPKLRERGHRVLIFSQFLDQLTILEDFLAGMDLPYQRLDGSQSSMEKQKRIDAFNAPDSQLFCMLLSTRAGGVGINLATADTVIILDPDWNPHQDIQALSRAHRIGQQKKVLCFQLMTVDSAEEKILQIGRKKMALDHLLIETMDDKEGEAANDVETVLKHGAAALFGEGRKKDRIVYDEAAIDKLLDRSAKEETKQDGDKSAESAFAFARVWAQDEGGLKDDVETEQKALTMSVWDQILQQREEEARLEREKELQALGRGGRRRGTANYRGPKFEFEEGQEGGESDRGDQDGDFMGGDDSDGETSGNENGNSPHGEFLPNGGSSRKSQARNAQQADAQDSSDPRHPQQTRSRQGSQNQLVVQIAPAPGPAAPNPKGRPTKPVRPSSHNQEVHRIADFNTPHGQIPASGGLAMPSHAIGGDLAVHPRPVPSTHRPNGNPNGASKLTSNTPILVPRPGAGVVTGARIRPPSLNGLPNLNPNRQPNNLPSDVTKQPKPGILWSNQGPPVPPGVPHTSCFVCGFVHPPTWMCPEMSQEVPLRLALDNLRLIPHQTPERMEIKRKFLLEMLRVVQQRKEEAMRAKQRQQSGQQTQEGQQSQQGQQGQQRQEGQEPPQVPPS

SEQ ID NO: 8644 - protein, 1011 aa, Neurospora crassa
MAFSSLPEDDSLRSSSVVVDSPVPQRRTKPDLDFIDEDDEDELSIVSQSPYFTQPTQIASQPTVKPREAAIPSSPTVVEVPASSPFRQQSSNIGGRFASAMAPRGTSFKAPAAQPLPAKAGAKRDYIMIDDDEFDKPLYAGDSSDDEGPARGDIQPSAFKKPNPTSAKAAPAVYLKPSKKPKLFNDVGSPITSPSKPYVLQEDWVTLRSSSPESLQSIRPKDSPLKPAPAPPAPARRRLIQGRRRRSPSPASSPAKPIEKPVPKLKQTKIITLVSDDEDDDDYVQKKSVRSPEPQPELSQRDPEEDAFEERVLKYLNTCDPIQLMAIANVKEDVAKHMLSYQPFDSVADAERVTMAAKATKVKRKKSTRAPVGEDIVGSIKEYTKALDGIDHVIAVCESQAAAIKDATSRWKVDQTGQPRTVKNKDGTITPLSIDGTTTLVDLPLSQPKLMSGCTMKPFQLYGLNWLYLLYENQYASILADDMGLGKTCQVISLISAIVEEHDKHSQDDDSNQPWPNIIFVPPSTLANWAAEFKRFAPGLNVTLYQGSQSVRDEIADNILDDPASHHVVLTSYSQVSRQDDISNLRRLKPMVAVFDEGHKMKNPKTKLYKDLLKITATWRLILSGTPVQNNLMEMISLLQFVEPELFRDHFDDLEALFNQKFSLTAVSQGALLHSERVARARTILEPFILQRRKEQVLKDMPPKTAKVVYCEMDDVQAAIYKDYERRFRKTDATGASSVGRDNDNNNVWIQLRKSAIHPQLFRRYFNDSTVEKMANILMKKVDQSELRQPKIEHLINELKALSDFELHLWCRDYKCIRQFDLPDGSWMESAKVQALLKLIKQYQKNGDRALVFTRFAKVIEILGECLASEKIEYLSLQGNTDVSERQELINDFNADATIPVFLLTTGSGGTGINLTAANKVIIFDQSDNPQDDIQAENRAHRLGQTRPVEIVRLISKDTVEELVYKACQKKLELANKVVGWSTVEMSQSEMEAQVRAAIMNGGSIATPPSD

SEQ ID NO: 8645 - protein, 1845 aa, Neurospora crassa
MTTMMTDSGTASDSGAGLVDSTRNDTTTTTTTTTTPGDNDADDDNTNGTTTGHHDNNETDNNSKSYSSTHHVPAIDNTSTTNANDNEDAAGFLDRDQSPLSSISSPLSEPDNFEFDTEPIPSILSPKSTTSDNHARDGETPELDEDGQPPAKRRRVRETTPHNHSRKPKPESPPWKKFEAEGPTTIITEDGRRKSGRVNPVLLGMKPSDKKVTRKAIQTSPVSNKSSASTSRKPAPASSSNSKHAPAKMPPPPPPPKAPARKSATTHETRPSASRSRRRSPSPRRPATPPKPAAVGTRRSTRQALAHSRASYDDGQLSPGASRATPRIKLKVRPPLTVIPLVHPNQANVRPKLGPTFEEYFARAHEIPVEEGGQHIPDEEPKYTDEMALQDAKVILRVEKEVEPGGLLAPDRCSAFEPEAEEEPPRQWAHLDHLTKAMTNFRKLMYREQQLHMQAAKRIAIACEAEWRRRNPQPKTAEEIELEEMEASKAKWRQVIRAFAGTWENVRVEVNRRRLVEWEAEEQRRVKAALNQAVNLSEQKLQQRQAQVDGDEITDEDEDEDDEDLASGMPSVMGDEKESDEHSDQGSDEMSDENDEDEDEDNMSSSEDDDKKSTASDEGLTQEELRAKYANLPTLGTTDETEETTKDVEMADAPAAMDGSVANDDDTSDESVDMDDDLGSSEESDDDEEEEEDDEEEEESDDEPAGLLGLFFGKSELKKLKEEAVTEEPSVEPAGDVEMTDASAALRPELQVNGHAHEAPITNGTHTNEQLASSQTEGADDEVSLLVIPNDEIAAENTQTAAEPGSGVVEKDFLTNDSSLKYPNEIVQSENQTLPAKESVEAGGDLPMVDAPSTDDLQRETAAAPSLEAPPNTRHDSQETVAATDMQSQSQTQSPKTTDTKPTDVDTPHSELAVSVQKPDSRQSSPQPTTPTVKTEIPFLLRGTLREYQHHGLDWLAGLYANNTNGILADEMGLGKTIQTIALLAHLACHHEVWGPHLVIVPTSVMLNWEMEFKKWCPGFKILTYYGNQEERKRKRQGWNNDDVWNVCITSYQMVLQDQQVFRRRRWHYMILDEAHNIKNFKSQRWQTLLGFNTQARLLLTGTPLQNNLTELWSLLYFLAPPENGEGGFVDLTEFHNWFARPESQILESGREQLDDEARAIIAKLHKVLRPYLLRRLKADVEKQMPAKYEHVEFCRLSKRQRELYDGFLSRADTRETLQSGNYMSIINCLMQLRKVCNHPDLFVDRPIMTSFRMSRSVPADYEWKEKFIRNRLLATKPMTTVNLSFLNMIPTEYEDLSKTHTDRIAQLSSHRILLDLREAQKVRANNAYTALDPSSVKSNLVYLESAARWGRFEELQHCVYINALRRQQRPIYGKRLTEFLTLDTHLRPYKPRPRVPAKIMSWFEEDSFLLHNAIPTLQQRAESMEMTITKFACVTPAVVTGPEMNRFLLGERGIQLFEDLDLKLSAPVKYAPYMPPQPPPDPWHEARMRLTIQFPDKRLLQYDCGKLQALDKLLRKLQAGGHRALIFTQMTKVLDILEQFLNIHGHKYLRLDGATKVEQRQILTDRFNHDPRILCFILSTRSGGLGINLTGADTVIFYDQDWNPAMDKQCQDRCHRIGQTRDVHIYRLVSEHTIEANILRKASQKQMLDDVVIQEGEFTTDYFNRLSVRDVLGSNGEVIASNEDDVAANLAMDRVLGGPSTTGAGGYDGTADGGGGASQPPVRNVGRVLEMAEDREDVDAAKAAEKEIMQDEADFGEAGSTRPGTPGDGLADLDGQLLGGEENKEVEDEVIEYNAWGERMHTIDEYMLGFMAKALEGTPLELPRDRKKGRDRNRNRKGKDSRKR

SEQ ID NO: 8646 - protein, 1146 aa, Neurospora crassa
MAENAIVLSDDDPTLSFDEDFRPQSSASATTTSLGKRKLSVSFEEKVDWSDDSDDGEKLKARRNAKRRATSGSVRGRGSKGKGRGGKKTAAATNRSRHDEIIELNQPTVRKEEETDYAEAFIPDYLLERRRKFNKDRELLRNAGLKLPPDYHDIYFSDDEKGTRYEQRPKFEESSGIKPCRPYKDVELEYSAGIIPACIAQYLRDYQVEGVKFLHQKFVYQRGCILGDDMGLGKTVQVAAFLTAAFGKTGDERDAKRMRKMRRAGDLWYPRVIIVCPGSLIQNWKNELDRWGWWHVDVFHGSNREDVLQAAKSGRIENTCVSETTRAMDKINAMCRIGLTGTAIQNRYEELWTLLNWTNPGYFGTRAEWNESITKPLTAGQSHDATLKQLSIARTTAKKLVQNLLPEFFLRRMKSLIAHQLPKKSDKVVFCPLTDVQRDAYENFLEGEHVTFILNAYQPCKCHSGRAGGFCCYKTLSDGRTWKSYVFPSIITLQKIANHLTLLIPSSSDPKEKQRSELNVLQTCAPDTWKELYNNRESMLSLANPEFCGKWKILRKLLRFWHESGDKVLVFSHSVRLLRILQHLFHNTSYNVSFLDGALSYEERQRVVDEFNTDPRQFVFLISTKAGGVGLNITSANKVVIFDPHWNPSYDLQAQDRAYRIGQIRDVDVFRLVSAGTIEEIVYARQIYKQQQANIGYNASNERRYFKGVQRDKNRKGELFGLENLFTFHADQVVLRDIVNKTNIAEAKAGVNLTDIDMEKAVKDEDEELDFIKKESEDKDDDTGMSSLAKLVTAEEPDKLLEASKSKKPKSDAIAAILASAGVEYTHENSEVIGTSKVEAQLSRRAELAANAADSQLFPGANNALFADSTESSDGGDDDDDDEDQEDLNGPARKKMLRMHYKFNPPEDVKRRQFCSMAREFGFQNATDFALVVESWTQEQRRNCLDTFYRRREVKLLEQEMAKMEAEKETEDDDDENDESTMVKTDDDDDDETVDLEKAVANEEILVLGESKPNAGVEVTRGEIAEKRAVAGAAERGEEGDPLRGTGALGYGVRSLPNARAGASASPVPKAEAGERRTDETATIVSEAGKPVDSGASSVAVKTEGVEEPRTVTVGAGTSFDNTAAAGQKKVTTIFLYDDEDEDDEL

SEQ ID NO: 8647 - protein, 1930 aa, Neurospora crassa
MAELNENEPFHWDVERVVKELCTPERTWDAPAPHKLPDPERLAFKLRELDIDGETLLMYPDEYGWPTFWEMLGIKKLAHHLSIGKAIKQFRETSTLYYRQRRDIDLPKGLLSTTPAIKPDPLDPSEPTPPLVDNSIPEPTAAAIDGPVSEPSPAGVGNAATDASPAIVNNTAVEANSVMLNDAASEPTPGVVSAPASETAPVMTGSAAVAPTPMEGVISQHAAPAEQAQDVQMSGIPDRSPESPEKRALGNGLRQDTEEVSRDPERPLKKRRIAPTIVSTVAPAQARSFIPTEGDMFYHPLLDIPSSQTGASQTGASQTGASQTGASFRSATLPTSTFLSDANFDRFLDVDDSKFSYLGSSALRSEDIASLPYNFESDDDGDDKEASEEFTWVRSGAVPPARALQVARVMRKFFRKRSPFVNEDEEVVLDFGEDDDGMSVDSETYREYEQEEQERKAHQSMHGSTQLSEVQAEEAIEDAIQRLEVSWEKIKKPKFERRAWKIWQDARRNRTRLSLITFAKNQLRSLEVRLENMEKELLIQKWFKEDKIEAKVEGFLEESVYDRKYQTWLLNLLENPHEPPKPSTLPRLKPEPKKERETLASDEELLTSDSEEEDQFIEDDLSPVDQMVIDPKETIPSIRPSTPVRPLNPSTEENSTNQIPEEEAEKEEDTTARPSAVDDETGTVNKVEPTTPQRIIHTIPAEPIEILSSPSDVDQLANVPPLTDVDTIGKLGTQFWAKHRDGERLVIAALWSWSPLRQSEIFDTIQDRGDKETWKEHIQPLIDRAATGISRIDVDPDSISLILALLFLTYSDFSEGRLKIRSTTLRCVTCQKLHREYLRFGEFFNFLQNCIRYFRSEPKSPTPMEMTSAESPEATQDIPMDITSESEHMDTDLEELSSQFPLSSAKKGRRPKHDEKAKKLRVDSKALLKQMDERRKLLRAKLAETGSVPSDKSRLIINETKESDDLPLIYVHEEIGGRIKDHQIDGVRFMWDQIVVESNSRQGCLLAHTMGLGKTMQVITLLVAIAEASQSDDPRVVAQIPKDLRVGRPLILCPSGLVENWIDEICKWAPKDILGTITKIDASTVPPSERVLLIKEWARSRGVLVMGYELFRSLVSGNEDNVAELLHSSPSIVICDEAHRFKNKTSKLYAVVQDFHTMSRIATTGSPLTRNVMDYYSMINWVAPNYLSDVGEFNQKYAEPISLGLHADSTDAQKRLARERLQILKAIVAPKVNRKDIQVLVDELPQKREFILTIQMTKVQRDAYQEYLETAQRNKGNDLYRTACVWGLIASLKLLLAHPKIFRSKMEERLSTNPALVKGKQRITNDEDPESDEVDEPLDLSRDTLRNVLAKVSIRGIDDIVHSTKVTVLLQILKECKQIGDKVLVFSQSIPTLNFLQDLFKLKKINYRKLDGKTPVSQRQAAVKEFNAVDSLDVYLISTRAGGVGLNIPGANRVVLFDFGFTPAEEQQAVGRAYRIGQEKKVFVYHLKVGGTYETAIHNLAIFKRQLSERVVDKKKPIPTSTRMREYFITPPENLEQKDLSAVKGLDPAVLDKVLASAECGSIIREIDSTETFEREEVYEFTAEQHRELNKQIELEELRINNPEEYYKRQMPTGSGFALPSLPPNLVPLHLRDKHNPTAPGSAPGIPPSAANNISASTQAGAPIPRVASTVIASQTVASSPSPANGQVAALNPILGTNTHYKVAEAARKPATLKAPEIIPKPRKPEDTTPKLLEALGEVHRKLRDEGYDMSIHPQDLVMQINSECDRQDMAAGTLPRMDKLRSLCKAVTESTRFGEALLAGYLTPNEAVAMGMAQMKAKIAEFQTMTDDCFKQELWARHKASHASKSTADVTVKTETTKMRPPLAESDAIDGIARSSSTSTTTKATPSRTLTEEIERKKKKKKKKEERKKHKRRLQPGGTADMPLVIDDD

SEQ ID NO: 8648 - protein, 1955 aa, Neurospora crassa
MDHFSTVLQRPPHFDEDGTEGRGDRGNGAGPGPAPPPPPPRGGLRDILNPVSSNSAVQSQAAAAAPPPPPAVASSSLHGIAASVPPPSSTNSMRATPHSSSSFNLRSPTREPSEYRHPLSSLATPAPFAASPPTSIANANNTNNNNALGAAGSLSSQPPPPPPTGPRSILNPPTPSQQHQQQHHHPNPFVAASAPSLPPPPSSLQAPPAITPIAGLSAPAPASGSLPLSAGGIGNSITVSSSSQPPARASQLHAPSAYYSPAESFRDRDSSVREKSSTGGSFYDPTAEASNGISGSSPRKDRDRDRDHRGTTRESQRRSVSGHSDTGSSWRNATQTSASNKTRDPYNYSPSSADYYNTRKKENYPVDNTTSSSIAAPSNFTVATRSPVAALSHPASIAAPASVGSLTGSISPRLSLRPPSMASPTIRSAVLANPTNGTTSTALPALGRNDSPPSKMSPGTSTNPSRAAGVMSFSNILSSSEPVPRPRATSPNNPDDDDDVPMKVERADSSEKVVKEKKERKPRQPKQPRISDIRHSESTPKGRRGSTKQESPLPNIRIPAKRMANGAPKQQKTFSAENEEKIRKAMDRIETRELPHEDEFEEELRLWRERREYKRQQMNQRDLRQRRQRRADYTEVEAQKLKLHADFGKRRYDDLNYDDALQEVRERELFAEKERKKDMQRKRRREKSMATTMEAKAAALARASAAQDEAERQKYMREAERANKKVQQTRLILQKGIKGPSRNTGPIEPNLEGGTMATFQAENMEPGKTKGKGRAGARPKKSKEQKQAEKDAAEAAQAALDAGLELPPKEETNKIRIKLTKTKAPKEADVDKDKENKEPQEPKEPKEPKEKVIKEKVVEEPKDPLELKFQSKGFNQIYDQIWRDLARKDVNKVFRLAIDSYSTKSSNLKKTAILASKEAKRWQLRTNKGTKDLQARAKRVMRDMMGFWKRNEREERDLRKAAEKQELENARKEEADREAARQKRKLNFLISQTELYSHFIGKKIKTNEVERSTDHPDEIAAEKDKIPENEMDIEVPTGPIGAKVTNFENLDFDAEDESTLRAAAMANAQNAIAEAQKKAREFNKEESKLDEDGEMNFQNPTMMGDVEIEQPKLLNCQLKEYQLKGLNWLVNLYEQGINGILADEMGLGKTVQSISVMAYLAEKYDIWGPFLVVAPASTLHNWQQEITKFVPQFKVLPYWGTAGDRKVLPQAIKSSQSSRWKCLLGFHCRNRLLLTGTPIQNNMQELWALLHFIMPSLFDSHDEFSEWFSKDIESHAQSNTKLNEDQLKRLHMILKPFMLRRVKKHVQKELGDKIEMDVFCDLTYRQRAMYANLRNQISIMDLIEKATLGDDDSASLMNLVMQFRKVCNHPDLFERADTASPYSFGHFAETASFIREGSQVTVGYSTRSLIQYELPRLLWRDGGRLHKAGEDNQVAGWRNQWLNEKFNIWTPEHIRESLAGTDNFSWLRFADTSYEEAYRASHKDLFARAVEMSTKKNRLAEIKIAYDEPEDLNFTPAHALFHIREREDRRPLAEITEQGILGSLMNVSRSAFSETGLGRLEQAAAPKASAPPIEVVCDSRSAVVERENIMFNAPMRKVLFGPTLAEEKALVVQKVPPSRYPPPALLPAPDKEKQKFTNITVPSMRRFVTDSGKLAKLDELLRELKENGHRVLLYFQMTRMIDLMEEYLTYRNYKYCRLDGSTKLEDRRDTVADFQTRPEIFIFLLSTRAGGLGINLTSADTVIFYDSDWNPTIDSQAMDRAHRLGQTKQVTVYRLITRGTIEERIRKRAMQKEEVQRVVITGGSSAAGGGVDFSGRRAPENRNRDIAMWLADDEQAEMIEKRERELLESGELDKMQKKSRGGNKRKRGGAGGEGKEVSLDEMYHEEMITGEGNFDDGGNNIKGSGTATPNGAAGGEGGDGKGAVGGAAKKRKTGGSKKAKTTKQRLAIADGEIDI

SEQ ID NO: 8649 - protein, 1951 aa, Neurospora crassa
MDHFSTVLQRPPHFDEDGTEGRGDRGNGAGPGPAPPPPPPRGGLRDILNPVSSNSAVQSQAAAAAPPPPPAVASSSLHGIAASVPPPSSTNSMRATPHSSSSFNLRSPTREPSEYRHPLSSLATPAPFAASPPTSIANANNTNNNNALGAAGSLSSQPPPPPPTGPRSILNPPTPSQQHQQQHHHPNPFVAASAPSLPPPPSSLQAPPAITPIAGLSAPAPASGSLPLSAGGIGNSITVSSSSQPPARASQLHAPSAYYSPAESFRDRDSSVREKSSTGGSFYDPTAEASNGISGSSPRKDRDRDRDHRGTTRESQRRSVSGHSDTGSSWRNATQTSASNKTRDPYNYSPSSADYYNTRKKENYPVDNTTSSSIAAPSNFTVATRSPVAALSHPASIAAPASVGSLTGSISPRLSLRPPSMASPTIRSAVLANPTNGTTSTALPALGRNDSPPSKMSPGTSTNPSRAAGVMSFSNILSSSEPVPRPRATSPNNPDDDDDVPMKVERADSSEKVVKEKKERKPRQPKQPRISDIRHSESTPKGRRGSTKQESPLPNIRIPAKRMANGAPKQQKTFSAENEEKIRKAMDRIETRELPHEDEFEEELRLWRERREYKRQQMNQRDLRQRRQRRADYTEVEAQKLKLHADFGKRRYDDLNYDDALQEVRERELFAEKERKKDMQRKRRREKSMATTMEAKAAALARASAAQDEAERQKYMREAERANKKVQQTRLILQKGIKGPSRNTGPIEPNLEGGTMATFQAENMEPGKTKGKGRAGARPKKSKEQKQAEKDAAEAAQAALDAGLELPPKEETNKIRIKLTKTKAPKEADVDKDKENKEPQEPKEPKEPKEKVIKEKVVEEPKDPLELKFQSKGFNQIYDQIWRDLARKDVNKVFRLAIDSYSTKSSNLKKTAILASKEAKRWQLRTNKGTKDLQARAKRVMRDMMGFWKRNEREERDLRKAAEKQELENARKEEADREAARQKRKLNFLISQTELYSHFIGKKIKTNEVERSTDHPDEIAAEKDKIPENEMDIEVPTGPIGAKVTNFENLDFDAEDESTLRAAAMANAQNAIAEAQKKAREFNKEESKLDEDGEMNFQNPTMMGDVEIEQPKLLNCQLKEYQLKGLNWLVNLYEQGINGILADEMGLGKTVQSISVMAYLAEKYDIWGPFLVVAPASTLHNWQQEITKFVPQFKVLPYWGTAGDRKVLPQAIKSSQSSRWKCLLGFHCRNRLLLTGTPIQNNMQELWALLHFIMPSLFDSHDEFSEWFSKDIESHAQSNTKLNEDQLKRLHMILKPFMLRRVKKHVQKELGDKIEMDVFCDLTYRQRAMYANLRNQISIMDLIEKATLGDDDSASLMNLVMQFRKVCNHPDLFERADTASPYSFGHFAETASFIREGSQVTVGYSTRSLIQYELPRLLWRDGGRLHKAGEDNQVAGWRNQWLNEKFNIWTPEHIRESLAGTDNFSWLRFADTSYEEAYRASHKDLFARAVEMSTKKNRLAEIKIAYDEPEDLNFTPAHALFHIREREDRRPLAEITEQGILGSLMNVSRSAFSETGLGRLEQAAAPKASAPPIEVVCDSRSAVVERENIMFNAPMRKVLFGPTLAEEKALVVQKVPPSRYPPPALLPAPDKEKQKFTNITVPSMRRFVTDSGKLAKLDELLRELKENGHRVLLYFQMTRMIDLMEEYLTYRNYKYCRLDGSTKLEDRRDTVADFQTRPEIFIFLLSTRAGGLGINLTSADTVIFYDSDWNPTIDSQAMDRAHRLGQTKQVTVYRLITRGTIEERIRKRAMQKEEVQRVVITGGSSAAGGGVDFSGRRAPENRNRDIAMWLADDEQAEMIEKRERELLESGELDKMQKKSRGGNKRKRGGAGGEGKEVSLDEMYHEGEGNFDDGGNNIKGSGTATPNGAAGGEGGDGKGAVGGAAKKRKTGGSKKAKTTKQRLAIADGEIDI

SEQ ID NO: 8650 - protein, 950 aa, Neurospora crassa
MPKRPYTSGVGAAASDRRDEARRRRLNADSSSSGPSQSQYVPQSTSTNGLSSSSQTSSGRRQLPWQTPPGTQGAQSRHNTQGATSTYSARSSQATPSSQHRPPEHVQAIHDTLNWLSTQPDILESDDEAEVIDLTQADPGPVLEFYGHFDGKIVGVRYYNGVASPGEVVVCKREPQNQYDPNAIRVDNVLGTQIGHIPRTVAAKLAPYMDNGDLVVEGMLTGEKEFYDCPVRLYFYGTSASLQRARLEERLKKDKLVKATQLNQTRKANEEQRKKQTLELRGNGTYGFPSQTQEPEPQVTMEQLAKMSEVISFRSGGDMIKSLAMSEEDLANLPMASQPEKLRAKLLPYQLQGLAWMISKENPTMPAKGSTDSVQLWQHTADGRYHNMATGFYNKSPPQLLSGAICADDMGLGKTIQIISLIMTEGLGTGPTLIVAPVGVMSNWKQQIRRHVHEEHQPKIVIYHGSKRKEFAKALQDQDVVITSYGTLSDDALVKTRWRRVVLDEGHSIRNAKAQVAQNACKLEAKSRWVLTGTPIINSIRDLHSLLKFLRITGGIEQSEIFNTVLTRPLANGEPKGEALLKSLMKDLCIRRKKDMKFVDLKLPEKTEHMSRITFWPDEQKKYDALLSEAQGVLENYRTQSKRSQGQFQGVLERLLRLRQTCNHWVLCKKRITEVLELLADKDVVDLTDENRAILQQALQLYIESQEECPICIDPLSNPIITHCKHVFCRGCIDKVIEVQQKCPMCRAPLSEDKLLEPAPEHSATQDEEELESETKSSKTEAVLALVKGTLDKEGSKIIIFSQWTSFLTIIQHQLDEAGYTYTRIDGSMNAAQRDAAIRALDYDPNTRILLASLGVCSVGLNLVSADTVILADSWWAPAIEDQAVDRVHRLGQTRPTTVWRLVMDNSIEERVLDIQKEKRELVGKAFQEKQDGKKKVKETRMADIMKLLS

SEQ ID NO: 8651 - protein, 1079 aa, Neurospora crassa
MVRTRRSVVAADEVVVAAPIAEIKKPRGRPRKSATPAVSATASSVPTPATYTSGSEYATPLTSHAATPTPSLLKENVRSTRSTQSAPKIEVAIPVLKASHTMQTTLRSSASATTSKRKRNMVADSQEDDSDDGHDAKLARMLQDEEDAKVASSSKTPSFRVDHLGSTPRSTRSSHRGNTNVSSSKTKKEVIADSEDDGFDDSPDATLARKLQAEEYGEEDSEVEAATSNVKALGLRRSSRRLNSSPVRASSNVTGKSTAVAKGNQSAPTRNSTRRGVAESSTQVLGFRTAKDLIADSQDDDDDFDSLSAFESDDNDSDVSAQGGRPSAAQKGKGKAIAPPPESEDENDSDDSVLSLPDEADEMSVLGTGSYVSIDEDPDFLLPPNLQASVHGSDDDEDATLGAHIAEAGEGLDRIRAQMSNRRAYRSYRSNRRVKKDRLRLEKQHPELTTMWKDLENMPVLKAGRAEQPKSISRQLKPFQLEGLAWMTAMEKTEWKGGLLGDEMGLGKTIQAVSLIMSDYPAKKPSLVLVPPVALMQWMTEIESYTDGTLKTLVVHGTNSKSKNLTVKNIKSYDVIIMSYNSLESMYRKQEKGFKRKEGLYKEKSVVHQTEWHRVILDEAHSIKSRTTMTAKACFALKVTYRWCLSGTPLQNRIGEFFSLIRFLNIRPFTCYLCRGCPCKTLEWGMDDDNRCKHCNHSAMQHVSVFNQELLNPIQKFGNRGEGALAFKKLRILTDRIMLRRLKKDHTNAMELPVKEINVERQFFGEVENDFANSIMTSGQRKFDTYVATGVLLNNYANIFGLIMQMRQVADHPDLILKKNGEGGQNVLVCCICDEPAEDAIRSRCKHDFCRVCVKTYVHSATDPNCPSCHIPLSIDLEQPELEQDEAQVKKSSIINRIKMENWTSSSKIELLVHELHKLRSDNASHKSIIFSQFTTMLQLIEWRLRRAGITTVMLDGSMTPAQRQASINHFMTNVDVECFLVSLKAGGVALNLTEASRVFIVDPWWNPAAEWQSADRCHRIGQSRPCTITRLCIEDSVESRMVLLQEKKTNMINSTINADDAAMDSLSPEDLQFLFRGN

SEQ ID NO: 8652 - protein, 1097 aa, Neurospora crassa
MTTPSRATAFSTRASLRQTRTGSPSPNPQPQPTAEAKDLADLEINLTIQLELRAQLQEGPETDESKAILIETNDKICDIVSNMDRIRASRGSPMYAGFRGTADGGRSPAGTATAQQRARQQGNQVRQQQTQRGLNPQQHPPQRPPQRQQQQQHQQQGQQRPLQGLYQQEQENLQQHPQQHESRVDGSEDAQNSFSGFVPRERKRSIGTSLGNDALNDTGRSSKRTASGSGTSDHSTFSDPFNASTFAGNGIDPFDDNFGFDNGFDFGPLIDLTESLAFPSLPGGLVTVDSSRPGTLINGDYYAPNNSGSSRVHIPSLTDVISRTATYDFTSMTDLLGNPLDERLTTLDLDDPLKREDEISKLLSNIRPDEDIPPEERGDTPPDLKYPLYPHQQLALKWMTDMEGGHNRGGILADDMGLGKTISTLALMASRRAPEGEVVTNLIVGPVALIKQWELEIQNKMKEDRRMKVYLYHGGSKKKPWTELQKYDVVLTTYGTLTAQFKKHHHYLEKNTESLNGLDEQAEKRYRLECPMLHPSTKFFRVILDEAQCVKNANTMQSRAVRQVRATYRWCLTGTPMMNSVSELSSLLRFLQIKPFCDEKKFKEAFASLDHKYTGRDVEKSTAMKQLQALLKAIMLRRMKTTVIDGNPILNLPPKSLYTEHVEFSEGELEFYKNLQEKSQVIYGRYVRNNTVGKNYSNILVLLLRLRQACCHPHLTDFEANPKNHLAEATMIELAKTLEPVVIDRLKQIKAFECPICYDAVIDPTILLPCGHDICADCFSSLTDQSAMNGIRNGQDGANVAKCPVCRGPADHTRVTNYTSFQAAHMPEALEKLDNDDADSLVGDGSDTSDGSLGSLSGEKKRKAKSEGKRPTKVKPEEKEDWKPTVFDQLRKEANASRNQDARDRLLQYTWDHWQDSAKVSRVTELVDQFQQFNEKTIIFSQWTSHLDLIECSLKFKLNIKYRRYTGNMSRSQRDNAIQAFVEDPDVKVLLVSLKAGNAGLNLTVASRVIVCDPFWNPFIEDQAVDRAYRIGQQREVHVYKILVQETIEDRIIELQNLKRNIVETALDETEGKQLARLSIDDLNYLFTGRRGGARQQ

SEQ ID NO: 8653 - protein, 882 aa, Neurospora crassa
MRSTSSSSASGRGSGSSRAPSRLPDSVPSSPPPEEPLARQQEDIMMDDSKMSYTKLRAEQRLAEEEEKARVENEKAEERRKKKWKKKVLSKEERDAKAKDLDRLLAQSAAFSSILTNKTKVLGRVGTGLDGKTLGEHELAMAKQPKCVVGGTMRDYQLEGLTWMYEICVQGMSGILADEMGLVAPLSTLSNWIDEFHRWVPSIPVVMYHGTPQERQDIFKTKLMHHLHGGRPTEKFPVVCTSYEMVLKDRANLSKINWEFIIIDEGHRMKNFNSKLFRELKTFTSATRILMTGTPLQNNLKELWSLLNFLLPKIFRDWEAFESWFDFSDLEDEEGTEEFIADKTKQELVKKMHVVLQPLLLRRVKSDVAKYLPKKREYVLYAPMTKEQTDLYNVINDKHIDTRSYLESKVVERLTGATASTASSPRSTSRSSKANSVKMESDSLSESGSFTTKTSALTLQEKESSPLAKNAFALMMGKRTRGRPRKALSVSESPAEETTPVKSTTKGTKRKAAPAVETPAPKSTKSSRQSTPMSTRSRSRRGMRSYKEADSDEELLDDDEFEKKLAKEVVEDDVQDMEVDLDAEEIKRAQTLDLAKKEISNKKLGNPLMQLRLVCNSPHNFYNPWSNSDQPIDESIVTASGKMLLLDRLLPALFERGHKILIFSQFKTQLDILEEYCRELRSWDVCRIDGGVAQDDRRAQIEQFNTDPDVKIFLLSTRAGGQGINLASADTVILFDSDWNPQQDLQAQDRCHRIGQTRPVVVYRLATKGTVEEELLMSADAKRRLEKLVIKKGGFKTMGQKLDLREEGLDRETLRALLLKDGQVYKFSGDKEILSDEDLRVLCDRSDEAYASAAKGEGNADGWKVIETQAEGIRTAGEKKKR

SEQ ID NO: 8654 - protein, 1197 aa, Neurospora crassa
MASRRQLSEPFAYDSLSDEDLDLINSQATDEGISMSSSQQDLSFASSRGSNGTPKGKNNNNNKNTSSPRIFSGDADVVDLTASSPTTPSHPSSDKREQFHGGGMTVHGLGQNHASTPIPKFGQPTQLVSQFTPVNTNNNTKNAASHHGNGSRGGTSSHAIGGSKYNNLFNDRGKNRPEFHKDLYRSSGPLKANAPSKPEIKRNSMGMQLFSSLDVDPAPAPSPLQPGRGTASRGTAAAFGENVFYTDPDKAKEDLKALLEGGLEDEESEDEGAKAKTKGAVSESKKKEESIVSSTGHLPGLAVPLLPHQVEGVRWMINRELGPLKRGRVPKGGLLADDMGLGKTLQSISLIIGNRKPESSSAPGWKAHFKDISKATLVVAPLALIRQWEAELKDRVMPDLNIKVCVHHGPKRSTVPAELAKYDVVITTYQILVSEHDKSHPDPNKGAQAGCFGVHWFRVILDEAHSIKNRNTKAAKACCALRSEYRWCLTGTPMQNNLDELQSLIHFLRIAPYDNLTEWRAQIDTPMKQGKGHIAIQRLHSILRCFMKRRTKEVLTEKGALVAGGKEALAKAEENGEKAPEAAFKVTERKVVTIETEFSPAESAFYKALEERADQSLEKMMKGRTVNYANALVLLLRLRQACNHPRLAQTKLDKDRDALAVDSATAPTAGGKKKKNAYDSQSQTSSVDDLADMMGGMGIQARQCDMCLGEMTKKEIQEGQLRCQGCEDSLSQLMKEQESTQESVESKESKKHKKKKVSVVKEKVKVERKTRGRGRKVVVDSDDEEEGGEWEDEEETPKKDKKSRDNRKRVVDSDDEEDEGTWLVGESQRSALDLGVAGGTDDENAEGTGEDIDSNEEISEDSEDPEEDSFVVKDSDDDDDDDDESVNSDEIVGSGDEDDTFASVSKLSSQVVKQSESEESETAASSSEDSAISDSELEHSSETDSEAEYGTKRSPKGPVQISSKIHELIAILRREAPTHKFIVFSQFTSMLDLVEPFLRHHLPDIKHVRYDGKMSNDAREASLHSLRKDPRTRILLCSLKCGSLGLNLTAATRVIIVEPFWNPFVEEQAIDRVHRLTQTVDVVVYKLTVRGTVEARILELQEKKRLLAQTAVEGSTERGGNKKKKGQGLKLGLQEILDLFKHDGSRAIHGADNGESGYGEENAAAAAAGRTPVRRTAGAAANHTGTRREHEVFGRRW

SEQ ID NO: 8655 - protein, 846 aa, Neurospora crassa
MLPSGRSNPKRRRLESNESGESASVGYAYHYSDGWPHYPMLTAPVVVPALEDRENSFPSPSAALNSPALLSGIPARLDRNLPWGNVTPSSYLRVSLDSSFRFSGKAGAQDFSGTIVQGTTKNNTGDWTVFTDALLEESGIELSVICSKDPYHPSSAAHHKAFKQFEKALDCTLSITIYGPLDLFEEIGSFFQEHNVYLQDPLHCDRLVRYCNPHRLSSADLEKCIWTSDLGKPMTQLVELTNTVPTPELLDAITSAQDLPEADQPRAIRTKLARHQKQALTFMQRREEGWAFNGKHPDVWEYVEHRVGDGSFVNRISDSHQKEQPENFQGGIIADPMGLGKTLTMIALTASDLMWVSLARRGNNEFASVGQTLVIVPPPLLGTWEEQLTELITTNDAHQPTIILTTYHTVSAEWRNAGESARSGIFSRRWRRIILDEAHIIRNHNSQMAHAICSLDGDSRWAVTGTPIQNKLSDLATLLKFLRIYPYSDKRCFDADFTNLWKNGQANEALKRLKRLAGCLILRRPSTTIQLPERRDLLCPVEFYPAERELYQDIRTRTIERLDEFLYANNADTVRLPSYVNVLQQIEGMRMVCNLGLYYRSRHDFTAQDPSADTTWNNAMAQRALDLQLEMNPVRCKDCKASLDVAFSLLGDTPEVQGLQQALLSQCMKFVCPECVFRRGGAPPVCDHTPVCPFAPVSISAITAKEAPEPAAIEFEGRDLMSPHEMPSKIKSLILQLKNLACDTKRLTLTVASYAFLMEPHWNPTLEDQALARIHRMGQTREVTTARFFIRDSFEERVMEVQEKKRKLVTVLLAPHGQGEGEEEDVGSLQFKKKIEKGGKGVIKVS

SEQ ID NO: 8656 - protein, 1175 aa, Neurospora crassa
MDFTNEPLSKKRRFLGDQGDSDHVAGGPSSSPQFSAPPSSPPRKKLLQDPNSEVQPRVSKDADHNDDDDDDDDDDDEERPRFFTDDGTLTPHATKICAPWLNDMPKPDPRKGYLLKDVDTPIATPRDVAPPVVESPQLAFDKDTFEAFVGEKVASDILHVISKNCGNNIERAVNMYLDGTWKKLHRAPPVRVNSHSPLVVGGQSPKKSSTSQARSRSHAQAQPQPQSNTPTKVLPSMPDARYVGAFGVEGWATRSGTGLLRHGDSVKIERQKIQPPTVARKGQTKPGTPQSIPRVSAAAAKRVDVIVRFNDASGRELGRLAKDTANWVSTLIDQNICRFEGICVYAPERLRTNETVFLQLKCYMLRSAFLGRTLQLADNRAAGFHEKDETTEEKDLRLRQVALVRLFQEINIVPSRGNAAAAKDARKDLLEAADSAEKKAMDKAKAGDHNTNGLASPPEEAEEGQELEQDQLDALYKKAQSFDFSTPEAEPANTFAMTLRPYQKQSLYWMLAKEKNQRTEDRETSMHPLWEDSQSCITGKTIQMLSLIHSHRSEVAIKAREAGPTSVNNLPRLPTVSGQKTTIDAPCTTLVVAPMSLLAQWQSEAENASKEGTFKTMMYYGAEKNVDLVTMCCEANAANAPDVIITSYGVVLSEFTQLATKNGDRLSSRGLFSLNFFRVILDEAHNIKNRQAKTSRACYEIAAEHRWVLTGTPIVNRLEDLFSLVRFLRVEPWNNFSFWRTFITVPFESKNFVRALDVVQTVLEPLVMRRTKDMKTPDGQFLVPLPPKHIEIVDIELSEPERAVYDYVFNRAKRTLFDNMQAGTVMKAFTSIFAQILRLRQSCCHPVLVRNQEILADEEEANMAADVAAGLADDMDLQTLIERFTATTDDASKTNNNFGAHVLRQIRDEAVNECPICAEEPMIDQAVTGCWHSACKKCLLDYIKHQTDRNEVPRCFQCREHINIRDIFEVIRHDDDLETSSTPGASPEPRISLQRVGANDSSAKIVALISHLRTLRQEHPKMKSLVISQFTSFLSLISSALTRHKISFLRLDGSMSQKARAAVLTEFQSTNKFCVLLLSLKAGGVGLNLTSAKRVYMMDPWWSFAVEAQAIDRVHRMGQEDEVRVYRFIVKQSVEMRMLRVQERKKFIATSLGMMSDEEKKMQRIEDIKELLSSD

SEQ ID NO: 8657 - protein, 1173 aa, Neurospora crassa
MASRRQLSEPFAYDSLSDEDLDLINSQATDEGISMSSSQQDLSFASSRGSNGTPKGKNNNNNKNTSSPRIFSGDADVVDLTASSPTTPSHPSSDKREQFHGGGMTVHGLGQNHASTPIPKFGQPTQLVSQFTPVNTNNNTKNAASHHGNGSRGGTSSHAIGGSKYNNLFNDRGKNRPEFHKDLYRSSGPLKANAPSKPEIKRNSMGMQLFSSLDVDPAPAPSPLQPGRGTASRGTAAAFGENVFYTDPDKAKEDLKALLEGGLEDEESEDEGAKAKTKGAVSESKKKEESIVSSTGHLPGLAVPLLPHQVEGVRWMINRELGPLKRGRVPKGGLLADDMGWKAHFKDISKATLVVAPLALIRQWEAELKDRVMPDLNIKVCVHHGPKRSTVPAELAKYDVVITTYQILVSEHDKSHPDPNKGAQAGCFGVHWFRVILDEAHSIKNRNTKAAKACCALRSEYRWCLTGTPMQNNLDELQSLIHFLRIAPYDNLTEWRAQIDTPMKQGKGHIAIQRLHSILRCFMKRRTKEVLTEKGALVAGGKEALAKAEENGEKAPEAAFKVTERKVVTIETEFSPAESAFYKALEERADQSLEKMMKGRTVNYANALVLLLRLRQACNHPRLAQTKLDKDRDALAVDSATAPTAGGKKKKNAYDSQSQTSSVDDLADMMGGMGIQARQCDMCLGEMTKKEIQEGQLRCQGCEDSLSQLMKEQESTQESVESKESKKHKKKKVSVVKEKVKVERKTRGRGRKVVVDSDDEEEGGEWEDEEETPKKDKKSRDNRKRVVDSDDEEDEGTWLVGESQRSALDLGVAGGTDDENAEGTGEDIDSNEEISEDSEDPEEDSFVVKDSDDDDDDDDESVNSDEIVGSGDEDDTFASVSKLSSQVVKQSESEESETAASSSEDSAISDSELEHSSETDSEAEYGTKRSPKGPVQISSKIHELIAILRREAPTHKFIVFSQFTSMLDLVEPFLRHHLPDIKHVRYDGKMSNDAREASLHSLRKDPRTRILLCSLKCGSLGLNLTAATRVIIVEPFWNPFVEEQAIDRVHRLTQTVDVVVYKLTVRGTVEARILELQEKKRLLAQTAVEGSTERGGNKKKKGQGLKLGLQEILDLFKHDGSRAIHGADNGESGYGEENAAAAAAGRTPVRRTAGAAANHTGTRREHEVFGRRW

SEQ ID NO: 8658 - protein, 1139 aa, Neurospora crassa
MEQLSDSHPEDGGTRAYSAPARPNMSTDTRSTGEIRQQWLLSRGDEIKAEDPEDFIQSVRNRVFFGIRNTAKDTTVKQEDVASLDVNNIMPVHQQKARKNDIVNSAVGVGDDDDDDCMIIDEADVPEHVRMKANSKPFSTQVRVAPDVTGLEGKKVTVKVEEYDNGIDDHDNDNGAVSGDNLFVSQHSDRDGETDEFMMDEYAQLSDGSIASERRRRHGRRPIAGGKDGSKRSPKKRPKSGREVQHIDNEYEGDDDDDIEEMEYELQILVAEQNLLERRSAKGKLTPRCEMRLEEVDRKIESIRRRLGASVEPPSVDGDRDRDTPRNSRVLTSDTNKKRKGAYAEPGKARAKKPKPEPKMTAHKKKKQKEKAMQMITSMLGGEDPVIARNHMRILATFDHLPEEAKTVEGMEKHIRDVIEADDMLTPQEKKRIAGDLKQLKEARVAFGKKNYKQDGGTWKITGLKSRLHHYQFAGAGWMVNRERSGDVPGGFQCDDTGLGKTVMTLACIAGNPPWDRDEDPTRGGTLIVVPASAVSQWMEEIGKHTSRMTFDQYHSTRQHRMRQGSMNRMDIVVSSYQEVVKGFPSERSQESLLQKGLSLPEVSERMKEREGELFKVKWFRVILDECHAIKNHNTQTARACLALQGEYKWLLSATPLQNGLSELYPFLRFLKVPNIDSFRHFRKKYELQKPQQARGLPADLSALLSEIVLKRDITTVFLGRALFKIPITHPDLELWVNFSREETLIYRMVEGKFRKELNDKFMQRASMDTTADKFIKSYLTLALRLRQATAHPYLLESLMRDHFTPDDIQKLKDELCKLKTNQRYVQQIGRWCDGLVQQGVLRRQPYAGDDHDKFGEGDYGEEFDIAPQLESMQKAKMDMQSRAEICSPMGDPKNATFLAEADRKHTVNMTPSAKTTRLKDIILEWQKDAPDDKIIVFTHWILLGRILGRVLQQEKIDFLYLFGGMGPTVREDQIKAFQTNPRIKVLVSSLRVGGQSLNLAAANRVVILDAWWNNGMEKQAFGRVFRFGQKKESWFTRILAKNTIDKRIIDLQEDKLKAISKAIQTNDNTKHKLTDEEVGSLFGRTRRRTDGTLVIESDYEDDESDKGDEDQDATSGGEGESGNDSDSDSGSDSDDSDW

SEQ ID NO: 8659 - protein, 1111 aa, Neurospora crassa
MSWNPEALLNPKAASSAASSTSDLTSQSGASPSFQQPSFAHQIQSVPSSPTFQFTSPNDQTLNIDFSGLPYGATLHGHVRNTPTFPIFQNGFGSQVERLHNVTDRISVPQPKRRKTYNENDHLRTNTFGGTSSGLLADQFGQNGTPGASTPVAMMTRQTETVDLTEGDSETAQPRQQLDLTKDEEVCYGMIEGTTINCHRVPAPKPGMVSLLGDGYWPQIKILLRKRVDDTETNRIPAYDCTRVVFGYLDAKTSYCLGNLLTSAMGIRTDCRIPPRRKSGPNEKIGESISAAVPFELMLYGPRKLAIQIGNHLARHHLALLSPPRVEPGIKVFNPHAKENRPAPPVRANSLGGTNSYSLHHSATVRTVEEIRSEVMSVFDSLPKSESLEQMEPDPRITTELLKHQKQALYFMTEREKDLIQDYGDKLTRSTWQRRKDPRGVDFYYNVVTMQNQRERPPPALGGILADMMGLGKTLSILSLITKTMDQAAAWSLEAPVQPPKPPEKKQPNAARYFEVPKPQAMGLTPVRLNGKATLLVCPLSTVTNWEEQIKQHIKPDTLSYHIYHGPNRVKDVKKLAQYDLVITTYGSISSELNARAKNKAGIYPLEEIAWFRIVLDEAHMIREQNTLAFKSICRLQASRRWAVTGTPIQNKLEDLASLLAFLRVKPFDEKIKFLQYIIAPFKNADPEIVPKLRVLIDTITLRRLKDKINLPPRTDEIIRLDFTPEEQRVYDWFAKTAKERVSVLTGQAIGQERIIGGKTMIHILRSILQLRLICAHGKDLLNEEDLKELQGMTADTAIDIDSDDDSGQLVLSESKAYEMLYLMQEGNSDNCARCNTKLGSNEVVDVESERQEDIIGYMVKANCYHVYCNKCVDHIKNEACPTCSGMTRPGCIELHRARAMAEHESRTAKVENGDANQDLTAYSGPHTKTRALVAELLADKQKSEAAPHEPPYKSVVFSGWTSHLDLIELALEDAGITFTRLDGKMTRTARTAAMDKFREDPSVQVILVSIMAGGLGLNLTTASSVYVMEPQFNPAAEAQAVDRVHRLGQKRPVRTVRYIMANSFEEKMLRLQEKKKKLASLSMDGRDKGQVMDRTDAAKQRLMDLRSLFK

SEQ ID NO: 8660 - protein, 405 aa, Neurospora crassa
MSGALHVTIFHGEQKPRGYETLMDTDLVLTTYSTLASDYKRSGLLHRMEWYRVVLDEGTPIQNKLEDLSSLADFLRLPPYLAKNAFRKHVLEPLSGGGRCNSEPLRAYLRSYCLRRTDKCLDVPPSTSKIIYLALSDQEQWTYDAILSRTKWLLDDIVSGKDTGTLKLYNVLFTAILKMRMMCNHGTLNPLWASADYLTPQHGEVDTSCERCSSLENDVDFGDIQFCPNCRRPLQPGSHFVNAGESPDPTGLLGDAIADTIDINSSLQTDLFSTKLKAVRKQVLEAGTGTKHISERTRLIRTFQGDPQAFILIMSVGTGAVGLNLTAASHVHVVEPHWNPSVEAQAIARAVRMGQTKNVLVTRYIMKRTVEDTKKQTLAKLTFDTGDGVNDNLEDFKAVLGVKLD

SEQ ID NO: 8661 - protein, 1541 aa, Neurospora crassa
MPPKKKSQGQSRQPRSDWEANPENVAAFVDHVRSVGLDPAVSTTDAEQDIEVRPAKRPKLSRGVFKPSDAVCIDEHTVALPVRDTAAIPKHFSLNKQNIGDYVDVWVVNAKPDRRDPERGAWYLHLAPSKNSRRANKNKNAHICYALKTRAISSKLALMARVAKTQSFDPGSPGYLWTAVDIAIRQEGASVKIDVTLRLMWNTSTDVYQSKVQQGLKTQVLMAYHPNLLVSAQETIAWTPQHFYEAAHTPTPRISDGHLATAKVPSLETDLYPFQRRAVKWLLHREGVEWSGLPQPDGQPLVQPSKSGASSLLPAFFHQVKQLDGETFYISPLFGIVVKDITKLPSNDMVKGGLGKTVEVIALTLLHKRPPGPTVAYDAFLGRELQTTGATLIITPLPLLDQWLSELNRHAPTLKVVYYPGLKKAAKMKGVDLSSTQLAQQDVVITTYEVLRTEIWSAVDHPERSMRGKKQYERQTSPLVELGWWRVCIDEAQMVENWNSNTAVLARRIPRVHAWAITGTPVKDDIQKDLRGLLNFLRVEPYASDKEAWRALMSDKARFKSLFGSITMRHTKSMVRSEISIPSQKRHVITMPFSAVEEQHYRTVFRELVNNCGLDVEGNPIQEDWDPEDPFTQQGMRTALDQLRQLTLHPEVGNRNRKALGKRSGRPMRTVAEVLDAMLEQSDGAIRSDQRSLLLMQLKRGQILAGMDRVQDALTIWEDVRAKSVEMVAECRKQLEAELAKDPVVPSGAKEDSESDDDEDISSGLKDARRRLRFVLEIQHMAVFLCANGYYSSKTDDKLTVPDSDEFKRLDKLESEGYDLAKAIRKEILQESYGKARKLMDKLEECRQKQDFAVIPAVDIPEESGVECSHIIIALEGIYEALDRQADKLDEWREHVIQLLLKPLVDEDNTDVEATGQEYEESTKLQDEILAYVQVLKAAIADRQAVISGQQNGLVEHEVGVVLKMARDDMEVEAGHKPPESAKRILELFALRESVKPKFKEGDGHTSLRGIISKLRAVMTDLRHQEASGSKRARLELALAERLLKSTQAQHTDQGKAATAMEQEVENFTDILNARLDFYRQLQQVSDSVEEYTGATDEQALQRAIDEEERLKTKVATAESKHRYLLHLKQADASSDEERMCVICQSPFSIGVLTVCGHQFCKECITMWFTTHHNCPVCKRPLHRSNLHNITYKPQELKVHSEGHNTRDSNKQLAPRDQQPTSPSKSKKHTSIYTEFNPSKLAEIQNIDLENGPHYTTKVDTLLRHLLWLRQSDPGAKSIVFSQYQDFLHVLAQAFERYHIGYSSFYRSAVSSVASFREDPSIEVFLLHARAHASGLNLVNASHVFLCEPLLNTALELQAIARVDRIGQKQETTVWLYIVDGTVEQNVYELSVKRRLEHMERRATVVGGTADASSSSSTNTKTREEARDKEKESETLEDISLDAANAQEMQQAHLSKLMGKGSDGVVGEAVDQNDLWTCLFGGVKSGGRTPTTAESGGGVDGNNNEEAERSLVENPVTRGFLAGEAAEGRNRMRRDGDEAPN

SEQ ID NO: 8662 - protein, 800 aa, Podospora anserina
MIPNTPAANKENVGAPRSKFPTPQSLDRLRTPFKCPGSATRTVATDRPARKKRRIDYKGTDGDVDPDADKPYTNADRLALANRDANKFPVFQPKDKTTVFRKAFSVPLLNKDSAAYNPNRPPPTLGLRQGAVFVAKPLHDPSGEFAIVLYDPTVDDKPKDAPKPEEKVEEEKIVEPLEHKSLAEILGIKKKVVGEHPRVPVVIDPKLAKILRPHQIEGVKFMYKCVTGMVDEKAHGCIMADEMGLGKTLQCITLLWTLLKQSPDAGKTTIQKAIVACPASLVRNWANELVKWLGPDATTPFAIDGKASKEELTRQLRQWAIATGRAVTRPIIIVSYETLRLNCEELRNTEIGLILCDEGHRLKNNDNKLFTALNGLNVKRRVILSGTPIQNDLSEYFSLISFANPDLLGTHLEFRKRFEIPILRGRDSMASEAERKRGDECLAELATIVNKFVIRRTNDLLSKYLPIKYEHVVFCNLAPFQLDLYNYFLTSPDIQALLRGKGSQPLKAIGILKNLCNHPDLLKLPDDLPGSEQHYPDDYVPRDSRGRDRDIKPWYSGKMQVLDRMLARIRADTNDKIVLISNYTQTLDLFEKLCRSRAYPCLRLDGKMLVNKRQKLVDKFNDPNGDEFVFLLSSKAGGCGLNLIGANRLVLFDPDWNPAADQQALARVWRDGQKKDCFVYRFIATGTIEEKIFQRQSHKQSLSSCVVDSAEDVERHFSLDSLRELFQYRPDTKSDTHDTFKCKRCKPDGKQFIKAPAMLYGDTSTWNHFVNEGLKGIQDLLLRQEMGEREVSAVFQYISH

SEQ ID NO: 8663 - protein, 1252 aa, Leishmania major
MADDLASLQQRFGVFQDEEEMRMDVAARVVAQSSREALEDEERLKKSWRELEKAEHAVGKLQLELSEAQLAAAQESSGLLGDAQRNKSSGPATPSPRRVSDIRFQLNAAERELKRADAAVQKLQKEVDQRQAARLAEAKRLEQEDEAERAAADVTRVVRANSTTGRPVPLASSSSTIPPRANTSVNGGALAGGSLSASSPTVMTTTRVLYRAPTHLKGITQSDYSGGEVLPSLSRVQVTRADIRSKQRRYQDDSEMQRYVERVTKRQRLEAVAKEQRRLVALGTDGDAPSQSLSSSIEKLAETRVKAEGEQDGHAHQVKQEPGGDDVAGALTPAAAAAAKARAATKEAEGGERTRRLPRAGVKVETEEEEGAHDVIDVDALMEADDDAAVAAVVSRASTQLTGGYTQRSGKATPSTSLSSQQQQQQRERAGSASSTTVSASEEVVWEMEEATLLPGVRMDAAIYNRLLDYQQEGLLWLLTLHSRRTGGILGDEMGLGKTIQVAVMINALHHSGMLRGPVLIAAPMTVLRQWLAELHRWAPYVRSCVMHESSGSDTTRDSLLQSVQGTPAVVITTYAAMRVHCGLLHRTGFQYVILDEGHKISNPEAGATLAAKSFTTPHRLILSGSPIQNSLKELWCLFDFVRPGLLGTMSRFIDEFETPIAQSRNARASPLSLATAVECAKALQAHIAPYMLRRLKRQVNTSLPPKYERVLRVPLADKQLDQYLQVLSSPAVQRLFAQTAMFGSRNGGLDRDGRDSTGSLHVAGLRANMASRRHSSGVRLESFRLMNQLRQICNHADIYAVQQGADEEDRMMLARRGAAAKLSAISATRPGQHRSFRSNNPVDLLGSGKLNALLMMLKEWQSFGHRVLVFSQTRIMLDIIENMCEQQAYSYIRMDGATNSHYRQELMDRFNEDDSIFVALLTTRVGGIGVNLIGADRVVIYDPDWNPITDVQARERAWRIGQKREVCVYRLITSGSVEESILRRQLAKMYVTDKVLKDPELQRFFDVQDGFMESFLLGSEYANRVPVDKRYLLAAHHLNSVSAGNRDRARGRDRHAALGEYGNAVPGVDDDDDTDTDMSEGNMGVAGSKEEQPRKERDFGMLVPLKNEDGIDEVGADPDDTGGAEEDGSPVGIPGMGDRNKKTSKGKEVWRETQMLQKLVDCQDVSVAGHDRVAHHLARKKAEDMMRRVSSSALTTEAMREQQRQYSLLQAIGEKKAKDAADREEKARYYREEIAAAAAAAAAASQKRRHE

SEQ ID NO: 8664 - protein, 925 aa, Leishmania major
MEHDDLLDDLLSWTPSAPRGNVAKSSSCITTAATTSSSSTSPHVVSRQPRAGSLQETCVNTAAATTKAGNVSASHCHRNASDADDEQSAPCTASVSAETSPPPPPTSGPPFSLPPDVDARLYPHQRAGVQWLYSRHCKSRACLLADEMGLGKTVQVAAFLGQLYARQMIKTTILVVPPTLVPIWTAAFAEWGGASLSRVVEVIHNEPRKKRQARWRKLRYGLPCVLVTTYGVLRQDAADVSVTLVDYVVLDEAHLIKDPNTCVFKSALTLAARHKIALTGTPLMNTFDDMWSIFRFLDGSILDMDKSDFNAISATLLRGNERDASAAQREAASSELAKLQAAIRPFMLRREKKDVAAQVLSSSKEDVVVWVRLTDVQRQLYAAFLDSKEVASAREGAADVDLTEGTADEDGVGMQKSCLGGGGSSAAAAVSTNPLLLLTMLSQICSHPWLSLLDEAFAAALARNPYKAPVAEMGDIFSGAKLWVALQLLLHCVSEQRKTLVFSRSRRILRLLSFLLQEWRLTHTQVDGDTPSERRCAEVDRFNNDAGVWVCLLTTQVGGVGLTFNAASAVVLLDPSWNPSADAQAVDRVHRIGQRRDVVVFRLVTCDTVEEKVYRNQIFKRMAALQSMKGDGGSSGGEGRRPPTADAGGELYRYFTRVQLRNMFSMDDGAQRSTAEQLEVLHPGRVRAQLREELRRIDGVYDVSDNACVLTEPVDADAAGRDEAQLTHSPSASPERTWRAGSVSPPPSQASLSQQALTRVRSRSDGAGGDDDAPRRRRVDVEDTLATAHAATVGCGASADPGEALDVAARMTMLATSPVAVLRGTQHLSNSPSPSLLPVSCTTTTTALNQLEGSASASLAAPRPTEVTAGDDAEMVSSPFPLLGDSLEHANDAISAAAAAAAAVARGRASDDCSSADFASCRSSF

SEQ ID NO: 8665 - protein, 1422 aa, Plasmodium falciparum
MFVTISKVVMMLTRKRKTTWGSVHMDENTENYDKESNGFVHRDFNNGINKEDKDYEELDLKKLNVSSNDITKEGNNMNENMMNRKLNSSVEDGNDNNHDKNVHRNIGNDTHVSYDDKRKSYLDNNEENSEQMNDNMKKRKLNEISYDNNEEDEFRNKKDDSMEMNDKEKGSTNMSTINDNNNNHNDDSNNHNDDSNNHNDDSNNHNDDSNNHNDDNNNHNEDNNNHNDDNNNHNDDNNYNSEEKPNYLQEKLEQLLAQTKRYTEKLAGQRLKMNAQMKSSKKGRCLLTEKEEDFMLLKDANEEDEAIILKQPMNINGTMKPYQLEGLNWLYQLYRFKINGILADEMGLGKTLQTISLLCYLRFNKNIKKKSIIICPRSTLDNWYEEIKKWCTPMKAFKYYGNKDQRKELNRNLLHSDFDVLLTTYEIVIKDKSALYDIDWFFLVIDEAHRIKNEKSVLSSSVRFLRSENRLLITGTPLHNNLKELWSLLNFLMPKIFDNSEEFDNLFNISKISTNDNKQSEIITQLHTILKPFMLRRLKVEVEQSLPPKREIYIFVGMSKLQKKLYSDILSKNIDVLNAMTGSKNQMLNILMQLRKCCNHPYLFDGIEEPPYIEGNHLIETSGKMSLLDKLLPRLKKENSRVLLFSQMTRLLDIIDDYCRWKNYPYLRIDGSTPGDERQVRINQFNEPNSKYFIFLLSTRAGGIGINLTTADIVILFDSDYNPQMDIQAMDRAHRIGQKKRVIVYRFVTQNSVEEKIVERAAKKLKLDSLIIQKGKLNLNSAKENNKQELHDILNFGAPEVYKTQDISSISDEDIDIILADAEKRTIEIEKKLKNLENIFDLTNISLDGGLNMYNDLEKEASEESTDEEDSSGSGEETILEGSGNNDIVEENGVKKKKKKKKNINKIRRTIKKFLKNNKKNMTFLDLGERKSKWKVMNTACGRTNKKKMVLHGWRAEARGGHDFQFFNVEKLDELEKIEDKWNNYMINQEKINVLIEAQNEEKDYEKIVTFNEFLDKHAKNIYQIITLINPSLFDEHKDTKEEELLKMGTHSDVNSNDKDYKRSSFMSTDYNMKTTYLNNINSNNNNNNNINDNVGTSINTIDDQQYFKKKILSLFESGKKLQMIKFKDRNIKNCYTQVANFIKKNFPEKINNNDTNNNKSTTLKNKKLKKGKQTKNVNVEKDIASVDIEKIKLQKQELMKQGFAKWNKAEFNKLMSGLIIYGTNEVEYIYEKYFSNSKKSMEDIKAYLTVFFRKYDQIKGGVRLFDKIKRSDLQKKIIEEENDMITEFVEKQLSEGVDSIEKLQLPSNLRYDFMEKREVLNITEEVKTENEENVLSNEELAYYDRENKILLWLLYQQGVVQIKNIHILTPYYWPEAYNFFKYATTPFENVEYRCRLIVDAIAELYAKKENVPLNNKDKRRI

SEQ ID NO: 8666 - protein, 2110 aa, Plasmodium falciparum
MNEIKSESLLQTRPFKLGIEDIQNLGSSYFIENNEKLKKYNNEISSLKKELDILNEKMGKCTTTTKIVEPAKTPEFTFWYYELKEMKGFQDLVMYEVKKKKKHFKVLSHSCLKYLSNREKMKIKKQEEEEKRLKLYSKNISSYMDVFWKKIEKLVWEEKKRELQQTLNKKKEMRFKKFVKEAIKKIKDARHNNAHELFENKYVSMSSNNNSEIVNNNASSVDNGDKELKEDDLTDQEEEDYLLDEQMSSTDESENKEEEINMLDDEANLPIEELLKRMYGFKSGEDYINFMENEDDANEENVIETSHNDEKSGDNSIGEDDNNNDEKGGDNNIDEDDNNNDEKSGDNSIGEDDNNNDHKSGDNNIDEDDNNNDHKSEDNSIGEDDNNNDEKGGDNNIDENDNNSDHKSEDNNIDENDNNSDHQSDQEQFNHETKDDIIKNSSYEHIDNKNYYNKTGEDYKSDKENYSPTRFHNKLKKEKYDEYDTKLKIEKREEENKNYEKDEHEYESDNYDKEKINKKKELILLKNDIENDSDETSEHIKRDSRSSCQKQNCEKKRRIIKDEYNLRRTKIAKSKPSSDNNNSENDNNNDNNNDNNNDNNDDNNDDNNDDNNDDNNDDNNDDNNDDNNNEHKNDSDDNDDILTCNMDEKHLTKIPPIIKATLRDYQHAGLHWLLYLYKNNINGILADEMGLGKTLQCISLLSYLAYYFNIWGPHLVIVPTSILINWEIELKRFCPCFKILSYYGNQNERYKKRVGWFNKDSFHICISSYSTVVKDHLVFKRKRWKYIILDEAHNIKNFNTKRWNIILSLKRDNCLLITGTPLQNSLEELWSLLHFLMPNIFTSHLDFKEWFSDPLNLAIEKSKIHHSKELIDRLHTVIRPYILRRLKKNVEKEMPNKYEHIIKCKLTRRQQILYDEFINNKNVQNTLNTGNYIGLMNILIQLRKVCNHCDLFTNKYIQTPYYYMLSIRYFVPRFFILFEKNYYADFYLILFLHNEFTSLGGRDVTKETSPSSKSFDLAHILTKHNTNELYDNNHISELYDNNHISELYDNNHISELYDNNHISELYDNPMSHKNYKHNSNGYTYPNDPINNMNNNPSGFTKTSEQFGQIVSHERDNNYHMMDHNNMNNLLSKEMVNSLRNDDNSNNNFYKYSLTSNNNDSQTSIHDNKQCDYNKLCADTFNNINSIGNEEKRSLNVLNEQNNNNSKDNNNNIDNNNNIDNNNNIDNNNNIDNNNNIDNNNNNIDNNNNIDNHHNNNQHCNYNDNWPSDYPTNIINHRNAFLSILKLLNQSNPLNNDNNNNNNNNNGNNNIYNMNRYNSRNSRNSSLSNIFSSNTSKMNSFQLDFLYTNSFINQDALCKNSFFVNINIEDVHSYIYNSIYKEYIPKNILSFSDEFLTELNNNYDILSLYIDPYNRYKSYNEYLYKMKEEGTLTNQQSLGDINNKHIYHKSTSNENTHMKNRKTFIYKYNNMFKVINNDTQYQNIFTDDTNNSYYNSLEHNLWIKRNQIDERKKEEEEEQNKYYNVCMNNLYILRNERIPIFGKNFLDLIKKEFTKDKNIVYNYTNNVPIDYYSSVKEVWVEDICEKDNKKRKCKREKRWYKKIKKTNNPPEDSEVYRENSSDVEKYNCDVEKDNCDDEEKDNCDDEDMNSNLSSNVYGCIDISSQNFIHSRYHNPMMNMSYIIEFLFPNMEQFLKRHEKMIHNFTLINNPSVICKSHDIRINNNLLNYSNDKMNPIILQIKNATRVYHDAFLKQSIIFPLNKDISLGSGKLCALEKLLSKCKREGNKCLLFTQFIKMLDILEIFLNHLNYSFIRLDGSTKVEQRQKIVTKFNNDKSIFIFISSTRSGSIGINLTAANVVIFYDTDWNPSIDKQAMDRCHRIGQTKDVHVFRFVCEYTVEENIWKKQLQKRKLDNICINMGNFNNSNTHSKITDTDPTHNKDWFTNVDTIKEVFINKKNNDDDDDMYKDRLLHEQVENKDKMNVRFEKTLEHVEDKDDIRALNETKKETQNEISQNMQVSTNKKNIYIYINILYLNVNFFNKHPLGEFTTRNDFQDSYNLTSYCFNFLNENLTDSLKQQIDEMRMKIEIEMMNTGDENMSLSDLSNKSHNSE

SEQ ID NO: 8667 - protein, 1239 aa, Plasmodium falciparum
MRKYNGNVKRSRDDEYEENENVNGERTSITLVRATLLPILSIGKNEKTTLFHPFKNPLPGFVSDKTLYLKKTLGVKVRRTGWINLMKNSIPRRSDETEEQEKIEEVIKKHEPLILYKDENDKIEVDPILAQYLREHQREGVQFVFECLMNIKDDKISGCILADDMGLGKTLQSITVLYTLLKQGFHKKCAVRRCLILCPASLINNWNDEISKWIPNRCNVTCVNDNAKEKIVSKLEGFKYDIQSTVLICSYECFRINNEFLDKSSIDMIICDEAHRLKNDKTKTYTSIYNLTAKKRLLLSGTPIQNDLGEFYALISLCNPDLFDDINLFRKKFANPILIGRDKDATEKEQEIASERLTELSNITNKFILRRTNNLLSKVLPVKYLINIFIKLNPIQEALYVLFLKDKKILKNDNTNNKVNVLINIKKLEKICNHPLLLNVNDIKEIGQVTLWKLIEDVIFEMQTNMKICNRGNKRDNKNDSKSGCVLKVDKSMSSISNNNMKNGNDMNNTNNNTNNNTNNNTNNNTNNNINSNINNNINNNINSNINNNINSNMNNNTNLRCGSRGNQNDASGYVGNKRKPIELDYNKPVKRIIEECKRDIYRSYYNFSCKFLLLHFLLKNIKQNTNDKVVIVSNYTQTLDYMEILCKENMYKFVRLDGGINIKKRHKVINDFTHSADIFIFLLSSKSGGCGINLISSNRLILLDPDWNPANDKQALARVWREGQKKICYIYRLFCTGTIDEKVYQRQISKDGLSNMIVTTTNLSKDQMSDENVKKLFNYKMNTVSETHDNIECNRCNLNGVSPNIHKVAHVDSINKNKSKGKNDNNNNNNNNNSNSNGNGNNYKSDDDKNYIDGEHFAEQLEDFEEDDVNTWAHHQNIDTVPDNILIKAVKDAEEYKKNDMNSMPLLQKLTHDFVTFTMSCKIEYRDDLIKQKSEQAKMREKGASQTNGKSMKEMKLESQDGKKGKGHKNGKREEDEDEDEFDGDEEDNDEEDEFDDDDDEEEEENDDDNDEEDEFVDEEEDDRDESNESDDDVQEVGVHSGLDKIKNKKMENIIESDRDEPSDACRKKLNELVQYQRERKKREEEFLNKKREPLSDDDKEKVVCLKEEKSNIKGNIKSNTNNNTNNNTNNITNNITNNNINGSASTSTRHDNNIENNNMKKEEEANYGNNSHNKNKNEEKIKNGKDEPSKRITRNMSHRSLVELLSQDEDSKESLTMSEDIEEMSAENVSTDSSYFI

SEQ ID NO: 8668 - protein, 2719 aa, Plasmodium falciparum
MRIRKTWCTLCRENFEEGDECIQCKQCKKKFHRECLQAEGLMDNEQLKDIKNYVCYQCINEDDDIPENEDRCKICREKSANLILLLCDGCPNSYHVSCLGLAAEPESEKWYCPICKPDDHKNLDVRRMRKGFVLDNMNGEHVNSSTCYVCQRPGKLLGCDFCPNSFHPTCLPDLDFDNISDQWECPCCKNEDPLLNQGHKRWTKNEIQEIMKKRQRELGFWRSKIIKYRNRFLLAHRKDLQPFVNPRVFSNLTKTFKNDYFHTKGSSNNKKSNKYDNDKYNSKKDVDMDSKEFNEFISSLEDEAHQNACKFIESVFLSVYYPNGRKIERRPLVDNVQLKPHQEDGVEWLLKSFLTGGAILADEMGLGKTIQTLCFLSYLKCNKIDGPHLIVVPLSTVGNWLREIHRFTPHLTCIKICGSKNERTHAKEDRLAEKGLYDLYVTTYETVKNEEEFFVETIPKWQCIVLDEAHRIKNQSGAIRHSMDRVVGNMRLLLTGTPLQNNSAELFTLINFMFPDIFKNSEIIEQAFMNASQNNKNKSNNNNNNNNKDEKNNNNDDDDDGGGGGGGANTSGNNTSKVNVNIGNIDLKSAIKEEDLKSIRCLLDKIMLRRLKEQAITLPKKIFHDVWLPLGTLSAHWYKRLLDIRSMVEEKVSVKKLLGLVIKMRIICGHPKGIVSRPSQMEKLFAFFEEESEDIKEQVKNDALKLKNISGEEHIESSSKLIFIDKLLCQLHYENCKYVKNYASSYEKHKKEVAAYNYHKIQEQTNAQKKKREHSGKFKKIEALENSPLFMEIYNKGKFDLKPTSQKEDMLKSFMHSVPVDNECPYKKKRCIYDKVKEYVKNNSNIKHKGRARLISDNNKNNKNDDNSDDEDDDEEEDEVNYYNKRKDKKKKVISDDDDDDDDDENSNDDNKSEDNNNDDNNNDDNKDITKNDNNGNFSDNNNNNNNINDDQNDDNIFSLHDSSKINNNIKEFLKSEKMEMSNNTDKINEDSTVGVTDKGDNKLDDFDMLKREEKEKNDAYMKEEGEEYDEEDVITHKNGTQLNIDNNNNNNNNINNVTDLKLQTDEKKVVINIKNEMNDNDENGEKLGEAKMHKVLIFTQFQLVLDELEEYCKYRCWKYMRLDGSTNKLIRELDIREFNLSDSIYFIYLISTRAGGLGINLTAANHVIMYDEDWNPFIDLQAIDRAHRIGQKREVNVWKLMTEWTVEERMAFRREQKLKLDKLVVQTQDDEDMLDNFEEKLSSDEIRKLMLHGKAAIQNMDVESTNNFPLEFFIERGRQKLPIINGVDLEREEKCAIEEEINKKDDGDDILVSKNDEDDDDDDDNSVDAKYNNNNDDDNAIDIDEVMMDEAEELESRNNNTNNNNNNNDGTGGSGEMINGQFSSSNNQNNNNNNNNNNDISLWRSVRERKKPQILYTPEYWGRKQEVKQIKHEYRCFICNNTKNHKAIVKDRNGNDIEIDYGDMINCFRCPKTYHKLCEGIKDENVKKTWTCSWHECCLCFRKSSQCGNLLIHCATCPTSFCYNCFPPDYVRYYVGEEYYHNLRQRGVNFTPQNWVCFLCSKCKAVEEQKKRRKMTKEERENEKQLQKELRSQLHDSKQEELEAKKRKRAQQLERDKFIIENRKRIDALDQQYEDQLRKAYENVFPNNFVKELVNRIEHAKMLKQKGIVEDNNNNNNNNKETNKKKSTTFLHTKLPSKLLVLCENCKLPCHANYKYPGKCCYPPELDKSYYMSNTSFSQMGRDGFEKRVSEGKNDSCSSHIHFKDKVGEDSNNMKNITNIVDGNKIMNSSPHKGGTKCEPNEGSTTPSRNDGIKKDLMVTSTINNNNSNNNNNSNNNNNNNNSYNFNENKENSSSTNKLMSNKGIEYNKNDDEDYNNNESKDKIMKGVGTTFLSDGSMRFEKDSPENNMNENNNMNNNNNNEKDSPQNNNDNTSKSKTRKFLRAVCSKCGTVQLGKLAHFRKHCDKLTEEEKKEYDEKREKLKELINLLNKKKIKEEHTEEEYKNMSVFKFKSLYSNYQDKADDILEDCIRSMKWDILIADKKKIIKKEKEKENKKIYSKNDDDNNNNNNNNNKKNNNITSMSLKAKLTHFLSNQPLTISSDYSDTKDIIEIRSDLTDDMKEKINDELCTISGKRKKCIVKNIKKVKKKKGNDDNDENNNNSNNNVDGDKKNNNKSNTSSKKKDDKDLKKLNLLINPFHEKLIKDTHNANFIRDSFNEDFLNKAKEFLRVTKSNLINNGNNNNNNKNKKSSSNSKNINKNSSNTKNSSNTKSSSNTKSSSNTKNKNNKNNHNNSFLESATTAEDFLRGITTGNNNIFNLVSSSNSPYDKNKKLKDDEFEKSIIQNYLNKMKNSLKNSSHLDKNTIKEKLKELNYVNSRSNSNTKNNMNTNIINNNNNNNNNQHTISAQENSLRFAKEIFKNGAFDKNGNFKLYANKGNLCNTNKDIVHLLKSNEQIENMNKNSGYSINDFNLDIFNIDKNIKCEDLEKKLLNLCASTNLMNKKNIQHDNNKKEDNKNYMLDSKNKNKQFLFKKDNTQQQEAFLSNISKAKKESSNSRKRVVEDVNVDYDIKKITNTSENSGPNKVQEYILYRRNTSSVMSNVINNNDKSKNVRNDDEDDDDDEDDDEEDDEDKNESSNYNNNKKKKTNTSSRNSSNNNSSNKNKNNKSGNDIHQASNLLYQNLLNNPQSLLQHLNLEDVKNFLKAADRSNNDNLPEIN

SEQ ID NO: 8669 - protein, 1235 aa, Plasmodium falciparum
MDVFEFVDPLRKRKINNNILDFNKYVYKDKMEVGEEEIEHDEEKTKDDEIINMKKKKKKKKKKKLRRLLDSSSSDDNNENEEISSKKIKIRKLNSDNEDNKLKNNNNEKKKKEKVEDEKQSNDIEILDSYDEDDENQKAEYEYNLNTLYQCLYISIQIKNRIIDHFTSEKKDKKEELIKEFVKGSFRVSNFQANYEDFEKYVDTFHKLKCYQKCGVLWLYVLYKQNKNGILADEMGLGKTAQTCVFLDYMYKTGTIKNKTIIVAPTSLLKNWDNEINMWCPYLRNHKIIYYGSQSERRYLAYDIFSSKGSKNNKYFPSNNNDDEDDGVNNNNNNNNNDDGHNNIHLIITSINMLMGKNDVSYFRQIKKYDYLIFDEAHFLKNKNSLIYKKLQKKIVFNNKILLTGSPIQNKTQELTNLLLFLMPHIFTETNINNAMQAFIAMYEEEVQTRNKKKKMDEGTTPKLTTFVEEIMKKNETQSNNNNNNNNNNNNSNNNSNNSNNNSNNNNNNSNNNNNSSNNIMMDKCSDMCHKLTDDNNSMNNNYNIYDIKCDEEVTDGNIKDDNEKDNNVIVSDTNKSIIKNYLIQTIRDDLKQHVELKNKEIILLQLIIEPYILRRSKKHVFIDMPKKHSLIIKLPLNNTQLNLYKDEIFSKMQKTFKHLEFLETHSSKKELQKIYAILNKKEIKNEKNNTRVEKKEIQQNVDKENYQNGHCNNNTNNMESADHNVDVDIGHDNVHVHDDDDDDREMDEETINIEKTDEENKNSNIVIHKRDDDSNDMDEDNIKDDNNSNSNSHNNNNMCEDSTSPTKEVTLNKSKKNQENNKNNKEVRGKMINASIFILRRICNHPLLHKYYYTVEDIKKISKYFYYNTDQYVDLDLKTVENEFMKISDFDIHLSIKHLISQGDNKLNKYLITKEHILNSSKINHMLSLIKDIRKKKEKEALLYEFIYDDSDYMDHIQTIKSSQSINKNDTICKEENNINVNVFIKEEQNYHDIGKETKRHDDNNNNNINDGDENKFCFKENIKKPNDIYNEDMENSERTKDTNCEYNKKKKDEDDEEICLTSSTLSTSSVGTQNDAGHQIYVRLDGSTNTIERQKIIKRFSKDENIFVFLLSTKAGGVGLNLIAANHVILMDQDWNPHNDRQAEDRVHRLGQKNEVFIYRLCCKNTIEEAILKCNKAKLHLDQAFGGNNELLQTALIKDALNALPLLYKYYIYIIYIYIYIFIYFIFLKFLIL

SEQ ID NO: 8670 - protein, 1703 aa, Exophiala dermatitidis
  unsure (1)..(1703): unsure at all Xaa locations
MAASRFVTLQPVGQIYSYRTNRFRTGSIDLSRLLDKGSTQLIGNTAVAQLADIQKQNPDNLFALFGRVLPYLQSKSWETRTAAAKAIGGIVSNVPKFDPNADEAEIKDEVPKSEDGELKVEVKTEDKVQEADDLLQLATLDIKMILRHGKKLLGSAGKEYEYSMAGMTPAQRLHHQKQSLTARLGLGGEYMEEDLVTENDFAATSQHKLAQTPGPPRVDTKSAGQRTDSIGAPSPYSAMSPSENGQPFLEESGLSKRQLNQLKRKNKSAAKVGASKMRVVDLSGRRPSEPXQTPVSATPHPVKLNGQDESNGDSKQDYFSIKREXPDDNTALISEFKGDVVEEKPLIQPDEEHSHDWPFEVMCDFLSIDLFDPNWEVRHGAAMGLREVLAENDLANRRWLDDMACRLLCVLMLDRFGDYVSDTVVAPIRESIGQXLGALLTQLPDDTAVSVYNFLQQMINQSDTGLKQPIWEVCHGGMIGLRYFVAVRKDLLLQHNALIDGVVSAVIRGLAHPDDDVKSVSAATLVPVAGELTTIRPQSLGQLIGVVWDCLLDMQDDLSASTGAVMDLLATLCSYDATLEAMRKNAAEDPEQSFEMLVPRLYPFLRHTITSVRLAVLKALVTFLNLSNVNNMEWVGGRVTRLLFQNMXLERNEGVLRMSFEVWEALVAFMERQGMAKFAPNLDPHIMPMLKATIQPVGQSRSPIPMDASLLIKPSGTPMATSAPRQGSASDADQQPNQQPSHNTDGHMLHGEVDLVGMEVILRTRITCSRALGLLLGKQNEAAVASYWTSLLPIINSNHSSSRLFTGMILEELARNQSIKPTDTASCVAQLQSVLDDDGHHWYSDIVSSLQAARGQCQSLISAFQNNAHVSRDKLPAIAVVCQGENGAGPKAFSLADAEKIVTTRFDRLLKSLTPAQRVSGTQYLNDARTNAMTAVEEARKXKEGRDLAIKAAVASVLVRLGEIPKKPGQLIKCIMDSIKGEEFEELQARSASAVAALIDFYTRGAKKGPVDKLVSNLVKFTCVDTSETPEFGPNAKFEDIVLSLRKEEDRKDHPDAAKFEQEAKEARIMRRGAKRALDELAQSYGGELLEKLPVLKSLIENPIGELVEASRFSYFAGGSPCHNIVXNIGQIVPLEAGIXXPPGMPESLLQVRERERKFMAQMLDPKKVEPFQIXVAIKAELRSYQQEGVNWLAFLNKYNLHGVLCDDMGLGKTLQTLCIVASDHHMRAEEYAKTKAPDMRRLPSLIVCPPTLSGHWQQEIKQYAPFLSCVAYVGNPMERNSRLHLLEQADVVITSYDVCRNDNDVLAPITWNYCVLDEATHRFILSGTPIQNNVLELWSLFDFLMPGFLGTEKVFQDRFAKPIAASRNAKSSSKEQEAGALAIEALHKQVLPFLLRRLKEEVLNDLPPKILQNYYCDLSDLQKRLFEDFFKKERKTVENSIGAADKEAKQHIFQALQYMRKLCNSPALVVKEGTKQYETISKQLAASKSSLRDVAHAPKLTALRDLLVDCGIGVSNDSNEMSASNYVSQHRALIFCQMKEMLDMVQNEVLAKLLPSVQFLRLDGSVEATKRQNIVNQFNNDPSYDCADTVIFVEHDWNPQKDIQAMDRAHRIGXKKVVNVYRLITRGTLEEKIMXLQRFKIDVPLLLSIXKMLAWAVWRRIDSRTMASGVCSLSAYCSNALIPSGPDSVSXPCNPITSSMSG

SEQ ID NO: 8671 - protein, 1806 aa, Taeniopygia guttata
MNGHSDEESVGNSSRESSRSDDDSGSASASGSGSSSGSSSDGSSSQSGSSDSDCGSGSGTQSESESDTSREKKQIQSKPPKVDGSEFWKSSPSILAVQRSAVLKKQQQQKAASSDSVSEEDSSSSEDSADDSSSETKKKTHKDEDWQMSGSGSMSGTGSDSESEEDREKSSCEENESDYEPKNKVKSRKPPIRIKPKSGKKSAGPKKRQLDSSEDDDDDEEEEEDDDYDKRGSRRQATVNISYKEAEETKTDSDDLLEVCGEDVPQPEEDEFETIEKFMDSRVGRKGATGAATTIYAVEADGDPNAGFEKSKEPAEVQYLIKWKGWSHIHNTWETEETLKQQNVKGMKKLDNYKKKDQETKRWLKNASPEDVEYYNCQQELTDDLHKQYQIVERIIAHSNQKSAAGYPDYYCKWQGLPYSECSWEDGALIAKKFQARIDEYFSRNQSKTTPFKDCKVLKQRPRFVALKKQPSYIGGHESLGLRDYQLNGLNWLAHSWCKGNSCILADEMGLGKTIQTISFLNYLFHEHQLYGPFLLVVPLSTLTSWQREIQTRAPQMNAVVYLGDITSRNMIRTHEWMHPQTKRLKFNILLTTYEILLKDKSFLGGLNWAFIGVDEAHRLKNDDSLLYKTLIDFKSNHRLLITGTPLQNSLKELWSLLHFIMPEKFSSWEDFEEEHGKGREYGYASLHKELEPFLLRRVKKDVEKSLPAKVEQILRMEMSALQKQYYKWILTGNYKALSKGSKGSTSGFLNIMMELKKCCNHCYLIKPPDDNEFYNKQEALQHLIRSSGKLILLDKLLIRLRERGNRVLIFSQMVRMLDILAEYLKYRQFPFQRLDGSIKGELRKQALDHFNAEGSEDFCFLLSTRAGGLGINLASADTVVIFDSDWNPQNDLQAQARAHRIGQKKQVNIYRLVTKGSVEEDILERAKKKMVLDHLVIQRMDTTGKTVLHTGSTPSSSTPFNKEELSAILKFGAEELFKEPEGEEQEPQEMDIDEILKRAETRENEPGPLTVGDELLSQFKVANFSNMDEDDIELEPERNSRNWEEIIPEVQRRRIEEEERQKELEEIYMLPRMRNCAKQISFNGSEGRRSRSRRYSGSDSDSISERKRPKKRGRPRTIPRENIKGFSDAEIRRFIKSYKKFGGPLERLDAVARDAELVDKSETDLRRLGELVHNGCIKALKDNSSGQERAGGRLGKVKGPTFRISGVQVNAKLVISHEEELAPLHKSIPSDPEERKRYVIPCHTKAAHFDIDWGKEDDSNLLIGIYEYGYGSWEMIKMDPDLSLTQKILPDDPDKKPQAKQLQTRADYLIKLLNKDLARKEAQRLAGAGNSKRRKTRTKKNKVLKAAKLKEEIKSDSSPQPSEKSDEDDDENNKDEIVSVKHLHKKFKAEKENEEKPEPDTGIKKEAEEKRETKEKENKRDLKREKKEKEDKKELKEKRENKVKESTQKEKEVKEEKVNEIKSENKEKTKKIPLLDTPVHITASSEPIPISEESEELDQKTFSVCKERMRPVKAALKQLDRPEKGLSEREQLEHTRQCLIKIGDHITECLKEYTNPEQIKQWRKNLWIFVSKFTEFDARKLHKLYKHAIKKRQESQQHNDQNISGHVNTHVIRNPDVERLKENTNHDDSSRDSYSSDRHLSQYHDHHKDRHQGDAYKKNDSRKRPYSAFSNGKDHRDWDHYKQDRYYSDSKHRKLDDYRNRDHRSSLEGSIKDSRVHLDHRSHSDHRIHSDHRSSSEYSHHKSPRDYRYHSDWQMDHRASGSGPRSPLDQRSPYGSRSPLGHRSPFEHSSDHKSTPEHTWSSRKT

SEQ ID NO: 8672 - protein, 1786 aa, Taeniopygia guttata
MNGHSDEDVRNRSGESSQSDDDSGSASASESGSSSGSSSDGSRSQSSSSDSESGSESDTSREKKQVQAKLPPKLGGSEFWKSSPSILAVQRSAVLKKQQQQKAASSDSGSEEDSSNSEDSADDSSNEAKKTHRDEDWQMSGSGSVSGTSSDSESEEDREKSSCEDSESDYEPENKVKSRKPPSRIEPKSGKKIAGQKKRQLDSSDDDDYDKRGSRRQATVNVSYKEAEETKTDSDDLLEVCGEDVPQPEEDEFETIEKFMDSRIGRKGATGAATTIYAVEADGDPNTGFEKSKEPGEIQYLIKWKGWSHIHNTWETEETLKQQNVKGMKKLDNYKKKDQETKRWLKNASPEDVEYYNCQQELTDDLHKQYQIVERIIAHSNQKSAAGYPDYYCKWQGLPYSECSWEDGALIAKKFQTCIDEYFSRNQSKTTPFKDCKILKQRPRFVALKKQPSYIGGHEGLELRDYQLNGLNWLAHSWCKGNSCILADEMGLGKTIQTISFLNHLFHEHQLYGPFLLVVPLSTLTSWQREIQTWAPQMNAVVYLGDITSRNMIRTHEWMHPQTKRLKFNILLTTYEILLKDKSFLGGLNWVFIGVDEAHRLKNDDSLLYKTLIDFKSNHRLLITGTPLQNSLKKLWSLLHFIMPEKFSSWEDFEEEHGKGREFGYASLHKELEPFLLRRVKKDVEKSLPAKVEQILRMEMSALQKQYYKWILTRNYKALSKGSKGSTSGFLNIMMELKKCCNHCYLIKPPDDNEFYNKQEALQHLIRSSGKLILLDKLLIRLRECGNRVLIFSQMVRMLDILAEYLKYRQFPFQRLDGSIKGELRKQALDHFNAEGSEDFCFLLSTRAGGLGINLASADTVVIFDSDWNPQNDLQAQARAHRIGQKKQVNIYRLVTKASVEEDILERAKKKMVLDHLVIQRMDTTGKTVLHTGSTPSSSTPFNKEELSAILKFGAEELFKEPEGEEEEPQEMDIDEILKRAETRENEPGPLTVGDELLSQFKVANFSNMDEDDIELEPEQNLRNWEEIIPEVQRRRIEEEERQKELEEIYMLPRMRNCAKQISFNGSEGKHSRRRRYSGSDSDSVSERKRPKKRGRPRTIPRENIKGFSDAEIRRFIKSYKKFGGPLERLDAIARDAELVDKSEIDLRRLGELVHNGCIKALKDNSFGQERAGGRFGKVKGPTFRISGVQVNAKLVISHEEELAPLHKSIPADPEERKRYVIPCHTKAAHFDIDWGKEDDSNLLIGIYEYGYGSWEMIKMDPDLSLTQKILPDDPDKKPQAKQLQTRADYLIKLLNKDLARKEVQRLTGAGNSKRKKARSKKNRATKAAKIKEEIKSDSSPPSEKSDDDGYNEDEIVSVKCPHKKIKAEENEEKPEPNTGIKMEAVEKRETREKENKRHLKREKKEKEDKKEFKNIKEKRESKLKESTQKEKEVKEEKANELKSENKEKNKKVSLLDIPVHITATSETLPISEESEELDQRTFSVCKERMRPVKAALKQLDRPEKGLSEREQLEHTRQCLIKIGDHITECLKDYTNPEQIKQWRKNLWIFVSKFTEFDARKLHKLYKHAIKKRQESQQHSDQNISNNMNTHVIRNPGVERLKEKANHDDSSRDSSSDRHLSQYYDHHMDKHQEDAYNKNDLRKRFHSAFSNGKDHRDWDHFKQDSRYYSDGKHRKVDDHRNRDHRSNLEGSLKDSRPHSNHRSHSDHRIHSDHRSTSEYIHHKSSRDYRYHSDCQIDHRASGSGPRSPLDQRSPYGSRSPTGHRSPFEHSSDHKSTPEHTWSSWKT

SEQ ID NO: 8673 - protein, 695 aa, Encephalitozoon cuniculi
MFGLSLCVMDCRAEDYEKSFVERYLERTASVKIRELAKRAEDHRNKGEMDKARELEKEIEKIKSELVADKSIVSKTDCRREEVESKESIDFEWDGAEDDRDIKVFDAKRAKAVEKYCRHMGIEEDEFSEHIKKEGKECEGFSVPGFLWSSLFPYQQDGVRWMLRLYRDEKGGVLADDMGLGKTIQVIVFLGALLHSRVVSKALILCPATIVSQWMDEWKRFYPFVRIFFGFPNEDCEGVYLMSYEKFKAGVKNFLWDVLILDEGHRIKNKNAQITLSVKKARSRGRFVLSGTPIQNNLGELWSIFDFVNPGLLGSHTSFNEEFEEVIRRGGYRNASNLQVEKAYRHSLMLRSLIEPYILRRTKSQVSHKLPSKEDKIVFCSLTPAQIELYNRVLESKHIMKVLTGKANLLSGISMLRKVCNHPRLLFPRKLGVSEDCEEEASDEKNGEDEALELPGADVSYDLVSSSCKIKILVDLLKKWRSEGNKVLVFSQTIRMLDIIERCVRKYTYLRMDGRTPTSSRPGLVDRFNEDEDVFLFLLTTKVGGLGLNLTGASRIVIYDPDWNPSTDTQAKERAWRYGQKKGVEIYRFVCKDTIEEKVYQKQIFKDLLGKKVLSNPRLSRFFNKSCINELFSFTMTGDLVEVKTHEVHRCDEEGALKEVRDGDGEAFSRIKALNEKRVLSGSEVLEYIALREGE

SEQ ID NO: 8674 - protein, 823 aa, Encephalitozoon cuniculi
MNTKLLRKYRNFIGDNEFFRAFIPNYGEVVEGDEEPVEPYTFISSPRFVLYELRDYQIEGLNWLINMHENSINCILADEMGLGKTLQTIAFLGYIRYVKKERKRHLIILPKSTLANWRREFRKFMPNYKVRVFYSSRKEMRREAEEIMSSRWDACLTTYEMCINARSILNTVKWSYIVIDEAHRIKNEHSLLSKIVRIFSCDHRLLITGTPLQNNVHELWALLNFIVPEIFNDAEKFESYVMNIDEGDGEAIRRIRSVLQLFFLRREKIDVEMSLPPKKIVNLYSKLSPMQREWYRMLLKRDLSPLGSTRDPKGMLMNVVMQLRKCCNHPYLFPDAEPKPYTNDKHIIENSGKMIVLDKLLASLKAKGSRVLIFSQMSMMLDILEDYAMFREYEYCRIDGSTSYRDRTEAIDGFNAEGSEKFLFLLTTRAGGLGINLSTADTVILFDSDWNPQMDLQAQDRAHRIGQKKQVVVFRLISENTVEERIVYRSLQKLKLDDILLQGRYHRSSSVSQSELIDILANGMEITEDEGKDESIEDVIRRGEEKTREMNVKLCDFKITDTLNTNIDCYTWEGEDYNVKKIESFIENSRDGHGRSSRTSILFRARPRIIEYPEYQFYPKELQEIQRKEVKLYEEGKSLSQDEVLRKKELQSQGFDWTKKDFHLYIKAVEKVGRDDVEKIAMLLKHKDDVEAYHRVFWERVNELSDAEKIIGSINRSQRRMERKSRIREMIEGDLADINRRLGKSRSKLGDYNGLLLGLYRKYLDHPNWAECIRKDILRLSEYKFDYYLLSRTNTDIQKHVNHLIFTLAKSCSKIKDTKAVEA

SEQ ID NO: 8675 - protein, 1256 aa, Encephalitozoon cuniculi
MNRLEKFFTTLNTAQSKVLKGYTTDELVSQIKEYVDFTPYILKQTYRLLCGQASEDRRNGARILRSLMFQFKLVTDFKIEYKESSSIYLSSTGEQFNVQAPSIQEQKRMVRKIAKLEHVEANFLSDIDFKAGSGEAIKRHKVDERPIENVLDFFEQISDNLLSYEWYKRHGAFLAFAAMFSEIDNGGDIQIRVDSKLFSKIYEILVTDKFNDFVDDRTVAPVRDAAAYLLSRIYPLIGPNDIIEQLVGFLDSGDWQVQFSGLIALGYLKEFVEDKDGLCRKLVSLLSSPDEDIKLLSAELLCHFPITDSLDLVLEKCWKNIESEELISVSKTSNLSLLTKIYRENPELSIPPERLKDIFPCFTSPVPEVRTSILNMVKNLSEESIDFLVAEVVLIEEKDEIREMAIKLLKKRRDLPKNLILHFMNVIGGSLYEPYSEDDFVSYEDLYFTKSGINVVGKDEILKNRCLLFECIMKSGLPDLQSTIETTTSRTFISLYRSVQALVKDTPYTPANIEELEYYFDRCKDLKMAPLKEFKKKLSAPGIRSIHPMVDPLYSDYTRMVASIEFPGLERATALFEVETCKQFLHLFSKMITEYYDAEKISIDNFLLKAYEGLASGKDGFLSFFEVFNTRLLAHSFFHKIGSLENRLDFFSKTIHIYTKTSQIQKIGFVFDDALREKNITVINGFMRSLEFNEKFVRKALEDLDVELLDAVLMSGDHSFNPLFVKPLLRNISGNIDREASSKVLSKVIPTLGFSTNTKISKDLLEMIEREKKSLESLLDAGKIPEYHIKCPISVKLRDYQMEGVKWLNFLYSFSLNGILADDMGLGKTLQVLTFLCSEIYKTNRKVLVICPSSLTGHWKSEVKKFFPFVAAEIYKREDRDTYSILISSYETFRNDYLNFIEKDWFYVVVDEGHVLRNKQTILYSRMNMIRCSRKMVLTGTPVHNSVEDLISLFNFLMPNYIGPEKEYGSLNVKMSDSEIEKTHKRLDLLHRKVLPFILRRLKIDVLKDLPPKIIRDITVELGPVQEKLYREIDEKGGKESLGDAELEYGKVDQKNVGFKRTRDLFLAVSHIGHFKDSTEVSCKVKALEDIISLCGGEDLGSKILIFFQFKSTIDLVIKDIMKKYKFKYSRLDGSVPSAARTKIAEEFNTGTTQMLFLTTQVGGLGLNLTGADTVVMYEHDWNPFNDLQAMDRAHRIGQKRTVNVFRFIARNTLEEKVMNLQSFKMFVANSLVSQQNADIETMDTKDLLERFQVPG

SEQ ID NO: 8676 - protein, 1251 aa, Encephalitozoon cuniculi
MDSESESTASSVTSSSESSEKKVMPRKRGRPRKNDNSRQAQSHFNPMLYQAPLGYQYAPTIGPGIPHGFVPGVQHGFYNTFNFSHGFGYGHGYGPSAPLQGEETRTREMDGYREKNEGRSVYIPERRQKRNAAVVRRASAPESESSSDSYNEESEDGIEKLLKYDSESERYFVKFKHKSYLHCDWVPKSEIMASKVGAMKVKKFRATEVPFNPDFVKVDRILHEDYDGEKVFLVKWRGQAYELSTFETAESVTKCEGFEEELKKYRDRKKIRNMRVGIDWRPPRENFIKYEESPVFKGGNRLREYQLEGLNWLLNRWYYKQSCIMADEMGLGKTVQSVTFINTLFTKYDYCAPVLVVTPLSIIPHWEREFEAWTDLRVLKYHENRPGRALIAEYEFVLKKNNLEIRLFDVLITTYDTVMAEQEHLSQFHFSVGIFDEAHRLKNAKSKAATILRTLKFNHKVLLSGTPLQNNISELWSLLNFIDPMRFSSLPHFLGEFKMENINDVEKLQGLLRPLMLRRMKEDVEKSIPTKEETIIEVALTMIQKRFYRAILEKNIEFLTKGGKESAPNLLNVMMELRKCCIHPYLIKGAEEQILSGYLKKKRERSKAEGAENDITLTSEVLNEDEHQDGNSVISDIDEYYKIFIQSSGKLVLLDKLLGKLKDGHKVLIFSQMTRCLDLLAEYLAYRKYKYERIDGGARTENRQAAIDRFSDKTSDVFVFLLSTRAGGVGINLTAADTVIIFDSDWNPQNDLQAQARCHRIGQTSEVKVYRLVTENTYEREMFDKAGLKLGLDRAVLQKMTFEEQKSEKTRKKDAIETLLRKGAYGVLMETDDASSRKFCEEDIDQILERRTKIVKHSDGGNVFSKASFQVEEEIDDPDFWENLLSKRKSEESEGRIRRQMRRLAREGGLSSEDISEIDELLNTKLESEDENVFYENQCLLIFLGVLRFGPRSVGLEIPSLTHEDLKDGVEKAHILPQSPRFKDTDAYFRYLVKYTVDQFQSTKVRSDFSDGIEEFLVDNYDPSLFSKFGSVYKKYGERFLLRIQVVMILNSLLKTEDLAVEKVRGWTSDDDRALVSLTLKYGYDCYPETIRNKSVDDMNQRIRKIVSTLSRKKEVREDDNLFHKAIMIFGRVTDDNRESIVEFLGDKDIEGLEETINRILGEAKRHKLSSSEIECLDRMSWFNSLESMTKIPQPKRGMLPKNWNAKTLSELRGEILAKGLASAGERFGVSEDFIVKKFEALFPSGRPAQN

SEQ ID NO: 8677 - protein, 883 aa, Encephalitozoon cuniculi
MTGVDLEDILKVYERRGEALNIEKAANGTRHISKCVMDVPVALLNYPEVRHLRFLAKEKISQIINEMRSQRGEGDTDSERTAEWISVMRNIRKVHSAIVGYESARIAYSKKISIICARELRRGLSKTSRTNPILKSKRIYRELYGHIKKTERNMKDRFKKAEKEEMERKKREMEEREELRQKRKFEYLLSQTELFSHFILKKNRCGLSSAEEAERKEIGAGEYNGMKGYEAAMLQKERLREFGAERSTKKFKEGGEVGETTTRYVPQPSILKCTLKEYQLRGLNWLVSLYDKGINGILADDMGLGKTVQSISLLAHLYETEEVPGPFLVVTISSTLDNWAQEFARFLPSFRVCRFSGSPSERKELKKRFKNSDVVITTYQTAVSDEKMLKKIKWQYMILDEAQAIKSSMSRRWKTLLSFKARNRLLLTGTPIQNSMQELWALLHFIMPTLFDSLNEFSDWFSKEIETSAIMKKTVDEKSLQRLHAILKPFMLRRHKSDVIHELGQKTQIDLYCDLSYRQKVLYKEITRSCSSMEMENLLMQLKKVCNHPDLFKKLEPRCGLSLEVSDGIGDVVSFGRSKMDIKIPSLVAKDALEMFRKKEYEMIERINGLRRIVNGEGPNAWYLRGSLDFKYGGYVFRSVEEAGKAVLRNMGNPESSLLESMRRVIDEEAYRLQRHVYCISPVVATAPRLISNEADLPEIDLENRHIPLNTTIYVPPLNTFISDSGKLVVLDELLPKLKAEGHRLLMYFQMTRMIDLIEDYLVRKGYTYLRLDGSLKASARAEVIRDWQASDKFIFLLSTRAGGLGINLTAADTVVFYDSDWNPTADQQAMDRAHRLGQTRDVTVYRLITRGTVEEKVLESANRKDEIQKMVIHGNIFEGENF

SEQ ID NO: 8678 - protein, 556 aa, Encephalitozoon cuniculi
MEQERWGRAFEARLRGAGEGLDDRKEGEKMQPIKIRVYVNGDGDVVLRPSNKRLSTTLSKLDESVYDVKGNEWRISGRDYVAVKEELRRNKLVFDDIPKGVLRIARKEAGWQKFELIGPIYSMLLPFQREGVEHALNRGGRMIVADDMGLGKTIQALAVAYYYRAEWPLVIIAPASLLEDWADACRRFLGMEAMVMRRKEDFGQEIGVVSYEVASSHANVLACGAGVVIADECHYLKSLQTKRTKAIVPLLQKVSRALLLSGTPAVSRPLELYPIISAVDRTIFPRFAEYGARYCNGRKVGQWYDYKGCSNAEELHYVLRKFLMIRRTKDEVLGQLPPKFRRQVVLECTGRQDDPRKDLVGESVDTNVVMQYREAVGLKVDPVKQYLATMVEKGMKFVVFCHHTEMMESLEGFFAERNVPMIRIDGSVPSTSRHLLVKKFQENEEVMVALLSITACSTGLTLTAGRAVVFAELYWNPGVLLQAEDRIHRIGQKSSVDIIYLVAKGTIDEYVWPKLLSKLNVLESLGVGSNQLKNVGVSSQAAGQKTLCQFNIKRCN

SEQ ID NO: 8679 - protein, 1076 aa, Dugesia japonica
MAEPPLSSTDSDGSHESNDDSVIISNGKSQVNNNKTNKRNTRLNLKIPKLASSDSGNDLSSCNSSGKASKSLKRKPNYCSTSASESESDASLSDLYKKVTSKKKPSKKSKIEKSKTSKKEKSSKAEKKNKTSAQSNNEEEDEVETRKNIHKIMTNSKLSIATKTSAQLESDRRKRIEERQKEYNKDVPDEDILMTSSNITMVLEKDQDDNSIVEVDKLIVDNLKPHQMEAVQFLWDCVIRSVECLEKSQQVDSEDDKNASAVGGCVLAHCMGLGKTLSLIAFMHTMLTTSCLKLRTCLVVCPVNTALNWKKEWEMWMPKEKLVNIFEVCSTECKKSKVQVVQDWYHKGGVLIIGYEMYRLLATGDSRTVRRKIVKQKLNEALVEPGPDFVVCDEGHLLKNNKSAINKVITKIFTRRRIVLTGTPLQNKLLEYHTMVQFVKPNLLGTQKEFLNRFVNPINNGQHINSTPYDVSLMKKRSHILFKMLDGCVHRRDYSALVKYLPPKYEYVVKIRLSDIQVQLYRQYISICKDNKHSLFQDHLTFSRIWTRPFVICMHQEIMDKKMFFVDTDEDGDDSFINDTSDSDSKDADDKKPVKTSNGGDVINLISDDSDLDGSVRKKSKIEKREKSNSGSDSSAEEVVRNWGTTSRSAKKNELVDSDEEPIITGIKELKELKYMNPIDKHWWSNIIQPEHEHQIEISGKLSVLFQILRKASDIGDKIIIFSHSLLVLDIIEKYLQELHTIAEKIQEDLKKLNDSIDQSPTTAEEDIIYNSWIKGLDYDRMDGSTQAFVRADIQSRFNSFEDHRLRLFLISTRAGGMGVNLVAANRVIIFDVSWNPSHDVQAIFRSYRFGQNKPVYVYRFVSQGTMEEKIYERQVTKQSLSLRVVDEQQISRYFTEEDLRSLYKFEPDLYDPEKVRETPILPKDRFLAELIQELPQFIHGYHEHDSLLQNKTDEELTETERQDAWKEFEEEKIRGYRPFPMNPIQPKPAMDQDRMHQLQIMMLQQYPQYAALYAQNYNNLVKYVLSRKPDLNQIQLNNEVQHLFLQSLQKYYNSQATMMVTQPADTIAGSSQSMQ

SEQ ID NO: 8680 - protein, 1009 aa, Caenorhabditis elegans
MSVHESSNEINDEPMDTDSNIPESSGNDPSMEVDDEPESSDAADSFKRFERLLQKTENFSHCLSSGDAKLATGAPVDTKKRGRPSKKNGIDGDHRHRKTEQEEDEEMVADAIKSDDLVIFDKSPFYIENGEMRDYQVRGLNWLASLQHNKINGILADEMGLGKTLQTISMIGYMKHYKNKASPHLVIVPKSTLQNWANEFKKWCPSINAVVLIGDEAARNQVLRDVILPQKFDVCCTTYEMMLKVKTQLKKLNWRYIIIDEAHRIKNEKSKLSETVRELNSENRLLITGTPLQNNLHELWALLNFLLPDIFTSSDDFDSWFSNDAMSGNTDLVQRLHKVLQPFLLRRIKSDVEKSLLPKKEVKVYVGLSKMQREWYTKVLMKDIDIINGAGKVEKARLMNILMHLRKCVNHPYLFDGAEPGPPFTTDQHLVDNSGKMVVLDKLLMKFKEQGSRVLIFSQFSRMLDLLEDFCWWRHYEYCRLDGSTPHEDRSNAIEAYNAPDSKKFIFMLTTRAGGLGINLATADVVIIYDSDWNPQSDLQAMDRAHRIGQKKQVRVFRLITENTVDERIIEKAEAKLRLDNIVIQQGRMSEAQKTLGKGDMISMIRHGAEQVFAAKDSTISDDDIDTILEKAEVKTAELNEKMGKIDENNLRNMTFEDNAKFTVYQFEGENYKAKQADGMGHFWIEPPKRERKANYQVDLYYKEAMRAGNPTEKQSKAPRPKLPQVFDFQFYPRRLFELLDKEIYHYRKTIGYVAERPKDVPPKEAEKRQAEEQKLINNARPLTDKEQEEKAELLTQSVTDWTKREFQQFVRGNEKYGREDLESIAKEMERPLEEIQSYAKVFWERIEELQDSEKVLSQIEKGEARIQRKYAVKKALDAKIAKYKAPFQQLRISYGTNKGKTYTEEEDRFLVCETHRLGHDKENVFEELRQSVRMAPQFRFDWFLKSRTAMELQRRCNTLITLIEREMGEVVESKPVIVTAADKKKSVAKDLSKSSGTPTAKKVKATPK

SEQ ID NO: 8681 - protein, 971 aa, Caenorhabditis elegans
MEVDDEPESSDAADSFKRFERLLQKTENFSHLATGAPVDTKKRGRPSKKNGIDGDHRHRKTEQEEDEEMVADAIKSDDLVIFDKSPFYIENGEMRDYQVRGLNWLASLQHNKINGILADEMGLGKTLQTISMIGYMKHYKNKASPHLVIVPKSTLQNWANEFKKWCPSINAVVLIGDEAARNQVLRDVILPQKFDVCCTTYEMMLKVKTQLKKLNWRYIIIDEAHRIKNEKSKLSETVRELNSENRLLITGTPLQNNLHELWALLNFLLPDIFTSSDDFDSWFSNDAMSGNTDLVQRLHKVLQPFLLRRIKSDVEKSLLPKKEVKVYVGLSKMQREWYTKVLMKDIDIINGAGKVEKARLMNILMHLRKCVNHPYLFDGAEPGPPFTTDQHLVDNSGKMVVLDKLLMKFKEQGSRVLIFSQFSRMLDLLEDFCWWRHYEYCRLDGSTPHEDRSNAIEAYNAPDSKKFIFMLTTRAGGLGINLATADVVIIYDSDWNPQSDLQAMDRAHRIGQKKQVRVFRLITENTVDERIIEKAEAKLRLDNIVIQQGRMSEAQKTLGKGDMISMIRHGAEQVFAAKDSTISDDDIDTILEKAEVKTAELNEKMGKIDENNLRNMTFEDNAKFTVYQFEGENYKAKQADGMGHFWIEPPKRERKANYQVDLYYKEAMRAGNPTEKQSKAPRPKLPQVFDFQFYPRRLFELLDKEIYHYRKTIGYVAERPKDVPPKEAEKRQAEEQKLINNARPLTDKEQEEKAELLTQSVTDWTKREFQQFVRGNEKYGREDLESIAKEMERPLEEIQSYAKVFWERIEELQDSEKVLSQIEKGEARIQRKYAVKKALDAKIAKYKAPFQQLRISYGTNKGKTYTEEEDRFLVCETHRLGHDKENVFEELRQSVRMAPQFRFDWFLKSRTAMELQRRCNTLITLIEREMGEVVESKPVIVTAADKKKSVAKDLSKSSGTPTAKKVKATPK

SEQ ID NO: 8682 - protein, 1787 aa, Caenorhabditis elegans [sequence omitted]

SEQ ID NO: 8683 - protein, 1336 aa, Caenorhabditis elegans
MKTDRRYISVRKLLALIQEEKLTIIIPPRIPMPARYPPTEESLGDEPVDETVEDRAARYDDYMQVLANAYPLNTWDSNFMKIDDDIIRKEALHYRDQDMKNREMYLKENLHTFPEERQTKAKIEYLGLSLLDFQTELRKKVLATTVLVPPNDFLINPWSIRRTKYEYLQELKRHPDRAILEKRRKVTNFHFLQSLTKHAREFKEFHKRNMLNHTKVRKSMQQYITNENKRIAREEMKNEKNRIQKLIQEDEEGYRAMLDEKKDQRLVYLLEQTDDYIKSLCDLLKQQQNATAGSLATKSYIRKEYDGVAEEDKVKSILDKARNDDDEYENKTKMNIEDYYTTAHGVREEIKEQHFMMGGGNPSLKLKPYQIKGLEWMVSLFNNNLNGILADEMGLGKTIQTIAFITYLMEIKKTSGPFLVIVPLSTVPNWQNEFDKWAANVHLIAYKGPKETRKVFEPIIKSGKFNVLLTTFEYVIREKALLGKLRWKYMIIDEGHRLKNQHCKLTEMLNTRFQCQRRLLITGTPLQNKLPELWALLNFLLPSIFSSCSTFEQWFNAPFATTGEKVELTQEETMLIIRRLHKVLRPFLLRRLKKEVESELPDKMEFVVRCDMSALQKVLYKHMQKGLLLDGKTNTGSKSLRNTMIHLRKLCNHPFLFENVEESCRNFWDARFISAVDLYRVSGKLELLSRILPKLQATGHRVLMFFQMTSMMTIVEDFLAGGTIQYLRLDGSTKPDERGALLDKFNAPNSEYFLFMLSTRAGGLGLNLQTADTVIIFDSDWNPHQDMQAQDRAHRIGQKAEVRVFRLITANSVEEKILAAARYKLNVDEKVIQAGKFDNRSTGAERREILENIIKTENESEEDEEVPNDEDINDILSRSEEEFELFQKMDQERFENEQAQKAKPRLVGEDEIPRDILRAADETDYIEKAKEEGRVPYLEVMPGSRRTRREVDYSADTMSDDKFLEKLFDEDDTTSARTEEEPNPAQPGPSSVSISLESSCDTQKDIKVDDVPAPPLTFKVPRLTIKLGGDEKKRKHNRSESDSDDNSLKKEKKHRKEDHPKEKEKEKKKEKEQEKSTDSEKDLKRKIEAPIEKIRIKFSGEPSEKYRKINEEPPKKEHRDKGRKEEKSHKHRSDDDDSSPKKKKHRDSDESSEKKKKKHKHDSDSALKLREGSPLSVDKEKSPMKIRIGQGQPSISLAANEDKNHPPIKLKLNVKFNMPSQETDGSKKDKKEPHKEKEKDKEKEKEEDKGKEKEKHKDKDKDKEHKKKSREDETEEERRARKEAKRLKRQKEEQEDDAKLQEKLARKAAKKEQKRLEKEKSESSTGTVNLSAAGSA

SEQ ID NO: 8684 - protein, 1257 aa, Caenorhabditis elegans
MKIDDDIIRKEALHYRDQDMKNREMYLKENLHTFPEERQTKAKIEYLGLSLLDFQTELRKKVLATTVLVPPNDFLINPWSIRRTKYEYLQELKRHPDRAILEKRRKVTNFHFLQSLTKHAREFKEFHKRNMLNHTKVRKSMQQYITNENKRIAREEMKNEKNRIQKLIQEDEEGYRAMLDEKKDQRLVYLLEQTDDYIKSLCDLLKQQQNATAGSLATKSYIRKEYDGVAEEDKVKSILDKARNDDDEYENKTKMNIEDYYTTAHGVREEIKEQHFMMGGGNPSLKLKPYQIKGLEWMVSLFNNNLNGILADEMGLGKTIQTIAFITYLMEIKKTSGPFLVIVPLSTVPNWQNEFDKWAANVHLIAYKGPKETRKVFEPIIKSGKFNVLLTTFEYVIREKALLGKLRWKYMIIDEGHRLKNQHCKLTEMLNTRFQCQRRLLITGTPLQNKLPELWALLNFLLPSIFSSCSTFEQWFNAPFATTGEKVELTQEETMLIIRRLHKVLRPFLLRRLKKEVESELPDKMEFVVRCDMSALQKVLYKHMQKGLLLDGKTNTGSKSLRNTMIHLRKLCNHPFLFENVEESCRNFWDARFISAVDLYRVSGKLELLSRILPKLQATGHRVLMFFQMTSMMTIVEDFLAGGTIQYLRLDGSTKPDERGALLDKFNAPNSEYFLFMLSTRAGGLGLNLQTADTVIIFDSDWNPHQDMQAQDRAHRIGQKAEVRVFRLITANSVEEKILAAARYKLNVDEKVIQAGKFDNRSTGAERREILENIIKTENESEEDEEVPNDEDINDILSRSEEEFELFQKMDQERFENEQAQKAKPRLVGEDEIPRDILRAADETDYIEKAKEEGRVPYLEVMPGSRRTRREVDYSADTMSDDKFLEKLFDEDDTTSARTEEEPNPAQPGPSSVSISLESSCDTQKDIKVDDVPAPPLTFKVPRLTIKLGGDEKKRKHNRSESDSDDNSLKKEKKHRKEDHPKEKEKEKKKEKEQEKSTDSEKDLKRKIEAPIEKIRIKFSGEPSEKYRKINEEPPKKEHRDKGRKEEKSHKHRSDDDDSSPKKKKHRDSDESSEKKKKKHKHDSDSALKLREGSPLSVDKEKSPMKIRIGQGQPSISLAANEDKNHPPIKLKLNVKFNMPSQETDGSKKDKKEPHKEKEKDKEKEKEEDKGKEKEKHKDKDKDKEHKKKSREDETEEERRARKEAKRLKRQKEEQEDDAKLQEKLARKAAKKEQKRLEKEKSESSTGTVNLSAAGSA

SEQ ID NO: 8685 - protein, 1474 aa, Caenorhabditis elegans
MSGRPAFEQFTAQPPQPAGEVVAQQAGDGAQGQELTISKLENAITSMEEQGLQNDHRHAKAVLLKQKLQSGLPDAVPGQENGGNQQITPAQLNQLRAQVSAYRLLARNEQVPANLIADAVMLRPKVTTLLPEPYEYPGEAENGEKLPYDLMKIFNLHQIRCNRPTTISVPSGIDPVGMLKQRENMIQNRIGLRMKLLNNLPADIPDHMKLKAEIELRALRLVNLQTQVRSEVMACLKRDTTLETALNPYAYRRTKRQSLREARVTEKLEKQQKMEQERKRRQKHTDLMQAIIQHGKEFKEYHRNNLLKMAKSRKAVMTYHQNNERERKKDEIRNEKLRMQKLMQEDEEGYRALLDEKKDQRLVYLLQQTDEYVDSLCSLVRQHQNTEKKKKKEDKKIEKGNQMDEEARVHVRERSTGKALTGDQAPKTEEIEFWLETHPEYEIVPRDQLSDDEEEEEEEAPVEPEEEKDDQYAGMDEETKAKMILEKARNEEDEYDQKTKKQMADYYATAHKIKEKVVKQHTTMGGGDPNLLLKPYQIKGLEWMVSLYNNNLNGILADEMGLGKTIQTISLVTYLMEVKQNNGPYLVIVPLSTLSNWQNEFAKWAPSVTTIIYKGTKDARRRVEGQIRKGAFNVLMTTYEYVIKEKALLGKIRWKYMIIDEGHRLKNHNCKLTLMLNGFFHAQHRLLLTGTPLQNKLPELWALLNFLLPSIFSSCGTFEQWFNAPFATTGEKVELNQEETMLIIRRLHKVLRPFLLRRLKKEVESQLPDKTEYVIKCDQSALQKVIYRHMQKGLLLDAKMSSGARSLMNTVVHLRKLCNHPFLFPNIEDSCRAYWKVNEVNGTDLMRVAGKLELLDRILPKLKATGHRILMFFQMTSMMNIFEDFLNFRRYTYLRLDGSTKPDERGDLLTQFNAPNSDLFLFMLSTRAGGLGLNLQTADTVIIFDSDWNPHQDMQAQDRAHRIGQKKEVRVLRLITANSVEEKILAAARYKLNVDEKVIQAGKFDQRSTGAERKQMLEQIIQADGEEEEEEEVPDDETVNQMVARSEEEFNIFQSMDIDRRREEANQLHRKPRLLEEHEIPDDILKLSFDYEEMERAREEGREVVDQTPNQRRRRREVDYSSDLLSDEQFMKQVEEVEDENNQAVAERKKQRKRKMAGLDENDDSMDDVVLQHKKKKTDPELAEKINEMLDVILEYKNEDGELIADVFQTLPTRKELPDYYQVISKPMDFDRINKKIETGRYTVMEELNDDMNLLVNNAQTYNEEGSEIYVSSETIGKLWKEQYDKFMNPPKPVEEPVKKKEPSTPSTSSSRPSTSGTPSVSDLQRTQQATAQQMLMLMTHMQSLPPAQAQQFQQALMTQTGGNQALMLQYMQSAMLAQRAQASTKVTPKKDEKKETSSSVKTEEAKKDDEPSTSSASAPPPKKKKESEDSEDPMEEDEEEEIIGQKKEPASSRRKSRPTRRFSNEDEEEEDDE

SEQ ID NO: 8686 - protein, 1529 aa, Caenorhabditis elegans
MYNCRSPLKEIIKKTLNIKFSFQTKFLSDDEFLHQGISEPDQPSTSKELDEVVTKIEIFDEENGNCDDGIERQKKFLKVLRELVNLVAEKQWYARHGGAIAICQIASTSYDRLSYELIDTILYLLIHVLILDKFNDFISGRNATAPVREQCAQALVHMLRNTDEKRREVVLEIVVQMVRTPGEKNWNIRQSGLLILKYYFAIARNDGTEHQKTFNQCFNLVIQSLDDSVDDVTGCAVKTLASILSNKEIPQEEMSQLVEKVMSHVWKLLDLEAAKEQLRAGLDALCIDLLEIVELWLRWNQHVGISRESLLTICSTIDAAFPVRCEKIVQLLEADIERPQSNKLSAEDVFIIIKQLYRILLFAPPADSLLFLEKTFITFSKIFKCYRQDLLIENGLVSQKIGNWLGCLLLDHRNPQIDVFACDVDGISSNRSSPTELMCSEEMRFLGEKEKDKVYLTRKILCAKFLAIILEALYESDGEIQGQRIDIAVQLLFIPFFQSKSIMHNLGVSIIVNEWAALYRSGITAKTLEKPPPLTIIQLADGIVRGPGKQYDEMTTIVMGLTKDCNEFIEYCVVRGFDRTSAEARGESPEDVSKAAYSIVRPNLKTEKQRESIDSRYNTLCRSIENAKMNIKSNGIRINALLSSTLFYFGNAPEKLTPQIRPIVETMQTEENDAMASEVFRGAVPLLVMFSWSRNPRPYVKVFAKAFESFSGCPIRMPKLGASSPGALEPWTTTIISMRRIWGKETDDGFEESSGMISAESRNAELFLNILCQFNASQLAEFYCHFDLSEDVDLNTFLTRLELHNSLWNRVGSRLSDQSADKIFSLVPSEDPAIRYAFAKAIETFFKSSCGDTLSKCYNRLVVLSKDLDNVNSRLSAVEVFLRLCMMDTRYLNGWATLLAPVIFPLLADQCETVRDAAGEAFRRLIPVITLENPDFSIEGMSQELLAKKSEYSNFINVLGSPSSLPRVIRADIRGGFDTSMLREYQLEGITWIRFLRTYGLHGILADDMGLGKTLQTMCSIALSVDRDEMSEFHRCSLIVCPRTLVDHWCLEWNRFFPQRVPASKNLTRCHGAEICVIAYDELKTAYMMDRVWNYIVLDEGHVMRNSKLRAWKFASQLVGKSRLILSGTPVQNSPADLWSLFAWLMPGYLGSEKQFRSQFLKKIMKCRLPKANEADLKAGSAAISQLHKLVLPFVMRRLKTEVLKELPEKNVQDYECELTEDQKEIYRFVVDRCTSSQEDVGLSSLVTLITLRKLTDHTKLVHDTLAKIGAPQYILSKALAAKSGKMEALKQLLIECEICKNPDEEVEQPEDLGGLVASGHRALIFCQWKTSAKLVSDALKSGEFGSVVSHLVLDGSVPAGDRMKMVNRFNEDKTIDVLILTTHVGGVGLNLTGADTVIFLDHDWNPMKDLQAIDRAHRLGQTRNVNVYRLITQGTVEEKVMSLAKFKLNTAQALIGADNTSMMTMETGELMNMFTLDGDEAKKKPGGGEPAAKKSKKSTGAPEEVDLASMWDESQYDDFQVDSFLRNT

SEQ ID NO: 8687 - protein, 1829 aa, Caenorhabditis elegans [sequence omitted]

SEQ ID NO: 8688 - protein, 1785 aa, Caenorhabditis elegans
MSTKPEPENPDSGTPKTLSVDDDDIVVIEDQNTPKYREAALRRSNSSSSDFDEKWEPELDEEDFCENDADVLAEPISSKSRKKSRRSDSSEFVPSEESDDDEEYEVLEKSRKKGRKSGSSSRSSSDDFIESDDNEDYKSAGLLDDNDSKNFKARIDKLKPEATSELVDTRMVTSEEYGKSSKPWKVNAGVWNKLHKFQQEGVEWLQKKTDHRSGGILADEMGLGKTIQSVVFLRSIQETARTHYKTTGLDTALIVCHVSIIAQWIKELNQWFPKARVFLLHSHCSTGRQEDYVGSIFRKLQRRRKEYPDGAIILTTYSLFTKLKKPIVKHLWQVVILDEGHYIRNENTKCSIAMRKLMTTQRFILTGTPFQNRLSEFWKLVDFVHPGRLSDSATFHRNFTHIINAGANLNCSPEAAAKAYECLVALHIAVKPLILRRLQEDHKEVLQLPEKQEIVLSCELSKRQRRLYMEYGNSHQVNEIIERRLKAFVGINHLTNICNHPGIYRSLSPASPKFGSIKDSGKVEMTFKLFDDWFKSPTNRVILFTQRRTVITMMEYFLAEKGIKCVSLTGADSAAARPKIIKKFEDDVSIKVFLMTTRAGGLGLNLTCANKVIIFDPDWNPQADNQAKNRIYRMGQTNDVAIYRLVSNGTIEDLKFFKQVQKENLAARLLHNAEIDQFVPNNTLADLFRLKPKGLEGSEIGVYLDGEIAREGSKKQKRDKVEKKAAKKRMKNKLAGFEDKKLLLSLFDDDKLVAMREHSISLQNSSSMNRIEKMKMRKSIDDAVGSLLHTEGRLAHTWKQVFHKQLRKTLKKSINGDYFVEEEQLDSYWNTVHSGFRANDDQRELDRLVKLATDMLQFFNGVPGAKEDSIHRIFVKDSDRKDPTQMFFIQEIISTLAKYDDASDTWILRDKYRSADVLSPVKKKNKRRSDDNDEVDAKRARKSREWSDSSGPSNMTEKWTVYRDPINSTQNRDNKDTNGIASDDTNGDQEKWDSALKYRQAKAFWMRHTGQLNISARNANKNRANASERNEQRPDKNNDAIVIKPTNTSNDRKSLKRRPDALPDPPIEKRHKQTTVDSDDDVMIIERTPEKTSAGLSSALIVCPEAKLSEWMLAIRHQFDYARIFVLHKASTTGHETDYVEKIFQDLKETKKIPFGAVLLTTFAEFGKHEKAIVDHQWQLVYLDQGLFEMTRQMRNQIEGMKKLKTPNRFIFTDTSVRDRLEELWWNVDFVFPGRLSDYKTFQTNFQNVIEIGCRLDATPEEASTAYECIVALHVALKPLILSRLIKNPNDWFCRREISKKEVEHIKVRIFVKQYFEQTLFFQDIICPLSKRQRRCLKIYKRSDEVQGILRQSSAACVGLKKLTDICDHPGIHKGVTPETKKFGSIEDSGKVRIVFQLLDMWLGTPGAKVVIFTQRRQVAVMLEHFMKQKRIAYCSFLKAKNAYDRENVVNYFENTTDVQILLAPSIMFKLGMQLKKANKVIIFDPEWNPDSDVKHTREMSFLTKKVEDVTVVRLVSEGTVEDSSYFKKLWESGLASRLLSDPKFEPFVPRTTLEEFLTVRPKIKAGKNDMPVVKSHMKNRLLEYEDKQLLSSIIDTTRLDTIRTHFTSFQYHSTTSDRIKSRDVVNRAVRSIIQIDSRLARYWRQMYHQIVDEPTLDPPNPEFYVEPMQIDPYWEAVHPMVPRTSDREELNFLVAMAVDVRSHMLKCYGETEKKLRELFVRNADRSNPIRMFFIYDIFWTFAKFHENWQLWIIRPDLTVNPEEWGPEAMKTRWLRHWIDQYLCC

SEQ ID NO: 8689 - protein, 1461 aa, Caenorhabditis elegans
MWNQSESSSGSDAEPDEKTDEPVREEENPEGNSTSEDNDEKEKAADSPESSSDQSDDSDDASENSSSSEPDEPAPKKKNNNNRGMDAETRKLLENENYFRRSKRSKRQDDSPSDNSEESQSSEDDWDDRRKPRRTVTKKVVKQTKKAVSVVKRKSVKGNVNYAEKNSDDDIDDDDVLEWDEEPAVPAEGPAILTETVERVIKWRHGVPGATGSATTCYNIADKGDPNDQIPGDKTEQQFFVKWTGWSHLHNTWESENSLALMNAKGLKKVQNYVKKQKEVEMWKRSADKEYIEFFECEQQMAEELCEEYKKVERVVAHQTSRDRAADGSMATEYLIKWSGLPYSDCTWEDEKMVAPEQIKAYYHRIENLKSPNKNSNVLRKRPKFEKFESMPDFLKTDGESTHKLRDYQLEGLNWMVYAWCKGNSSILADEMGLGKTIQSISLLASLFHRYDLAGPYLVVVPLSTMAAWQKEFAQWAPEMNLVVYMGDVVSRDMIRQYEWFVGGTKKMKINAILTTYEILLKDKAFLSSIDWAALLVDEAHRLKNDESLLYKSLTQFRFNHKLLITGTPLQNSLKELWALLHFIMPEKFDCWEEFETAHNESNHKGISALHKKLEPFLLRRVKKDVEKSLPPKTEQILRVDMTAHQKQFYKWILTKNYRELSKGVKGSINGFVNLVMELKKCCNHASLTRQYDHIYDDAQGRLQQLLKSSGKLILLDKLLCRLKDKGHRVLIFSQMVMMLDILQEYLQLRRFPSQRLDGSMRADLRKQALDHYNAPGSTDFAFLLSTRAGGLGINLATADTVIIFDSDWNPQNDLQAMSRAHRIGQTKTVNIYRLVTKGSVEEEIVERAKRKLVLDHLVIQRMDTTGKTVLSKNATASGSVPFDKQELSAILKFGAVELFKEKEGEEQEPEVDIDRILMGAETREAEEEVMKENELLSSFKYANFAIDEEKDIAAATDEWAAIIPEEDRNRILEEERMKELAEMNLAPRQRKQPIPQVVEDDDGDDDEEEDDTGKKKKKKAVGNFTIPEIKRFIKSFRKFSMPLNRLEEIAQDAELEEHSTDEMKKLVESLSEACKKAADEFDSNEKNGDAGAAESEKKDIERKFKFHTCDVNLKQIERSHAELKPLHEILKSEETKTSFKPPANAKLQKGWDVDWSRPDDSALLLGVWKYGYGSWEAIKMDPTLGLADKIFIKDKTKKPQGKNLQVRVDYLLKLMSKDKVKTTEKKERKRKADDVPVGPEKKKRHTNNVPQEGEKKKKEKKEEKNSSSLKDQLALLSIDKSLYGGALEDSSAKPFLECVKLCMPVHKYMKKLKEAQEAKNQADEAKYLTRLGDSFLENLETLIKKKPKTNIRKWYNYLWIFLCKFTLREPGEMADRYRSITSDKHKNHHHHHHHKSKEEKPKEAKDHKERDREKDRERNRGERRMDHGEGTSKDHHREHHKDHHKDHHHREQHKEKNRRH

SEQ ID NO: 8690 - protein, 1465 aa, Caenorhabditis elegans
MWNQSESSSGSDAEPDEKTDEPVREEENPEGNSTSEDNDEKEKAADSPESSSDQSDDSDDASENSSSSEPDEPAPKKKNNNNRGMDAETRKLLENENYFRRSKRSKRQDDSPSDNSEESQSSEDDWDDRRKPRRTVTKKVVKQTKKAVSVVKRKSVKGNVNYAEKNSDDDIDDDDVLEWDEEPAVPAEGPAILTETVERVIKWRHGVPGATGSATTCYNIADKGDPNDQIPGDKTEQQFFVKWTGWSHLHNTWESENSLALMNAKGLKKVQNYVKKQKEVEMWKRSADKEYIEFFECEQQMAEELCEEYKKVERVVAHQTSRDRAADGSMATEYLIKWSGLPYSDCTWEDEKMVAPEQIKAYYHRIENLKSPNKNSNVLRKRPKFEKFESMPDFLKTDGESTHKLRDYQLEGLNWMVYAWCKGNSSILADEMGLGKTIQSISLLASLFHRYDLAGPYLVVVPLSTMAAWQKEFAQWAPEMNLVVYMGDVVSRDMIRQYEWFVGGTKKMKINAILTTYEILLKDKAFLSSIDWAALLVDEAHRLKNDESLLYKSLTQFRFNHKLLITGTPLQNSLKELWALLHFIMPEKFDCWEEFETAHNESNHKGISALHKKLEPFLLRRVKKDVEKSLPPKTEQILRVDMTAHQKQFYKWILTKNYRELSKGVKGSINGFVNLVMELKKCCNHASLTRQYDHIYDDAQGRLQQLLKSSGKLILLDKLLCRLKDKGHRVLIFSQMVMMLDILQEYLQLRRFPSQRLDGSMRADLRKQALDHYNAPGSTDFAFLLSTRAGGLGINLATADTVIIFDSDWNPQNDLQAMSRAHRIGQTKTVNIYRLVTKGSVEEEIVERAKRKLVLDHLVIQRMDTTGKTVLSKNATASGSVPFDKQELSAILKFGAVELFKEKEGEEQEPEVDIDRILMGAETREAEEEVMKENELLSSFKYANFAIDEEKDIAAATDEWAAIIPEEDRNRILEEERMKELAEMNLAPRQRKQPIPQVVEDDDGDDDEEEDDTGKKKKKKAVGNFTIPEIKRFIKSFRKFSMPLNRLEEIAQDAELEEHSTDEMKKLVESLSEACKKAADEFDSNEKNGDAGAAESEKKDIERKFKFHTCDVNLKQIERSHAELKPLHEILKSEETKTSFKPPANAKLQKGWDVDWSRPDDSALLLGVWKYGYGSWEAIKMDPTLGLADKIFIKDKTKKPQGKNLQVRVDYLLKLMSKDKVKTTEKKERKRKADDVPVGPEKKKRHTNNVPQEGEKKKKEKKEEKNSSSLKDQLALLSIDKSLYGGALEDSSAKPFLECVKLCMPVHKYMKKLKEAQEAKNQADEAKYLTRLGDSFLENLETLIKKKPKTNIRKWYNYLWIFLCKFTLREPGEMADRYRSITSDKHKNHHHHHHHKSKEEKPKEAKDHKERDREKDRERNRGERRMDHGEGTSKDHHREHHKDHHKDHHHREQHKVFIKKTTTFF

SEQ ID NO: 8691 - protein, 1933 aa, Caenorhabditis elegans
MPATPVRASSTRISRRTSSRSVADDQPSTSSAVAPPPSPIAIETDEDAVVEEEKKKKKTSDDLEIITPRTPVDRRIPYICSILLTENRSIRDKFGKAKYREAQQARSNNYSASRRAVLSSGPVRQEDHEEQIARAQRIQPVVDQIQRVEQIILNGSVEDILKDPRFAVMADLTKEPPPTPAPPPPIQKTMQPIEVKIEDSEGSNTAQPSVLPSCGGGETNVERAAKREAHVLARIAELRKNGLWSNSRLPKCVEPERNKTHWDYLLEEVKWMAVDFRTETNTKRKIAKVIAHAIAKQHRDKQIEIERAAEREIKEKRKMCAGIAKMVRDFWSSTDKVVDIRAKEVLESRLRKARNKHLMFVIGQVDEMSNIVQEGLVSSSKSPSIASDRDDKDEEFKAPGSDSESDDEQTIANAEKSQKKEDVRQEVDALQNEATVDMDDFLYTLPPEYLKAYGLTQEDLEEMKREKLEEQKARKEACGDNEEKMEIDELKSQILLHILVVLLLSESPSSDAQKPSTSSSDLTAEQLQDPTAEDGNGDGHGVLENVDYVKLNSQDSDERQQELANIAEEALKFQPKGYTLETTQVKTPVPFLIRGQLREYQMVGLDWMVTLYEKNLNGILADEMGLGKTIQTISLLAHMACSESIWGPHLIVVPTSVILNWEMEFKKWCPALKILTYFGTAKERAEKRKGWMKPNCFHVCITSYKTVTQDIRAFKQRAWQYLILDEAQNIKNWKSQRWQALLNVRARRRLLLTGTPLQNSLMELWSLMHFLMPTIFSSHDDFKDWFSNPLTGMMEGNMEFNAPLIGRLHKVLRPFILRRLKKEVEKQLPEKTEHIVNCSLSKRQRYLYDDFMSRRSTKENLKSGNMMSVLNIVMQLRKCCNHPNLFEPRPVVAPFVVEKLQLDVPARLFEISQQDPSSSSASQIPEIFNLSKIGYQSSVRSAKPLIEELEAMSTYPEPRAPEVGGFRFNRTAFVAKNPHTEESEDEGVMRSRVLLKIANFRVRDDVIQNQLMEQLNHFKMEIHTTKCSNRPQTSCIRSKTVVNTVPLTISTDRSGFHFNMANVGRGVVRLDDSARMSPPLKRQKLTGTATNWSDYVPRHVVEKMEESRKNQLEIVRRRFEMIRAPIIPLEMVALVREEIIAEFPRLAVEEDEVVQERLLEYCELLVQRFGMYVEPVLTDAWQCRPSSSGLPSYIRNNLSNIELNSRSLLLNTSTNFDTRMSISRALQFPELRLIEYDCGKLQTLAVLLRQLYLYKHRCLIFTQMSKMLDVLQTFLSHHGYQYFRLDGTTGVEQRQAMMERFNADPKVFCFILSTRSGGVGVNLTGADTVIFYDSDWNPTMDAQAQDRCHRIGQTRNVSIYRLISERTIEENILRKATQKRRLGELAIDEAGFTPEFFKQSDSIRDLFDGENVEVTAVADVATTMSEKEMEVAMAKCEDEADVNAAKIAVAEANVDNAEFDEKSLPPMSNLQGDEEADEKYMELIQQLKPIERYAINFLETQYKPEFEEECKEAEALIDQKREEWDKNLNDTAVIDLDDSDSLLLNDPSTSADFYQSSSLLDEVRDRRRRSSSLLQKAAQKPAKKPQNFQIRARSPSKRKSQAPSFDPYVSYAPHALASPPDSPRKRRSRGARSLGSGGGGGGGSRSVGRPARRSVKKEESDDDDEDYCQEEEVKRNPAEKVPPKRKRVVFVEPPEVKPPEPKKRVVVPAPSSSSSALTTLPQQGPLISLPKAVPVVPRPQQQAPPQLIKKHQQTLMPVKVLKISGGGGGTPGPSSVSPGPSILRRTVVPGIGAGGVGRLPLVRMPVRPPFPGSQAPAPPLRSGVAPTAPAAAPRQFVVPSSRVRVITTRTPVATTMVQQQQSPSPLMFPVRVVQRPGPSGPPPPGPPDRPGFGIYEKPRFSLGSRRSRGDSGPEDPAPPQPPPPTTSRPPPQA

SEQ ID NO: 8692 - protein, 2957 aa, Caenorhabditis elegans
MSQMADYTMMGGPPPQQSQQSQQGVPQRYPGQPMNPYEQQQQHHQMMMMQQQHQMQHMAPPPQQVPPQPAQPPPAKKARGKSKKAQAEAAAAAAAAAAAQMDPMASMAAMSNNPMMRQGGYPNQMAMYGGVPPPHYPSSNGPSQQGYRPGPVTNGPPPQGQYPPPPQAPQNYQQMYHQQRAQQQQAGQQQAQGPPGYGPYGYAPQASTGYPPPPSQQSPYAPQAGPPPQMRHQYPPHSQQQAPPGYWDGYQGYGGPPPSQQQQQQGGGPVTAPQSMQMAQQEQWGRVGTNDLMNVIAQVEKSSAECKARIQQLYNMQRSASADAEVQQLQHKLAQFQSDHYRYSQQLQHVQWQQQQQQQQAAAAAAAAAAAASAGGHHQGPPPPTSSQSNQIPSNPNSVPVHVNQPGSQVHITADKTRTLISVYHDGYGGAGSGASSTESKESIVPPEPTPSMQESPVPNAPQVKMEPEKPSPYQQQYNGMENGSGNPYAQQQQQHPMYAQYQQQQQQHAQHQQNMSGYPQQQQQPQHPHQHQQPASVPMQHHPQQHPSQHQTQPNQQQQQHPSGYGIGVSTAPASMEPSQSVDQSAPPSQAQIPATSTPSTSSQQQNAYPEFPDFPSSSGYQEPTVAPEAIPSPSVSDPIMPQSSQNDQELQAISDQQEILEDVPKEEPIIEEDEPKYEYSQETIPVEELKDEVEFKEDQQSTSNLLEDDTGIDNFVKNEEGAEAGYSNGTPLDQVEQNDYENIEKEEPQVSVDPEPVEVEAQQEPADTEEYPIPSVGTIEEPAEEPAEEPVEEPEPMDDSSPVDQSTPVKADDIENFAGVEETFGEEEEVQDEDDDEASSAKSSKDDIKEEEDDDTSTITKDMSEAPSETNDGFTEPSTPATPLMGATSSKKKSYRRPAVVVAKSRKKKSVDDSDDDDFYPQRGRGKKKGGGGKKKADPTDEAGVEGAKSDDEDDEFLMKIDTPAPDPNAMVVEKILNMRMGKVEKKVPETEVAEGSEENGEEKSEEKVKKEPKENGENGESVGNGESSKSKTESETNEIEEEEVEQFLIKWKGRSYVHCEWKTAAELLEIDKRVEAKIKRFKVKKMSSYIEDDEDFNSDFVIVDRVVDLITEDDGQEFVLIKWKSLGYEEVTWEPIEMIPADKVELWRERQVIDPAKIREKQRPEPEEWKKMSTSKVWKNGNSLREYQFEGVDWLLYCYYNAQNCILADEMGLGKTVQTITFLSRIYDYGIHGPFLVVVPLSTIQNWVREFETWTDMNAIVYHGSAYAREVLQQYEVFYDKRHCGAKNWKKNFVKIDALITTFETVVSDVEFLKKIPWRVCVIDEAHRLKNRNCKLLVNGLLAFRMEHRVLLTGTPLQNNIDELFSLLNFLHPQQFDNSATFLEQFGSCQTDDQVQKLQEILKPMMLRRLKEDVEKSLGPKEETIIEVQLSDMQKKFYRAILERNFSHLCKGTSAPSLMNVMMELRKCCNHPFLINGAEEAIMNDFRLAHPDWDEETLAHKALIQASGKVVLIEKLLPKLRKDGHKVLIFSQMVKVLDLLEEFLISMSYPFERIDGNVRGDLRQAAIDRFSKENSDRFVFLLCTRAGGLGINLTAADTVIIFDSDWNPQNDLQAQARCHRIGQKKLVKVYRLITSNTYEREMFDKASLKLGLDKAVLQSTTALKAEGTALSKKDVEELLKKGAYGSIMDEENESSKFNEEDIETILQRRTQTITLEAGQKGSLFAKATFNSSHNKGDDIDIDDPEFWTKWAEKAQVDVEKATATPDGRELIIEEPRKRTKRFEENKDEGDSDGSEESGNRKRGAAEKRKRRRGNDEDGDYSGSYRPDELATSKAEYFKVEKVLAQYGWGRWAEIKKYGELEISEQDIEHMSRTLLLHCIREFRGDDRIRQFVFNLIRPQGIQENQKLGAGSMYNQGWAGLPEFNPPSFALDSAFQRHVHRHANKLMVKIDMLKHLEIHLIGDERALVEDFNVKWTDIKLPEMPTISETFIEGWDSDCDKCFLIGCWRHGLDNFDAIRVDENLCFAEKNLAVWPGQTDFWLRFRRLLTSSQKSVHDPVYNKLNWTKREEQEFIRVVRSYGVKTNIGEGGNEDWTIFKTLSPILEKKTDEDCHEQLMCVLAMCQRAQGSNDLKPIDLKRAMSIDPMPTRKAIKMMNRISLMRKVHTMVQTLSELNLELCETTGMPSGWCMQHDKELMEICDQCGLDQLAANVLNKPAFTKIVRPSETTLLRRLLEIVATIESGKWCGVADVETVNDSDSEDKKDMAAVAAAQAQFLRLQQQQQQQQQAAAVAASSSASRKASRKRPNNDNDAKMRAMQQMLMGQGGSGAAEYASMIALMLMPQMMAASGGQNMTAAQQQALNQMLTMLIAGAVQQQQQAQPSTSKGASSSQSSAQANQAAQAQAAAVALAQVAAAASASTSSADAQAVAQQQQVLEALLAMSMNPAALAALTGTSSSTGTSTPSAPKKSKPAPQKESTSSATAAAAAASAQAAALAAAQQQQQQAQQAQQAAQQAQSAKTQEELLILRLLELAGVGMQELAKLNTMSKDARVPMIHKQTRESLPVSKRPPIRDLTVFVMSNPEWSIDIPLFNEMSGNGTGSGAAPSSKAASSRPTPAATPLAVATPKPSTPKVEKSSATPSAPETPSASATCNIKIGESLQFDDMISVFNRKTGELLAASKWPKATELSAWLDANPDYNVHANSALFAHLSLGGAHSDRIGDATPAVTASVPSTPTPSTSASAANAQLMALALAQQVQQAQQTPSTPTSSKSRSATAAAQAAAAQAAASQQDAITKQQLEMLQMQMMLQQYQQAAALQSMLYGGYGMPTTSTAASSSSTANVASMAAMAAAAQAASTPTTSKQASASTSTPSTSAVASAQTPSTSVPSTSSQAAAAAASSANSGEDINPLLLTALMQNPAILQSMMLSDPSILAALAAAQQQQQQQQPSAKKSKHP

SEQ ID NO: 8693 - protein, 818 aa, Caenorhabditis elegans
MPKKTFENLEDSHGKDVNIPVELPKRKREVTPENLPSTSSTAPTQKRKSLGYSGRTEEPKNIHKTFISPFSTSVSPSKQGLRRRKKALPAIEPPVSVEEASPLRFVNIDVFSRRMASESSDHDAMIAKLLSRKFSIPMEGYMLSGRSLGLGGNRRKCALFDPYHEGALILYAPEHLSEHAQLKEDKDRKVHVVADPVVGKILRPHQRDGVKFMWDCVTGINIPEFHGCIMADEMGLGKTLQCISLLWTLLRQSPDACPTVSKSIIVCPSSLVKNWDKEIKKWLGTRLNAMPVDSGKREQIIACLNSFMADSKMRCAIPVLIISYETFRLYANILHSGDVGIVICDEGHRLKNSENLTYQALSGLKCARRVLISGTPIQNDLLEYFSLVNFVNPGLLGTASEFRKKFENAILKGRDADASSEDQKKGEEKTKEMISLVEKCIIRRTSALLTKYLPVKYEHIICCKNSTLQETLYNKLIECEKQNRIVEKDKGATASALSFITHLKKLCNHPYLVYDEFQKPDNRFRNKCLSIFPESFNPKSFDPSFSGKMKVLDYILAVTRKTTDDKFVLVSNYTQTIDQFMELCKLRGYDFVRLDGSMSIKQRSKIVDTFNDPASTIFCFLLSSKAGGCGLNLIGANRLVMFDPDWNPANDDQAMARVWRDGQKKMCFIYRLLATGSIEEKMFQRQTHKKALSSCVVDAGEDVARHFSSEQLRELFKLESTVASDTHEKLKCKRCIQGVESVDPPTNADCASDLSNWFHSQKSARKVADNVLRAVFECGSISFVFHQKSHNVEVKKVQEKVEEVDEDYVPSEAEENDD

SEQ ID NO: 8694 - protein, 1038 aa, Caenorhabditis elegans
MSTTSDFQTGERVRVAHQGNPQSSSLQADMDAKKALLSQNLNNGHLTARPPRTTGPGIKYGEKKPKKQKGSDDDDEDYVDETMPSEDEEDFDNNEEDEDDDDYEEEGPRKRKAPSKKKLVYPRENYRREDSETPEPEMKRIRTLSDSSDDEWMTKPRLNGSESPIGNVMRTQMAKRSAASKRKIVIDDESEDDFINDEEISEKGSGKGSEKEESEGSGKDSETEEVTMKQGQSLKAAMAKAQKEQKKKAESDEDWEEDEDDMNADGDETPSDDSDIEERRAKRGETKNQKECREFFNKAKKEDLLQQARINDKIADFVLANRPFEIYGAMVAKMKGVTRGTNAIEAYMEFLEKRGILSRILDDCKDHAHTVTKDFERCTEGPLQLPLLKEGCTLHDYQLIGVKWLIMMYNKDLNAILGDEMGLGKTIQIVAFLSYLKQIGKTGPHLIVVPSSTIENWIGEFHKWCPSIQLLTYYGSQDERKHLRHRVKKQKDHIDVILTTYNMVTSKSDDKKFFKNFSLNYVIYDEGHMLKNCDSERYRGLMKVKGKKKILLTGTPLQNNLIELISLMYFVLSKVFNKYCEDITHLLQHFKQLGPALDTKNKALYQQDRIEEAKAILQPYILRRLKNQVLGSLPSKSEQIIEVEMKKPQKQLYDNIVEALQQSEESGDSYGSLMRLRQAANHPLLRRSEYTDQKLDKIAKMLCLREKAYADKKWQHVSEDLAWLSDIKIHQLCERFRCTSKFLLNEQLALKSGKCEQLDVMLPEIQKKGDKVLIFSQFTSMLDILEVYLNIRGYSYKRLDGQTPVLDRQEMINEFNLSKDLFVFLLSTRAGGLGINLTSANHIIIHDIDFNPYNDKQAEDRCHRMGQEKPVHVTRLVSKGTVEVGMLALAKKKLQLEKQVTDGVKGQLDEVHFIENFKFLLEEIEIYRKFRKFDLFKSPNIPEIQKKKSKNSDFFTGKKYALRELKEEEGGEQCGGRDLSKLLSSAISGRYDDVEDDSGDSKNGIDAEEAAKKEDEAVKEPVEKEQQKEEESQPSTSA

SEQ ID NO: 8695 - protein, 1091 aa, Caenorhabditis elegans
MSSPRRTRIMFDTSSDDSQSDEKIDDFICRSSPQRQSKESDDQEDSVVDESMKSVNSPIVNTPSSTASHCTNSFATSTPKSKSNASTRLGSSYGSSRSSSQNHESHDRSRSFVQYDENKPLTPISKKLAESTDLRSKAQLRERLLRKSLKQNAEDSSPTRAASGGGWGSSADVKKSPEVSTGLFETALSPIAKSDRRSSEYNSSTFLNVQKVATSTAINDIGGREEIVDESFPAPRTTAKQDDSDIIEVTPEKVVSNEKRKSGIAINLDDSDIIDVTPVKTTSSRPPEPQRPRLPTSPINSEYAKLSYKELLAKKNKVMGLISLSLDLPDGGRRVIKQFQELDDEVERRKEMGLAEEIVDDDEDDEIFVIEDDEPSHRQVAPKFPSGSVMTQNGLLPKRHIVDPLKAPQPDFNAMLEKDNKKMMSGKMTDEKYKRIQLVSDRVVRQLAEATHTIPDETELTDTPKGFKLELMPHQKAGLTWMRWRETQPQPGGILADDMGLGKTLSMISLIAHQKAARRARREDGNDDKDKEKRKVVKEQGLIPSNGTLIVAPASLIHQWDAEIDRRLDDSVLSTYMFHGTKKQRDIDARRLARYDVVITTFNLIANELIEKIRTKSKADDSSDGESDSNHTGIRRAVGKDDSVLAQICWSRVILDEAHTIKNRQSLASKAVCRLSAFSRWCLSGTPIHNNLWDLYSLVRFLRIRPFSDDKYWKESIMPMKPIMADRVNLLTKNLLLRRTKDQTCAVTNQKLVQLPPKNVEVHELELDGDEAQAYEIMMEAAKKFVKKLLQDSNDMKNHGFIPRRNRRAGKEGEVQNPFNFGPRDLAAGSNFEKMSCVLMLLLRLRQACVHFNITKTGVDMDAFSLIGGDNAEEANVDDLNELLEKTMNMTLGNGDNEERDKPRATTRIFDPDYLSCKIKNTLEIVENIMEKKEKVVIVSQWTSVLNLIEIHIKSSGFKYTSITGQVLVKDRQERVDSFNREKGGARVMLLSLAAGGVGLNLTGGNHLVMVDLHWNPALEQQAFDRIYRMGQKKDVFIHRLVTKGTIEQRVVMLQKDKVALASSVLDGNATRKMNKLTTADIKMLFGLNEK

SEQ ID NO: 8696 - protein, 751 aa, Caenorhabditis elegans
MSRVVLNVDSYEGNDTPSAEIARFVVLYGKASTRKHKIWEGDGLLVCFTDSCLLKSEDERDVICSSQNLSQNDPPPSYRRLLAPRAPPPAAPAPPQFRRKSLHLYSTNRIFSIEKPRQQSLWTRDSRDISDLIRNLEFNLFSIGLGEAPGKTVVVAEQFSPTIWDSERVYRRWLPRSKTAQQLANSCLIIVPSSLVNNWKAEFDKWWRLMRFPAVIALTANDITTYQSTIKLMPYLVISYDLAQRHVEKLKIIRFDVMVCDEGHKLKNLDGKLRKTLLSLEIPRRLILTGTPMQNDFEEFYSLLDFVRPSVFGSIVEFRKMCSDRPEQLNELIDECMLRRTAADVDLKHLPEKHEYILFCAASPIQKHVHSEICDYMTGDALSLIFFARQLANHPKLLLDNLREKTEKSKAHKHSPLLLAFDGAHMPRGGVKESGKLTALVDMIKCFRLLQECTVIVSNYIETLDMIQQLCEYLNFKVLRLDGKTQVPDRQKLVRTFNDHRDPSNIFLLSTKAGGVGLNLIGASRLVLFDSDWNPANDQQAMARIWRDGQVRPCHIYRLITTGTIEEKMLQRQIKKTGLGCVIDAIEVGDTIATFTDEDLKDIFTFTGSATECNTHDLCECPCDGCGMLENEMDEEDDGDDVVENDAEKIDKSGKIDKIDSDDDEEADDEELEADVTDEVVEDSQEPPEATKPAVAAAGLRTIASLAELSRWRHFSPRHADTWHHFMTNAGLSQVDTDVELTFAFYQESQY

SEQ ID NO: 8697 - protein, 687 aa, Caenorhabditis elegans
MVLTDEQRQAIAKKREEAIRRAAAYREREMQAAANATASTSSAAPPAPPKPVIPVMFSQNRQPMKPTMNNSTKQSTINNYIKQVQKPEPTSLIKPTIGVKLKLDIGDRIKIEFYPFHSAVIDLIKQVPSRNYDPAKRSWTVASSDHITISNILKNATAVKVELEPLPQNIIGLTNFKPKAAPSDLNTVMDPSLIERLFPYQKEGVIFALERDGRILLADEMGLGKSVQALTIARYYKADWPLLIVCPASVKGAWKKQLNTFFPIIHRIFIVDKSSDPLPDVCTSNTVAIMSYEQMVLKHDILKKEKYRTIIFDESHMLKDGKARRTKVATDLSKVALHVILLSGTPALSRPSELFTQIRLIDHKLFTNFHEFAIRYCDGKQGRFCFEAKGCTNSEELAAIMFKRLMIRRLKADVLKDLPEKRREVVYVSGPTIDARMDDLQKARADYEKVNSMERKHESLLEFYSLTGIVKAAAVCEHILENYFYPDAPPRKVLIFAHHQIVLDTIQVEVNKRKLGSIRIDGKTPSHRRTALCDSFQTDDNIRVAVLSITAAGVGITLTAASVVVFAEIHFNPGYLVQAEDRAHRVGQKDSVFVQYLIAKKTADDVMWNMVQQKLDVLGQVSLSSDTFRTADKMHLRFNDAAQPGIAEYLKKTPDTTIDEWEDPVEEKEDDDLEIICDSPAPKRIKN

SEQ ID NO: 8698 - protein, 690 aa, Caenorhabditis elegans
MVLTDEQRQAIAKKREEAIRRAAAYREREMQAAANATASTSSAAPPAPPKPVIPVMFSQNRQNFQPMKPTMNNSTKQSTINNYIKQVQKPEPTSLIKPTIGVKLKLDIGDRIKIEFYPFHSAVIDLIKQVPSRNYDPAKRSWTVASSDHITISNILKNATAVKVELEPLPQNIIGLTNFKPKAAPSDLNTVMDPSLIERLFPYQKEGVIFALERDGRILLADEMGLGKSVQALTIARYYKADWPLLIVCPASVKGAWKKQLNTFFPIIHRIFIVDKSSDPLPDVCTSNTVAIMSYEQMVLKHDILKKEKYRTIIFDESHMLKDGKARRTKVATDLSKVALHVILLSGTPALSRPSELFTQIRLIDHKLFTNFHEFAIRYCDGKQGRFCFEAKGCTNSEELAAIMFKRLMIRRLKADVLKDLPEKRREVVYVSGPTIDARMDDLQKARADYEKVNSMERKHESLLEFYSLTGIVKAAAVCEHILENYFYPDAPPRKVLIFAHHQIVLDTIQVEVNKRKLGSIRIDGKTPSHRRTALCDSFQTDDNIRVAVLSITAAGVGITLTAASVVVFAEIHFNPGYLVQAEDRAHRVGQKDSVFVQYLIAKKTADDVMWNMVQQKLDVLGQVSLSSDTFRTADKMHLRFNDAAQPGIAEYLKKTPDTTIDEWEDPVEEKEDDDLEIICDSPAPKRIKN

SEQ ID NO: 8699 - protein, 866 aa, Caenorhabditis elegans
MSEAETGEPNGFRSCYDKLRKAVGNIPMDASKSTKLHNLSSRKISEILPNLYLSGRTVSQNSELLKEKNITTVINVSDREVVNYKNNQKFIKNYRFYAMSDTASAKFDGIIEEAVRIIHDSRSKEEGVLVHCFLGVSRSATLVAFYLISALSINWRDAVDFIHHRRFSANPNFGFLHQLKVYSTTKAKEFRNQLISERCLRMRESDKDIIKKYLPLAQAAANATASTSSAAPPAPPKPVIPPMKPTMNNSTKQSTINNYIKQVQKPEPTSLIKPTIGVKLKLDIGDRIKIEFYPFHSAVIDLIKQVPSRNYDPAKRSWTVASSDHITISNILKNATAVKVELEPLPQNIIGLTNFKPKAAPSDLNTVMDPSLIERLFPYQKEGVIFALERDGRILLADEMGLGKSVQALTIARYYKADWPLLIVCPASVKGAWKKQLNTFFPIIHRIFIVDKSSDPLPDVCTSNTVAIMSYEQMVLKHDILKKEKYRTIIFDESHMLKDGKARRTKVATDLSKVALHVILLSGTPALSRPSELFTQIRLIDHKLFTNFHEFAIRYCDGKQGRFCFEAKGCTNSEELAAIMFKRLMIRRLKADVLKDLPEKRREVVYVSGPTIDARMDDLQKARADYEKVNSMERKHESLLEFYSLTGIVKAAAVCEHILENYFYPDAPPRKVLIFAHHQIVLDTIQVEVNKRKLGSIRIDGKTPSHRRTALCDSFQTDDNIRVAVLSITAAGVGITLTAASVVVFAEIHFNPGYLVQAEDRAHRVGQKDSVFVQYLIAKKTADDVMWNMVQQKLDVLGQVSLSSDTFRTADKMHLRFNDAAQPGIAEYLKKTPDTTIDEWEDPVEEKEDDDLEIICDSPAPKRIKN

SEQ ID NO: 8700 - protein, 686 aa, Caenorhabditis elegans
MVLTDEQRQAIAKKREEAIRRAAAYREREMAAANATASTSSAAPPAPPKPVIPVMFSQNRQPMKPTMNNSTKQSTINNYIKQVQKPEPTSLIKPTIGVKLKLDIGDRIKIEFYPFHSAVIDLIKQVPSRNYDPAKRSWTVASSDHITISNILKNATAVKVELEPLPQNIIGLTNFKPKAAPSDLNTVMDPSLIERLFPYQKEGVIFALERDGRILLADEMGLGKSVQALTIARYYKADWPLLIVCPASVKGAWKKQLNTFFPIIHRIFIVDKSSDPLPDVCTSNTVAIMSYEQMVLKHDILKKEKYRTIIFDESHMLKDGKARRTKVATDLSKVALHVILLSGTPALSRPSELFTQIRLIDHKLFTNFHEFAIRYCDGKQGRFCFEAKGCTNSEELAAIMFKRLMIRRLKADVLKDLPEKRREVVYVSGPTIDARMDDLQKARADYEKVNSMERKHESLLEFYSLTGIVKAAAVCEHILENYFYPDAPPRKVLIFAHHQIVLDTIQVEVNKRKLGSIRIDGKTPSHRRTALCDSFQTDDNIRVAVLSITAAGVGITLTAASVVVFAEIHFNPGYLVQAEDRAHRVGQKDSVFVQYLIAKKTADDVMWNMVQQKLDVLGQVSLSSDTFRTADKMHLRFNDAAQPGIAEYLKKTPDTTIDEWEDPVEEKEDDDLEIICDSPAPKRIKN

SEQ ID NO: 8701 - protein, 534 aa, Caenorhabditis elegans
MPKKTFENLEDSHGKDVNIPVELPKRKREVTPENLPSTSSTAPTQKRKSLGYSGRTEEPKNIHKTFISPFSTSVSPSKQGLRRRKKALPAIEPPVSVEEASPLRFVNIDVFSRRMASESSDHDAMIAKLLSRKFSIPMEGYMLSGRSLGLGGNRRKCALFDPYHEGALILYAPEHLSEHAQLKEDKDRKVHVVADPVVGKILRPHQRDGVKFMWDCVTGINIPEFHGCIMADEMGLGKTLQCISLLWTLLRQSPDACPTVSKSIIVCPSSLVKNWDKEIKKWLGTRLNAMPVDSGKREQIIACLNSFMADSKMRCAIPVLIISYETFRLYANILHSGDVGIVICDEGHRLKNSENLTYQALSGLKCARRVLISGTPIQNDLLEYFSLVNFVNPGLLGTASEFRKKFENAILKGRDADASSEDQKKGEEKTKEMISLVEKCIIRRTSALLTKYLPVKYEHIICCKNSTLQETLYNKLIECEKQNRIVEKDKGATASALSFITHLKKLCNHPYLVYDEFQKPDNRFRNSEFRISDL

SEQ ID NO: 8702 - protein, 1009 aa, Caenorhabditis elegans
MASFRKNHVIIDSSDSSEDEDRKERHSSSSEVDETASMRSTDSSEPPRTIIDASLNSMASTVYTSTPNSKQSISRTGSSTTYGSSKCSTDDHYRSRSFIDNSFEKPVTPITKKLQESDEPRAKQQLRERLLRKSIKQQSDQDLTGGSSRSGWGTGENSSLESSDLINSHFSPIAKTFRHASDLDDSMNTSPPPNRSTLPSVETSSGNSPQTPYPGSPEASPQPSPPKNTASELQKLSIKELEANKDKKLKLLKFSSNLPDNGARVKLQVDEITEEIERRIINGVTDTMVVDKTTAIPPPPQPKNLIAPIPQDFAAMLDKNGRKVMSGRMTEQKILKVNKISDRLMQQLADATHTIPAETDLTDTPDGLLVELMPHQKAGLRWLVWREGQPHSGGILADDMGLGKTLSMLSLIVHQKAARRARKESGDNAADKEKRRVAKEEGLYPSNGTLIIAPASLIHQWEAEINRRLESDLLSVFMFHGTKKQRQIEPKELARYDVVITTYTLAANELMEKKAAGSKKEEDSDDESENEENPRRPAGKNDSPLARVAWSRVILDEAHAIKNRLSQCSKAVCRLSSFSRWCLSGTPIHNNLWDLYSLVRFLRIPLFGDRKFWAESIMPMKTGMADRVNLLTKNLMLRRTKDQQCALTNKKIVNLKEKKIEIHELEMVGDEANGYAIMMEAAQKLVKQIVTNTDDIQKYGQIRRRRQRGNDDEFANPYNVGPRNLAGNSNFQNMSCILLLLMRLRQACVHFHITKSGMDLDAFKINGGDDEDADMKELENLMEKTMADLTIADSDNDEEGVDTNKEEPKQPPTRIFEPDFISCKMAKTLEVVREILEKKEKVVIVSQWTSVLNLVEKHIQAGGHNYTSITGQVLVKDRQERVDSFNQEKGGAQVMLLSLTAGGVGLNLIGGNHLIMVDLHWNPALEQQACDRIYRMGQKKEVFIHRLNISKFCRLIVKGTIEQRVMDLQEKKLALAASVLEGTATRKLNKLTTADIRMLFGLDGSSNAN

SEQ ID NO: 8703 - protein, 722 aa, Caenorhabditis elegans
MVVDKTTAIPPPPQPKNLIAPIPQDFAAMLDKNGRKVMSGRMTEQKILKVNKISDRLMQQLADATHTIPAETDLTDTPDGLLVELMPHQKAGLRWLVWREGQPHSGGILADDMGLGKTLSMLSLIVHQKAARRARKESGDNAADKEKRRVAKEEGLYPSNGTLIIAPASLIHQWEAEINRRLESDLLSVFMFHGTKKQRQIEPKELARYDVVITTYTLAANELMEKKAAGSKKEEDSDDESENEENPRRPAGKNDSPLARVAWSRVILDEAHAIKNRLSQCSKAVCRLSSFSRWCLSGTPIHNNLWDLYSLVRFLRIPLFGDRKFWAESIMPMKTGMADRVNLLTKNLMLRRTKDQQCALTNKKIVNLKEKKIEIHELEMVGDEANGYAIMMEAAQKLVKQIVTNTDDIQKYGQIRRRRQRGNDDEFANPYNVGPRNLAGNSNFQNMSCILLLLMRLRQACVHFHITKSGMDLDAFKINGGDDEDADMKELENLMEKTMADLTIADSDNDEEGVDTNKEEPKQPPTRIFEPDFISCKMAKTLEVVREILEKKEKVVIVSQWTSVLNLVEKHIQAGGHNYTSITGQVLVKDRQERVDSFNQEKGGAQVMLLSLTAGGVGLNLIGGNHLIMVDLHWNPALEQQACDRIYRMGQKKEVFIHRLNISKFCRLIVKGTIEQRVMDLQEKKLALAASVLEGTATRKLNKLTTADIRMLFGLDGSSNAN

SEQ ID NO: 8704 - protein, 1026 aa, Caenorhabditis elegans
MASFRKNHVIIDSSDSSEDEDRKVCSSLTFEFCFKIIEFQERHSSSSEVDETASMRSTDSSEPPRTIIDASLNSMASTVYTSTPNSKQSISRTGSSTTYGSSKCSTDDHYRSRSFIDNSFEKPVTPITKKLQESDEPRAKQQLRERLLRKSIKQQSDQDLTGGSSRSGWGTGENSSLESSDLINSHFSPIAKTFRHASDLDDSMNTSPPPNRSTLPSVETSSGNSPQTPYPGSPEASPQPSPPKNTASELQKLSIKELEANKDKKLKLLKFSSNLPDNGARVKLQVDEITEEIERRIINGVTDTMVVDKTTAIPPPPQPKNLIAPIPQDFAAMLDKNGRKVMSGRMTEQKILKVNKISDRLMQQLADATHTIPAETDLTDTPDGLLVELMPHQKAGLRWLVWREGQPHSGGILADDMGLGKTLSMLSLIVHQKAARRARKESGDNAADKEKRRVAKEEGLYPSNGTLIIAPASLIHQWEAEINRRLESDLLSVFMFHGTKKQRQIEPKELARYDVVITTYTLAANELMEKKAAGSKKEEDSDDESENEENPRRPAGKNDSPLARVAWSRVILDEAHAIKNRLSQCSKAVCRLSSFSRWCLSGTPIHNNLWDLYSLVRFLRIPLFGDRKFWAESIMPMKTGMADRVNLLTKNLMLRRTKDQQCALTNKKIVNLKEKKIEIHELEMVGDEANGYAIMMEAAQKLVKQIVTNTDDIQKYGQIRRRRQRGNDDEFANPYNVGPRNLAGNSNFQNMSCILLLLMRLRQACVHFHITKSGMDLDAFKINGGDDEDADMKELENLMEKTMADLTIADSDNDEEGVDTNKEEPKQPPTRIFEPDFISCKMAKTLEVVREILEKKEKVVIVSQWTSVLNLVEKHIQAGGHNYTSITGQVLVKDRQERVDSFNQEKGGAQVMLLSLTAGGVGLNLIGGNHLIMVDLHWNPALEQQACDRIYRMGQKKEVFIHRLNISKFCRLIVKGTIEQRVMDLQEKKLALAASVLEGTATRKLNKLTTADIRMLFGLDGSSNAN

SEQ ID NO: 8705 - protein, 518 aa, Caenorhabditis elegans
MNVSDPSKNEYSKEIRRTVSSEIIGQSRSPMTLENQPVSPMTKRRRLENMDRTITEQMVEDEIVATAISPPSQPKNVVVPIPQDFAAMLTNSWTKPIRGPMTEKKKLKINETFNKLTQQLADATHTIPAETDLTETPDGFLVDLMPHQKAGLCWLLWRESQPHSGGILGGDMGLGKTLSMISLIVHQKAARKTRKDAGDDAIAPESLVHHWEAEIARRLKQDLLSVLVYHGNRRHINPKDLKKHIELDYDLEDEHNPCSKLRPRVCPKADKNSSPLARIAWSYVILDEAHIIKNRNAQCSEAACKISAFSRWCLSGTPIHNNMRRKKIVHLMEKNIVIHKLEMVGQEAKGFAMMMEAALSLSPNGLLFCVSCKDIQEGGHGYTSITGEVAIKDRQERVDSFNQEKGGAQDMLLSLTAGGVGLNLIGGNHLIMVDLHWNPALEQQACDRIYRMGQKKEVHIHRLIVKETIEQRVMSLQEKKLALAASVLEGSATRGMNKLTNSDIRTLFGLDEEFELDT

SEQ ID NO: 8706 - protein, 1274 aa, Caenorhabditis elegans
MSEEIDENTMKEEQEEEERDEIEEKEEKPDAQQQELLNIRIPTQTKKSLKRKHIKTDFGAEDLDENVLEAQRLEKQRLERLEKIKPENDHIQQMESLFLAGASEGQLPQLDLQDDDFEEMFGFSVENDNKKYRYGDEEKPEPMFHLQEPSTSRGHVDVVDLTLDDSDDDCLITDVKSVMPQVVPGRRMRWAQAEKDRIDADQMDIQHNIEARRLKKMRSAKDLESTEKKEGRLLVNAGHPEEDPDIFVISHLTHVLQPHQLGGIRFMYDNTIESLGEYKKSDGFGCILAHSMGLGKTIQVITFSEIFLRATKAKKVLVIVPINTIQNWYSEYDKWIPKFSDTGDRIRSFEVFLLGDGVKTFDQRVNLIEQWDQTGGVMLVGYDMFRLLIKMTLPKKQKKGRPKLNLSGISSGFSKDSSEDQKLRDEELEFETGFTSGGRVRQEAYSLIRSALLEPGPDLVVCDEGHKIKNITAEISMTLGAINTKRRIVLTGYPLQNNLLEYFCMIDFVRPKYLGTRKSFIDRFEKPIKNGQCVDSSPDDVKIALQRTHVLVELVKGFVQRRTHHLLKKILPESKEYVLLLRKSQIQRQLYRNFVLWAKNEIAANNDAVFNPLMAFSACSKIWNHPDILYRLVEQKKRAEEDKKRVEQMKFAQLQQQQQQQQQQLQGMMMMGNNGMMPGFGAQFHPQQNGMMMQNGSWHPNNYQMPSPFNSIPSNPSTPTSSSTSKSAKKTKKPRGSKKAPKSDEEDEEVEKESRMKYDWTFELFEKYQEGVLENGYKIVISLEILDESTQIGEKILIFSQNLTALDMLEEILKKRQIRGKDGPGQRWEKNRNYLRLDGTTSGADREKLINRFNSEPGLSLFLISTRAGSLGINLVSANRCIIIDACWNPCHDAQAVCRVYRYGQQKKTFVYRLIMDNSMERSIFNRQISKHGLQQRVVDDAQVDANISQKELETLLMYDEAQDVNHDKWNTDDWDFGDPVLDSITKRMSQMFAGKPFLHETLIMESEQSLSEQEKREAQLLFDRERRMENYDPLSGLSSSNFYNNAPGSSMGMMGPPPVPMFNNNMQNSFNNHWQQSPNQLAPNFGSYPPQQFPQPMPNMSQFPPHGPSPQIPSIRPSPMPHTLRMNVSQFHHQGGGHTMTSFNNGYPNNNNGGAIGNPQQMLPPRDPSAFPGAVMSKIPSFSPAGAVQQLITDRQLVFPIVGHRDQLHQVQANTPIQLVVPKNGYYVKLRDGTILDAVGSVFENHARQLRDMYLSKNFNHDPQQVQEVIDLD

SEQ ID NO: 8707 - protein, 1359 aa, Caenorhabditis elegans
MRVGVSESEDSDGHVIEDEDLEMARQIENERKEKRAQKLKEKREREGKPPPKKRPAKKRKASSSEEDDDDEEESPRKSSKKSRKRAKSESESDESDEEEDRKKSKSKKKVDQKKKEKSKKKRTTSSSEDEDSDEEREQKSKKKSKKTKKQTSSESSEESEEERKVKKSKKNKEKSVKKRAETSEESDEDEKPSKKSKKGLKKKAKSESESESEDEKEVKKSKKKSKKVVKKESESEDEAPEKKKTEKRKRSKTSSEESSESEKSDEEEEEKESSPKPKKKKPLAVKKLSSDEESEESDVEVLPQKKKRGAVTLISDSEDEKDQKSESEASDVEEKVSKKKAKKQESSESGSDSSEGSITVNRKSKKKEKPEKKKKGIIMDSSKLQKETIDAERAEKERRKRLEKKQKEFNGIVLEEGEDLTEMLTGTSSQRKLKSVVLDPDSSTVDEESKKPVEVHNSLVRILKPHQAHGIQFMYDCACESLDRLDTEGSGGILAHCMGLGKTLQVITFLHTVLMHEKIGEKCKRVLVVVPKNVIINWFKEFQKWLVDNDEELDTIDVNELDSYKTIEDRRRALKAWHSSKTPSVMIIGYDLFRILTVEDDPKKKKPKNRNRRLEKAKEDFRKYLQNPGPDMVVCDEAHKLKNDDSALSKCMVKILTKRRICLTGTPLQNNLMEYHCMVNFVKPGLLGTKTEFANRFVNIINRGRTKDASPLEVSFMKRRCHVLYDHLKKCVDRKDYRVLTEAIPPKQEYVINVRQTERQCALYNAFLNDIVGDSGLSKRLLPDYHMFSRIWTHPYQLVLHEQRMERERVMREDAEEEADFIDDGDGSESESEGSFKSGSESDSGKSVVLSSDDEGSSKKKKNGNKPEIKKTAPQKKRKFLNSDDEDEEDGEDTAMAILQDGIRQSKRLAGEEADLRDTDTPPEYTGWFARLGLVKEEDRDDFALSNKLILLVEIIKKCEEIGDKLLVFSQSLESLTLIKRMLEYMAGTGQWFADGHEALNAEGEETWSWLEGEDYMTIDGSVQSGKRDAVQTSFNDPLNLRARLMLISTRAGSLGTNMVAANRVIIFDACWNPSHDTQSLFRVYRFGQTKPVYIYRFIAQGTMEERIYKRQVTKESTSMRVVDEAQIQRHYLGNDLTELYQFTPSTFDPDVEISCAPPKDRLLADVIHKNQHAVVDYIEHDTLFANVEDEKLTEQEMKDAWTDYEKDKSGMPVRAQYAAPPMPGFPNGMIVGQNVQALLQNRMNQGIRVDQMQHDILFKELQKMRIKDAGTAVKIVLLRNLLEQILPYIPDEMRGGMSEFNTHFIRLVHETDRKMETPADLLRKSLESFKTVIKMVKMIPTCREPLARMTRDYPYLFA

SEQ ID NO: 8708 - protein, 1359 aa, Caenorhabditis elegans
MRVGVSESEDSDGHVIEDEDLEMARQIENERKEKRAQKLKEKREREGKPPPKKRPAKKRKASSSEEDDDDEEESPRKSSKKSRKRAKSESESDESDEEEDRKKSKSKKKVDQKKKEKSKKKRTTSSSEDEDSDEEREQKSKKKSKKTKKQTSSESSEESEEERKVKKSKKNKEKSVKKRAETSEESDEDEKPSKKSKKGLKKKAKSESESESEDEKEVKKSKKKSKKVVKKESESEDEAPEKKKTEKRKRSKTSSEESSESEKSDEEEEEKESSPKPKKKKPLAVKKLSSDEESEESDVEVLPQKKKRGAVTLISDSEDEKDQKSESEASDVEEKVSKKKAKKQESSESGSDSSEGSITVNRKSKKKEKPEKKKKGIIMDSSKLQKETIDAERAEKERRKRLEKKQKEFNGIVLEEGEDLTEMLTGTSSQRKLKSVVLDPDSSTVDEESKKPVEVHNSLVRILKPHQAHGIQFMYDCAFESLDRLDTEGSGGILAHCMGLGKTLQVITFLHTVLMHEKIGEKCKRVLVVVPKNVIINWFKEFQKWLVDNDEELDTIDVNELDSYKTIEDRRRALKAWHSSKTPSVMIIGYDLFRILTVEDDPKKKKPKNRNRRLEKAKEDFRKYLQNPGPDMVVCDEAHKLKNDDSALSKCMVKILTKRRICLTGTPLQNNLMEYHCMVNFVKPGLLGTKTEFANRFVNIINRGRTKDASPLEVSFMKRRCHVLYDHLKKCVDRKDYRVLTEAIPPKQEYVINVRQTERQCALYNAFLNDIVGDSGLSKRLLPDYHMFSRIWTHPYQLVLHEQRMERERVMREDAEEEADFIDDGDGSESESEGSFKSGSESDSGKSVVLSSDDEGSSKKKKNGNKPEIKKTAPQKKRKFLNSDDEDEEDGEDTAMAILQDGIRQSKRLAGEEADLRDTDTPPEYTGWFARLGLVKEEDRDDFALSNKLILLVEIIKKCEEIGDKLLVFSQSLESLTLIKRMLEYMAGTGQWFADGHEALNAEGEETWSWLEGEDYMTIDGSVQSGKRDAVQTSFNDPLNLRARLMLISTRAGSLGTNMVAANRVIIFDACWNPSHDTQSLFRVYRFGQTKPVYIYRFIAQGTMEERIYKRQVTKESTSMRVVDEAQIQRHYLGNDLTELYQFTPSTFDPDVEISCAPPKDRLLADVIHKNQHAVVDYIEHDTLFANVEDEKLTEQEMKDAWTDYEKDKSGMPVRAQYAAPPMPGFPNGMIVGQNVQALLQNRMNQGIRVDQMQHDILFKELQKMRIKDAGTAVKIVLLRNLLEQILPYIPDEMRGGMSEFNTHFIRLVHETDRKMETPADLLRKSLESFKTVIKMVKMIPTCREPLARMTRDYPYLFA

SEQ ID NO: 8709 - protein, 951 aa, Nostoc punctiforme
MAILHSNWLLKSQKGCLFIWGETWRSPRVNFESNGSGDIPLNPLAMTSLELSEWLVSQKMAITNFIQQPQIAIATTGRTRKAATATEINLPTHSQIIALPTYIPEESAEGTSAIFPVHSASLRLETDSPQYLQPWLVEGFCLNPSEAVKFLAAVPLNAAKGEDAFLGGDLRFWSQVSRWSLDLISRCKFLPRIERQSDGAFAAKWQVLLDSAVDGTRLEKFSADMPLVCRTYQEGVGTGDWGLRTGEEFSQSLIPNSQSLLYVNFPTEPQELLLGFLNSTIDAQVRGMVGSQPPMEAKAMASLPSGVRQWLQGLTSTSGTVNADAIEVERLEAALKAWMMPLQYQLTLKTLFRTCFQLRSPEAGETDWTLAYFLQAADDPDFLVDAATIWNNPVERLVYENRTIEQPQETFLRGLGVASRLYPAIAPSFETEYPQSSRITPMQAYEFIKAVAWRLEDSGLGVILPPSLANREGWANRLGLKITAETPKKKQGRLGLQSLLNFQWQLAIGGQTISKAEFDKLVALNSPLVEINGEWVELRPQDIKTAQTFFTTRKDQMALSLEDALRFSTGDTQVIEKLPVVSFEASGALQELIGALNNNQAIAPLPTPVGFKGQLRPYQERGAAWLSFLERWGLGACLADDMGLGKTIQFIAFLLHLKEQDALENSTLLVCPTSVLGNWEREVNKFAPSLKILQYHGDKRPKGKAFLEAVKNHDLIVTSYSLLHRDIKSLQSVPWQIIVLDEAQNVKNPEAKQSKAVRQLEATFRIALTGTPVENRLQELWSILDFLNPGYLGNKQFFQRRFAMPIEKYGDTASLGQLRSLVQPFILRRLKSDREIIQDLPDKQEMTVFCGLTADQAALYQQVVEQSLVEIESAEGLQRRGMILALLIKLKQICNHPAQYLKQATLEQHNSAKLLRLEEMLEEVLAESDRALIFTQFAEWGKLLKPKSVEC

SEQ ID NO: 8710 - protein, 1403 aa, Nostoc punctiforme
MINLATDTTKLQIQLADKYFKLHPSIQKIIQLFSVIYAPIDKNSFVSCLSKIDALDENNKPWVTKTLSSQIDKLLKAGLLIQESRQGAECHPLLTEIATRHAVQTGQFETLVTAVEEKLPIRTHWNRDSRIFYNLRQCIREIRIGIYRQDLSFINQQIEAYQKYSDSEEKIVIEDIFEQIYNNPFDADWFNTLPQGLYESGISSILFNSALKLSASEDALMLLEEECSTPGKHCSDYLHLILTEQLLLQGCTQEAQESLGRISNEYQNNAAIFWGWLSFLRGDNEQAIKYYKDALKAIKKATGKRQIYFNTIGGLFFILALLKDGSAQSLREAEEYTSLMSRQSDHWLRFTYGRLKMVLQVHQGDITQKQFVVSGHISSVEEENSLQTLFCSLCLYWMDAESAKKRLLNLLEPLYRRSLASGYHWLAMETAELLSRLKPSSNYKQLAEALREDSNIQTIVDLIRPQEAWEMCLNALANLQKEPQTPGKPESELRLAWFITFYPSRCVLQPREQKVNAKGEWSKGRPIALKRLSSALSEFDYITPQDMRVCSCIEAYSDGYYGKVDYTFGEKAISALIGHPLVFWEDTLTIRVEIVKGEPELLVKKEKLGRLTLEFSPKLPESQNILHIKETPTRIKVIEITAEHRRIAEIIGIDNKLNVPAIAEKQVLAAINAVSGIVTVHSDIGGGSEGAEKVPAQTLPHIHLLPANAGLKISLLSRPFAQGGPYYRPGAGGETVIAEIDGKRLQTRRNLSEEKQLAKDAVAACATLTRTEEQDGEWIIEHLEDCLELLLELQELGNNVVIEWPQGEKLRVSHNADLKDFNLSIQRQQDWFAATGELKLNNDLVLDMQQLLELLEKTPSRFIPLGDGQFLALTQAFRKRLDELRMFSEKHSKGIRFHPLATLGLEDFVDEVGKVKADKHWKTHIQRLHEVKNLQPELPSTLQAELRDYQMEGFCWLARLAHWGVGACLADQMGLGKTLQALAVILRNAHEGPTLIIAPTSVCMNWVSEAQKFAPTLNIIQFSGANRQKLLDGLQPLDMLVCSYGLLQQEEVAQMLSQIQWQTIVLDEAQAIKNMTTKRSQAAMNLKSNFKLLTTGTPIENHLGELWNLFRFINPGLLGSFESFNQRFATPIEKYQDKLARNKLKKLIQPFLLRRTKNQVLEELPSRTEILLHVELSQEEKAFYEALRRQAISKLTESDAEAGKKHLQVLAEIMKLRRACCNPSLVMPGTELPSSKLQLFGEVLGELLENRHKALVFSQFVDHLHIIRDYLEQQGINYQYLDGSTSVAERKKRVDAFQAGSGDVFLISLKAGGTGLNLTAADYVIHTDPWWNPAVEDQASDRAHRIGQQRPVTIYRLVAKDTIEEKIVELHHHKRDLADSLLEGTEMSGKISTEALLQLISES

SEQ ID NO: 8711 - protein, 1403 aa, Nostoc punctiforme
MTKLANDTTNLQTKLANQYFDLDSSVQKVIQLLAIIYAPVDKNSLLSCLSKMGALDEKNKLWVTKTLSPQIDKLLKVGLLVQSGRQSPECHPLLTEIATRHAVQTGQFEIQVIAVESKFPIRTHWNHDSRIFYSLRQCIREIRIGIYRQDLNFINKQIEDYQKYADSEEKLVIENIFEQIFNNPFDADGFNTLPQGLYESGISSIFLNCALKLSVSEDALMMLSEQCSTGGKHCSDYLHLILTEQLLLQGCTQEAQESLERVSNEYQNNAAIFWGWLSFLRGENEQAIKYYTDALKAIKKATGKRQIYFNTMGGLFFILALLKDGSAQRLKEAEEYTNLMSRQGDHWLRFIYGRLKTVLQVHQGDITQKQFVLSAHISSVEEENSLQTLFCSLCLYWMDAEGAKKRLPKLLEPLYQRSFASGYHWLAMETAELLSRLKPSSKYQKEAEALREDSNIQTIVDLIRPQEAWEMCLNALANLQKQPQTSLKPESQLRLAWFITFYPSKCVLQPKEQKVNAKGEWSKGRPIALKRLSSGLAEFDYVTPQDMRVCSCIEVYSEGYYGKVDYTFGEKAISALIGHPLVFWEDMPNIRVEIVKGEPELLVKKEKLGRLTLEFSPKLPESQNILHIKETPTRIKVIEITTEHRRIAQIIGKDNKLNVPAFAEKQVLAAINAVSGIVTVHSDIGGGSEGAEEVPAQTLPHIHLLPANVGLKITLLSRPFTQGGPYFRPGTGGETVIAEIEGKRFQTRRNLSLEKQLAADAVAACPTLAQSEEQDGEWVIVDPESCLELLLELQALGNKVVMAWPEGEKLHISHNADLKDFNLSIQRQQDWFAATGELKLNNDLVLDMQQLLELLEKTPSRFIPLGDGQFLALTQAFRKRLDELRMFSEKHNKGIRFHPLATLGLEDFVDEVGKVKADKHWKTHREHLHEVKNLQPELPSTLQAELRDYQMEGFCWLARLAHWGVGACLADQMGLGKTLQALAVILRNAHEGPTLIIAPTSVCMNWVSEAQKFAPTLNIIQFSGANRQKLLDGLQPLDMLVCSYGLLQQEEVAQMLSVVHWQTIVLDEAQAIKNMTTKRSQAAMNLKSNFKLLTTGTPIENHLGELWNLFRFINPGLLGSFESFNQRFAVPIEKYQDKLARNKLKKLIQPFLLRRTKNQVLEELPSRTEILLHVELSREEKAFYEALRRQAISKLTESDADAGKKHLQVLAEIMKLRRACCNPSLVMPDTVLPSSKLQLFGEVLGELLENRHKALVFSQFVDHLHIIRDYLEQQGINYQYLDGSTSVAERKKRVDAFQAGSGDVFLISLKAGGTGLNLTAADYVIHTDPWWNPAVEDQASDRAHRIGQQRPVTIYRLVAKDTIEEKIVQLHHQKRDLADSLLEGTDMSGKISTEALLQLISQG

SEQ ID NO: 8712 - protein, 124 aa, Nostoc punctiforme
MIDRFQHDPQGPPIMILSLKAGGVGLNLTRANHVFHFDRWWNPAVENQATDRVFRIGQTRNVQVHKFVCTGTLEEKIHDMIESKKQLAEQVVGAGEEWLTELDTDQLRNLLILDRSAVIDDDAE

SEQ ID NO: 8713 - protein, 940 aa, Vibrio cholerae
MNSQGELILTPNMGQSASHESIQKVLGQLQSDNAVTLKVGDEIVLFSEEKLMAVKEVISNRVIPQQQVKAFLENPTAYIDASLVDLDLGFSIRVHGATVFKHAYFGETDESGIDWFGASPTSDLINPISKLTDRVRDKTTLEDVAKKIEDARQTGATVFDYEGQSYDISDPAAVEKVLNEIGHKISSPNTDLSSYGEAEDAETESEGSEIHVVDIDLNDEELSENSPKVEQLISDISWDGELNWENHKRTPFPHQDIGVRWILGVEQKSLSDSKVSGALLADDMGLGKTFMALSAIEHIYQRQQISGETKKPALIVAPLSLLENWKDEVDKTFKHSPFKDVVILQSSAELNEYRMGGVEIRGQSASDDCLEPKYSLKVGKYFGPSRLDLPERLVITTYQTLRDYQFSMCLIDWGIVVFDEAQNIKNPNALQTRAAKGLKADFKLVATGTPVENSLADFWCLMDTACPGHLGSYQEFRARYISPILKAAGDEVEEIRARLGRELRIAVGALMLRRIKEDNLKGLPLKHMYAGGEFENWKYLEELKSTMVGYQRDVYEGAISHQLENEESHALTTLMRLRDSSLHPRLSDGGRLDIPKNAKSARALYGESGKLVSLLETLDRVRSKQEKCIIFAVNKRLQSFLSVTLGQIYNLGPLSVINGDAKAVAKRKSVPTRKSMISDFEAKEGFNLIVMSPVAAGVGLTVVGANHVVHLERYWNPAKEAQATDRVYRIGQEKEVHIYIPLLHHPEFESFDVNLHRLLTQKTLLKDAVVTPEDVIPQPAGVGGVVSGDLIDKRITAAELDKLSWQQFEALCVELLAKITDSESAWLTNNGADHGADGVLLNNSGNILLQAKFTQRQYDGYKGIQEIHSAKPIYESAMRSSFGRLIFVTNSPLLAKRTHEIAATCGIEVLGRTQLLTYLEEYDITLKDILSRLGKDRLRV

SEQ ID NO: 8714 - protein, 507 aa, Vibrio cholerae
ALQTRAAKGLKADFKLVATGTPVENSLADFWCLMDTACPGHLGSYQEFRARYISPILKAAGDEVEEIRARLGRELRIAVGALMLRRIKEDNLKGLPLKHMYAGGEFENWKYLEELKSTMVGYQRDVYEGAISHQLENEESHALTTLMRLRDSSLHPRLSDGGRLDIPKNAKSARALYGESGKLVSLLETLDRVRSKQEKCIIFAVNKRLQSFLSVTLGQIYNLGPLSVINGDAKAVAKRKSVPTRKSMISDFEAKEGFNLIVMSPVAAGVGLTVVGANHVVHLERYWNPAKEAQATDRVYRIGQEKEVHIYIPLLHHPEFESFDVNLHRLLTQKTLLKDAVVTPEDVIPQPAGVGGVVSGDLIDKRITAAELDKLSWQQFEALCVELLAKITDSESAWLTNNGADHGADGVLLNNSGNILLQAKFTQRQYDGYKGIQEIHSAKPIYESAMRSSFGRLIFVTNSPLLAKRTHEIAATCGIEVLGRTQLLTYLEEYDITLKDILSRLGK

SEQ ID NO: 8715 - protein, 501 aa, Epiphyas postvittana nucleopolyhedrovirus
MDNLKFDVDEFFNADDDANTCTPAIVHKLDLLPHQKSGIGWMLQREKRGNPHGGVLADDMGLGKTLSVLLLIANNNNVNLKTLIVCPLSLLNHWCGESDKHNLNIKLCKFYNNKCDQSFDAYQVVVTTYDTLYNHHKLLKTKQRASSLLTRQWHRVVLDEAHVIKNCKTAVHAAASALCADNRWCITGTPIHNKHWDMYAIIKFLRCKPFNNAAVWKMLNRNNDTNHIKSVMSKIVLKRNKSEIALDIPENSVQYVYVTFNETEKQVYDILKSKSQKAFDVAVETDGKDLNSMQDVLSLLCRLRQMCCHPALTKCAHMFESHANIFEPTYASSKCQRVLELIQQVLNTDNDKIVLVSQWVEFLHIIAALLRRHEILILLYTGKQRVEERIAVENQFNAANSPYRVLLMSIKCGGVGLNLIGGNHIVVLEPHWNPQIELQAQNRIHRLGQKKQTYVYKMLHDEDNSVERYMKTRQDNKLTFVNKVFDRSIPDYEDIKKFFSL

SEQ ID NO: 8716 - protein, 1027 aa, Drosophila melanogaster
MSKTDTAAVEATEENSNETTSDAATSSSGEKEAEFDNKIEADRSRRFDFLLKQTEIFTHFMTNSAKSPTKPKGRPKKIKDKDKEKDVADHRHRKTEQEEDEELLAEDSATKEIFRFDASPAYIKSGEMRDYQIRGLNWMISLYENGINGILADEMGLGKTLQTISLLGYLKHFKNQAGPHIVIVPKSTLQNWVNEFKKWCPSLRAVCLIGDQDTRNTFIRDVLMPGEWDVCVTSYEMCIREKSVFKKFNWRYLVIDEAHRIKNEKSKLSEILREFKTANRLLITGTPLQNNLHELWALLNFLLPDVFNSSEDFDEWFNTNTCLGDDALITRLHAVLKPFLLRRLKAEVEKRLKPKKEMKIFVGLSKMQRDWYTKVLLKDIDVVNGAGKVEKMRLQNILMQLRKCTNHPYLFDGAEPGPPYTTDTHLVYNSGKMAILDKLLPKLQEQGSRVLIFSQMTRMLDILEDYCHWRNYNYCRLDGQTPHEDRNRQIQEFNMDNSAKFLFMLSTRAGGLGINLATADVVIIYDSDWNPQMDLQAMDRAHRIGQKKQVRVFRLITESTVEEKIVERAEVKLRLDKMVIQGGRLVDNRSNQLNKDEMLNIIRFGANQVFSSKETDITDEDIDVILERGEAKTAEQKAALDSLGESSLRTFTMDTNGEAGTSSVYQFEGEDWREKQKLNALGNWIEPPKRERKANYAVDAYFREALRVSEPKAPKAPRPPKQPIVQDFQFFPPRLFELLDQEIYYFRKTVGYKVPKNTELGSDATKVQREEQRKIDEAEPLTEEEIQEKENLLSQGFTAWTKRDFNQFIKANEKYGRDDIDNIAKDVEGKTPEEVIEYNAVFWERCTELQDIERIMGQIERGEGKIQRRLSIKKALDQKMSRYRAPFHQLRLQYGNNKGKNYTEIEDRFLVCMLHKLGFDKENVYEELRAAIRASPQFRFDWFIKSRTALELQRRCNTLITLIERENIELEEKERAEKKKKAPKGSVSAGSGSASSNTPAPAPQPKASQKRKSEVVATSSNSKKKKK

SEQ ID NO: 8717 - protein, 1027 aa, Drosophila melanogaster
MSKTDTAAVEATEENSNETTSDAATSSSGEKEAEFDNKIEADRSRRFDFLLKQTEIFTHFMTNSAKSPTKPKGRPKKIKDKDKEKDVADHRHRKTEQEEDEELLAEDSATKEIFRFDASPAYIKSGEMRDYQIRGLNWMISLYENGINGILADEMGLGKTLQTISLLGYLKHFKNQAGPHIVIVPKSTLQNWVNEFKKWCPSLRAVCLIGDQDTRNTFIRDVLMPGEWDVCVTSYEMCIREKSVFKKFNWRYLVIDEAHRIKNEKSKLSEILREFKTANRLLITGTPLQNNLHELWALLNFLLPDVFNSSEDFDEWFNTNTCLGDDALITRLHAVLKPFLLRRLKAEVEKRLKPKKEMKIFVGLSKMQRDWYTKVLLKDIDVVNGAGKVEKMRLQNILMQLRKCTNHPYLFDGAEPGPPYTTDTHLVYNSGKMAILDKLLPKLQEQGSRVLIFSQMTRMLDILEDYCHWRNYNYCRLDGQTPHEDRNRQIQEFNMDNSAKFLFMLSTRAGGLGINLATADVVIIYDSDWNPQMDLQAMDRAHRIGQKKQVRVFRLITESTVEEKIVERAEVKLRLDKMVIQGGRLVDNRSNQLNKDEMLNIIRFGANQVFSSKETDITDEDIDVILERGEAKTAEQKAALDSLGDSSLRTFTMDTNGEAGTSSVYQFEGEDWREKQKLNALGNWIEPPKRERKANYAVDAYFREALRVSEPKAPKAPRPPKQPIVQDFQFFPPRLFELLDQEIYYFRKTVGYKVPKNTELGSDATKVQREEQRKIDEAEPLTEEEIQEKENLLSQGFTAWTKRDFNQFIKANEKYGRDDIDNIAKDVEGKTPEEVIEYNAVFWERCTELQDIERIMGQIERGEGKIQRRLSIKKALDQKMSRYRAPFHQLRLQYGNNKGKNYTEIEDRFLVCMLHKLGFDKENVYEELRAAIRASPQFRFDWFIKSRTALELQRRCNTLITLIERENIELEEKERAEKKKKAPKGSVSAGSGSASSNTPAPAPQPKASQKRKSEVVATSSNSKKKKK

SEQ ID NO: 8718 - protein, 913 aa, Drosophila melanogaster
EFTPKLVMPLETLKQTPVSSEVINNCVYYGILTLALQQTVTTTNTRRCGRCNNSHCYYGPQGPWATATGEILSATNATAHIELKAHEAKEAEANECRIQRLGAACAIEKLCRIFGEQIIEKVAVFQHLMFGKVEQFVKEAYDWRLGSLLPDLGVCNELVSSMQLIETAAPHLHVALHPQMFALLPSLGFIVCHPLKAVRHMAARCIAVLAEIDACQTMQFVVHDLLPLLGKIEQLIERQGAIEAIERVVSRLQIKVVPYIVLLVVPLLGAMSDPDESVRLLSTHCFANLVQLMPLDGKTEQLKSDPLQARKTRDREFLDYLFNPKSIPNYKVPVPISVELRCYQQAGINWLWFLNKYNLHGILCDDMGLGKTLQTICILAGDHMHRQTANLANLPSLVICPPTLTGHWVYEVEKFLDQGSVLRPLHYYGFPVGREKLRSDIGTKCNLVVASYDTVRKDIDFFSGIHFNYCVLDEGHIIKNGKTKSSKAIKRLKANHRLILSGTPIQNNVLELWSLFDFLMPGFLGTEKQFVQRFSRPILSSRDAKSSAKEQEAGVLAMEALHRQVLPFLLRRVKEDVLKDLPPKITQDLLCELSPLQLRLYEDFSNKHLKDCLDKLGDSSSASMVTENLSAKTHIFQALRYLQNVCNHPKLVLRQSEELTKVTSQLALSNSSLDDIEHSAKLPALKQLLLDCGIGVQTESVSQHRALIFCQLKAMLDIVEQDLLRRHLPSVTYLRLDGSVPASQRQDIVNNFNSDPSIDVLLLTTMVGGLGLNLTGADTVIFVEHDWNPMKDLQAMDRAHRIGQKKVVNVYRLITRNSLEEKIMGLQKFKILTANTVVSAENASLQTMGTSQIFDLFNGGKDKGAESGSSAVQGTASGGMSMNTIIENLPELWSEHQYEEEYDLGNFVQALKK

SEQ ID NO: 8719 - protein, 673 aa, Drosophila melanogaster
AIEAIERVVSRLQIKVVPYIVLLVVPLLGAMSDPDESVRLLSTHCFANLVQLMPLDGKTEQLKSDPLQARKTRDREFLDYLFNPKSIPNYKVPVPISVELRCYQQAGINWLWFLNKYNLHGILCDDMGLGKTLQTICILAGDHMHRQTANLANLPSLVICPPTLTGHWVYEVEKFLDQGSVLRPLHYYGFPVGREKLRSDIGTKCNLVVASYDTVRKDIDFFSGIHFNYCVLDEGHIIKNGKTKSSKAIKRLKANHRLILSGTPIQNNVLELWSLFDFLMPGFLGTEKQFVQRFSRPILSSRDAKSSAKEQEAGVLAMEALHRQVLPFLLRRVKEDVLKDLPPKITQDLLCELSPLQLRLYEDFSNKHLKDCLDKLGDSSSASMVTENLSAKTHIFQALRYLQNVCNHPKLVLRQSEELTKVTSQLALSNSSLDDIEHSAKLPALKQLLLDCGIGVQTESVSQHRALIFCQLKAMLDIVEQDLLRRHLPSVTYLRLDGSVPASQRQDIVNNFNSDPSIDVLLLTTMVGGLGLNLTGADTVIFVEHDWNPMKDLQAMDRAHRIGQKKVVNVYRLITRNSLEEKIMGLQKFKILTANTVVSAENASLQTMGTSQIFDLFNGGKDKGAESGSSAVQGTASGGMSMNTIIENLPELWSEHQYEEEYDLGNFVQALKK

SEQ ID NO: 8720 - protein, 1221 aa, Drosophila melanogaster
STPGSTSRKRTPRIGDELGGNILAQSNASLKLYLGGSEATPLDVRDANFMRARISSSRALGALSHYLVQPAPGVVYTPQTESPTDCYTKVLLGHLNAHSAVQRIVCGLIIAFWALEDEPVRPGPPNLQEKLHQCVSEYVYYDEVAISLTRLLQEAQDFIATLKQNKIPINDFNNAKILTLDQIEAVATTLSENLRSYPLKPKVLDMLEERRRSLQASYQQTTSEQSAYHVSAQAALAGAICALHCLPDKLNPVVKPLMESIKREQCLQLQQLSAEFLVHLMDQVCDRNPSPNSKILNNLCTLLRSDPEFTPKLVMPLETLKQTPVSSEVINNCVYYGILTLALQQTVTTTNTRSGAGGATTPTATTAPRGPGRPPTGEILSATNATAHIELKAQQAKEAEAKQCRIQRLGAACAIEKLCRIFGEQIIEKVAVFQHLMFGKVEQFVKEAYDWRLGSLLPDLGVCNELVSSMQLIETAAPHLHVALHPQMFALLPSLGFIVCHPLKAVRHMAARCIAVLAEIDACQTMQFVVHDLLPLLGKIEQLIERQGAIEAIERVVSRLQIKVVPYIVLLVVPLLGAMSDPDESVRLLSTHCFANLVQLMPLDGKTEQLKSDPLQARKTRDREFLDYLFNPKSIPNYKVPVPISVELRCYQQAGINWLWFLNKYNLHGILCDDMGLGKTLQTICILAGDHMHRQTANLANLPSLVICPPTLTGHWVYEVEKFLDQGSVLRPLHYYGFPVGREKLRSDIGTKCNLVVASYDTVRKDIDFFSGIHFNYCVLDEGHIIKNGKTKSSKAIKRLKANHRLILSGTPIQNNVLELWSLFDFLMPGFLGTEKQFVQRFSRPILSSRDAKSSAKEQEAGVLAMEALHRQVLPFLLRRVKEDVLKDLPPKITQDLLCELSPLQLRLYEDFSNKHLKDCLDKLGDSSSASMVTENLSAKTHIFQALRYLQNVCNHPKLVLRQSEELTKVTSQLALSNSSLDDIEHSAKLPALKQLLLDCGIGVQTESVSQHRALIFCQLKAMLDIVEQDLLRRHLPSVTYLRLDGSVPASQRQDIVNNFNSDPSIDVLLLTTMVGGLGLNLTGADTVIFVEHDWNPMKDLQAMDRAHRIGQKKVVNVYRLITRNSLEEKIMGLQKFKILTANTVVSAENASLQTMGTSQIFDLFNGGKDKGAESGSSAVQGTASGGMSMNTIIENLPELWSEHQYEEEYDLGNFVQALKK

SEQ ID NO: 8721 - protein, 1929 aa, Drosophila melanogaster
MLIVFNIPCRLDRLFILLETGSTAATRQAAAKQIGEVQKLYPHELHALLNRLVGYLHSTSWETRIAAAQTVEAILKQVPPWQPEFQVLPKKERCATNTATAAAAAEEDSCQSSGSNSTTASERLLSFDEFDLQQILHKGARLIGSEGNEFDVQEEQPASGGGEEDRSLASRLSRQRAVLNDKLGLTTAAKLGVNLTDMITDEDVALNRSGSTYNVNAEKLPVEHLLNIKTAANGSGQAPLSCREMNRAKRKARQNTSGCSVTAVTPTCSRRNSNSNHSTGSNHSSNGTTGAAIEEPEKKKLKSTDRQEIFYSLNAAVPDATGTWVDAVSWPLENFCSRLFIDLFHAKWEVRHGAATALRELINQHAQGAGKAVLQTREQMDEAHSRWLEDAALRLLCVLCLDRFGDFVSDQVVAPVRETCAQVLGTLVKEMEASKVQRIVNILLQLIQHKNEWDVRHGGLLGLKYVFVVREELLPIYLPQSISNILIGLLDAVDDVGAVAAATLIPVSSWLPKLLNPAQVSSIVKMLWDLLLDQDELTSACNSFMGLLAAILCLPNAARWVEMEPMAILVPRLWPFLSHSTSSVRRSTLKTLMTLTSADRVKSEPKDENQVKEEADKEEMKLNFGVSDWKWELLQQALRHIYQRILVEPQADIQALARQVWSNLIQHADLGALLHAACPFVSSWICLSMQPPRLAFDAGVLIRAGGDVSTPGSTSRKRTPRIGDELGGNILAQSNASLKLYLGGSEATPLDVRDANFMRARISSSRALGALSHYLVQPAPGVVYTPQTESPTDCYTKVLLGHLNAHSAVQRIVCGLIIAFWALEDEPVRPGPPNLQEKLHQCVSEYVYYDEVAISLTRLLQEAQDFIATLKQNKIPINDFNNAKILTLDQIEAVATTLSENLRSYPLKPKVLDMLEERRRSLQASYQQTTSEQSAYHVSAQAALAGAICALHCLPDKLNPVVKPLMESIKREQCLQLQQLSAEFLVHLMDQVCDRNPSPNSKILNNLCTLLRSDPEFTPKLVMPLETLKQTPVSSEVINNCVYYGILTLALQQTVTTTNTRSGAGGATTPTATTAPRGPGRPPTGEILSATNATAHIELKAQQAKEAEAKQCRIQRLGAACAIEKLCRIFGEQIIEKVAVFQHLMFGKVEQFVKEAYDWRLGSLLPDLGVCNELVSSMQLIETAAPHLHVALHPQMFALLPSLGFIVCHPLKAVRHMAARCIAVLAEIDACQTMQFVVHDLLPLLGKIEQLIERQGAIEAIERVVSRLQIKVVPYIVLLVVPLLGAMSDPDESVRLLSTHCFANLVQLMPLDGKTEQLKSDPLQARKTRDREFLDYLFNPKSIPNYKVPVPISVELRCYQQAGINWLWFLNKYNLHGILCDDMGLGKTLQTICILAGDHMHRQTANLANLPSLVICPPTLTGHWVYEVEKFLDQGSVLRPLHYYGFPVGREKLRSDIGTKCNLVVASYDTVRKDIDFFSGIHFNYCVLDEGHIIKNGKTKSSKAIKRLKANHRLILSGTPIQNNVLELWSLFDFLMPGFLGTEKQFVQRFSRPILSSRDAKSSAKEQEAGVLAMEALHRQVLPFLLRRVKEDVLKDLPPKITQDLLCELSPLQLRLYEDFSNKHLKDCLDKLGDSSSASMVTENLSAKTHIFQALRYLQNVCNHPKLVLRQSEELTKVTSQLALSNSSLDDIEHSAKLPALKQLLLDCGIGVQTESVSQHRALIFCQLKAMLDIVEQDLLRRHLPSVTYLRLDGSVPASQRQDIVNNFNSDPSIDVLLLTTMVGGLGLNLTGADTVIFVEHDWNPMKDLQAMDRAHRIGQKKVVNVYRLITRNSLEEKIMGLQKFKILTANTVVSAENASLQTMGTSQIFDLFNGGKDKGAESGSSAVQGTASGGMSMNTIIENLPELWSEHQYEEEYDLGNFVQALKK

SEQ ID NO: 8722 - protein, 1638 aa, Drosophila melanogaster
MASPSPANSPMPPPQAPSPMAPPSQSPAPSPHSPYPHQQPGPLQGPPPPGHPGAYGHPMQHGPPGQGPPGHHMPPHHQGMIFSKGPHMGMQMPPTGPNMSPYQTHGMPPNAPTQPCIVSPGGPPGGPPPPERSSQENLHALQRAIDSMEEKGLQEDPRYSQLLAMRATSKHQHLNGNQVNLLRTQITAYRLLARNKPISMQMQQALQAAQQQPPPGPPIGPPGAPGGPPPGSQHAGQPPVPPQQQQQPPPSAGTPPQCSTPPASNPYGPPVPGQKMQVAPPPPHMQQGQPLPPQPPQVGGPPPIQQQQPPQQQQQQSQPPPPEPHQHQLPNGGKPLSMGPSGGQPLIPSSPMQPQVRGTLPGMPPGSQVPQPGGGPQRQVPPAGMPMPKPNRITTVAKPVGLDPITLLQERENRIAARISLRMQELQRLPATMSEDLRLQAAIELRALRVLNFQRQLRMEFVQCTRRDTTLETALNIKLYKRTKRQGLREARATEKLEKQQKLEAERKRRQKHLEFLAAVLQHGKDLREFHRNNKAQLARMNKAVMNHHANAEREQKKEQERIEKERMRRLMAEDEEGYRKLIDQKKDKRLAFLLSQTDEYISNLTQMVKQHKDDQMKKKEEEGKRLIQFKKELLMSGEYIGIDEGSIVADMRVHVVEQCTGKKLTGDDAPMLKHLHRWLNMHPGWYWIDDEEDSCGSNDDHKPKVEEQPTATEDATDKAQATGNDEDAKDLITKAKVEDDEYRTEEQTYYSIAHTIHEKVVEQASIMVNGTLKEYQIKGLEWLVSLYNNNLNGILADEMGLGKTIQTISLVTYLMDRKKVMGPYLIIVPLSTLPNWVLEFEKWAPAVGVVSYKGSPQGRRLLQNQMRATKFNVLLTTYEYVIKDKAVLAKIQWKYMIIDEGHRMKNHHCKLTQVLNTHYIAPYRLLLTGTPLQNKLPELWALLNFLLPSIFKSCSTFEQWFNAPFATTGEKVELNEEETILIIRRLHKVLRPFLLRRLKKEVEHQLPDKVEYIIKCDMSALQRVLYKHMQSKGVLLTDGSEKGKHGKGGAKALMNTIVQLRKLCNHPFMFQHIEEKYCDHTGGHGVVSGPDLYRVSGKFELLDRILPKLKATNHRVLLFCQMTQCMTIIEDYLGWRQFGYLRLDGTTKAEDRGELLRKFNAKGSDVFVFLLSTRAGGLGLNLQTADTVVIFDSDWNPHQDLQAQDRAHRIGQRNEVRVLRLMTVNSVEERILAAARYKLNMDEKVIQAGMFDQKSTGSERQQFLQTILHQDDNEEEEENEVPDDEMINMMIARSEEEIEIFKRMDAERKKEDEEIHPGRERLIDESELPDWLTKDDDEVERFHYQYDEDTILGRGSRQRKEVDYTDSLTEKEWLKAIDDGAEFDEEEEEDDSKRKRRKRKNRKEESDDDSLILKRRRRQNLDKRSKKQMHKIMSAVIKHNQDGRTLSEPFMKLPSRQRLPDYYEIIKRPVDIKKILQRIEDCKYADLNELEKDFMQLCQNAQIYNEEASLIYLDSIALQKVFVGARQRITAAADAAAVAAGDNTGEAHGNGGSDNSDNDDDDGGDDGSDDEEIATTSAAAVKMKLKLNKSLASAPATPTQSSSNVSSGAATTSKKQTRRKRSQKKYTISDDDDDDMD

SEQ ID NO: 8723 - protein, 1634 aa, Drosophila melanogaster
MASPSPANSPMPPPQAPSPMAPPSQSPAPSPHSPYPHQQPGPLQGPPPPGHPGAYGHPMQHGPPGQGPPGHHMPPHHQGMSPHMGMQMPPTGPNMSPYQTHGMPPNAPTQPCIVSPGGPPGGPPPPERSSQENLHALQRAIDSMEEKGLQEDPRYSQLLAMRATSKHQHLNGNQVNLLRTQITAYRLLARNKPISMQMQQALQAAQQQPPPGPPIGPPGAPGGPPPGSQHAGQPPVPPQQQQQPPPSAGTPPQCSTPPASNPYGPPVPGQKMQVAPPPPHMQQGQPLPPQPPQVGGPPPIQQQQPPQQQQQQSQPPPPEPHQHQLPNGGKPLSMGPSGGQPLIPSSPMQPQVRGTLPGMPPGSQVPQPGGGPQRQVPPAGMPMPKPNRITTVAKPVGLDPITLLQERENRIAARISLRMQELQRLPATMSEDLRLQAAIELRALRVLNFQRQLRMEFVQCTRRDTTLETALNIKLYKRTKRQGLREARATEKLEKQQKLEAERKRRQKHLEFLAAVLQHGKDLREFHRNNKAQLARMNKAVMNHHANAEREQKKEQERIEKERMRRLMAEDEEGYRKLIDQKKDKRLAFLLSQTDEYISNLTQMVKQHKDDQMKKKEEEGKRLIQFKKELLMSGEYIGIDEGSIVADMRVHVVEQCTGKKLTGDDAPMLKHLHRWLNMHPGWDWIDDEEDSCGSNDDHKPKVEEQPTATEDATDKAQATGNDEDAKDLITKAKVEDDEYRTEEQTYYSIAHTIHEKVVEQASIMVNGTLKEYQIKGLEWLVSLYNNNLNGILADEMGLGKTIQTISLVTYLMDRKKVMGPYLIIVPLSTLPNWVLEFEKWAPAVGVVSYKGSPQGRRLLQNQMRATKFNVLLTTYEYVIKDKAVLAKIQWKYMIIDEGHRMKNHHCKLTQVLNTHYIAPYRLLLTGTPLQNKLPELWALLNFLLPSIFKSCSTFEQWFNAPFATTGEKVELNEEETILIIRRLHKVLRPFLLRRLKKEVEHQLPDKVEYIIKCDMSALQRVLYKHMQSKGVLLTDGSEKGKHGKGGAKALMNTIVQLRKLCNHPFMFQHIEEKYCDHTGGHGVVSGPDLYRVSGKFELLDRILPKLKATNHRVLLFCQMTQCMTIIEDYLGWRQFGYLRLDGTTKAEDRGELLRKFNAKGSDVFVFLLSTRAGGLGLNLQTADTVVIFDSDWNPHQDLQAQDRAHRIGQRNEVRVLRLMTVNSVEERILAAARYKLNMDEKVIQAGMFDQKSTGSERQQFLQTILHQDDNEEEEENEVPDDEMINMMIARSEEEIEIFKRMDAERKKEDEEIHPGRERLIDESELPDWLTKDDDEVERFHYQYDEDTILGRGSRQRKEVDYTDSLTEKEWLKAIDDGAEFDEEEEEDDSKRKRRKRKNRKEESDDDSLILKRRRRQNLDKRSKKQMHKIMSAVIKHNQDGRTLSEPFMKLPSRQRLPDYYEIIKRPVDIKKILQRIEDCKYADLNELEKDFMQLCQNAQIYNEEASLIYLDSIALQKVFVGARQRITAAADAAAVAAGDNTGEAHGNGGSDNSDNDDDDGGDDGSDDEEIATTSAAAVKMKLKLNKSLASAPATPTQSSSNVSSGAATTSKKQTRRKRSQKKYTISDDDDDDMD

SEQ ID NO: 8724 - protein, 1638 aa, Drosophila melanogaster
MASPSPANSPMPPPQAPSPMAPPSQSPAPSPHSPYPHQQPGPLQGPPPPGHPGAYGHPMQHGPPGQGPPGHHMPPHHQGMIFSKGPHMGMQMPPTGPNMSPYQTHGMPPNAPTQPCIVSPGGPPGGPPPPERSSQENLHALQRAIDSMEEKGLQEDPRYSQLLAMRATSKHQHLNGNQVNLLRTQITAYRLLARNKPISMQMQQALQAAQQQPPPGPPIGPPGAPGGPPPGSQHAGQPPVPPQQQQQPPPSAGTPPQCSTPPASNPYGPPVPGQKMQVAPPPPHMQQGQPLPPQPPQVGGPPPIQQQQPPQQQQQQSQPPPPEPHQHQLPNGGKPLSMGPSGGQPLIPSSPMQPQVRGTLPGMPPGSQVPQPGGGPQRQVPPAGMPMPKPNRITTVAKPVGLDPITLLQERENRIAARISLRMQELQRLPATMSEDLRLQAAIELRALRVLNFQRQLRMEFVQCTRRDTTLETALNIKLYKRTKRQGLREARATEKLEKQQKLEAERKRRQKHLEFLAAVLQHGKDLREFHRNNKAQLARMNKAVMNHHANAEREQKKEQERIEKERMRRLMAEDEEGYRKLIDQKKDKRLAFLLSQTDEYISNLTQMVKQHKDDQMKKKEEEGKRLIQFKKELLMSGEYIGIDEGSIVADMRVHVVEQCTGKKLTGDDAPMLKHLHRWLNMHPGWDWIDDEEDSCGSNDDHKPKVEEQPTATEDATDKAQATGNDEDAKDLITKAKVEDDEYRTEEQTYYSIAHTIHEKVVEQASIMVNGTLKEYQIKGLEWLVSLYNNNLNGILADEMGLGKTIQTISLVTYLMDRKKVMGPYLIIVPLSTLPNWVLEFEKWAPAVGVVSYKGSPQGRRLLQNQMRATKFNVLLTTYEYVIKDKAVLAKIQWKYMIIDEGHRMKNHHCKLTQVLNTHYIAPYRLLLTGTPLQNKLPELWALLNFLLPSIFKSCSTFEQWFNAPFATTGEKVELNEEETILIIRRLHKVLRPFLLRRLKKEVEHQLPDKVEYIIKCDMSALQRVLYKHMQSKGVLLTDGSEKGKHGKGGAKALMNTIVQLRKLCNHPFMFQHIEEKYCDHTGGHGVVSGPDLYRVSGKFELLDRILPKLKATNHRVLLFCQMTQCMTIIEDYLGWRQFGYLRLDGTTKAEDRGELLRKFNAKGSDVFVFLLSTRAGGLGLNLQTADTVVIFDSDWNPHQDLQAQDRAHRIGQRNEVRVLRLMTVNSVEERILAAARYKLNMDEKVIQAGMFDQKSTGSERQQFLQTILHQDDNEEEEENEVPDDEMINMMIARSEEEIEIFKRMDAERKKEDEEIHPGRERLIDESELPDWLTKDDDEVERFHYQYDEDTILGRGSRQRKEVDYTDSLTEKEWLKAIDDGAEFDEEEEEDDSKRKRRKRKNRKEESDDDSLILKRRRRQNLDKRSKKQMHKIMSAVIKHNQDGRTLSEPFMKLPSRQRLPDYYEIIKRPVDIKKILQRIEDCKYADLNELEKDFMQLCQNAQIYNEEASLIYLDSIALQKVFVGARQRITAAADAAAVAAGDNTGEAHGNGGSDNSDNDDDDGGDDGSDDEEIATTSAAAVKMKLKLNKSLASAPATPTQSSSNVSSGAATTSKKQTRRKRSQKKYTISDDDDDDMD

SEQ ID NO: 8725 - protein, 1518 aa, Drosophila melanogaster
SNSMSSKRGADPDWKTPGKASKDKRPKTNAKKQKFRDEEYCKVCSDGGDLLCCDSCPSVYHRTCLSPPLKSIPKGDWICPRCIPLPGKAEKILSWRWALDRSVELRTSKGEKRREYFIKWHGMSYWHCEWIPEGQMLLHHASMVASFQRRSDMEEPSLEELDDQDGNLHERFYRYGIKPEWLLVQRVINHSEEPNGGTMYLVKWRELSYNDSSWERESDSIPGLNQAIALYKKLRSSNKGRQRDRPAPTIDLNKKYEDQPVFLKEAGLKLHPFQIEGVSWLRYSWGQGIPTILADEMGLGKTIQTVVFLYSLFKEGHCRGPFLISVPLSTLTNWERELELWAPELYCVTYVGGKTARAVIRKHEISFEEVTTKTMRENQTQYKFNVMLTSYEFISVDAAFLGCIDWAALVVDEAHRLRSNQSKFFRILSKYRIGYKLLLTGTPLQNNLEELFHLLNFLSSGKFNDLQTFQAEFTDVSKEEQVKRLHEILEPHMLRRLKADVLKSMPPKSEFIVRVELSSMQKKFYKHILTKNFKALNQKGGGRVCSLLNIMMDLRKCCNHPYLFPSAAEEATISPSGLYEMSSLTKASGKLDLLSKMLKQLKADNHRVLLFSQMTKMLNILEHFLEGEGYQYDRIDGSIKGDLRQKAIDRFNDPVSEHFVFLLSTRAGGLGINLATADTVIIFDSDWNPHNDVQAFSRAHRMGQKKKVMIYRFVTHNSVEERIMQVAKHKMMLTHLVVRPGMGGMTTNFSKDELEDILRFGTEDLFKDGKSEAIHYDDKAVADLLDRTNRGIEEKESWANEYLSSFKVASYATKEEEEEEETEIIKQDAENSDPAYWVKLLRHHYEQHQEDVGRSLGKGKRVRKQVNYTDGGVVAADTTRDDSNWQDNGSEYNSEYSAGSDEDGGDDDFDDQNGAERKAKRRLERRDDRPLPPLLARVGGNIEVLGFNARQRKSFLNAIMRYGMPPQDAFNSQWLVRDLRGKSERNFKAYVSLFMRHLCEPGADNAETFADGVPREGLSRQHVLTRIGVMSLIRKKVQEFEHINGYYSMPELILKPCEPVRSALKQDVAALEAPPTGGNVDKSATTSNSVTPATSAAPSPAPASEKGEDKDKDSEKEKDKTSAEKSEVKQEQEAEEDKKPGDVKQENPVEEAAGDTKPSDAEVKTEVAKTEPKEETKDPEVKEEPKTEEKEKEKVDDKKPIPPTTVIDDDDDDVMIVKEDGELEKPSASSPKDQKAVAAATSAATGATGKGAEDSLEVLKRKFMFNIADGGFTELHTLWLNEEKAAVPGREYEIWHRRHDYWLLAGIVTHGYGRWQDIQNDIRFAIINEPFKMDVGKGNFLEIKNKFLARRFKLLEQALVIEEQLRRAAYLNLAQDPSHPAMSLNARFAEVECLAESHQHLSKESLAGNKPANAVLHKVLNQLEELLSDMKSDVSRLPATLARIPPVAQRLQMSERSILSRLAATAGNASNAAQLMAQFPAGFQGTTLPAFTSGPAGNFANFRPQFSVPGQLSNNSGV

SEQ ID NO: 8726 - protein, 892 aa, Drosophila melanogaster [sequence omitted]

SEQ ID NO: 8727 - protein, 1982 aa, Drosophila melanogaster
MASEEENDDNFQEEEEAQEDNAPAAELSNDSDAPLKPNNDEDDDYDPEDSRRKKKGKKRKTRKGEEKGRKKKKRKKNESEEDSDFVQHDEEVEYPSTSKRARKRKEEKQAAKEKESASSGMPSVEDVCSAFSVCNVEIEYSEEELQSLTTYKAFMHHVRPILQKENPKIAAPKLVMLVAAKWREFCESNPHIQQEGGAAGSGGSAGQARSVTGDEPEEPRSSRSSRNEKPDDIYEEAVEEEEEEEEEEKKPRRKRSGRGKKGRRPSGKVPTLKIKLLGKRKRDSSDEEQDASGASERDSDLEFERMLQKSDDSADEKEAPVSSKADNSAPAAQDDGSGAPVVRKKAKTKIGNKFKKKNKLKKTKNFPEGEDGEHEHQDYCEVCQQGGEIILCDTCPRAYHLVCLEPELDEPPEGKWSCPHCEADGGAAEEEDDDEHQEFCRVCKDGGELLCCDSCPSAYHTFCLNPPLDTIPDGDWRCPRCSCPPLTGKAEKIITWRWAQRSNDDGPSTSKGSKNSNSRVREYFIKWHNMSYWHCEWVPEVQLDVHHPLMIRSFQRKYDMEEPPKFEESLDEADTRYKRIQRHKDKVGMKANDDAEVLEERFYKNGVKPEWLIVQRVINHRTARDGSTMYLVKWRELPYDKSTWEEEGDDIQGLRQAIDYYQDLRAVCTSETTQSRSKKSKKGRKSKLKVEDDEDRPVKHYTPPPEKPTTDLKKKYEDQPAFLEGTGMQLHPYQIEGINWLRYSWGQGIDTILADEMGLGKTIQTVTFLYSLYKEGHCRGPFLVAVPLSTLVNWEREFELWAPDFYCITYIGDKDSRAVIRENELSFEEGAIRGSKVSRLRTTQYKFNVLLTSYELISMDAACLGSIDWAVLVVDEAHRLKSNQSKFFRILNSYTIAYKLLLTGTPLQNNLEELFHLLNFLSRDKFNDLQAFQGEFADVSKEEQVKRLHEMLGPHMLRRLKTDVLKNMPSKSEFIVRVELSAMQKKFYKFILTKNYEALNSKSGGGSCSLINIMMDLKKCCNHPYLFPSAAEEATTAAGGLYEINSLTKAAGKLVLLSKMLKQLKAQNHRVLIFSQMTKMLDILEDFLEGEQYKYERIDGGITGTLRQEAIDRFNAPGAQQFVFLLSTRAGGLGINLATADTVIIYDSDWNPHNDIQAFSRAHRIGQANKVMIYRFVTRNSVEERVTQVAKRKMMLTHLVVRPGMGGKGANFTKQELDDILRFGTEDLFKEDDKEEAIHYDDKAVAELLDRTNRGIEEKESWANEYLSSFKVASYATKEEEEEEETEIIKQDAENSDPAYWVKLLRHHYEQHQEDVGRSLGKGKRVRKQVNYTDGGVVAADTTRDDSNWQDNGSEYNSEYSAGSDEDGGDDDFDDQNGAERKAKRRLERRDDRPLPPLLARVGGNIEVLGFNARQRKSFLNAIMRYGMPPQDAFNSQWLVRDLRGKSERNFKAYVSLFMRHLCEPGADNAETFADGVPREGLSRQHVLTRIGVMSLIRKKVQEFEHINGYYSMPELILKPCEPVRSALKQDVAALEAPPTGGNVDKSATTSNSVTPATSAAPSPAPASEKGEDKDKDSEKEKDKTSAEKSEVKQEQEAEEDKKPGDVKQENPVEEAAGDTKPSDAEVKTEVAKTEPKEETKDPEVKEEPKTEEKEKEKVDDKKPIPPTTVIDDDDDDVMIVKEDGELEKPSASSPKDQKAVAAATSAATGATGKGAEDSLEVLKRKFMFNIADGGFTELHTLWLNEEKAAVPGREYEIWHRRHDYWLLAGIVTHGYGRWQDIQNDIRFAIINEPFKMDVGKGNFLEIKNKFLARRFKLLEQALVIEEQLRRAAYLNLAQDPSHPAMSLNARFAEVECLAESHQHLSKESLAGNKPANAVLHKVLNQLEELLSDMKSDVSRLPATLARIPPVAQRLQMSERSILSRLAATAGNASNAAQLMAQFPAGFQGTTLPAFTSGPAGNFANFRPQFSVPGQLSNNSGV

SEQ ID NO: 8728 - protein, 1982 aa, Drosophila melanogaster
MASEEENDDNFQEEEEAQEDNAPAAELSNDSDAPLKPNNDEDDDYDPEDSRRKKKGKKRKTRKGEEKGRKKKKRKKNESEEDSDFVQHDEEVEYPSTSKRGRKRKEEKQAAKEKESASSGMPSVEDVCSAFSVCNVEIEYSEEELQSLTTYKAFMHHVRPILQKENPKIAAPKLVMLVAAKWREFCESNPHIQQEGGAAGSGGSAGQARSVTGDEPEEPRSSRSSRNEKPDDIYEEAVEEEEEEEEEEKKPRRKRSGRGKKGRRPSGKVPTLKIKLLGKRKRDSSDEEQDASGASERDSDLEFERMLQKSDDSADEKEAPVSSKADNSAPAAQDDGSGAPVVRKKAKTKIGNKFKKKNKLKKTKNFPEGEDGEHEHQDYCEVCQQGGEIILCDTCPRAYHLVCLEPELDEPPEGKWSCPHCEADGGAAEEEDDDEHQEFCRVCKDGGELLCCDSCPSAYHTFCLNPPLDTIPDGDWRCPRCSCPPLTGKAEKIITWRWAQRSNDDGPSTSKGSKNSNSRVREYFIKWHNMSYWHCEWVPEVQLDVHHPLMIRSFQRKYDMEEPPKFEESLDEADTRYKRIQRHKDKVGMKANDDAEVLEERFYKNGVKPEWLIVQRVINHRTARDGSTMYLVKWRELPYDKSTWEEEGDDIQGLRQAIDYYQDLRAVCTSETTQSRSKKSKKGRKSKLKVEDDEDRPVKHYTPPPEKPTTDLKKKYEDQPAFLEGTGMQLHPYQIEGINWLRYSWGQGIDTILADEMGLGKTIQTVTFLYSLYKEGHCRGPFLVAVPLSTLVNWEREFELWAPDFYCITYIGDKDSRAVIRENELSFEEGAIRGSKVSRLRTTQYKFNVLLTSYELISMDAACLGSIDWAVLVVDEAHRLKSNQSKFFRILNSYTIAYKLLLTGTPLQNNLEELFHLLNFLSRDKFNDLQAFQGEFADVSKEEQVKRLHEMLGPHMLRRLKTDVLKNMPSKSEFIVRVELSAMQKKFYKFILTKNYEALNSKSGGGSCSLINIMMDLKKCCNHPYLFPSAAEEATTAAGGLYEINSLTKAAGKLVLLSKMLKQLKAQNHRVLIFSQMTKMLDILEDFLEGEQYKYERIDGGITGTLRQEAIDRFNAPGAQQFVFLLSTRAGGLGINLATADTVIIYDSDWNPHNDIQAFSRAHRIGQANKVMIYRFVTRNSVEERVTQVAKRKMMLTHLVVRPGMGGKGANFTKQELDDILRFGTEDLFKEDDKEEAIHYDDKAVAELLDRTNRGIEEKESWANEYLSSFKVASYATKEEEEEEETEIIKQDAENSDPAYWVKLLRHHYEQHQEDVGRSLGKGKRVRKQVNYTDGGVVAADTTRDDSNWQDNGSEYNSEYSAGSDEDGGDDDFDDQNGAERKAKRRLERRDDRPLPPLLARVGGNIEVLGFNARQRKSFLNAIMRYGMPPQDAFNSQWLVRDLRGKSERNFKAYVSLFMRHLCEPGADNAETFADGVPREGLSRQHVLTRIGVMSLIRKKVQEFEHINGYYSMPELILKPCEPVRSALKQDVAALEAPPTGGNVDKSATTSNSVTPATSAAPSPAPASEKGEDKDKDSEKEKDKTSAEKSEVKQEQEAEEDKKPGDVKQENPVEEAAGDTKPSDAEVKTEVAKTEPKEETKDPEVKEEPKTEEKEKEKVDDKKPIPPTTVIDDDDDDVMIVKEDGELEKPSASSPKDQKAVAAATSAATGATGKGAEDSLEVLKRKFMFNIADGGFTELHTLWLNEEKAAVPGREYEIWHRRHDYWLLAGIVTHGYGRWQDIQNDIRFAIINEPFKMDVGKGNFLEIKNKFLARRFKLLEQALVIEEQLRRAAYLNLAQDPSHPAMSLNARFAEVECLAESHQHLSKESLAGNKPANAVLHKVLNQLEELLSDMKSDVSRLPATLARIPPVAQRLQMSERSILSRLAATAGNASNAAQLMAQFPAGFQGTTLPAFTSGPAGNFANFRPQFSVPGQLSNNSGV

SEQ ID NO: 8729 - protein, 5322 aa, Drosophila melanogaster
MDGNAQNMFHGNHQGDPYYRYDAAAAAAAAAAANPRAMGPPGGYPPRHRPPHPLQQQPQYPSYQPTAENLYGLGAADHQAAMGLGVGVGVGAGMGDLSGWGAAPSVPGQAAAYPGAGLGAYGHPQAAPPSQQQRQSNASAYRQHMPAYGQQDQQKLASYGAQQSMMAGYGSLAPQQQQQQQPPTPQQQQQAQQVQQQAQQQQQQQQQQSQQQARLPQHYPQAPGQHPLYPGVGAPTVQAGQPPTPQAYAHSPYGSPMQHQPSRGAPQHVGYGHTGLDQASAYGQHVPGGAPPGHHLSAQQQQAAQQLGAHQQQQLQSQQQQQAQQQQPHVSLMQQQQLPGAGLPPPHMGMPPSYGSHHQQQQQQQQTQQQQQQSAPPYMSSSKHQQAAAQLNSSPQYRAPFPQLSPQMSPRPPTMSPHPQMSPRPVGVSPAKPPPPQQQQQQTQAQQPQQVVSNQPSQHSIQGMVGLPSPRPQPPTSGAGGAGAKGPAPVAAPVNTLQALEQMVMPSQALGLPPMDYPSAYRSAVGPRMPASPQQQQQQHQQWGAAHGAQHLAALQQQQAQQQQQQVQQQQQAPPQQQQQAAMLQAQQQHHQQQLSMYGQPMGQQPQTAQQQVVPPVTSQPPVVAASQQQQQQQHQQQSLNDQLQHSINDIVGGGNSSGATGGAQNQHQQQPQLAAMSSPLHQQNLPNMHHLIQPTMETTQPTQQQQQTSQQQQQPQQPQATLTSPHHQQMQHQSPIHQQQQSPHHQQHLPSYNQSQQQFDPFANILGDNQPAASQQTMSPAHVSSPVPAQMQQQQHQTQQQPSQQVPQSQQQQVSQPQQQTQQQQPSTPSHHLSSILNETANSNDSSTLAVAANDSNNSSSNSSTNSIVNNQPTSVHDSNSQSSINSSSNNQQQLLMDNTNSHGGNSESAQNAGVDVGLFDNNSMSSNSAAVAAVASNAASAAAALLDSNSQSSNAEFEKNQSEGEGLGVVEGVIANETDLPQDENSVSKTQDITLSTELPTIQDDLQEKPTAEMEQTQLGQSLGDLSKSLLEEPKTVEESGEDKSQSAPGVAPPADPIIPVTQPPQQQMPPIGMPMHPIAPGYEAQAQGQGHMPPMMPPYGGAPGMYPPYPMLHQQEIAALQQQIQELYCMPPGHELQHQDKLMRMQERLNLLTQHEVNDQCAGGPQCLLFQNVPPMYGPPGNPLLNQQMVESPQVSSTTGRGRGKSANKPRKPRAKKGEKAQVGQQQDLMDISGNVAMGAANAVSSIPTTQLPVSEDCVTQGAGDTSVVGMLEYSEGMGDLSQDVHSANELDTSTDGSGKKKKPRKPRTPKDPNKPPRDRTPKAKKPKDPNDPNSTETPAAVKKRAGASKRRKQYGEDGAEQTGEGSEVEDNKPLVPKAGSADGEAETTSGGTGVDGESPDYDDIPVSKIPRGSNEDEKEAEAGDETVDSVPDSAGDPASTPSRRDRKRSTARSRRNANSEEGGSARKNRGSLSAKALKKRRNRGRIVPESDGEDDTLDRTPPPSPPPDSEMDSNKRRSSRNTQRKKYIDDVMLRFSDDENSLLVASPVKKDKKPSANASNSNAGSDVEKTEPQSGAEGDAAQEVGEEKSNLPLDESSQLEASSSTSAVAEKERQISTDAANAAMSSKPNYVYINTGDEDSMVVQLVLAMRMGKRELILDKPKEKAPEPKQDEEKSELDEATTDKPEGDEKFKTEGESKKDLTDSEETKLESSAMEVDSKEESEPDDSKKSDEDNKDKDKMEVDDEVGKSDKESKPEEQSETVKTEENSKAIEEDKSSTVLTADHAKEPETVLEKMEVDEKANDDQSAVSKAEGSDEKSTDDSNPEEATTEKNKESLEIEGEKERVKEGEESVKKENDEKTEADMENKPEPVFIDVEEYFVKYRNFSYLHCEWRTEEELLKGDRRVAAKIRRFQQKQSQQLNIFENIEDEPFNQDFTEVDRVLDMSVHTDETSGETTKHYLVKWKSLPYEDCTWELEEDVDNDKIEQYLRFNKIPQRSEWKSKKRPHPELWKKLEKTPVYKGGNSLRPYQLEGLNWLKFSWYNTHNCILADEMGLGKTIQSLTFVHSVYEYGIRGPFLVIAPLSTIPNWQREFEGWTDMNVVVYHGSVTSKQMIQDYEYYYKTESGKVLKEPIKFNVLITTFEMIVTDYMDLKAFNWRLCVIDEAHRLKNRNCKLLEGLRQLNLEHRVLLSGTPLQNNISELFSLLNFLEPSQFSSQEEFMSEFGSLRTEEEVNKLQALLKPMMLRRLKDDVEKSLAPKEETIIEVELTNIQKKYYRGILEQNFSFLKKGTTSANIPNLMNTMMELRKCCIHPYLLNGAEEQIQYDFKSQHGEDPESYYKNLILSAGKMVLIDKLLPKLKANGHRVLIFSQMVRCLDILEDYLVYRKYPFERIDGRIRGNLRQEAIDRYSKPGSDRFVFLLCTKAGGLGINLTAADTVIIYDSDWNPQNDLQAQARCHRIGQRKMVKIYRLLCRNTYEREMFDKASMKLGLDKAVLQSMNTQGSKDGNNKQLSKKEIEDLLKKGAYGAVMDDDNAGDKFCEEDIDSILKRRTQVITMESEKGSTFSKASFAASGNRSDITIDDPDFWTKWAKKVDIDPDACERDETEDLVLSEPRRRTQIKRYGHEDVMELNSEESSNENSDEEGGIGLRSRRRKEKRDRAREKKGNDEYIPRERDALAALGLEEIQYGNWAKSECFKVEKGLLSFGWGRWSELLELGQFKRGWRDVDVEDCARIILLYCLQVYKGDEKIKTFIWDLITPTEDGEVQKISRDHSGLHNLVPRGRNGGKSNKESTGVSTPAPGSASGSNSGNTTPAHKSSALDGSDKDSGGINASAVAAAVTSIHDPNHWSKKEKYDADAYLEGAYKKHLGRHANKVLLRVRMLYYIQHEVIGDFVQQIKDNTPISELPIRPPPTPDQVPSSWWNPICCDKSLLVGTYKHGCEMYRQMRADPNLCFVTHVGAGAAGDDLAVTSLPINEDDANSKHDDGDEVDDDGTTTTKDSDSTKLTGGDNKDSLLDPERPSSSGLDEEESVAGSYPPTVAAVEDATTMWPSMQDLNTRLRRVITAYQRNYKKEELKLQQKAKLQALVSSTPPLSVPTTPTLQSMQMQLQSGSGSGGSGIGSSAQHDASGRSLQALMQSQGASTSAAAAAAASSAGGSCSGSGQVGMGGAGVMPAMPTAADISLMLSILNTTDVNQLANLDINKLAMYLVSMNNKMERQGKMELAAKERESQRLQLIPKKWNRREEYEFLRVLTGYGVDLHVSTPMASSNGSSLSPDWTKFKQMAHLERKSDETLTDYYKVFVAMCKRQAGLKLSESERGLEGIIEEIEKEHAKLILDRLEVLAKLREVARNPMLEERLKLCTKNADTPDWWEPGRHDKELITAVLKHGLYRSETFIFNDPNFSFGESEKRFIRELEAQIQRTIKLEAFNAEKAEKLAAAEKDAATEKAAATEKAAAEKAASVKNEVIDLDDELMTNESVIKKESPVTPIKEEIKSEESPEKHDTADNLEDKNSDAEESTKIKGKEDFNPETTEKEALDESTNLNKDKSSTETLVPEIEDSKPSEDKMEVEELPVAENGEKEGSPEKCSDAEDKKFSEEKPSSPAVPDGKVSEMEADEAAPNTEENCSGDSESPEKECEDKVVEKVEEEKGENSYEKAEEQKEETEKLEKSSIESEPSEKSETVLEPEVAVPKKSTGDQDILDLVAGPSDPDDDEVMKEKEKAVEEECKKQAAELKARFPDLEVIQPATVKQQKLEKPKLEMCMIRWFKDFALERRIAHIVACVESGNWPVDSKYSAFATCKGATDLSIALHESIPHLSSLERRSTTPDVITITTDQGVTKHLQTSHMQQVASSASAASTSSGVPQVTQSKPSSSNSLPGLDAKSINAAVAAAVAAAAAGGNATSLSSLLPGMSLSAATGSSAGGVSGLSVPSAGSGVGKKRKRHIAIDVETERAKLHALLNSSTMAPKDWESEIANMEALSGSSGRGRGGNSSASSGMQPPPAHQHASLSRQSSGQFSKPAVPAMKTPPPSMGAPMDLSSSLPKMNMTEMLKSASSSGAIDLSEVQDFSMPSKKSSVHAALSSAFPSMGNKSKLDDTLNKLMKKNNCTIEEPVIGKEKKRKKLDEIVLGLSAAKEQKTFPDPSLPSSKKPQIPPSVSVTPANLQSSSNQQSNQKPFTITVTTVPGKSKSGSSNSGSGTGGSSSASGGGAGGSGLSALQNMAMGGLSSKDSLNALLAQTMATDPQTFLKQQQKMMQFLPPAQRKAYENMLAEMEQAMKISSKFSTNSPHDVKVNKWLSDMTSPLGDQLSIDYVGGGGASGSGSGNSRRSNRQQGNSQQSSSAAQLQKQQQQQQQQQQQQQQHSMPGPQNLTGEEPVPVINKQTGKRLGGNKAPQLKRLMQWLTENPNYEVDPKWLEQMQNPMSTPSPRPASMESGYGSSAVKSHGGRPLSNLSSTSSSSHTQQQSSAAQSQAGGNSGSSKKNSRQQTAASAALDQAALQFGSLAGLNPSLLANLPGLGAFDPKNPLAAFDPKNPLLSMSFGGMPGMGNIPGLGNLNNMNLFASLAGMGGLGNLAGMDTQSLAALMAAAGPTLGGLTGASGGAGSGKSQAQSQSSATSSSSSASKKKQQQQQQQAQNEAAQLAAAISASTGGSGASGGKNAAASASQLAAGFPFLFPNPSLLYPPMGLGGLNPYSLGSSGLGSAYDQLAQQYNLLNGATSSASNTSSTQSKSHQSQSKSSQSRNTTASANSAASLMNAMASMGGGASTVTTPSTSASGSGRGRQSSSRNQSQTTPTAADMAQLSSLLMPGADPHLLESLSRMSNMDLAQATRLMSSLGMPPLSGTPSSSGGGNTSTSKRSSQAANEANVQAKEQQKWLESLARGALPTDLAALQAFSQGKMPSTSGSNTGTSTSSSKSSKAAATAAAAQLPQIPGMSSDFPQAFLAEMAAQAMAAAGGSLPLSGPGSLASLAGLTGGSAGGGGSSASGSTSHSSSKRQREQDAFKQQMDYYTKTLGLGSGISLIPTSSAGGSSASSSAANAAAAAYAAALDAEQQHQQQQKALSKRARGDLHPTKEELAALAAGLPLNLGASMSSIEKSLRGGSSSSSSSTPAPMTAEQDKVTLTPLNASGGGSGSSSSSAAAAGLAANLPSQTTITIAPPISSGASTSSERSERSESRISLTITNAADAAKLPPPYEEADELIIQPILKKPTAANPGSSHGGSVDDLDTAENTSAANLSGSSSSSAAAAAAAAAEENRRSSNRLKRPRSGNEQGSGSVEGQPPEKRRELRSTRHTRSSADASTLNLSTGSESGAEERNE

SEQ ID NO: 8730 - protein, 1883 aa, Drosophila melanogaster
MSQALNESANSIGSDEQDDTREEANGTDHSGSGSGSGSSGSDSDSDSSSGNSSDGRSSPEPEDKSLSVAGFPPTAAAAQADSKTNGFTDDQEDSSSDGSSGSDSDSDAEGPSDQRNQSINNANTSSSLPKPEQNEEEDNETEAGQQQPASDASADESSDSSANVSPTSSSSSSEEEEEDYRPKRTRQARKPPTAAEKSKKAPAPKNKKKTWDSDESDESEDSDDEVSTAQKRKPAATTSRSKLAQQQQRRRVKPFSSEDSDDDDASKRCATRRKGAAVSYKEASEDEATDSEDLLEFEYDESQAATTAATAEEEEKCETIERILAQRAGKRGCTGNQTTIYAIEENGFDPHAGFDEKQTPDAETEAQFLIKWKGWSYIHNTWESEATLRDMKAKGMKKLDNFIKKEKEQAYWRRYAGPEDIDYFECQLELQHELLKSYNNVDRIIAKGSKPDDGTEEYLCKWQSLPYAESTWEDAALVLRKWQRCAEQFNDRESSKCTPSRHCRVIKYRPKFSRIKNQPEFLSSGLTLRDYQMDGLNWLLHSWCKENSVILADEMGLGKTIQTICFLYSLFKIHHLYGPFLCVVPLSTMTAWQREFDLWAPDMNVVTYLGDIKSRELIQQYEWQFESSKRLKFNCILTTYEIVLKDKQFLGTLQWAALLVDEAHRLKNDDSLLYKSLKEFDTNHRLLITGTPLQNSLKELWALLHFIMPDKFDTWENFEVQHGNAEDKGHTRLHQQLEPYILRRVKKDVEKSLPAKVEQILRVEMTSLQKQYYKWILTKNFDALRKGKRGSTSTFLNIVIELKKCCNHAALIRPSEFELMGLQQDEALQTLLKGSGKLVLLDKLLCRLKETGHRVLIFSQMVRMLDVLADYLQKRHFPFQRLDGSIKGEMRRQALDHFNAEGSQDFCFLLSTRAGGLGINLATADTVIIFDSDWNPQNDLQAQARAHRIGQKNQVNIYRLVTARSVEEQIVERAKQKMVLDHLVIQRMDTTGRTVLDKSGNGHSSNSNPFNKDDLSAILKFGAEELFKDEQEHDDDLVCDIDEILRRAETRNEDPEMPADDLLSAFKVASIAAFEEEPSDSVSKQDQNAAGEEDDSKDWDDIIPEGFRKAIDDQERAKEMEDLYLPPRRKTAANQNEGKRGAGKGGKGKQQADDSGGDSDYELGSDGSGDDGRPRKRGRPTMKEKITGFTDAELRRFIRSYKKFPAPLHRMEAIACDAELQEKPLAELKRLGEMLHDRCVQFLHEHKEEESKTAATDETPGAKQRRARATFSVKLGGVSFNAKKLLACEQELQPLNEIMPSMPEERQQWSFNIKTRAPVFDVDWGIEEDTKLLCGIYQYGIGSWEQMKLDPTLKLTDKILLNDTRKPQAKQLQTRAEYLLKIIKKNVELTKGGQRRQRRPRASRANDAKAASQSASSTIDAKPHDGEDAAGDARTVAESSNSQVDPSNASPHNAPATEQHGDPAKKAKKSKARSKKTSASDNNGNKPMHFTANNEPRALEVLGDLDPSIFNECKEKMRPVKKALKALDQPDVSLSDQDQLQHTRDCLLQIGKQIDVCLNPYAETEKKEWRSNLWYFVSKFTELDAKRLFKIYKHALKQKAGGDGEAKGKDKGSSGSPAKSKPNGVTTEEKEKERDRSGGKKKKKDKDKERSGQARYPETGIPTSGRYADPPLKRKRDENDADASSGLAGAPGGGIGDNLKSMSFKRLNMDRHEDRKKHHRGPDYYGGSGPPMGSGSYEGGSNSRSQGPTSPSTPRTGRGGYDPPPAPSGYTPEMERWQSRDRYSQDYKRDRYDGYGRSGGGQGIYHRERDRRPEKRRYPSGLPPHPYSSHYLPPNYYGLPNGAVPGLPPPSSVYRSDPRGYPVMPRDYPADYRRSDYERRTQT

SEQ ID NO: 8731 - protein, 1883 aa, Drosophila melanogaster
MSQALNESANSIGSDEQDDTREEANGTDHSGSGSGSGSSGSDSDSDSSSGNSSDGRSSPEPEDKSLSVAGFPPTAAAAQADSKTNGFTDDQEDSSSDGSSGSDSDSDAEGPSDQRNQSINNANTSSSLPKPEQNEEEDNETEAGQQQPASDASADESSDSSANVSPTSSSSSSEEEEEDYRPKRTRQARKPPTAAEKSKKAPAPKNKKKTWDSDESDESEDSDDEVSTAQKRKPAATTSRSKLAQQQQRRRVKPFSSEDSDDDDASKRCATRRKGAAVSYKEASEDEATDSEDLLEFEYDESQAATTAATAEEEEKCETIERILAQRAGKRGCTGNQTTIYAIEENGFDPHAGFDEKQTPDAETEAQFLIKWKGWSYIHNTWESEATLRDMKAKGMKKLDNFIKKEKEQAYWRRYAGPEDIDYFECQLELQHELLKSYNNVDRIIAKGSKPDDGTEEYLCKWQSLPYAESTWEDAALVLRKWQRCAEQFNDRESSKCTPSRHCRVIKYRPKFSRIKNQPEFLSSGLTLRDYQMDGLNWLLHSWCKENSVILADEMGLGKTIQTICFLYSLFKIHHLYGPFLCVVPLSTMTAWQREFDLWAPDMNVVTYLGDIKSRELIQQYEWQFESSKRLKFNCILTTYEIVLKDKQFLGTLQWAALLVDEAHRLKNDDSLLYKSLKEFDTNHRLLITGTPLQNSLKELWALLHFIMPDKFDTWENFEVQHGNAEDKGYTRLHQQLEPYILRRVKKDVEKSLPAKVEQILRVEMTSLQKQYYKWILTKNFDALRKGKRGSTSTFLNIVIELKKCCNHAALIRPSEFELMGLQQDEALQTLLKGSGKLVLLDKLLCRLKETGHRVLIFSQMVRMLDVLADYLQKRHFPFQRLDGSIKGEMRRQALDHFNAEGSQDFCFLLSTRAGGLGINLATADTVIIFDSDWNPQNDLQAQARAHRIGQKNQVNIYRLVTARSVEEQIVERAKQKMVLDHLVIQRMDTTGRTVLDKSGNGHSSNSNPFNKDDLSAILKFGAEELFKDEQEHDDDLVCDIDEILRRAETRNEDPEMPADDLLSAFKVASIAAFEEEPSDSVSKQDQNAAGEEDDSKDWDDIIPEGFRKAIDDQERAKEMEDLYLPPRRKTAANQNEGKRGAGKGGKGKQQADDSGGDSDYELGSDGSGDDGRPRKRGRPTMKEKITGFTDAELRRFIRSYKKFPAPLHRMEAIACDAELQEKPLAELKRLGEMLHDRCVQFLHEHKEEESKTAATDETPGAKQRRARATFSVKLGGVSFNAKKLLACEQELQPLNEIMPSMPEERQQWSFNIKTRAPVFDVDWGIEEDTKLLCGIYQYGIGSWEQMKLDPTLKLTDKILLNDTRKPQAKQLQTRAEYLLKIIKKNVELTKGGQRRQRRPRASRANDAKAASQSASSTIDAKPHDGEDAAGDARTVAESSNSQVDPSTASPHNAPATEQHGDPAKKAKKSKARSKKTSASDNNGNKPMHFTANNEPRALEVLGDLDPSIFNECKEKMRPVKKALKALDQPDVSLSDQDQLQHTRDCLLQIGKQIDVCLNPYAETEKKEWRSNLWYFVSKFTELDAKRLFKIYKHALKQKAGGDGEAKGKDKGSSGSPAKSKPNGVTTEEKEKERDRSGGKKKKKDKDKERSGQARYPETGIPTSGRYADPPLKRKRDENDADASSGLAGAPGGGIGDNLKSMSFKRLNMDRHEDRKKHHRGPDYYGGSGPPMGSGSYEGGSNSRRQGPTSPSTPRTGRGGYDPPPAPSGYTPEMERWQSRDRYSQDYKRDRYDGYGRSGGGQGSYHRERDRRPEKRRYPSGLPPHPYSSHYLPPNYYGLPNGAVPGLPPPSSVYRSDPRGYPVMPRDYPADYRRSDYERRTQT

SEQ ID NO: 8732 - protein, 1101 aa, Drosophila melanogaster
MDGLNWLLHSWCKENSVILADEMGLGKTIQTICFLYSLFKIHHLYGPFLCVVPLSTMTAWQREFDLWAPDMNVVTYLGDIKSRELIQQYEWQFESSKRLKFNCILTTYEIVLKDKQFLGTLQWAALLVDEAHRLKNDDSLLYKSLKEFDTNHRLLITGTPLQNSLKELWALLHFIMPDKFDTWENFEVQHGNAEDKGYTRLHQQLEPYILRRVKKDVEKSLPAKVEQILRVEMTSLQKQYYKWILTKNFDALRKGKRGSTSTFLNIVIELKKCCNHAALIRPSEFELMGLQQDEALQTLLKGSGKLVLLDKLLCRLKETGHRVLIFSQMVRMLDVLADYLQKRHFPFQRLDGSIKGEMRRQALDHFNAEGSQDFCFLLSTRAGGLGINLATADTVIIFDSDWNPQNDLQAQARAHRIGQKNQVNIYRLVTARSVEEQIVERAKQKMVLDHLVIQRMDTTGRTVLDKSGNGHSSNSNPFNKDDLSAILKFGAEELFKDEQEHDDDLVCDIDEILRRAETRNEDPEMPADDLLSAFKVASIAAFEEEPSDSVSKQDQNAAGEEDDSKDWDDIIPEGFRKAIDDQERAKEMEDLYLPPRRKTAANQNEGKRGAGKGGKGKQQADDSGGDSDYELGSDGSGDDGRPRKRGRPTMKEKITGFTDAELRRFIRSYKKFPAPLHRMEAIACDAELQEKPLAELKRLGEMLHDRCVQFLHEHKEEESKTAATDETPGAKQRRARATFSVKLGGVSFNAKKLLACEQELQPLNEIMPSMPEERQQWSFNIKTRAPVFDVDWGIEEDTKLLCGIYQYGIGSWEQMKLDPTLKLTDKILLNDTRKPQAKQLQTRAEYLLKIIKKNVELTKGGQRRQRRPRASRANDAKAASQSASSTIDAKPHDGEDAAGDARTVAESSNSQVDPSTASPHNAPATEQHGDPAKKAKKSKARSKKTSASDNNGNKPMHFTANNEPRALEVLGDLDPSIFNECKEKMRPVKKALKALDQPDVSLSDQDQLQHTRDCLLQIGKQIDVCLNPYAETEKKEWRSNLWYFVSKFTELDAKRLFKIYKHALKQKAGGDGEAKGKDKGSSGSPAKSKPNGVTTEKKKKK

SEQ ID NO: 8733 - protein, 788 aa, Drosophila melanogaster
EFNEMRRSLAPSQRGPLRPESRHSFTPPLLKKNKRSCQQELEREQELDRRRLGALRDASNTSELPLPIRFTANSEYELAIAKVLARKFKVPMDNYVPDYGGKRVLGVRRCISRRPLHDPMACNALVLFHPPAYTEHERMGMDPTKVLVHVVVDPLLSNILRPHQREGVRFMYECVEGKRGNFNGCIMADEMGLGKTLQCVTLVWTLLRQGPECKPTINKAIVVSPSSLVKNWEKEFTKWLHGRLLCLPMEGGTKENTIRALEQFSMTSARLGTPVLLISYETFRIYAEILCKYEVGMVICDEGHRLKNSDNLTYQALMGLKTKRRVLLSGTPIQNDLTEYYSLVNFVNPEMLGTAAVFKRNFESAILRGQNTDSTEQERQRAIEKTQELIGLVDQCIIRRTNQILTKYLPVKFEMVICAKLTAIQLELYTNFLKSDQVRRSLADCNEKASLTALADITTLKKICSHPDLIYEKLTAREKGFENSQNVLPSNYKPKDLNPELSGKFMLLDFMLAAIRAEGNDKVVLISNYTQTLDLFEQLARKRKYGFVRLDGTMSIKKRSKVVDRFNDPESDSFLFMLSSKAGGCGLNLIGANRLFMFDPDWNPANDEQAMARVWRDGQKKPCYIYRLVASGSIEEKILQRQTHKKSLSSTIIDNNESAEKHFTRDDLKDLFTFDANILSDTHDKLKCKRCVQNIQMKPPPEDTDCTSHLSQWYHCSNNRGLPDNILAQAWMDCKCVSFVFHHRSQAQEIVPSAEEEATDQPEEKPESRKRSSTPASDDSADEDFRGF

SEQ ID NO: 8734 - protein, 784 aa, Drosophila melanogaster
MRRSLAPSQRGPLRPESRHSFTPPLLKKNKRSCQQELEREQELDRRRLGALRDASNTSELPLPIRFTANSEYELAIAKVLARKFKVPMDNYVPDYGGKRVLGVRRCISRRPLHDPMACNALVLFHPPAYTEHERMGMDPTKVLVHVVVDPLLSNILRPHQREGVRFMYECVEGKRGNFNGCIMADEMGLGKTLQCVTLVWTLLRQGPECKPTINKAIVVSPSSLVKNWEKEFTKWLHGRLLCLPMEGGTKENTIRALEQFSMTSARLGTPVLLISYETFRIYAEILCKYEVGMVICDEGHRLKNSDNLTYQALMGLKTKRRVLLSGTPIQNDLTEYYSLVNFVNPEMLGTAAVFKRNFESAILRGQNTDSTEQERQRAIEKTQELIGLVDQCIIRRTNQILTKYLPVKFEMVICAKLTAIQLELYTNFLKSDQVRRSLADCNEKASLTALADITTLKKICSHPDLIYEKLTAREKGFENSQNVLPSNYKPKDLNPELSGKFMLLDFMLAAIRAEGNDKVVLISNYTQTLDLFEQLARKRKYGFVRLDGTMSIKKRSKVVDRFNDPESDSFLFMLSSKAGGCGLNLIGANRLFMFDPDWNPANDEQAMARVWRDGQKKPCYIYRLVASGSIEEKILQRQTHKKSLSSTIIDNNESAEKHFTRDDLKDLFTFDANILSDTHDKLKCKRCVQNIQMKPPPEDTDCTSHLSQWYHCSNNRGLPDNILAQAWMDCKCVSFVFHHRSQAQEIVPSAEEEATDQPEEKPESRKRSSTPASDDSADEDFRGF

SEQ ID NO: 8735 - protein, 784 aa, Drosophila melanogaster
MRRSLAPSQRGPLRPESRHSFTPPLLKKNKRSCQQELEREQELDRRRLGALRDASNTSELPLPIRFTANSEYELAIAKVLARKFKVPMDNYVPDYGGKRVLGVRRCISRRPLHDPMACNALVLFHPPAYTEHERMGMDPTKVLVHVVVDPLLSNILRPHQREGVRFMYECVEGKRGNFNGCIMADEMGLGKTLQCVTLVWTLLRQGPECKPTINKAIVVSPSSLVKNWEKEFTKWLHGRLLCLPMEGGTKENTIRALEQFSMTSARLGTPVLLISYETFRIYAEILCKYEVGMVICDEGHRLKNSDNLTYQALMGLKTKRRVLLSGTPIQNDLTEYYSLVNFVNPEMLGTAAVFKRNFESAILRGQNTDSTEQERQRAIEKTQELIGLVDQCIIRRTNQILTKYLPVKFEMVICAKLTAIQLELYTNFLKSDQVRRSLADCNEKASLTALADITTLKKICSHPDLIYEKLTAREKGFENSQNVLPSNYKPKDLNPELSGKFMLLDFMLAAIRAEGNDKVVLISNYTQTLDLFEQLARKRKYGFVRLDGTMSIKKRSKVVDRFNDPESDSFLFMLSSKAGGCGLNLIGANRLFMFDPDWNPANDEQAMARVWRDGQKKPCYIYRLVASGSIEEKILQRQTHKKSLSSTIIDNNESAEKHFTRDDLKDLFTFDANILSDTHDKLKCKRCVQNIQMKPPPEDTDCTSHLSQWYHCSNNRGLPDNILAQAWMDCKCVSFVFHHRSQAQEIVPSAEEEATDQPEENPESRKRSSTPASDDSADEDFRGF

SEQ ID NO: 8736 - protein, 628 aa, Drosophila melanogaster
RPHQREGVRFMYECVEGKRGNFNGCIMADEMGLGKTLQCVTLVWTLLRQGPECKPTINKAIVVSPSSLVKNWEKEFTKWLHGRLLCLPMEGGTKENTIRALEQFSMTSARLGTPVLLISYETFRIYAEILCKYEVGMVICDEGHRLKNSDNLTYQALMGLKTKRRVLLSGTPIQNDLTEYYSLVNFVNPEMLGTAAVFKRNFESAILRGQNTDSTEQERQRAIEKTQELIGLVDQCIIRRTNQILTKYLPVKFEMVICAKLTAIQLELYTNFLKSDQVRRSLADCNEKASLTALADITTLKKICSHPDLIYEKLTAREKGFENSQNVLPSNYKPKDLNPELSGKFMLLDFMLAAIRAEGNDKVVLISNYTQTLDLFEQLARKRKYGFVRLDGTMSIKKRSKVVDRFNDPESDSFLFMLSSKAGGCGLNLIGANRLFMFDPDWNPANDEQAMARVWRDGQKKPCYIYRLVASGSIEEKILQRQTHKKSLSSTIIDNNESAEKHFTRDDLKDLFTFDANILSDTHDKLKCKRCVQNIQMKPPPEDTDCTSHLSQWYHCSNNRGLPDNILAQAWMDCKCVSFVFHHRSQAQEIVPSAEEEATDQPEENPESRKRSSTPASDDSADEDFRGF

SEQ ID NO: 8737 - protein, 3201 aa, Drosophila melanogaster
MNEGNSAGGGHEGLSPAPPAVPDRVTPHSTEISVAPANSTSTTVRAAGSVGAALPATRHHQHIATQVKGIASSSSKQQKQLASAQLPVPLSPLPQQQQQTAEATAAAAAPAHSNVSVSSSTIEASVLPPQAKRQRLDDNEDRTSAASIVGPAESSNIVSSLLPASVASSSEVGGLSSTALQDLNALKKRILQQKLQILRNLKERHLENVSEYFYLQNGGSMMDYPAWRKKTPTPQFISYSNANRIDQLIHEDKPSTSAAAAAAQNQKYTTQQTDSVESSLVSGIGTGATKGAPLDGNISNSTVKTNTQSQVPSKIGSFTESTPAATESNSSTTVPGTATSGAATSTSATSAEASGNVLAVEAEIKIPAVGATPVAISTKLPAAVVQLTQQGGTPLLPCNTSAGSTALRRPQGQNNASSGSAAASGGGGSLTPTPLYTGNGPAALGGSGGLTPGTPTSGSLLSPALGGGSGTPNSAAQEFSFKAKQEVYVMQRISELQREGLWTERRLPKLQEPSRPKAHWDYLLEEMVWLAADFAQERKWKKNAAKKCAKMVQKYFQDKATAAQRAEKAQELQLKRVASFIAREVKSFWSNVEKLVEYKHQTKIEEKRKQALDQHLSFIVDQTEKFSQQLVEGMNKSVADTPSLNSSRLTSPKRESDDDFRPESGSEDDEETIAKAEEDAADVKEEVTALAKESEMDFDDFLNDLPPGYLENRDKLMKEEQSSAIKTETPDDSDDSEFEAKEASDDDENTISKQEEAEQEIDHKKEIDELEADNDLSVEQLLAKYKSEQPPSPKRRKLAPRDPELDSDDDSTAVDSTEESEDAATEDEEDLSTVKTDTDMEEQDEQEDGLKSLMADADATSGAAGSGSTAGASGNKDDMLNDAAALAESLQPKGNTLSSTNVVTPVPFLLKHSLREYQHIGLDWLVTMNERKLNGILADEMGLGKTIQTIALLAHLACAKGNWGPHLIVVPSSVMLNWEMEFKKWCPGFKILTYYGSQKERKLKRVGWTKPNAFHVCITSYKLVVQDQQSFRRKKWKYLILDEAQNIKNFKSQRWQLLLNFSTERRLLLTGTPLQNDLMELWSLMHFLMPYVFSSHREFKEWFSNPMTGMIEGNMEYNETLITRLHKVIRPFLLRRLKKEVEKQMPKKYEHVITCRLSNRQRYLYEDFMSRAKTRETLQTGNLLSVINVLMQLRKVCNHPNMFEARPTISPFQMDGITFHTPRLVCDIMEYDPFTQINLETLNLLLLHLEQTMTAYVSHKSRLLAPPRKLIEDIDTAPLPAPRCPNGKYRFHIRVRSAELAQRIKLNAVKVGASPAMRLEGSKIMPMRNLLPSGRVLKRVSASINPVNMALKPVVINSVVTTTSSSTTASSPTGALSVLSNSKLLGARSQINAPTPAKVAKTMQDGKPFFYLTPATNSGAAGARLTLTSKTTASASTTTSRTTVTASTTSGQQLIRDPIVKDLATHVKSTVQKQSIANGKTEPEEETEAEDPYKVQELIQMRKEQRLAALKRMAMINRRRTDATPIYGEDCREAIQRCMQATRSLKRSTWQTRGYANCCTAMAHRNGWSLNHLLKSFEERCADLKPVFANFVIYVPSGCAPRIRRYVQNLLLTHWQHEPRIENIVDQALRAKLALLHPIISEMTTKFPDPRLIQYDCGKLQTMDRLLRQLKVNGHRVLIFTQMTKMLDVLEAFLNYHGHIYLRLDGSTRVEQRQILMERFNGDKRIFCFILSTRSGGVGINLTGADTVIFYDSDWNPTMDAQAQDRCHRIGQTRDVHIYRLVSERTIEVNILKKANQKRMLSDMAIEGGNFTTTYFKSSTIKDLFTMEQSEQDESSQEKSENKDRIVATTTLSDTPSTVVETEKQSLRAFEHALAAAEDEQDVQATKTAKAEVAADLAEFDENIPIATEDPNAEGGPQVELSKADLEMQNLVKQLSPIERYAMRFVEETGAAWTAEQLRAAEAELEAQKREWEANRLAAMHKEEELLKQETEAEEMLTYSRKDSSNQVWISRNTMEQMPMWCPPTPPQDNDNDIYIDYSLSFMYELEPIAETDLPPVYVRKEHKRSRTDAGYDGSRRPNKMRREDNYVPPRSLFDRPTPQLARLRRELKSQRFRGSFKPNMPIPGLKPQLPTKPLTEPEAMAEWCVFEDMAILHVLGNLQGLPCSLMLLSPGQTPNWDLVSEMVNFCSKTYRSARQCPWRYETHIQPREEGKVVESPKKQKKLKPTLRTEYLKSPLRYLRTTQLYVSDNNASFYKTMRSRFDSIKTAYLKKAPPPKRQFSAPSLMNPKHMEVLQEFGILNYDQPVSPQNIAAMKANKIREKQRGQQMSQPPVGVGVVQQMQQQSQQQQQSQQQQQPAPPPLPQQQQPQQVVQQVQQQQQQQQQQQVVQQQLPTVSNVQQTLPVQQTVELVQQQPTTTTTVAVPAAGGQLQQLQIQHLTSSNVSPGQQTAILLHQPQQQLRTHPGQGGQSNTQQLVKTIVGTSSSLTAGQLQQLAQQSAVASGGQSSVSVVLTTPVQSLPSVVQPQIGSGAQIVSISSQTLPVNSSPQLGSIVQTQSLPQVVSVSTLPTVGTVLTTTANQPQQQHQTTAVTTLNTTMLRGQRIVSTAAGNTLQQRTTAGGQSIVSMPNLGQGASPSQFQTQLRLAAVPTSPATQTTQLVTTKGIPVSALQQGGKTTVIPVTQQSGGAHIQLYRQRSLKVLQTTTQAVPSGSAGATGATANLVQAGGTIIQASNMATHVTSQKVAVSGMPGTSTTVQAGNVVSSVQMHGQARTQFIKQMAAGKQQLQRQVVSADGTTTTTAAGDMLLVKRHNILAAQKAQQASGALFTTTTGQQQQQQQQQGQLPVAGQPQQVTQHQIASLVKASTAAAASGSSVNAGGVTVSATNPTVQAGSVNMTLPQLKPGSQIKVTMPNQMRHLQMQQQLTMPRKISRMTQLVSASGQPTATNIITTTGPQQQQQGVTVSGGGTLPTVASQQQQQQHQQKVGGGNSVQAQLLHIQNTKGLSNSVTMQQIQQVMRSGQQGTLATTNLVLGKTSVGRVIPVSVASQANQRQTIQVVSAASAQALAAGNLRTHVAGPSIASTLKVAAPGSAGGQTTQQTLIAALQHNQRQNASPVRLQTTAGGNLLAVVQQQQQQQHTSIAGPTAGPAEVMTITQTTTTLPTVGSLQQQQQQQQQQGGISQPTTQQVRKLVQKKILIRSEKE

SEQ ID NO: 8738 - protein, 2497 aa, Drosophila melanogaster
MNEGNSAGGGHEGLSPAPPAVPDRVTPHSTEISVAPANSTSTTVRAAGSVGAALPATRHHQHIATQVKGIASSSSKQQKQLASAQLPVPLSPLPQQQQQTAEATAAAAAPAHSNVSVSSSTIEASVLPPQAKRQRLDDNEDRTSAASIVGPAESSNIVSSLLPASVASSSEVGGLSSTALQDLNALKKRILQQKLQILRNLKERHLENVSEYFYLQNGGSMMDYPAWRKKTPTPQFISYSNANRIDQLIHEDKPSTSAAAAAAQNQKYTTQQTDSVESSLVSGIGTGATKGAPLDGNISNSTVKTNTQSQVPSKIGSFTESTPAATESNSSTTVPGTATSGAATSTSATSAEASGNVLAVEAEIKIPAVGATPVAISTKLPAAVVQLTQQGGTPLLPCNTSAGSTALRRPQGQNNASSGSAAASGGGGSLTPTPLYTGNGPAALGGSGGLTPGTPTSGSLLSPALGGGSGTPNSAAQEFSFKAKQEVYVMQRISELQREGLWTERRLPKLQEPSRPKAHWDYLLEEMVWLAADFAQERKWKKNAAKKCAKMVQKYFQDKATAAQRAEKAQELQLKRVASFIAREVKSFWSNVEKLVEYKHQTKIEEKRKQALDQHLSFIVDQTEKFSQQLVEGMNKSVADTPSLNSSRLTSPKRESDDDFRPESGSEDDEETIAKAEEDAADVKEEVTALAKESEMDFDDFLNDLPPGYLENRDKLMKEEQSSAIKTETPDDSDDSEFEAKEASDDDENTISKQEEAEQEIDHKKEIDELEADNDLSVEQLLAKYKSEQPPSPKRRKLAPRDPELDSDDDSTAVDSTEESEDAATEDEEDLSTVKTDTDMEEQDEQEDGLKSLMADADATSGAAGSGSTAGASGNKDDMLNDAAALAESLQPKGNTLSSTNVVTPVPFLLKHSLREYQHIGLDWLVTMNERKLNGILADEMGLGKTIQTIALLAHLACAKGNWGPHLIVVPSSVMLNWEMEFKKWCPGFKILTYYGSQKERKLKRVGWTKPNAFHVCITSYKLVVQDQQSFRRKKWKYLILDEAQNIKNFKSQRWQLLLNFSTERRLLLTGTPLQNDLMELWSLMHFLMPYVFSSHREFKEWFSNPMTGMIEGNMEYNETLITRLHKVIRPFLLRRLKKEVEKQMPKKYEHVITCRLSNRQRYLYEDFMSRAKTRETLQTGNLLSVINVLMQLRKVCNHPNMFEARPTISPFQMDGITFHTPRLVCDIMEYDPFTQINLETLNLLLLHLEQTMTAYVSHKSRLLAPPRKLIEDIDTAPLPAPRCPNGKYRFHIRVRSAELAQRIKLNAVKVGASPAMRLEGSKIMPMRNLLPSGRVLKRVSASINPVNMALKPVVINSVVTTTSSSTTASSPTGALSVLSNSKLLGARSQINAPTPAKVAKTMQDGKPFFYLTPATNSGAAGARLTLTSKTTASASTTTSRTTVTASTTSGQQLIRDPIVKDLATHVKSTVQKQSIANGKTEPEEETEAEDPYKVQELIQMRKEQRLAALKRMAMINRRRTDATPIYGEDCREAIQRCMQATRSLKRSTWQTRGYANCCTAMAHRNGWSLNHLLKSFEERCADLKPVFANFVIYVPSGCAPRIRRYVQNLLLTHWQHEPRIENIVDQALRAKLALLHPIISEMTTKFPDPRLIQYDCGKLQTMDRLLRQLKVNGHRVLIFTQMTKMLDVLEAFLNYHGHIYLRLDGSTRVEQRQILMERFNGDKRIFCFILSTRSGGVGINLTGADTVIFYDSDWNPTMDAQAQDRCHRIGQTRDVHIYRLVSERTIEVNILKKANQKRMLSDMAIEGGNFTTTYFKSSTIKDLFTMEQSEQDESSQEKSENKDRIVATTTLSDTPSTVVETEKQSLRAFEHALAAAEDEQDVQATKTAKAEVAADLAEFDENIPIATEDPNAEGGPQVELSKADLEMQNLVKQLSPIERYAMRFVEETGAAWTAEQLRAAEAELEAQKREWEANRLAAMHKEEELLKQETEAEEMLTYSRKDSSNQVNTKTDSNSNKRRLVRENRRNSAQKLSRSVSSHSTGSNNKNSKSATTRGNSQNSLNQTVPVGSGISRVNRTGAGVSSSSRGKSNSTKSTGKGTDAAPQVRRQTRLHSLGAVNMASARTPATRKTTRTALAASAAASTLEDASLIVEERPKRQSANIAMSKMMKTPFNQNVPSTISIKTTPPKRGRRDSVAAAATRSKLLERRATIAAPLKHMDDDSDQDEEDQEEQESEEDTEGEEANATVDDDEEGEEELASLDEETIQTGSQTNDEEDDDEEEVGEEEMVDIDTEDSEADVKSSSTYGTAADGKPEEAESLDGWDAHDQVQDTTMTSSTYYNVSEESDTDEHHDSKAEAKEPPQNSDKSDESEAVGHTPRTRSRGTVKINLWTLDVSPVANALNKSSANRSLKKAPRTESTPKESQSEPRRKITQPKLPKKEETNNKSNSNIGTLHRWISKSPRVMLRSTPGTATSASSSAAVSGVSGGNASSSGTAR

SEQ ID NO: 8739 - protein, 2497 aa, Drosophila melanogaster
MNEGNSAGGGHEGLSPAPPAVPDRVTPHSTEISVAPANSTSTTVRAAGSVGAALPATRHHQHIATQVKGIASSSSKQQKQLASAQLPVPLSPLPQQQQQTAEATAAAAAPAHSNVSVSSSTIEASVLPPQAKRQRLDDNEDRTSAASIVGPAESSNIVSSLLPASVASSSEVGGLSSTALQDLNALKKRILQQKLQILRNLKERHLENVSEYFYLQNGGSMMDYPAWRKKTPTPQFISYSNANRIDQLIHEDKPSTSAAAAAAQNQKYTTQQTDSVESSLVSGIGTGATKGAPLDGNISNSTVKTNTQSQVPSKIGSFTESTPAATESNSSTTVPGTATSGAATSTSATSAEASGNVLAVEAEIKIPAVGATPVAISTKLPAAVVQLTQQGGTPLLPCNTSAGSTALRRPQGQNNASSGSAAASGGGGSLTPTPLYTGNGPAALGGSGGLTPGTPTSGSLLSPALGGGSGTPNSAAQEFSFKAKQEVYVMQRISELQREGLWTERRLPKLQEPSRPKAHWDYLLEEMVWLAADFAQERKWKKNAAKKCAKMVQKYFQDKATAAQRAEKAQELQLKRVASFIAREVKSFWSNVEKLVEYKHQTKIEEKRKQALDQHLSFIVDQTEKFSQQLVEGMNKSVADTPSLNSSRLTSPKRESDDDFRPESGSEDDEETIAKAEEDAADVKEEVTALAKESEMDFDDFLNDLPPGYLENRDKLMKEEQSSAIKTETPDDSDDSEFEAKEASDDDENTISKQEEAEQEIDHKKEIDELEADNDLSVEQLLAKYKSEQPPSPKRRKLAPRDPELDSDDDSTAVDSTEESEDAATEDEEDLSTVKTDTDMEEQDEQEDGLKSLMADADATSGAAGSGSTAGASGNKDDMLNDAAALAESLQPKGNTLSSTNVVTPVPFLLKHSLREYQHIGLDWLVTMNERKLNGILADEMGLGKTIQTIALLAHLACAKGNWGPHLIVVPSSVMLNWEMEFKKWCPGFKILTYYGSQKERKLKRVGWTKPNAFHVCITSYKLVVQDQQSFRRKKWKYLILDEAQNIKNFKSQRWQLLLNFSTERRLLLTGTPLQNDLMELWSLMHFLMPYVFSSHREFKEWFSNPMTGMIEGNMEYNETLITRLHKVIRPFLLRRLKKEVEKQMPKKYEHVITCRLSNRQRYLYEDFMSRAKTRETLQTGNLLSVINVLMQLRKVCNHPNMFEARPTISPFQMDGITFHTPRLVCDIMEYDPFTQINLETLNLLLLHLEQTMTAYVSHKSRLLAPPRKLIEDIDTAPLPAPRCPNGKYRFHIRVRSAELAQRIKLNAVKVGASPAMRLEGSKIMPMRNLLPSGRVLKRVSASINPVNMALKPVVINSVVTTTSSSTTASSPTGALSVLSNSKLLGARSQINAPTPAKVAKTMQDGKPFFYLTPATNSGAAGARLTLTSKTTASASTTTSRTTVTASTTSGQQLIRDPIVKDLATHVKSTVQKQSIANGKTEPEEETEAEDPYKVQELIQMRKEQRLAALKRMAMINRRRTDATPIYGEDCREAIQRCMQATRSLKRSTWQTRGYANCCTAMAHRNGWSLNHLLKSFEERCADLKPVFANFVIYVPSVCAPRIRRYVQNLSSTHWQHEQRIENIVDQALRPKLALLHPIISEMTTKFPDPRLIQYDCGKLQTMDRLLRQLKVNGHRVLIFTQMTKMLDVLEAFLNYHGHIYLRLDGSTRVEQRQILMERFNGDKRIFCFILSTRSGGVGINLTGADTVIFYDSDWNPTMDAQAQDRCHRIGQTRDVHIYRLVSERTIEVNILKKANQKRMLSDMAIEGGNFTTTYFKSSTIKDLFTMEQSEQDESSQEKSENKDRIVATTTLSDTPSTVVETEKQSLRAFEHALAAAEDEQDVQATKTAKAEVAADLAEFDENIPIATEDPNAEGGPQVELSKADLEMQNLVKQLSPIERYAMRFVEETGAAWTAEQLRAAEAELEAQKREWEANRLAAMHKEEELLKQETEAEEMLTYSRKDSSNQVNTKTDSNSNKRRLVRENRRNSAQKLSRSVSSHSTGSNNKNSKSATTRGNSQNSLNQTVPVGSGISRVNRTGAGVSSSSRGKSNSTKSTGKGTDAAPQVRRQTRLHSLGAVNMASARTPPTRKTTRTALAASAAASTLEDASLIVEERPKRQSANIAMSKMMKTPFKQNVPSNISIKTTPPKRGRRDSVAAAATRSKLLERRATIAAPLKHMDDESDQDEEEQEEQESEEDTEGEEANATVDDDEEGEEELASLDEETIQTGSQTNDEEDDDEEEVGEEGMVDIDTEDSEADVKSSSTYGTAADGKPEEAESLDGWDAHDQVQDTTMTSSTYYNVSEESDTDEHHDSKAEAKEPPQNSDKSDESEAVGHTPRTRSRGTVKINLWTLDVSPVANALNKSSANRSLKKAPRTESTPKESQSEPRRKITQPKLPKKEETNNKSNSNIGTLHRWISKSPRVMLRSTPVTAASASSSAAVSGVSGGNASSSGTAR

SEQ ID NO: 8740 - protein, 3198 aa, Drosophila melanogaster
MNEGNSAGGGHEGLSPAPPAVPDRVTPHSTEISVAPANSTSTTVRAAGSVGAALPATRHHQHIATQVKGIASSSSKQQKQLASAQLPVPLSPLPQQQQQTAEATAAAAAPAHSNVSVSSSTIEASVLPPQAKRQRLDDNEDRTSAASIVGPAESSNIVSSLLPASVASSSEVGGLSSTALQDLNALKKRILQQKLQILRNLKERHLENVSEYFYLQNGGSMMDYPAWRKKTPTPQFISYSNANRIDQLIHEDKPSTSAAAAAAQNQKYTTQQTDSVESSLVSGIGTGATKGAPLDGNISNSTVKTNTQSQVPSKIGSFTESTPAATESNSSTTVPGTATSGAATSTSATSAEASGNVLAVEAEIKIPAVGATPVAISTKLPAAVVQLTQQGGTPLLPCNTSAGSTALRRPQGQNNASSGSAAASGGGGSLTPTPLYTGNGPAALGGSGGLTPGTPTSGSLLSPALGGGSGTPNSAAQEFSFKAKQEVYVMQRISELQREGLWTERRLPKLQEPSRPKAHWDYLLEEMVWLAADFAQERKWKKNAAKKCAKMVQKYFQDKATAAQRAEKAQELQLKRVASFIAREVKSFWSNVEKLVEYKHQTKIEEKRKQALDQHLSFIVDQTEKFSQQLVEGMNKSVADTPSLNSSRLTSPKRESDDDFRPESGSEDDEETIAKAEEDAADVKEEVTALAKESEMDFDDFLNDLPPGYLENRDKLMKEEQSSAIKTETPDDSDDSEFEAKEASDDDENTISKQEEAEQEIDHKKEIDELEADNDLSVEQLLAKYKSEQPPSPKRRKLAPRDPELDSDDDSTAVDSTEESEDAATEDEEDLSTVKTDTDMEEQDEQEDGLKSLMADADATSGAAGSGSTAGASGNKDDMLNDAAALAESLQPKGNTLSSTNVVTPVPFLLKHSLREYQHIGLDWLVTMNERKLNGILADEMGLGKTIQTIALLAHLACAKGNWGPHLIVVPSSVMLNWEMEFKKWCPGFKILTYYGSQKERKLKRVGWTKPNAFHVCITSYKLVVQDQQSFRRKKWKYLILDEAQNIKNFKSQRWQLLLNFSTERRLLLTGTPLQNDLMELWSLMHFLMPYVFSSHREFKEWFSNPMTGMIEGNMEYNETLITRLHKVIRPFLLRRLKKEVEKQMPKKYEHVITCRLSNRQRYLYEDFMSRAKTRETLQTGNLLSVINVLMQLRKVCNHPNMFEARPTISPFQMDGITFHTPRLVCDIMEYDPFTQINLETLNLLLLHLEQTMTAYVSHKSRLLAPPRKLIEDIDTAPLPAPRCPNGKYRFHIRVRSAELAQRIKLNAVKVGASPAMRLEGSKIMPMRNLLPSGRVLKRVSASINPVNMALKPVVINSVVTTTSSSTTASSPTGALSVLSNSKLLGARSQINAPTPAKVAKTMQDGKPFFYLTPATNSGAAGARLTLTSKTTASASTTTSRTTVTASTTSGQQLIRDPIVKDLATHVKSTVQKQSIANGKTEPEEETEAEDPYKVQELIQMRKEQRLAALKRMAMINRRRTDATPIYGEDCREAIQRCMQATRSLKRSTWQTRGYANCCTAMAHRNGWSLNHLLKSFEERCADLKPVFANFVIYVPSVCAPRIRRYVQNLSSTHWQHEQRIENIVDQALRPKLALLHPIISEMTTKFPDPRLIQYDCGKLQTMDRLLRQLKVNGHRVLIFTQMTKMLDVLEAFLNYHGHIYLRLDGSTRVEQRQILMERFNGDKRIFCFILSTRSGGVGINLTGADTVIFYDSDWNPTMDAQAQDRCHRIGQTRDVHIYRLVSERTIEVNILKKANQKRMLSDMAIEGGNFTTTYFKSSTIKDLFTMEQSEQDESSQEKSENKDRIVATTTLSDTPSTVVETEKQSLRAFEHALAAAEDEQDVQATKTAKAEVAADLAEFDENIPIATEDPNAEGGPQVELSKADLEMQNLVKQLSPIERYAMRFVEETGAAWTAEQLRAAEAELEAQKREWEANRLAAMHKEEELLKQETEAEEMLTYSRKDSSNQVWISRNTMEQMPMWCPPTPPQDNDNDIYIDYSLSFMYELEPIAETDLPPVYVRKEHKRSRTDAGYDGSRRPNKMRREDNYVPPRSLFDRPTPQLARLRRELKSQRFRGSFKPNMPIPGLKPQLPTKPLTEPEAMAEWCVFEDMAILHVLVNLQGLPCSLMLLSPGQTPNWDLVSEMVNFCSKTYRSARQCRWRYETHIQPREEGKVVESPKKQKKLKPTLRTEYLKSPLRYLRTTQLYVSDNNASFYKTMRSRFDSIKTAYLKKAPPPKRQFSAPSLMNPKHMEVLQEFGILNYDQPVSPQNIAAMKANKIREKQRGQQMSQPPVGVGVVQQMQQQSQQQQQPAPPPLPQQQQPQQVVQQVQQQQQQQQQQQQQQVVQQQLPTVSNVQQTLPVQQTVELVQQQPTTTTTVAVPAAGGQLQQLQIQHLTSSNVSPGQQTAILLHQPQQQLRTHPGQGGQSNTQQLVKTIVGTSSSLTAGQLQQLAQQSAVASGGQSSVSVVLTTPVQTLPSVVQPQIGSGAQIVSISSQTLPVNSSPQLGSIVQTQSLPQVVSVSTLPTVGTVLTTTANQPQQQHQTTAVTTLNTTMLRGQRIVSTAAGNTLQQRTTAGGQSIVSMPNLGQGASPSQFQTQLRLAAVPTSPATQTTQLVTTKGIPVSALQQGGKTTVIPVTQQSGGAHIQLYRQRSLKVLQTTTQAVPSGSAGATGATANLVQAGGTIIQASNMATHVTSQKVAVSGMPGTSTTVQAGNVVSSVQMHGQARTQFIKQMAAGKQQLQRQVVSADGTTTTTAAGDMLLVKRHNILAAQKAQQASGALFTTTTGQQQQQQQQQGQLPVAGQPQQVTQHQIASLVKASTAAAASGSSVNAGGVTVSATNPTVQAGSVNMTLPQLKPGSQIKVTMPNQMRHLQMQQQLTMPRKISRMTQLVSASGQPTATNIITTTGPQQQQQGVTVSGGGTLPTVASQQQQQQHQQKVGGGNSVQAQLLHIQNTKGLSNSVTMQQIQQVMRSGQQGTLATTNLVLGKTSVGRVIPVSVASQANQRQTIQVVSAASAQALAAGNLRTHVAGPSIASTLKVAAPGSAGGQTTQQTLIAALQHNQRQNASPVRLQTTAGGNLLAVVQQQQQQQHTSIAGPTAGPAEVMTITQTTTTLPTVGSLQQQQQQQQQQGGISQPTTQQVRKLVQKKILIRSEKE

SEQ ID NO: 8741 - protein, 3183 aa, Drosophila melanogaster
MNEGNSAGGGHEGLSPAPPAVPDRVTPHSTEISVAPANSTSTTVRAAGSVGAALPATRHHQHIATQVKGIASSSSKQQKQLASAQLPVPLSPLPQQQQQTAEATAAAAAPAHSNVSVSSSTIEASVLPPQAKRQRLDDNEDRTSAASIVGPAESSNIVSSLLPASVASSSEVGGLSSTALQDLNALKKRILQQKLQILRNLKERHLENVSEYFYLQNGGSMMDYPAWRKKTPTPQFISYSNANRIDQLIHEDKPSTSAAAAAAQNQKYTTQQTDSVESSLVSGIGTGATKGAPLDGNISNSTVKTNTQSQVPSKIGSFTESTPAATESNSSTTVPGTATSGAATSTSATSAEASGNVLAVEAEIKIPAVGATPVAISTKLPAAVVQLTQQGGTPLLPCNTSAGSTALRRPQGQNNASSGSAAASGGGGSLTPTPLYTGNGPAALGGSGGLTPGTPTSGSLLSPALGGGSGTPNSAAQEFSFKAKQEVYVMQRISELQREGLWTERRLPKLQEPSRPKAHWDYLLEEMVWLAADFAQERKWKKNAAKKCAKMVQKYFQDKATAAQRAEKAQELQLKRVASFIAREVKSFWSNVEKLVEYKHQTKIEEKRKQALDQHLSFIVDQTEKFSQQLVEGMNKSVADTPSLNSSRLTSPKRESDDDFRPESGSEDDEETIAKAEEDAADVKEEVTALAKESEMDFDDFLNDLPPGYLENRDKLMKEEQSSAIKTETPDDSDDSEFEAKEASDDDENTISKQEEAEQEIDHKKEIDELEADNDLSVEQLLAKYKSEQPPSPKRRKLAPRDPELDSDDDSTAVDSTEESEDAATEDEEDLSTVKTDTDMEEQDEQEDGLKSLMADADATSGAAGSGSTAGASGNKDDMLNDAAALAESLQPKGNTLSSTNVVTPVPFLLKHSLREYQHIGLDWLVTMNERKLNGILADEMGLGKTIQTIALLAHLACAKGNWGPHLIVVPSSVMLNWEMEFKKWCPGFKILTYYGSQKERKLKRVGWTKPNAFHVCITSYKLVVQDQQSFRRKKWKYLILDEAQNIKNFKSQRWQLLLNFSTERRLLLTGTPLQNDLMELWSLMHFLMPYVFSSHREFKEWFSNPMTGMIEGNMEYNETLITRLHKVIRPFLLRRLKKEVEKQMPKKYEHVITCRLSNRQRYLYEDFMSRAKTRETLQTGNLLSVINVLMQLRKVCNHPNMFEARPTISPFQMDGITFHTPRLVCDIMEYDPFTQINLETLNLLLLHLEQTMTAYVSHKSRLLAPPRKLIEDIDTAPLPAPRCPNGKYRFHIRVRSAELAQRIKLNAVKVGASPAMRLEGSKIMPMRNLLPSGRVLKRVSASINPVNMALKPVVINSVVTTTSSSTTASSPTGALSVLSNSKLLGARSQINAPTPAKVAKTMQDGKPFFYLTPATNSGAAGARLTLTSKTTASASTTTSRTTVTASTTSGQQLIRDPIVKDLATHVKSTVQKQSIANGKTEPEEETEAEDPYKVQELIQMRKEQRLAALKRMAMINRRRTDATPIYGEDCREAIQRCMQATRSLKRSTWQTRGYANCCTAMAHRNGWSLNHLLKSFEERCADLKPVFANFVIYVPSVCAPRIRRYVQNLSSTHWQHEQRIENIVDQALRPKLALLHPIISEMTTKFPDPRLIQYDCGKLQTMDRLLRQLKVNGHRVLIFTQMTKMLDVLEAFLNYHGHIYLRLDGSTRVEQRQILMERFNGDKRIFCFILSTRSGGVGINLTGADTVIFYDSDWNPTMDAQAQDRCHRIGQTRDVHIYRLVSERTIEVNILKKANQKRMLSDMAIEGGNFTTTYFKSSTIKDLFTMEQSEQDESSQEKSENKDRIVATTTLSDTPSTVVETEKQSLRAFEHALAAAEDEQDVQATKTAKAEVAADLAEFDENIPIATEDPNAEGGPQVELSKADLEMQNLVKQLSPIERYAMRFVEETGAAWTAEQLRAAEAELEAQKREWEANRLAAMHKEEELLKQETEAEEMLTYSRKDSSNQVWISRNTMEQMPMWCPPTPPQDNDNDIYIDYSLSFMYELEPIAETDLPPVYVRKEHKRSRTDAGYDGSRRPNKMRREDNYVPPRSLFDRPTPQLARLRRELKSQRFRGSFKPNMPIPGLKPQLPTKPLTEPEAMAEWCVFEDMAILHVLVNLQGLPCSLMLLSPGQTPNWDLVSEMVNFCSKTYRSARQCRWRYETHIQPREEGKVVESPKKQKKLKPTLRTEYLKSPLRYLRTTQLYVSDNNASFYKTMRSRFDSIKTAYLKKAPPPKRQFSAPSLMNPKHMEVLQEFGILNYDQPVSPQNIAAMKANKIREKQRGQQMSQPPVGVGVVQQMQQQSQQQQQPAPPPLPQQQQPQQVVQQVQQQQQQQQQQQQQQVVQQQLPTVSNVQQTLPVQQTVELVQQQPTTTTTVAVPAAGGQLQQLQIQHLTSSNVSPGQQTAILLHQPQQQLRTHPGQGGQSNTQQLVKTIVGTSSSLTAGQLQQLAQQSAVASGGQSSVSVVLTTPVQTLPSVVQPQIGSGAQIVSISSQTLPVNSSPQLGSIVQTQSLPQVVSVSTLPTVGTVLTTTANQPQQQHQTTAVTTLNTTMLRGQRIVSTAAGNTLQQRTTAGGQSIVSMPNLGQGASPSQFQTQLRLAAVPTSPATQTTQLVTTKGIPVSALQQGGKTTVIPVTQQSGGAHIQLYRQRSLKVLQTTTQAVPSGSAGATGATANLVQAGGTIIQASNMATHVTSQKVAVSGMPGTSTTVQAGNVVSSVQMHGQARTQFIKQMAAGKQQLQRQVVSADGTTTTTAAGDMLLVKRHNILAAQKAQQASGALFTTTTGQQQQQQQQQGQLPVAGQPQQVTQHQIASLVKASTAAAASGSSVNAGGVTVSATNPTVQAGSVNMTLPQLKPGSQIKVTMPNQMRHLQMQQQLTMPRKISRMTQLVSASGQPTATNIITTTGPQQQQQGVTVSGGGTLPTVASQQQQQQHQQKVGGGNSVQAQLLHIQNTKGLSNSVTMQQIQQVMRSGQQGTLATTNLVLGKTSVGRVIPVSVASQANQRQTIQVVSAASAQALAAGNLRTHVAGPSIASTLKVAAPGSAGGQTTQQTLIAALQHNQRQNASPVRLQTTAGGNLLAVVQQQQQQQHTSIAGPTAGPAEVMTITQTTTTLPTVGSLQQQQQQQQQQGGISQPTTQQP

SEQ ID NO: 8742 - protein, 1207 aa, Drosophila melanogaster
MEEQDEQEDGLKSLMADADATSGAAGSGSTAGASGNKDDMLNDAAALAESLQPKGNTLSSTNVVTPVPFLLKHSLREYQHIGLDWLVTMNERKLNGILADEMGLGKTIQTIALLAHLACAKGNWGPHLIVVPSSVMLNWEMEFKKWCPGFKILTYYGSQKERKLKRVGWTKPNAFHVCITSYKLVVQDQQSFRRKKWKYLILDEAQNIKNFKSQRWQLLLNFSTERRLLLTGTPLQNDLMELWSLMHFLMPYVFSSHREFKEWFSNPMTGMIEGNMEYNETLITRLHKVIRPFLLRRLKKEVEKQMPKKYEHVITCRLSNRQRYLYEDFMSRAKTRETLQTGNLLSVINVLMQLRKVCNHPNMFEARPTISPFQMDGITFHTPRLVCDIMEYDPFTQINLETLNLLLLHLEQTMTAYVSHKSRLLAPPRKLIEDIDTAPLPAPRCPNGKYRFHIRVRSAELAQRIKLNAVKVGASPAMRLEGSKIMPMRNLLPSGRVLKRVSASINPVNMALKPVVINSVVTTTSSSTTASSPTGALSVLSNSKLLGARSQINAPTPAKVAKTMQDGKPFFYLTPATNSGAAGARLTLTSKTTASASTTTSRTTVTASTTSGQQLIRDPIVKDLATHVKSTVQKQSIANGKTEPEEETEAEDPYKVQELIQMRKEQRLAALKRMAMINRRRTDATPIYGEDCREAIQRCMQATRSLKRSTWQTRGYANCCTAMAHRNGWSLNHLLKSFEERCADLKPVFANFVIYVPSVCAPRIRRYVQNLSSTHWQHEQRIENIVDQALRPKLALLHPIISEMTTKFPDPRLIQYDCGKLQTMDRLLRQLKVNGHRVLIFTQMTKMLDVLEAFLNYHGHIYLRLDGSTRVEQRQILMERFNGDKRIFCFILSTRSGGVGINLTGADTVIFYDSDWNPTMDAQAQDRCHRIGQTRDVHIYRLVSERTIEVNILKKANQKRMLSDMAIEGGNFTTTYFKSSTIKDLFTMEQSEQDESSQEKSENKDRIVATTTLSDTPSTVVETEKQSLRAFEHALAAAEDEQDVQATKTAKAEVAADLAEFDENIPIATEDPNAEGGPQVELSKADLEMQNLVKQLSPIERYAMRFVEETGAAWTAEQLRAAEAELEAQKREWEANRLAAMHKEEELLKQETEAEEMLTYSRKDSSNQVWISRNTMEQMPMWCPPTPPQDNDNDIYIDYSLSFMYEL

SEQ ID NO: 8743 - protein, 1638 aa, Drosophila melanogaster
MEAKPVPAPQPRPRAMAEPLHIQRLEAALNMRPFMNMAKRSLRKPLSSDEETDDEHVVKREHDVQDSDDSSTVGVVRMKQSSKRKSRLLASKEERQSVKAQLYNFNDLTSDREWLYDLLLSDTESDDPTITEDEYVQQLLREHVREQRQRKNYYKKAANAQYAYYGSGLLSNHDIFAERQLATAGVRKRRRRTKQEILMARLAEAQAGPKPPKQRRRGRKKRDNMGSPESGEVPPSELGKYTFGDTLPNNEDDDEDGGEVDYKRELASLALDYPEEEEIEEEVDVEGGTEGQVTKVRRKRKNPAALAARRRRIWQIMSKKESGRLQRIKSNNHKEMLANCKRVAGMCAKVVRQRAINSQRIMKETVWRAKRLTREMLAYWKRYERVERDQRRKQEREAEEQRKQDVELIEVKRQQRKLNFLITQTELYAHFMSKKLGQGSEEDQLRILSQLDEETNARLAAQDDYDAGEMKLLAQENAEAAMQRDLDKTRAFDVFAKKKEKEEEEQAQESVEDIKPEPRPEMKDLPQPKMFKGTLKGYQIKGMTWLANIYDQGISGILADEMGLGKTVQSIAFLCHIAEHYGVWGPFLVISPASTLHNWQQEMSRFVPDFKVVPYWGSPAERKILRQFWDQKHLHTRDASFHVVITSYQLVVSDYKYFNRIKWQYMVLDEAQAIKSAASQRWKLLLGFSCRNRLLLSGTPIQNSMAELWALLHFIMPTLFDSHDEFNEWFSKDIESHAENKTGIDEKQISRLHMILKPFMLRRIKKDVENELSDKIEIMVYCPLTIRQKLLYRALKQKIRIEDLLHLTSGSTTTSSSSSASNLMNLVMQFRKVCNHPELFERRDARSPFFMRCAEYTIPRLIHEEGLIHRMLPSRKHLLYNRFNIFKSEYIQRSLFEDVNVNSCFGFTRLCDLSVGDMVEVTLNGLIDFLLHYRRVLEKYPLLAYRRFWWKKQPDSRYQLLEPMLENKLALDYMPPNSVLKNFIFTAMTANESSVYAFGDYFTYNMQETIEHRVIRSKILKKKTSLIEEMEDVSKQKLEIESVEVQTKSNAKSDVKVTTLLLLPEFPHRPRKPRKYVCEPLSMPRILYDLGQKVQAVHRYLYCDSRSAAWSQIRHNQCENSQGRELVSSGLALCKPHGGWSSIVVPDKETLITDAGKLFVLDNLLTRLKANGHRVLIYSQMTKMIDLLEEYMWHRKHRYMRLDGSSKISARRDMVADFQTRADIFVFLLSTRAGGLGINLTAADTVIFYDSDWNPTVDQQAMDRAHRLGQTKQVTVYRLICKGTIEERILQRAREKSEIQRMVISGGNFKPDTLKPKEVVSLLLDDEEIEMKYRQEAKLQSSSPIPAATQSERKRRHPQKDVNMGGTTIAATSATQNPDDDVPSCSSAAKRIKLETEEDFIDVGITSSASSVGTDSNHPTLSQETYVPGATCVQQTEIDSENEALVVDGDSPTMLGQNESMNFLDDLSGISPMRRRHHPRGTRRGRPRGSTRRGGGHGSIPRVLTPTQAATPAVPATASQAAAAGTGAAAGTSSPLPQQEVSGGGDNAGVPLHEEEYRTSPSGQSPGVSCKRGPGRPRSKTATPISRGTRGAPRARRPMGPLLVPLGRSPDDTPPSSSPATSRAPSPLSGSHGAVGPE

SEQ ID NO: 8744 - protein, 1638 aa, Drosophila melanogaster
MEAKPVPAPQPRPRAMAEPLHIQRLEAALNMRPFMNMAKRSLRKPLSSDEETDDEHVVKREHDVQDSDDSSTVGVVRMKQSSKRKSRLLASKEERQSVKAQLYNFNDLTSDREWLYDLLLSDTESDDPTITEDEYVQQLLREHVREQRQRKNYYKKAANAQYAYYGSGLLSNHDIFAERQLATAGVRKRRRRTKQEILMARLAEAQAGPKPPKQRRRGRKKRDNMGSPESGEVPPSELGKYTFGDTLPNNEDDDEDGGEVDYKRELASLALDYPEEEEIEEEVDVEGGTEGQVTKVRRKRKNPAALAARRRRIWQIMSKKESGRLQRIKSNNHKEMLANCKRVAGMCAKVVRQRAINSQRIMKETVWRAKRLTREMLAYWKRYERVERDQRRKQEREAEEQRKQDVELIEVKRQQRKLNFLITQTELYAHFMSKKLGQGSEEDQLRILSQLDEETNARLAAQDDYDAGEMKLLAQENAEAAMQRDLDKTRAFDVFAKKKEKEEEEQAQESVEDIKPEPRPEMKDLPQPKMFKGTLKGYQIKGMTWLANIYDQGISGILADEMGLGKTVQSIAFLCHIAEHYGVWGPFLVISPASTLHNWQQEMSRFVPDFKVVPYWGSPAERKILRQFWDQKHLHTRDASFHVVITSYQLVVSDYKYFNRIKWQYMVLDEAQAIKSAASQRWKLLLGFSCRNRLLLSGTPIQNSMAELWALLHFIMPTLFDSHDEFNEWFSKDIESHAENKTGIDEKQISRLHMILKPFMLRRIKKDVENELSDKIEIMVYCPLTIRQKLLYRALKQKIRIEDLLHLTSGSTTTSSSSSASNLMNLVMQFRKVCNHPELFERRDARSPFFMRCAEYTIPRLIHEEGLIHRMLPSRKHLLYNRFNIFKSEYIQRSLFEDVNVNSCFGFTRLCDLSVGDMVEVTLNGLIDFLLHYRRVLEKYPLLAYRRFWWKKQPDSRYQLLEPMLENKLALDYMPPNSVLKNFIFTAMTANESSVYAFGDYFTYNMQETIEHRVIRSKILKKKTSLIEEMEDVSKQKLEIESVEVQTKSNAKSDVKVTTLLLLPEFPHRPRKPRKYVCEPLSMPRILYDLGQKVQAVHRYLYCDSRSAAWSQIRHNQCENSQGRELVSSGLALCKPHGGWSSIVVPDKETLITDAGKLFVLDNLLTRLKANGHRVLIYSQMTKMIDLLEEYMWHRKHRYMRLDGSSKISARRDMVADFQTRADIFVFLLSTRAGGLGINLTAADTVIFYDSDWNPTVDQQAMDRAHRLGQTKQVTVYRLICKGTIEERILQRAREKSEIQRMVISGGNFKPDTLKPKEVVSLLLDDEEIEMKYRQEAKLQSSSPIPAATQSERKRRHPQKDVNMGGTTIAATSATQNPDDDVPSCSSAAKRIKLETEEDFIDVGITSSASSVGTDSNHPTLSQETYVPGATCVQQTEIDSENEALVVDGDSPTMLGQNESMNFLDDLSGISPMRRRHHPRGTRRGRPRGSTRRGGGHGSIPRVLTPTQAATPAVPATASQAAAAGTGAAAGTSSPLPQQEVSGGGDNAGVPLHEEEYRTSPSGQSPGVSCKRGPGRPRSKTATPISRGTRGAPRARRPMGPLLVPLGRSPDDTPPSSSPATSRAPSPSAGSHGAVGPE

SEQ ID NO: 8745 - protein, 844 aa, Drosophila melanogaster
MSDSTVAASASASASSSAKSSLSDLRQFRINKNASSVVASPSRTERVPGKKRIQVMADSDSDGNDSQTPKKTKLELTVKEKEERYMAAAKISPHFDTMAIQESLSRTNWDVAASVRYLRENCKPKGHNGPLAKSKLKPRSNGISGGNFSDNDHSDDDDVKQSKDQVYDSDDSDSEMSTKMTGQRKKVFQFMNEASLIELQSVKTLSEKKALAIIDVRPFSDWSDLRQKLESIRMSGDLLNYAQELINKQNTVAAILSKCNNMVSRLEKAISNGAGIVEQPKLLSSGLQLADYQIIGLNWLTVMHKQEMNGILADEMGLGKTIQVIAFLAYLKENGLSQAAHLIVVPSSTLDNWEAEISRWCPELVVEKYHGSQDERRRMRGRFAKDGFTGFDVLLTTYHIVGSTPEERKMFRVCKLDYVIFDEAHMLKNMTTQRYANLITINARMRILLTGTPLQNNLLELISLLCFVMPKFFAKSIEDIKSLFAKKGKSDGDQDEVSQFQETQIQRAKRIMKPFVLRRLKKDVLKNLPKKLSLVEKVPMSSQQKIYYHELVDYYSNNKGEVCSSSERAGIAIMMEMRRIANHPLLMRHYFTDANLRGFSKRLANASSFKKTNEQYIFEELAVMSDFQVYQMMNKHEFYDVKIPDNLICDSGKFLYLDTLLPKLKAEGHRVLLFSQFTMMLDIVEEYLRIRKFGFCRLDGATAVNVRQDLITDFNGDDSIFVFLLSTKAGGVGINLTAADTCVIHDIDFNPYNDKQAEDRCHRMGQQRPVTIYRLISESTIEEGILMAAEEKLKLEKDITSNEKGEVHEQRCVVKLLTTALGLDKDQEEQLNNSLNNSIASPAK

SEQ ID NO: 8746 - protein, 627 aa, Drosophila melanogaster
MSSKRGADPDWKTPGKASKDKRPKTNAKKQKFRDEEYCKVCSDGGDLLCCDSCPSVYHRTCLSPPLKSIPKGDWICPRCIPLPGKAEKILSWRWALDRSVELRTSKGEKRREYFIKWHGMSYWHCEWIPEGQMLLHHASMVASFQRRSDMEEPSLEELDDQDGNLHERFYRYGIKPEWLLVQRVINHSEEPNGGTMYLVKWRELSYNDSSWERESDSIPGLNQAIALYKKLRSSNKGRQRDRPAPTIDLNKKYEDQPVFLKEAGLKLHPFQIEGVSWLRYSWGQGIPTILADEMGLGKTIQTVVFLYSLFKEGHCRGPFLISVPLSTLTNWERELELWAPELYCVTYVGGKTARAVIRKHEISFEEVTTKTMRENQTQYKFNVMLTSYEFISVDAAFLGCIDWAALVVDEAHRLRSNQSKFFRILSKYRIGYKLLLTGTPLQNNLEELFHLLNFLSSGKFNDLQTFQAEFTDVSKEEQVKRLHEILEPHMLRRLKADVLKSMPPKSEFIVRVELSSMQKKFYKHILTKNFKALNQKGGGRVCSLLNIMMDLRKCCNHPYLFPSAAEEATISPSGLYEMSSLTKASGKLDLLSKMLKQLKADNHRVLLFSQMTKMLNVLEHFLEGEGY

SEQ ID NO: 8747 - protein, 664 aa, Drosophila melanogaster
MSDSTVAASASASASSSAKSSLSDLRQFRINKNASSVVASPSRTERVPGKKRIQVMADSDSDGNDSQTPKKTKLELTVKEKEERYMAAAKISPHFDTMAIQESLSRTNWDVAASVRYLRENCKPKGHNGPLAKSKLKPRSNGISGGNFSDNDHSDDDDVKQSKDQVYDSDDSDSEMSTKMTGQRKKVFQFMNEASLIELQSVKTLSEKKALAIIDVRPFSDWSDLRQKLESIRMSGDLLNYAQELINKQNTVAAILSKCNNMVSRLEKAISNGAGIVEQPKLLSSGLQLADYQIIGLNWLTVMHKQEMNGILADEMGLGKTIQVIAFLAYLKENGLSQAAHLIVVPSSTLDNWEAEISRWCPELVVEKYHGSQDERRRMRGRFAKDGFTGFDVLLTTYHIVGSTPEERKMFRVCKLDYVIFDEAHMLKNMTTQRYANLITINARMRILLTGTPLQNNLLELISLLCFVMPKFFAKSIEDIKSLFAKKGKSDGDQDEVSQFQETQIQRAKRIMKPFVLRRLKKDVLKNLPKKLSLVEKVPMSSQQKIYYHELVDYYSNNKGEVCSSSERAGIAIMMEMRRIANHPLLMRHYFTDANLRGFSKRLANASSFKKTNEQYIFEELAVMSDFQVYQMMNKHVSDYQRGCPMTMTKFVHLSGVLRRENTR

SEQ ID NO: 8748 - protein, 1095 aa, Drosophila melanogaster
MQDGKPFFYLTPATNSGAAGARLTLTSKTTASASTTTSRTTVTASTTSGQQLIRDPIVKDLATHVKSTVQKQSIANGKTEPEEETEAEDPYKVQELIQMRKEQRLAALKRMAMINRRRTDATPIYGEDCREAIQRCMQATRSLKRSTWQTRGYANCCTAMAHRNGWSLNHLLKSFEERCADLKPVFANFVIYVPSVCAPRIRRYVQNLSSTHWQHEQRIENIVDQALRPKLALLHPIISEMTTKFPDPRLIQYDCGKLQTMDRLLRQLKVNGHRVLIFTQMTKMLDVLEAFLNYHGHIYLRLDGSTRVEQRQILMERFNGDKRIFCFILSTRSGGVGINLTGADTVIFYDSDWNPTMDAQAQDRCHRIGQTRDVHIYRLVSERTIEVNILKKANQKRMLSDMAIEGGNFTTTYFKSSTIKDLFTMEQSEQDESSQEKSENKDRIVATTTLSDTPSTVVETEKQSLRAFEHALAAAEDEQDVQATKTAKAEVAADLAEFDENIPIATEDPNAEGGPQVELSKADLEMQNLVKQLSPIERYAMRFVEETGAAWTAEQLRAAEAELEAQKREWEANRLAAMHKEEELLKQETEAEEMLTYSRKDSSNQVNTKTDSNSNKRRLVRENRRNSAQKLSRSVSSHSTGSNNKNSKSATTRGNSQNSLNQTVPVGSGISRVNRTGAGVSSSSRGKSNSTKSTGKGTDAAPQVRRQTRLHSLGAVNMASARTPPTRKTTRTALAASAAASTLEDASLIVEERPKRQSANIAMSKMMKTPFKQNVPSNISIKTTPPKRGRRDSVAAAATRSKLLERRATIAAPLKHMDDESDQDEEEQEEQESEEDTEGEEANATVDDDEEGEEELASLDEETIQTGSQTNDEEDDDEEEVGEEGMVDIDTEDSEADVKSSSTYGTAADGKPEEAESLDGWDAHDQVQDTTMTSSTYYNVSEESDTDEHHDSKAEAKEPPQNSDKSDESEAVGHTPRTRSRGTVKINLWTLDVSPVANALNKSSANRSLKKAPRTESTPKESQSEPRRKITQPKLPKKEETNNKSNSNIGTLHRWISKSPRVMLRSTPVTAASASSSAAVSGVSGGNASSSGTAR

SEQ ID NO: 8749 - protein, 974 aa, Drosophila melanogaster
MSSENSEYYSDKEEDSVVNNSSLGRSRKSSRLSKSSRLSKSSRPSSAGVVIDETQSEEEESQSSETAESEKSDESDNSQNSQESEDSEDDSVRPSARNTKRKPLGIPSDSEDEEDELEQRALSPSTRMSITGVRPQDLSDDDSEIEYSDEVQEGPTEAPTAEAVVPGYTTQFAGNIQNDLHSTIGAADSEVLDDSSGSDVLILSNKETPIEILSSTDDDATTNKENMSGPPFERPSKSLSPRSSAGASVVKTSKNLSQPTIQAVLKQKTSPAAPRRSRIKSEDQKVVSQVVYDEEMRKLAEKRVQVSDAEKLFEKVAHKLPDKGSQIMKRIDTLRRELAMDEQWISALRVQQSNVPAVRVVKPTLNPPRAPSIDTLDWDELSEAVNEIKPVYTGAQGMATFNNQKALTLESLKDLHVSLEDLPGPEVLAEDPVGLKVSLMNHQKHALAWMSWRERKLPRGGILADDMGLGKTLTMISSVLACKNGQEMSEGKDESSDSDSEDDKNKKRKSVTGWKSKGRKDTRRGGTLVVCPASLLRQWESEVESKVSRQKLTVCVHHGNNRETKGKYLRDYDIVVTTYQIVAREHKSLSAVFGVKWRRIILDEAHVVRNHKSQSSLAVCDLRGKYRWALTGTPIQNKELDVYALLKFLRCSPFDDLHTWKKWIDNKSAGGQNRLNLLMKSLMLRRTKAQLQSDGKLNSLPNKELRLIEISLDKEEMNVYQTVMTYSRTLFAQFLHQRAERETDFNYRSDANKPTYNQIKDPNGAYYKMHEKFARMAGSKKEVKSHDILVLLLRLRQICCHPGLIDAMLDGEESQTMGDHSSDSDTPEIDLLAQLNKLAITDTSTDGQQSVANAGDDGPPLLPDEARIAKASKNLLKRSNPVFNLHRPSSKINMVIQILKTSILKSSDDKAIVVSQWTSVLDILRDHLSKDGVATLSLNGTIPVKNRQTLLMSSTIATIRSAFSCFPLLLAVWV

SEQ ID NO: 8750 - protein, 835 aa, Drosophila melanogaster
MSGPPFERPSKSLSPRSSAGASVVKTSKNLSQPTIQAVLKQKTSPAAPRRSRIKSEDQKVVSQVVYDEEMRKLAEKRVQVSDAEKLFEKVAHKLPDKGSQIMKRIDTLRRELAMDEQWISALRVQQSNVPAVRVVKPTLNPPRAPSIDTLDWDELSEAVNEIKPVYTGAQGMATFNNQKALTLESLKDLHVSLEDLPGPEVLAEDPVGLKVSLMNHQKHALAWMSWRERKLPRGGILADDMGLGKTLTMISSVLACKNGQEMSEGKDESSDSDSEDDKNKKRKSVTGWKSKGRKDTRRGGTLVVCPASLLRQWESEVESKVSRQKLTVCVHHGNNRETKGKYLRDYDIVVTTYQIVAREHKSLSAVFGVKWRRIILDEAHVVRNHKSQSSLAVCDLRGKYRWALTGTPIQNKELDVYALLKFLRCSPFDDLHTWKKWIDNKSAGGQNRLNLLMKSLMLRRTKAQLQSDGKLNSLPNKELRLIEISLDKEEMNVYQTVMTYSRTLFAQFLHQRAERETDFNYRSDANKPTYNQIKDPNGAYYKMHEKFARMAGSKKEVKSHDILVLLLRLRQICCHPGLIDAMLDGEESQTMGDHSSDSDTPEIDLLAQLNKLAITDTSTDGQQSVANAGDDGPPLLPDEARIAKASKNLLKRSNPVFNLHRPSSKINMVIQILKTSILKSSDDKAIVVSQWTSVLDILRDHLSKDGVATLSLNGTIPVKNRQDIVNEFNDRNNQKRVLLLSLTAGGVGLNLIGANHLLLLDLHWSPQLEAQAQDRIYRVGQKKNVIIYKFMCVDTVEQRIKGLQDKKLDLADGVLTGAKVSSKLTIDDLKGLFGM

SEQ ID NO: 8751 - protein, 1061 aa, Drosophila melanogaster
MSSENSEYYSDKEEDSVVNNSSLGRSRKSSRLSKSSRLSKSSRPSSAGVVIDETQSEEEESQSSETAESEKSDESDNSQNSQESEDSEDDSVRPSARNTKRKPLGIPSDSEDEEDELEQRALSPSTRMSITGVRPQDLSDDDSEIEYSDEVQEGPTEAPTAEAVVPGYTTQFAGNIQNDLHSTIGAADSEVLDDSSGSDVLILSNKETPIEILSSTDDDATTNKENMSGPPFERPSKSLSPRSSAGASVVKTSKNLSQPTIQAVLKQKTSPAAPRRSRIKSEDQKVVSQVVYDEEMRKLAEKRVQVSDAEKLFEKVAHKLPDKGSQIMKRIDTLRRELAMDEQWISALRVQQSNVPAVRVVKPTLNPPRAPSIDTLDWDELSEAVNEIKPVYTGAQGMATFNNQKALTLESLKDLHVSLEDLPGPEVLAEDPVGLKVSLMNHQKHALAWMSWRERKLPRGGILADDMGLGKTLTMISSVLACKNGQEMSEGKDESSDSDSEDDKNKKRKSVTGWKSKGRKDTRRGGTLVVCPASLLRQWESEVESKVSRQKLTVCVHHGNNRETKGKYLRDYDIVVTTYQIVAREHKSLSAVFGVKWRRIILDEAHVVRNHKSQSSLAVCDLRGKYRWALTGTPIQNKELDVYALLKFLRCSPFDDLHTWKKWIDNKSAGGQNRLNLLMKSLMLRRTKAQLQSDGKLNSLPNKELRLIEISLDKEEMNVYQTVMTYSRTLFAQFLHQRAERETDFNYRSDANKPTYNQIKDPNGAYYKMHEKFARMAGSKKEVKSHDILVLLLRLRQICCHPGLIDAMLDGEESQTMGDHSSDSDTPEIDLLAQLNKLAITDTSTDGQQSVANAGDDGPPLLPDEARIAKASKNLLKRSNPVFNLHRPSSKINMVIQILKTSILKSSDDKAIVVSQWTSVLDILRDHLSKDGVATLSLNGTIPVKKPSDIVNEFNDRNNQKRVLLLSLTAGGVGLNLIGANHLLLLDLHWNPQLEAQAQDRIYRVGQKKNVIIYKFMCVDTVEQRIKGLQDKKLDLADGVLTGAKVSSKLTIDDLKGLFGM

SEQ ID NO: 8752 - protein, 755 aa, Drosophila melanogaster
MSTCSSSEIAEKKRIALAKLQAKKSQLLASAPATNGKSTTSATGATQHANNGKSNPNQPQAKSPLNFYRSPTGEQKKINRSGPTPGDNKSSSFLNALKAIKQTSNRELSRGAAHPYQRPNGGNERNKPTLSLSSDKEKPVAVLLGNSITCNLYLISTHRFAAQTSGYHEQLVTVFKNMPTKCYDGQTRIWSFDLSDYQSLKTHAADLKPYVHMNGIPKKVLDLCGQPPVVPERSVLASIEPKLADQLMPFQQDGVCFAIAQKGRIMICDEMGLGKTYQALAVADYFKDDWPLLVCTTASTRDSWAKHIMDLLPKVPIHYVQVLNNNQLYVGEAKVLITSYNMMERHEDKLMQRKFGFIIFDESHTLKNSKAKCTTTAKRLTDQAKRVVLLSGTPALSRPLELFTQLQMIDGKFMNFMEFTTRYCDGKQSTFGWDANGQSNLEELKVILHLKYMLRRTKVEVLPQLAEKNRETVVLDPALVWTNAETKETLDAFNKELKTAKGRATEEILLRFYARTAEVKTRAVCAYLKTLVKEQKKFIIFAHHRVMMDAISDFLSGLKVHYIRIDGQTRSDHRSDSVDTFQKKSSCKVALLSLKACNSGITLTAAEIIVFAELDWNPSTLAQAESRAHRIGQTKPVICRYLIAHNTADDIIWNMLKNKQEVLSKVGIFAENLQKATHTAAPTSSHKIEEYFSPSTSTSLEPERNSIKQYFSTIPAKEPPEQNNNTEMTKVNKAESDIAAFFNDDDDEAFLELDI

SEQ ID NO: 8753 - protein, 1061 aa, Drosophila melanogaster
MSSENSEYYSDKEEDSVVNNSSLGRSRKSSRLSKSSRLSKSSRPSSAGVVIDETQSEEEESQSSETAESEKSDESDNSQNSQESEDSEDDSVRPSARNTKRKPLGIPSDSEDEEDELEQRALSPSTRMSITGVRPQDLSDDDSEIEYSDEVQEGPTEAPTAEAVVPRYTTQFAGNIQNDLHSTIGAADSEVLDDSSGSDVLILSNKETPIEILSSTDDDATTNKENMSGPPFERPSKSLSPRSSAGASVVKTSKNLSQPTIQAVLKQKTSPAAPRRSRIKSEDQKVVSQVVYDEEMRKLAEKRVQVSDAEKLFEKVAHKLPDKGSQIMKRIDTLRRELAMDEQWISALRVQQSNVPAVRVVKPTLNPPRAPSIDTLDWDELSEAVNEIKPVYTGAQGMATFNNQKALTLESLKDLHVSLEDLPGPEVLAEDPVGLKVSLMNHQKHALAWMSWRERKLPRGGILADDMGLGKTLTMISSVLACKNGQEMSEGKDESSDSDSEDDKNKKRKSVTGWKSKGRKDTRRGGTLVVCPASLLRQWESEVESKVSRQKLTVCVHHGNNRETKGKYLRDYDIVVTTYQIVAREHKSLSAVFGVKWRRIILDEAHVVRNHKSQSSLAVCDLRGKYRWALTGTPIQNKELDVYALLKFLRCSPFDDLHTWKKWIDNKSAGGQNRLNLLMKSLMLRRTKAQLQSDGKLNSLPNKELRLIEISLDKEEMNVYQTVMTYSRTLFAQFLHQRAERETDFNYRSDANKPTYNQIKDPNGAYYKMHEKFARMAGSKKEVKSHDILVLLLRLRQICCHPGLIDAMLDGEESQTMGDHSSDSDTPEIDLLAQLNKLAITDTSTDGQQSVANAGDDGPPLLPDEARIAKASKNLLKRSNPVFNLHRPSSKINMVIQILKTSILKSSDDKAIVVSQWTSVLDILRDHLSKDGVATLSLNGTIPVKNRQDIVNEFNDRNNQKRVLLLSLTAGGVGLNLIGANHLLLLDLHWNPQLEAQAQDRIYRVGQKKNVIIYKFMCVDTVEQRIKGLQDKKLDLADGVLTGAKVSSKLTIDDLKGLFGM

SEQ ID NO: 8754 - protein, 1534 aa, Drosophila melanogaster
MEESNPNYDVNQRLQKPEGWPHVNEFHPSMMYPDDPRRYFHNASTDPQHQPQQHPQQQPEQHPEQHPQHPLHSQQQPQQHPQQQPQQHPQQQTQQPPQLQPQQHPQAQIQPPIPVPISTPMEGTMEVPVKMPEYCPETSQPVEPDRVINPLAEVAKNTVPYGHKRKNSAGEDQAANKKLSMAAAEEKKNSHLRKNIRDVMNENNLDTTTLAAQREESERLARVAGQQKSMREIQKQVVHKQIFRILQLDESEGIESCAVANPVEHHPPVDFPEEEIASDTFDDSNSSSLSGGSIEDVLHKGASVQPSEVVTIDDSSDDDCILLSEEEEEEDDEDLNESDDATNSGMHVKDIYNVPDENGQVVVNMAHPEGEETLYLAPQIAKVIKPHQIGGVRFLYDNIIESTRRYNKSSGFGCILAHSMGLGKTLQVVSFCDIFLRHTSAKTVLCVMPINTLQNWLSEFNMWIPRYSTDSNVRPRNFDIFVLNDQQKTLTARAKVILNWVHDGGVLLIGYELFRLLALKLVKTRKRKGSVIRPDGMDSSSDLMNLVYEALVKPGPDLVICDEGHRIKNSHAGISLALKEIRTRRRIVLTGYPLQNNLLEYWCMVDFVRPNYLGTRTEFCNMFERPIQNGQCVDSTPDDIKLMRYRAHVLHSLLLGFVQRRSHTVLQLTLPQKYEYVILVKMTAFQRKLYDTFMTDVVRTKAFPNPLKAFAVCCKIWNHPDVLYNFLKKCETDLDLEIDEEVTKGAATPIVEPSADSSLSLASPLEKKINGSGDPINSIETPSFYDEKPEPLNYGSFGSEGKNNYWMDSSILPKPGCVEVIKQTDTNMSSNFESITGSSEIVDLDTNEIKTVETTIQAPCSNNQLDNGCNAGKPSEWNAAGSKNSSGVAAAEPFKKLLKSKQRNEEFSCSWAVDLMKNYVSGLISNSPKMEIFFCILKESLNLGDRILYGQTKPCFVYRIVMDRCLEKKIYDRQIKKQGMSDRIVDECNPEAHLSMKDITNLCQDYDSDEDTVEEVNKSTGDLSKPGSPSEEGSKPGSANMSPNASNKSNNGPTKPLDDQNTPKSPNGASHSPIKTEKNDGQEHAVHVDGIINTILDMHRHCVTKEPFMHESLLVDQKDRKLSQAEKRQAHRSYELEKKAAVNQRFTYAPAKMNYKIVNNDGTVITKPMNQQIKTNTSSSTGGRSTRWIPADVWQRQGMTAQEMTLPLDVVIPTNSADKANIILKAGQRVMVLKSAKGIYMQLDSGKIIAIRTTAKTEPEKTNKDDVIDITDDGDTDTTKPQSPEEDVKDLTADDEPRVVKNKESNPATTSRPEMPAKDRKSTENVQHFKSQTQPNTTLATTTNQHQLPSDLTYSQPQQSHQQPQQQASQQQPAQQPPPPAYKHQNHLPAAGEGYSNANSIQPNVPLPPHPGAPNSSEAPPPADSSYFQPKPFQHTYPPQYYDYYDNKHKSAPPGSGYHINNYTSYGNLNFAPYHSNLHPPASYIGAPSSYVNSNVFPRQHWSSVVNSSPASSESMRQPSYIGSTYPVNEWSSQ

SEQ ID NO: 8755 - protein, 965 aa, Drosophila melanogaster
MESSSPSDTTEIHKQSCSIQDQSSVPVPDSSGEINNWMEPEPVDSLELSGGKNLEHAMPLLLTYLDLSPTEYADNESAIFVSASEYNEKKAQIDQLVQKILTMEQQQRQLEENASETKELCDLKLHLEKLNARLEALGEFLDTLRLREDQQEIKIEDNSELVDHTEQPKWSNLYSGLNRYRQKANHTAAQFYQHKSNIIDSLKTLYEPIQPRPAIDDLEKQPALLLVRLLKHQQSCLKWMQFRERQKISGGILADDMGLGKTLSMIALILASEETKNRKREEKKKALTLKWTQEFNRVYCKEIRKISMFDDEEESGKEEEQYEPPEKRTCHVKTKKINQFRILDDDDNDAGDKAVVEDEQKDLLAKTPEPEVFSSDEEEEHLSNGRYPSANTLVVCPMSVMCQWAHEVASKVAQNAIRVLTFHGPNRHEIGIEAFRSYDLVITSYNLVVNELKRYGNTSPLFAVYWNRVILDEAHIIRNSKTNCCNSVCQLRAHCHWALTGTPVQNRGVDVFALLRFVNVPNFQDLQQWKKNLNESMLGHRRLNFIIKPLMLRRTKQKLQASGDMPALPSLKIELICVQLSKTEMAVYQILSAISKKIFTQFLLQREKGNSDLNYYSLERTPQFIAGHMSDERYNEIYERFLKSLGYNPGEKILGIYILVLLLRLRQFCCHPGLMIGMLRGALTAEDVQNVKVDASDVEGQLKMDVLAELDKFDETDSEDDCCDEEDSTRRDGNFKLEVIKDEIKEENVPWDSGDDLPTASSFEDQLDSARALKLLNPQNPIFQFIRPSAKLKMVIDKLEELLTGTNDKIIVTSQWVSYLAIVRKRLQDLSWETLDFNGQLTAKEREIVLRDFNANNEKRVLLLSLTAGGVGLNLNVANHMLIVDLHWNPQLERQAQDRIYRYGQTKPTFIYRYMCQDTVEQRIKSLQDCKLEIAKVVLPEEGGEVTKCVGGGLNLAELKKLFEM

SEQ ID NO: 8756 - protein, 1311 aa, Drosophila melanogaster
MGKKNPNARHTDAATPLTTDDSNSSSVSRRESATESKSASESESSPPRSNTKQSRTHKNVKASGKATVSSSSDSDQAVANSSANDEEKEPVCKIRIVPLEKLLASPKTKERPSRGSQQKNVTINDSSDEEPLKGSKLVLPARKSRNKNASIIELSDSEEVDEEEESLLVAIPLPKEAQQTKPEKNSSKASKESIEKRQKAQKEATTSSARAIRSVNGTRRGSLSSERSSRASSSRAESPPRPKRCVVRLKRVSLPKTKPAQKPKKMSSDSEEAATTSKKSRQRRSKSESEADSDYEAPAAEEEEEEERKSSGDEEEAANSSDSEVMPQRKRRRKKSESDKGSSDFEPEEKQKKKGRKRIKKTSSGESDGDGDDDKQKNKRKHIRKIIKTKDLDLTTKEAAKEEDDRRKRIEDRQKLYNRIFVKSESVEINELVLDFDEESKKALLQVDKGLLKKLKPHQVAGVKFMWDACFETLKESQEKPGSGCILAHCMGLGKTLQVVTLSHTLLVNTRRTGVDRVLIISPLSTVNNWAREFTSWMKFANRNDIEVYDISRYKDKPTRIFKLNEWFNEGGVCILGYDMYRILANEKAKGLRKKQREQLMQALVDPGPDLVVCDEGHLLKNEKTSISKAVTRMRTKRRIVLTGTPLQNNLREYYCMIQFVKPNLLGTYKEYMNRFVNPITNGQYTDSTERDLRLMKHRSHILHKLLEGCIQRRDYSVLAPYLPPKHEYVVYTTLSELQQKLYGYYMTTHREQSGGDVVGKGARLFQDFQDLRRIWTHPMNLRVNSDNVIAKRLLSNDDSDMEGFICDETDEDEAASNSSDSCETFKSDASMSGLAASSGKVKKRKTRNGNAGGGDSDSDLEMLGGLGGGSSVQKDDPSEWWKPFVEERELNNVHHSPKLLILLRLLQQCEAIGDKLLVFSQSLQSLDVIEHFLSLVDSNTKNYEFEGDVGDFKGCWTSGKDYFRLDGSCSVEQREAMCKQFNNITNLRARLFLISTRAGGLGINLVAANRVVIFDVSWNPSHDTQSIFRVYRFGQIKPCYIYRLIAMGTMEQKVYERQVAKQATAKRVIDEQQISRHYNQTDLMELYSYELKPSTEREMPILPKDRLFAEILTEHEKLIFKYHEHDSLLEQEEHENLTEEERKSAWAEYEAEKTRTVQASQYMSYDRNAFGNQVMGQFGNASGSVTSNKIFGFRSDILLQLLNMKISKDHQELNQNQVIQLVPTYLQQLYNEMNNGDPTMYKDLLNLHSNIVHPSGMYMNPLLYANQNPNAAGYNQGTGGVPPMAGGSVAHGPPAAPAPGFEPDKVYEID

SEQ ID NO: 8757 - protein, 655 aa, Drosophila melanogaster
MIQFVKPNLLGTYKEYMNRFVNPITNGQYTDSTERDLRLMKHRSHILHKLLEGCIQRRDYSVLAPYLPPKHEYVVYTTLSELQQKLYGYYMTTHREQSGGDVVGKGARLFQDFQDLRRIWTHPMNLRVNSDNVIAKRLLSNDDSDMEGFICDETDEDEAASNSSDSCETFKSDASMSGLAASSGKVKKRKTRNGNAGGGDSDSDLEMLGGLGGGSSVQKDDPSEWWKPFVEERELNNVHHSPKLLILLRLLQQCEAIGDKLLVFSQSLQSLDVIEHFLSLVDSNTKNYEFEGDVGDFKGCWTSGKDYFRLDGSCSVEQREAMCKQFNNITNLRARLFLISTRAGGLGINLVAANRVVIFDVSWNPSHDTQSIFRVYRFGQIKPCYIYRLIAMGTMEQKVYERQVAKQATAKRVIDEQQISRHYNQTDLMELYSYELKPSTEREMPILPKDRLFAEILTEHEKLIFKYHEHDSLLEQEEHENLTEEERKSAWAEYEAEKTRTVQASQYMSYDRNAFGNQVMGQFGNASGSVTSNKIFGFRSDILLQLLNMKISKDHQELNQNQVIQLVPTYLQQLYNEMNNGDPTMYKDLLNLHSNIVHPSGMYMNPLLYANQNPNAAGYNQGTGGVPPMAGGSVAHGPPAAPAPGFEPDKVYEID

SEQ ID NO: 8758 - protein, 1311 aa, Drosophila melanogaster
  unsure (1)..(1311): unsure at all Xaa locations
MGKKNPNARHTDAATPLTTDDSNSSSVSRRESATESKSASESESSPPRSNTKQSRTHKNVKASGKATVSSSSDSDQAVANSSANDEEKEPVCKIRIVPLEKLLASPKTKERPSRGSQQKNVTINDSSDEEPLKGSKLVLPARKSRNKNASIIELSDSEEVDEEEESLLVAIPLPKEAQQTKPEKNSSKASKESIEKRQKAQKEATTSSARAIRSVNGTRRGSLSSERSSRASSSRAESPPRPKRCVVRLKRVSLPKTKPAQKPKKMSSDSEEAATTSKKSRQRRSKSESEADSDYEAPAAEEEEEEERKSSGDEEEAANSSDSEVMPQRKRRRKKSESDKGSSDFEPEEKQKKKGRKRIKKTSSGESDGDGDDDKQKNKRKHIRKIIKTKDLDLTTKEAAKEEDDRRKRIEDRQKLYNRIFVKSESVEINELVLDFDEESKKALLQVDKGLLKKLKPHQVAGVKFMWDACFETLKESQEKPGSGCILAHCMGLGKTLQVVTLSHTLLVNTRRTGVDRVLIISPLSTVNNWAREFTSWMKFANRNDIEVYDISRYKDKPTRIFKLNEWFNEGGVCILGYDMYRILANEKAKGLRKKQREQLMQALVDPGPDLVVCDEGHLLKNEKTSISKAVTRMRTKRRIVLTGTPLQNNLREYYCMIQFVKPNLLGTYKEYMNRFVNPITNGQYTDSTERDLRLMKHRSHILHKLLEGCIQRRDYSVLAPYLPPKHEYVVYTTLSELQQKLYGYYMTTHREQSGGDVVGKGARLFQDFQDLRRIWTHPMNLRVTSDNVIAKRLLSXDDSDMEGFICDETDEDEAASNSSDSCETFKSDASMSGLAASSGKVKKRKTRNGNAGGGDSDSDLEMLGGLGGGSSVQKDDPSEWWKPFVEERELNNVHHSPKLLILLRLLQQCEAIGDKLLVFSQSLQSLDVIEHFLSLVDSNTKNYEFEGDVGDFKGCWTSGKDYFRLDGSCSVEQREAMCKQFNNITNLRARLFLISTRAGGLGINLVAANRVVIFDVSWNPSHDTQSIFRVYRFGQIKPCYIYRLIAMGTMEQKVYERQVAKQATAKRVIDEQQISRHYNQTDLMELYSYELKPSTEREMPILPKDRLFAEILTEHEKLIFKYHEHDSLLEQEEHENLTEEERKSAWAEYEAEKTRTVQASQYMSYDRNAFGNQVMGQFGNASGSVTSNKIFGFRSDILLQLLNMKISKDHQELNQNQVIQLVPTYLQQLYNEMNNGDPTMYKDLLNLHSNIVHPSGMYMNPLLYANQNPNAAGYNQGTGGVPPMAGGSVAHGPPAAPAPGFEPDKVYEID

SEQ ID NO: 8759 - protein, 1285 aa, Drosophila melanogaster
VIAHLFVRIVISQITMDGVVLCEIADEVPPESPEDPTEFRYGKRRWVFKDNLVEHKEEILICIEKCQNARTRKLKFRSIRQESGSCILVLSHEQTHVRAREIEMEVGEQVLPLFFKDFRGSLEFEVAQQEKEHKRPLKTYVTTKLYDALYEKHRQTVHVELERSLDLPKRFQSQLRKYQQRTVSWMLGREQQITQVPANFIVLHAIDGITRVFKHKYCLQFYPFEEEIPKISLPPGGILADEMGLGKTVEFLAMLLMNPRPQDSYRNDYWHQRLEEFSDEVPLKRSRISKKDEVFCICTKKHGKRVQCTKCRRWQHEMCMTISDTSNVPHLCPSCWSELVKSGERLVESGATIIVSPNAIKMQWFEEIHKHISPSLKVLLYFGLHSTFWVSPFDLAQYDVVLTDYTILRNEIYHTTDFKSDRQMRHQQRYMRPNSPLLMVNWWRVCLDEAQMVESSTSAAAEMVRMLPAINRWAVTGTIDELPPLLEFVGRPEVCRPPDAWQTVDKAFQLNYKCEPLLELLEHSLWRTCKSKVEHELGIPPQTEVVHRLELSNVESLYYREEHLKCHEQFLAAVAKHTRHNADNSSCLASISPQLLRIILKPFLRIRQTCSVPVVFNSNVSSTDYLHPQDLLARLKSNNENECKTELRTWASSYNGLAAIYFIKNDFPQAIKYYNLLLKLANEYNEQNISVDSVLQIHAIYNLLQASSLAPAEHKLTELEHKKYQAQMSRLEWKYLEDNTRVLESALSSYNENLEKVSELEKRFEGSTLDLLSTMVNHKTSLHDAIWNKVRDDFFRQNISVERLENVNSMAGMLYFMDIWHNKLQNLKSTLIAEFEFLKGVMQQACEAIKTGVLLSMEIINFIENVTVCHLTDILDANKDKPVKPKKHRYCRLCLIRDSLNQFECLLFAKKLDEKATVTEGLENPSMEISFIKSIFAFLRSKQDFSEWKEECQSKLELLSCLQDLVKFQIKYWIEVEYMVKAFDELEMCKMRILLTDDPEEQSNYRILACQLDEQLQFNQYNLQTSQLNFTRLCGRLKYLKHLKEDSADKPCPICQTQDDVRYVMMVCGHFVCQHCLDSMRRKNGRAGVTKCPLCRQDSPQLYYSVRPGAHKSIIGDFSTKISSVVELVLKIKGENEQEKIIVFSQWQAILIEIARALSLNGIQFRNKCTNKDFDDFKNPLSNVTCLLMPLSKGSKGLNLIEATHVFLVEPILNPGDERQAIGRIHRFGQKRPTKVHRFIVNGTVEENILSLITSADDTTTLSTHWDLENMTLDSLKKLFILKEE

SEQ ID NO: 8760 - protein, 1350 aa, Plasmodium yoelii yoelii
  unsure (1)..(1350): unsure at all Xaa locations
MFRNVRDYFKGNNNDGEENEERERLNCVKNNINDENNINDEHGVASYNCQNEFSSNDKNVSIENLNNENKNNNINNSINFLESNNWNSNDEKFELNKEKQCYNEIDGNELKRRKINENEKVEKVENENGENENENGENENENGENENEKVENENGKGENEISEEMSEEKVNYLQEKLEQLLAETKRYTEKLSGQRVQINLQNKKDKNRRCAMTEKEEDYVLLKEADDDDDTFIIKQPQNISGTMKPYQIEGLNWLYQLYRHKINGILADEMGLGKTLQTISLLCYLRFNKNIKRKNIIICPRSTLDNWYEEIKKWCSEMKPFKYYGSKEQRKELNKTVLHSDYDVLLTTYEIVIKDKSALYDIDWFFLVIDEAHRIKNDKSVLSSSVRFLKSENRLLITGTPLHNNLKELWSLLNFLMPKIFDNSEEFDNLFNISKISTNDNKQSEIITQLHTILKPFMLRRLKVEVEQSLPPKREIYIFVGMSKLQKKLYSDILSKNIDVINAMTGSKNQMLNILMQLRKCCNHPYLFDGIEEPPYIEGNHLIETSGKMSLLDKLLPRLKKENSRVLLFSQMTRLLDIIDDYCRWKKYEYLRIDGSTVGDERQIRINKFNEPNSKYFIFLLSTRAGGIGINLTTADIVILFDSDYNPQMDIQAMDRAHRIGQKKRVIVYRFVTQNSVEEKIVERAAKKLKLDSLIIQKGKLNLNNKENXXQELHDILNFGAPEVYKTQDISSISDEDIDIILADAEKRTIEIEKKLKNLENIFDLTNISLDGGLNMYNNLEKEESDNSSDEDGSDEDDDEDDDDEEDENESEGGDGNNLDNQIGEDGIVDENXKKKKKKKKKKKKKLNKSSTIKKFLKNNKKHMIFLDLGERKSKWKVMNTACTKTNKKKAILYGWKAEARGGHDFQFFNNEKLDELEKIEEKWNNYHINQQKIKEIIESQTEKEDFEKIINIHEFLTHHAKNIYNLINLINPNILNDSNIGDSIEEKDVSKDIDEDGNEGYKKSGEFNGIVNIYSKSNVGSSETRNNDSKNSGSKDMDNEFYKNKIIKLLETKKKLNMIKFREKNVKNCYEYMINFIKKNLVPNSNGDVGTANNNNKKNKNKKVKKDINDDISTIDIEEIKIEKQKLLKQGFAKWNKAEFNKLMSALIIHGCDNLDYIYEKYFLNSKKSMEDIKSYLKVFFRKYDQVKGGIRLFEKIRNSDLQKQIIQEENDMIANYVEKQLSNGVDTIDKLELPPNFRYENVYIQPESVNTTGGTNDVPEKVSEEEILYFERENKILLWLLYQEGVVQTKSIHILTPYYWAETYNFFKYATTPLENIEYRCRLIVDAIMELNKKNVKSSNSKERRRG

SEQ ID NO: 8761 - protein, 2541 aa, Plasmodium yoelii yoelii
MHGNFYPYMTNGFYGMSSTNCFKPTSTNIPNNNNTNTTNNNNTSMNSFNQINGSFPYDNTIRSGVGPSAPPGGVNNAISSNSNNNNNNNSNFVNNLNSVNYGDNINCNSINNILNKDSENLDKSSQIKSLSNNMNVNNLNMGHHVNNTAITSGTNNNSNNNGINSNVKDNMTKMANNNFKGIGSICNNIPPYRINSDQQLDKQHNSIDDNNNNNNNNTRYHPMNMYNRMEYVIVITSNLLGDNKTNASISKIRKGNNKDGVIGDNNGNSNGLINNDSDGYKQYKNEVDGNHNKMKDGTDGMIKDPKLNDSVNSNGNNSYAMFPNYNLKYPMNMNMFNNINHFNMNNKNGINNIGGVSNMNVEGGNYQSFNLINNMSDLNSAYNNMNKLPNVNNYNMMNIYSDNRYNNNNTNIPVGVNNNIINMNNYNNMNYMNMRLLNSRNIPNNMNNSDLNTNYMTDGMGNRIVNHDMNNNMNDGNLNNGNKYVRKTGIGKQYVNNNVTSGSMKKKNETQKDKKKKRKKKNENNIPESDDEEDNDLYINSYVKKSAPKNSNGNKSWLQYDSLDDKYTEKMKRNEKNDIFVSPNIGAVGGRTNLRERKRVYNYAQIDNYYETDEEDKKVDEEKNLLRQEKQSMGGIDRVIHHRKIKDWDIINSIKNNPFLFINRKKPEQGENANGDANENANENGDTNGDSKKNENLIGSTEMSSDSLNATETAGTDGAPDVSCHKILGGVENNEDPALDDFYEEEDIVDVNEVEFLVKWIGKSHIHNFFCTYEYLRYFNGVKKVDNYIKKIRLSFQKRKYMTADEIEQEKIYSEIKKQIEMDSIHAERIITHRKCEITNEQLFLVKWTSCAYDQCTEETKQTLLDHNFGKLIDEYFDRESKIYGPKALSSIWNRGPLTATKFDPYNETPSYLHGKKLRAYQLTGLNWMVSRMKRNLSVLLADEMGLGKTVQTIAVVGHMLYKEKLIGPYLVLVPQSTVDNWLNEFKNWLPQANVVCYHGNAVSRELIRTYELKKVYVQNRGYRYKFDVCITTPSILNSVSDVELLKRIPWQLMVVDEAHQLKNRQSKRFIELKQFMAESKLLLSGTPLHNNLEELWTLLHFLNPQQYTYYEAFQKKYNEIENTSLIGEAKQKQLMQLQHELHEVILRRVKKDVEKSLPNKVERILRVELSPIQIEYYKNILTKNYEQLAKASGGAKNSLQNICMELKKVCNHPFLCCEPIDKDEYRERLVYSSGKICLLEKLLIRLKERGNRVLIFSQMVKMLNILSEYLTLRGFKHQRLDGTMTKEMRKKAMNHFNSKNSDDFVFLLSTKAGGLGINLTSADTVIIYDSDWNPQNDLQAGARAHRIGQTKTVQIYRLVTKDSIEQTILERAKVKMVLDTLVVQGLNKKQNDNVNFIGGEGSNSSNGFTREELSKILKFGSQKLWEKNSSKYSPQDGEDGKNIIKGVDVDLDKILEEAEANENTNNANKDINSELNSLQNGAASNFFNTNTNLFGNGVSGNGVNNIGGGIADDLLSSYNNITEFKYEPPENLKSNILYNDSTKQGELDVEENDKDFWDKTIPLEERLKLKKMKEEELLVHGPRKTRTRDARYNQGLYYDGGAHNNNSEGDDSDEFTIKYTDKYNKNLNKKKRKRRTSTHITEKDKFRLYRSLLKFGNPTLRLDDIQFDSKLMKVDRNVILTELNIIVDTCKEIVEKVAKEGNNTNGQQPGLATQNVKTDNDDQTEYNNEECNTTNANSVNVKSNDMGVEVKEENDQQAEDINDENDKNKRGKRGVRTTATPSTGENVEATEVSKKEEANNNDNDNNSGGGDGGGFFSKFMKFTKGSTGAKREDEIEGKGIKAKTEDDGVKDELDDDIVKDELNDESDNNNKTKGERGRKIDAYTFYIGTNKANALDLCHRLQLFKSLHDFIKEQNNDNEYSFRLPLKPPQTNPNNEIVNNDNVVDSVVENVEVNNKSVVKNDKIKNKKDEVEGAGATTTTADVEEEATLNLTTTSETKQEGKTSNECEATESSMVVVGGNPSDDYLKLKLPNYIFDHLRDLSTKDVKAWTKEDDENLIKGIYIYGFGSFNEICVDVNLNLEHMKNIKWDKIKMRCIKILKMIEEYTSNNKEGTPGKKRRRARGKNKNHDEIKEEYDNGNNNTSIKSEGTGGINKSNSINGRHSINNYGRRSSERVKAIYSQEDKENGGILKKRVVSSRKGERDNKNNSTHLGSNGTSSKLENVYDINNKGGENTLLSSSTLDKRRRRGISSKSSNVTLKNEKTNSKCIIESSECSSSNEQKSNGSDDDDDEEEDDEINTNIVKRSGRSGSNRSSRMNSYENYKLTRRRSTRTRRGGGNDSIVGSECVNSIDPDGDDEYHNDSNDRKKLKKKKKKKKKLTDEEIIEIIKNSNLREMDQHSINKLTKKPLKKYKKLLKIVKKVLSSKTNELGQAEEQVSDDIRKKTDELIFYIGNYIGKFFDHCVDSECKDILNNSGWEYISNFVNETSENLKEKYEKFKSSNLKDSDNADITEENIISFFYSKKCSGLLCPEDDPDDVMDE

SEQ ID NO: 8762 - protein, 1529 aa, Plasmodium yoelii yoelii
  unsure (1)..(1529): unsure at all Xaa locations
MIKNLDAEHLDAENLGAENLGAENLGAEHLDAEHLDAENLNDNSTNCNIHISQDDEKDPFLNRPVQENSQNSQNVQNSQDSQNCENTNEADQFDNITIIGKSKMSKSSHRIETNIDHKFEKDKELDISKYIYLSEHLRIQKDKQIFMSVELNKYINDNIELIKSLGNYNKSPKNIINHFFDIGMKIRLLLRRDKIKKQKKKIEKNGKLKKNDKFCNIPNLYEQDSNCSDSSYLLSESSNEDEQKVVKNIKDCQKIKTEKNDLRDIKNLEKNKNVYFRYIDSIYTKYAMISNMNISYFQNIQNIINKNSSDKNITDKVETEMNDIRTFFLNQENTKAIEKNQQILRNDVINSMFGFNIISDTQCIKIPIKYINSEYKKNEEKKNEEKKNEKINDTIHYSESISKNSDNEQHPFLSKLRNVKKEEKKKKKKXTQKIKTVIAQKNKTVIAQKNKTIIFQKKYVNIYFELQKKNYKMNGKIKNLKQYILLDNWKGFKNHNIYVNMIDREKKENEKLFATLCYDQINYINEKKEIILKREEKERLKLLRENNMDEYIKLIKNVKNKRIQELLDVTDKFLNDMSHSVLYQKGKTNIISSDFSKEPINMREKYYDVAHTIKNKIIKQPSILIGGNLMKYQLDGLEWLVSLYNNNLNGILADEMGLGKTVQTISLFAYLKELKMEENCENNINDEMNNQIGKNIIIVPLSTLPNWVNEFEKWCPTLKVIIYKGNKNERKNINKNLLENNYDICLTTFDIIIKEKNILGKISWNYIIIDEGHRIKNDNSKLHSILSLFISKYRILLTGTPLQNNMKELWALLNFLLPKIFSSSTDFQQWFSFPLSNEQTVYETMTEEEELLIINRLHTILLPFMLRRLKKDVLEFLPKKYEYNIYVQLSLYQKLLYKQIENKNFKQINSDGTLNNKTFQNTIMQLRKIVNHPFLFTHDYDINDFVIKSSGKFEVLDRMLPKLIKFKHKILLFCQMTKVMDIISDYFELRKYKYHRLDGSVSLSDRRDIIDSFNQNKFVKNSDNSSQNKNDSLLLDPASKLDDTMIFILSTRSGSLGLNLQAADTVIIFDSDFNPHQDIQAMCRCHRIGQKNVVKVFRFITLSSVEELIFQKAKDKLNINDKVIQAGLFNKIYNDNDRQKKLKNIIKKNQKYDPTLHPTNPIMLNEYMSRSPEELEYFTNFDRDYFGEELFSQLQSIRQNETQKAQFRYMSEDDEEEKEEMDENGQEMDENGQEMDENGQEMDENGQEMDENGQEMDENGQEMDENGQEMDENGQEKGQKNGQKNGQEKGQKNAERVCDASGTDFVCDTDVAGEIERILIESKKLVCESELPVHLFCEDIVETNEINFKRTRKVINSNLIYEEGLTEDQFCKLIDPTPPQICSQNNIESPVEIQDSMENEQSHKLDLLEKQTFDIGRQNCNDNKEKEKEIMGNKIHEYIDKKILILNKTRDDNISSLENNYLEENERKDELENQDKPSDVEKEENIIKKRKGEEIYINNFEQNYSQLSGPSDMLDEKENKKRKKNGGQI

SEQ ID NO: 8763 - protein, 1732 aa, Plasmodium yoelii yoelii
MYEIKKKKKHFKTLSNSCMKYLSNKEKIKLKKQEEEEKKLKIHSKNISSYMDVFWKKIEKLVWEEKKRELQKTLNKNKEMRFKKFVKGAIKKIKNARHNAHELFENNMNYLPCSNNNSENNANSNNENEENEENEENDENEENEENEENEENEENEENEENEENEENEENEEDPECASNNTDNDTKNNINAPPNRPIDSAPKNDNKLSSSKPNHSNEDKELGEEDLTDQEDEDILLDEEMESMDESEEKEVNLLDDEANVPIEELLKKIYGFKSGEEYINLMQNEEEDEGTDTDVDDQVSTQNDSTNPTQNSKKRKLSDAGESDRELKTAKVDEADAGKVEEAKVEKVDEAEVAKANEAEVAKVDEILECNMDEKHLTKIPPFIKATLRDYQHAGLHWLLYLYKNNINGILADEMGLGKTLQCISLLGYLAYYLNIWGPHLIIVPTSILINWEIELKRFCPCFKILSYYGNQNERYKKRIGWFNNDSFHICISSYSTIVKDHIIFKRKNWKYIILDEAHNIKNFNTKRWNIILSLKRDNCLLITGTPLQNSLEELWSLLHFLMPNIFTSHLDFKEWFSDPLNLAIQKSKIYDSKELIDRLHTVIRPYILRRLKKNVEKEMPNKYEHIIKCKLTRRQKILYDEFINNKKVQNTLTSGNYMGLMNILIQLRKVCNHCDLFTNKYIQTPYYYILPIQYNIPKFCLLFENNYYKDFYLILFLHNEFVSLGGIAKDVRPKQKQNHIYTDSNIQMHTKNNDLTILDSQQFKKNMTNIETLNEINQTKEFTNKCLIEEINSEGSFNLINKFDKNLNYISTDSRDTNYAQNKISFFNNENEKMEEQNSFKSSTWFKEVNKIKDNEHFDYLNYYKNILTNLNKNKEIKRDSQIITNNENDNGKQYLRSNSMQMWNTYPIKYETMQDESMQDENMQDETMQDLCTYVNNEIYKENIPKDLLTYSNEFVNELNNNYDILSIYIDPQNKYKTYDEYLYAMEYDTTLYNTTLQNDNLRGNKQIISNYRGSSNRGRPPRGSHVGRPSRGGHAGRPSRGGHAGRPSRGSHVGRPSRGSHVGSSFRGDIGNQSSRTSINETAEQSNANNNNDSSGHNNKNNDSSSHNNSSGHNNNNVQNEDNDTIVRSVETGNFLKKKYLYRYNMKVLNREMQYKNFFTDETNQSYLNSLEHNLWIRKKKEEEINKMKIEKEKKKQLISNYHFIKNSRIPIFGSNLLHLLKTEFLKDQNIVYNHANNIIINNTSMKEVYSEDIPSRNYYNYMDTNIKKENNDDTIENIMNYNINRCKSNECASIVLERLFPTMEYFLKLYEKLIQNFIVINSPSVICSSPNILINSNSKRDDDDDDNDNDKEICKVQNYSHISKIEDLIKKIKKATRVYHNAFLKQSIIFPLNKDISLGSGKLFALEKLLSKCKKEGNKCLLFTQFIKMLDILEIFLNHLNYSFIRLDGSTKVEQRQKIVTKFNNDKSYFIFISSTRSGSIGINLTAANVVIFYDTDWNPSIDKQAMDRCHRIGQTKDVHVFRFVCEYTVEENIWKKQLQKRKLDNICINMGNFNSQNNRNNNTSLQDHNEMNKDWFSNVDTIKEIFINKQNNDDDDDIYQDRLLHEQLENPEKTNVRFEKTLEHIEDKDDINALHVTKRERQHELSQDMHEFANKNDFQEAYTLTSYCFNFLNENLTDSLKQQIDEMKMRIEIEMMNAKEDENNSLDNLSNPSDELENYEQVRNEPT

SEQ ID NO: 8764 - protein, 1163 aa, Plasmodium yoelii yoelii
CITKILFSDDGNYIISSSLDNTVCLWNVNTFLHINTYKGNDSHVYLWDTLSNKILNRISVNAKLHKDEKLLICSKNNSVNIYDFRERDFKKKNTPLQVLNDAKDLISDIFVDDFEIYSCSIDNSLRLYDIRMGKMMSYNMQSSILSMDITNDRNYVCTYLIDNTIKLVEKNSGTVLGLYKGDINNNHRRNIKFDIKNKKTGWINLMKNSIPRRSDETGDENDKVEDIIRKFDPLVLYEDENSKIEVDPILAQYLREHQREGVQFVFECLMNLKDEKISGCILADDMGLGKTLQSISVLYTLLKQGYNKKAAVRRCLILCPASLINNWNDEINKWLPNRCTVTCVNDSAKEKIVSKLEGFKYDLKSTILICSYECFRINNDSIDKSAIDMIICDEAHRLKNDKTKTYTSIYKLSAKKRLLLSGTPIQNDLGEFFALISLCNPDLFDDTNSFRKKFANPILIGRDKDATEKEQQIASERLAELSTITNKFILRRTNNLLSKVLPVKYLINIFIKLNPIQEALYVLFLKDKKLLKPDNSNNKVNVLINIKKLEKICNHPLLLNANDIKDIGHIPVVKLIEDVIAENVKGRGNKLSNKNSVNSSANNSTENINATLNNNNNCSKDGDYLRERRKAVELDYDKSVKKLIEECKRDVYRCYYNLSSKFQLLHFLLKTIKQETNDKVVIVSNYTQTLDYMEILCRENYYKFVRLDGGISIKKRHKVISDFTNTDDIFIFLLSSKSGGCGINLISSNRLILLDPDWNPANDKQALARVWREGQKKICYIYRLFCTGTIDEKVYQRQISKDGLSSMIVTNTNLSKDQLSDENVKKLFNYKNNTICETHDNIECNRCNFKDNTEVYSEQLEDFEEEDVNTWAHHLNIDTVPDAVLIKAVKEATECKINHMNTLPILKKLKHEFVTFSMSCKIEFRDDLIKQKANKNNTSYQPIAISEKKEPTKAKRAKPKEDSEYSDSTNDEEEEEEDEEEDEEEEDEEEEENEDEYEEEDEEEDEEEEDQKRRMKTKECTKRLREIMGYQKEKELIKKQNNSNEIEKREEKEEEEEEEEEEDLISRDNSFSHKIENSKNEKKKQDNINNVFELNNQEKSTKLKMNEKNGCDDLNSVRVTRNMTQKNLMELLSQDDESKPEVLISQDEDMSVENISTDSSCFV

SEQ ID NO: 8765 - protein, 1312 aa, Plasmodium yoelii yoelii
MRIRKTWCTLCRENFEDGDDCICCKQCKKKFHRECLQAEGLIDSEQLKDVKNYICYQCMNEEDDTPENEDRCKICREKSSNLILLLCDGCPNSYHVSCLGLQTEPESEKWYCPVCKPEEHKNLDIRRMRKGFAIDNMNGDHVNSSSCYVCQRPGKLLGCDFCPNSFHPTCLPDLDFDNISDQWECPCCKNEDPLLNQGHKRWTKNEIQEIMKKRQKELNFWRSRIIKYRNRFLLAHRKDLQPFVNPKVFANLTKTFKNDFYASKCNNSNKKGGKNDSGKGTKITSINNNSSNNGKKSLNLDSKEFDEYISSLEEEANQNANKFIESVFLSVYHPNGKKIERRPLVDNVQLKPHQEDGVEWLLKSFLTGGAILADEMGLGKTIQTLCFLSYLKCNKIDGPNLIVVPLSTVGNWLREIHRFTPHLTCIKICGSKNERTHAKEDRLAEKGLYDLYVTTYETVKNEEEFFVETIPKWQCIVLDEAHRIKNQGGAIRHSMDRVVGNMRLLLTGTPLQNNSAELFTLINFMFPDIFKNSEIIEQAFINTPSTSGNSNNNNENNGNSGNSGNGGNGGNSSSNYKLNVNIGNIDLKSSIKEEDLKAIRCLLDKIMLRRLKEQAITLPRKIFHDIWLPLGSLSAHWYKRLLDIRSMVEEKVSVKKLLGLVIKMRIICGHPKGIVSRPSQMEKLFGFFEEESEEIKEEVKKDAIKLKNISGEEHIESSSKLIFIDKLLCQLHYENCKYVKNYASNFDKHKKEVAIYHYHKMQEQNQSQKKKREHSGKLKKTEALENSPLFMEIYNKGKLELKPTSKDEDKLKSFMHTVSIDNECPYKKKRCIYDKIKEMVKNKNNAKFNQNNLYSLKNPSKDFSEFHYKENAEPSDDENKTKNGNKTDEDEDEDAEEEEEEEEEENEETGDDECNNYSEKNKKNKKNLKQVFPDEDSNDEKVEKVEKDENVENVEKVEKVEKVEKDENVEKIEKDEKIEQGENKDSEEKTRGLDNLRNESGGINSKNIVTLGKNCKIINIKEFFKSGKEATNGEGKASVSPTEQVSKNENLEKVEADYIKKEYEGDTISTIHLNKSDTEEKMMQIGEIKDEKNEEIEKNNNNNNNNNTISVKKEVTIKLPFTRSNSNNEEGENASKTEAKMHKVLIFTQFQLVLDELEEYCKYRCWKYMRLDGSTNKLIRELDIREFNLSDSIYFIYLISTRAGGLGINLTAANHVIMYDEDWNPFIDLQAIDRAHRIGQKREVNVWKLMTEWTVEERMAFRREQKLKLDKLVVQTQEDEDMLDTFEEKLSSDEIRKLMLHGKAAIQNMDVE

SEQ ID NO: 8766 - protein, 818 aa, Plasmodium yoelii yoelii
MGGKKGSIDLNSYSDSNYVHTSSEDDKKEDSESVLAKDGGKNNRKRRKTIGSCAITKRENIDEINNKIKKEKKEQKEKKNSSKISEQCIKKRKTYSIENSKNSNGEHFSIRSSPRLAAKSSGGLSAKLSGGLSSKGSGRLSSKGSGGLSSKGSGRLRAKSSDDSSVNYLGSQIEDSSESFYEENENSSDTVMSYDSIIIEKNKIKKKNMKKKGSDIFDESILHLIEWNRIILDEAHRIKNRIASTSQSIFNLKCSGYRWCLTGTPLQNRIGELYSLIRFLEFYPYAYYFCSKKDCKCSLINFEMKDNKYCNICDHTRMSHFNYFNKRILKPIQSFGYNGEGINSMFYLKNEILDEILLRRTKNEREKDIKLKPLVVTIRKDKLSNEEKDFYESLYKKTTTQFDKYVKSNTVLHNYAHIFDLLSRLRQAADHPYLILFGNSFLSDPSGKFIKKNSTIIPAISNDFVCGICLENVPRKNNVNTKCNHHFHKNCLKQYIESFEIENKGNEDNENFSITKYKTYNIVSNCSDSEKCDNANMIVFGSDDKNGDKNGGRNNLGLNRNYKSLSVVKFKDRENSQFVSLTNNIENIKDHPLGCPVCYVPLTVDFTAFENEEDKMDDEEIIVCKEEVTHINKSFINRINTDEYQTSTKIEAIFEEVQNVIYNTDDKCLIFSQYCSMLDLIEYHLKKNNIICSKLLGYMSMVSRNNILYNFNNDKQLRVLLISLKAGGEGLNLQVANRIFIVDPWWNPAAELQAIQRAHRIGQTKTVYAIRFIIENTVEEKIIQLQNKKQLVFDCTIGNSGSAMQKLTKEDLAFLFHA

SEQ ID NO: 8767 - protein, 1472 aa, Plasmodium yoelii yoelii
  unsure (1)..(1472): unsure at all Xaa locations
KNNNNNNNNNTISVKKEVTIKLPFTRSNSNNEEGENASKTEAKMHKVLIFTQFQLVLDELEEYCKYRCWKYMRLDGSTNKLIRELDIREFNLSDSIYFIYLISTRAGGLGINLTAANHVIMYDEDWNPFIDLQAIDRAHRIGQKREVNVWKLMTEWTVEERMAFRREQKLKLDKLVVQTQEDEDMLDTFEEKLSSDEIRKLMLHGKAAIQNMDVESTLDLPLEFFIDRGRRKLPIINGIDLEKEEKNTIEQEIKNIKEIGNQLNTNDEENIYVQKENYISDDDGKDNNNNYYDNGIDMDEMLVEETEELLDQGQNNNGLGSFYEDGNNDPNSTNTDAIKQDKEQNGSNNSGTGLISQYSSNNNGGDSTLWRSVRERKKPQNMYTPEYWGRKQEVKQIKHEGRCFICNNTKNYKTIVKDRNNNDIEIDYGDMINCFRCPKTYHKLCEGIKDEVVKKTWTCSWHECCLCFRKSSQCGNLLIHCATCPTSFCYSCFPPDYTRYYVGEEYYHNLRQRGVNFNAQNWVCFLCSKCKAVEEQKKRRKMTKEERENEKQLQKELRSQLHGSKQEEIETKKRKKAQQLERDKFIIENRKRIDALDKKYETQLRNAYENLFPPKFIKELINRIEQAKLLKQKGGTTPDDENNTSKELLSKNQNSKDSDNNNNNNSSSTPKDSINKKKSTTFLHTKLPNKILVLCENCKLPCHANYKYPGNCCYPLELDKSYFYANSSFSQSANNKENKNINGDNIRSGANGSSFGQYQGSSTTLVDKEGSTQKNNFKDDNMNEIGQNGNQIKDEEDEEEDEKEENDKNDKNDKNDKKLSIINEEDEEEKEMNTTGQSNFNNDENSANNNNQKSFHENSNENKNEGNINDNEQCGESPNNNQDNSGKAKTRRFLRAVCSKCGTVQLGKLAHFRKHCDKLTEEEKKEYDDKREKLKQLIELLNTKNIPDEHTEEEYKNMSIFKFKSLYSNFQDKADNILEDCIREMKWDMLISTKKKTVKKEKESKKNNNNNXNGGNGGMGNSSGNSSSRGKSNGEKDGEKRGGNNNISSKSNIAQLLYKNALINSLNKEGKEFIEIISDNMTPEMKELLSRELSSMKGKRKKVINKNTIKSKKIKGNNNEGWDEENNYTIDDVMLNRHNNDKLNELKKISSNNNNNNLNIYHDRLNKDNQNEHFTLDSFNDDFLHKAKEFLRITKKKIINNGFSESTNIGNVLNSGEKDHNTDIEKSIIQNYIKKMKNSLKNNQINSKIINDLNFNKQHHINSYDHRSSSNSRIDVYKNCFDRNNKYHIQGSHSNYRINRGGSGERIKFDVANDHNNSNNNNNNRIFAPKSGIGNKNFHFSDINDFSVDIFNIDKNVKHKDDPVDYDIKKITNTSENTGTNKVHEYILYRKKKSNSKSHHGYDDGNSSNYSGMGKQDNIHNKYDNIENINKSGKINMETQMNIKRSSNSSSDRIKQLNLNDVKSFLINAERN

SEQ ID NO: 8768 - protein, 986 aa, Plasmodium yoelii yoelii
MDVCEFVDPIRKRKITNNLIDFDKYVYKEKSDKCEKKENTEYVVKKKKKKKLRRVLDSSNSDNSDQENIKKECKNEKKKKNDNNDNDDNDNNDDDQFLGKSYDNNSIINDNEIEEKKEYERNLKKLYNCLLGSIKIKNKIIKYFTQNVREKRQDIIKEFVKGSFRINNYDANFDDFEKNVDTFHKLKNYQKCGIYWLYILYKEKKNGILADEMGLGKTAQTCVFLDYMYKTKKLQNKTIIVAPTSLLKNWDNEIDMWCPYLKNYKIIYYGNQNERKYLAYDIFTNKKKDNNNSIHLIITSINMLTGKNDAAYFRQIRKYDYLIFDEAHFLKNKNSLIYKKLQKKITFSNKILLTGSPIQNKTQELTNLLLFLMPHIFTEHNINSAMDAFLKLYQEVIEKKNKSDNTENTTNNNKLKNQQLMDIYEIESECDEEKKNKIKNNKDDNTGYSVTEANGNLNDSEKDDEDEDKNADAEADAEAEADADSDGEEYMCPNTRDIIKEYLDNTIKYHEKNVDIKNKEIILLQLIIEPYILRRSKKHVFIDMPKKHSIIIKLPLNNTQLNLYKDEILSKLQHTHKHLEFLETNSSKEEMEKLKSILGNKGEKEITNLKNNEYNNNIIDHKNFENMKDNYDEDDDKIDEETINIEKEEENDEENKESKIVINKRDDEEVIKNSQSISTSLQNNKNNTKEERGKMINASIFILRRICNHPLLHKYYYSIDDIKKISKYFYNNTDQYLDLDLKTVENEFMKISDFDIHLSIKHLISQGDNNLNKYLIDKKHILNSTKIHHMLTLIKNIKQKKEKVLIFSQFTTFLDIIEESLLYEFIYDEHDYADHSNFVDKTQNGNISESPNKYNNNDGGDNDNDKNYQFVKRTSFNKPDDDTYVRSPSAMSTSSQLSEKRFQNNVYVRLDGSTNTIERQQIIKEFSENDNVFIFLLSTKAGGVGLNLIAANHVILMDQDWNPHNDRQAEDRVHRLGKSFSQKNKK

SEQ ID NO: 8769 - protein, 1412 aa, Plasmodium yoelii yoelii
MSKLVIMYTLLLQKFEVIGDIRIYNNDKIDEIKSFNKDGELIRGKGVYFEYYLGCIETDSIILSSEICDVKNDKDVSISYEITPKSTKRSFSPMYNLKINDSYISSNDYIKIIGRNIQNKTQTGKKKVPQKKQKKENNNDSSTVRYDTLSQKNNNFNEILSSDKKYVEMNKYKCEVLKDINEGYPCIRLKHNNRDISKLKSHLSKTLSVLLVLNAIRIEIKLEKVSLCDFKFGGSLKTFVHVILYPDSFKIDVHKYHEYNSLIKYSVNNLFKELKIAPLRLAKNISSDSFDDLNTKIVTGKNLTKNNDNFSNKYESSSTINTNNAFYLDFALKGGTQAKEYEEILDTASENEVEEKNEDTTNMVFAEEKYRGGYLLEDFKEIYPNSVYFKPTLKAYQAEGIWWMYLKENPPEYLKENIFKGEKTKEIDLDQIIRSKSTCSEIHVYNDLYVDKEVDVYNDVYVDKEVDVYADKEVDVYVDKDVHVNRDVYVDKEINVNRDVYIDKEVNVNKYMHNCEIYLLDMKTESGSSNSNIKIKDENSENDEENGRMNEINNKKKLVKTEEYNNDDDNDIRNKEPLNPMWEEHAFIPNIKIYEEGKLIFVLKYFYVNKITGCLSLTYPQYVPQFRGGILADEMGLGKTIQSIGLIAHDIYQNKLHIKNNNVENKNNITYLIENTIKGFDYNKGGTLIIAPLALIYQWKQEIDKHTKEGFISSYIYYANSKDINSDLLSKYSVVLTTYSTLVSEYKNTCNQNLSNNPTIKGKSNATNVSKSEYVIENKFSYTKWAKEKQEQNEKPEPVNKLEGSNNGEEKGNEIKKRKLNSFFMKPSLNNGKNSILPSTGDKKTNKVLNSMKEYPLYKITWRRIIIDEAHVIKNKNSIQSVAVWKLRGERKWCLTGTPIQNSLYDIFPLLRFLGIKPYGNIEWWSKEIADYVNRNKLNIALDIVRKISSPILLRRTKNSKTREGYNIITLPKKNVHVLKLKFSLEEEDFYRAIFYRSKTKFDTYMHDGNVLSHYSHVLQLLLRLRQCCSHPLLLFSKPFFEEWNDEDIINGMYEENSKITESATDSATEKSNICVKLSNMKVEDTLKSETVKNEILKKDTLIYNFLQKSSNSNKLSNDYVEEIEMLKNGTAMQCVICLEDSVYPLISKCLHIMCKKCADLYFNLTQIAEKKCPGCDNYISLKSLKTLQQNKSPLDDFLKKMKKDNFVYSTKLRILFDHIKEDIKNELHVVVFSQWIGFLKIIEKLLTLHEIPNKIYDGSLTFEQRKNTLYWFNIQKGKIYQPGIGFCQSTCDIPIENKSGKVLLCSLKAGGVGLNLTVSSKVYLMDLWWNPAIEDQAFERIHRIGQLKDVNIYKFVLEKTVEERILQIHQSKQYTANQCLAQVGNKINTDVNLVTQKLGMDDFILMFKDWN

SEQ ID NO: 8770 - protein, 1099 aa, Prochlorococcus marinus str. MIT 9313
MIGCGTPAWMVAVDRQCTPAPRNPTHTFCVAAMSLLHATWLPAIRTPTSSGRPALLVWADTWRVATPAGPAATPALHPFTLSPDDLRAWLIERDLLPDEIIDATACLTLPSRTVKPRNKTKNVSTESDEAKDNKTSWTGLPLQAGEPIPKQTEWWPWQVQGLAVEPAAATAWLSKLPLSGNHPDLADELRWWSHLQRWALSMIARGRWLPQVELSKGEGYPHRARWTPLLNREDDRRRLEDLAAQLPLVATCALPWREPTGRRSNRMTRLRPEAMRAANPVASCRPRSGRLRVASLLEELLDAQLRTGFEASEQGLDPLLTAWQEALGSDSGVINLPDEEAERLATASNHWREGVAGNVAPARACLELFTPGEGEDLWELRFSLQAEADPTIKVPAAAAWAAGPKVLQLGEIRVEHPGEVLLEGMGRALTVFAPIERGLDSATPEAMQLTPAEAFVLVRTAATQLRDVGVGVELPASLSGGLASRLGLAIKAELSERSRGFTLGETLDWSWELMIGGVTLTLRELERLASKRSPLVNHKGAWIELRPNDLKHAEHFCSVNPGISLDDALRLTATDGDTLMRLPVHRFEAGPRLQAVLEQYHQQKAPDPLPAPEGFCGQLRPYQERGLGWLAFLHRFDQGACLADDMGLGKTIQLLAFLQHLKAEQELKRPVLLIAPTSVLTNWKREALAFTPELNVREHYGPRRPSTPAALKKALKGLDLVLTSYGLLQRDSELLETVDWQGVVIDEAQAIKNPNAKQSQAARDMGRPDKNNRFRIALTGTPVENRVSELWALMDFLNPRVLGEEDFFRQRYRLPIERYGDMSSLRDLKGRVGPFILRRLKTDKAIISDLPEKVELSEWVGLSKEQAALYRNTVDETLEAIARAPRGQRHGKVLGLLTRLKQICNHPALALKEQTVAKGFMDRSAKLLRLEEILEEVIEAGDRALLFTQFAEWGHLLKAYLQQRWRFEVPFLHGSTSKTERQAMVDRFQEDPRGPQLFLLSLKAGGVGLNLTRASHVFHVDRWWNPAVENQATDRAYRIGQTSRVMVHKFITSGSVEEKIDRMIREKSRLAEDIIGSGEDWLGGLGVSQLRELVALEDS

SEQ ID NO: 8771 - protein, 542 aa, Prochlorococcus marinus str. MIT 9313
MKFTPKSSSSCYLGLTAAGLVKVTFPFDAVTQAQLRKVRPRGIWRGTRQGWEFPLVAAQHLQRQFGSRFLVQDDLAQWLSWFEQPLPPMPPHRDLVSYADLEVVLTDGRRPLPHQCSGARWLLARRGAVLADEMGLGKTLTSLLAARAMVRCADVRVMVVAPVGLHDHWRIEAASLDLPVCIHSWARLPRELPAAGTLLLVDEAHFGQSIKSRRTQALLRLARHPRLRAIWLLTGTPMKNGRPDQLYPLLAAIDHPLARDQRKFEERFCQGYWRDQGGQRRWLSRGASDLDALGKLTRPLVLHRRKQTLLGLPPKRRQEHRVVLTESESRGFDHRLALVTDNYRHRVQQGLVRSDAESLAVLTALRQIAAEFKLPAVETVVAALLAEGQAVVLFSSFVGPLLLLQQRLGGELLTGRQRPGQRQEAVNRFQSGMSSLLLATYAVGGLGYTLHRARHVVLLERHWTPGDVDQAEDRCHRLGMDGGLTSHWFQLGFADQLVDSLIASKAERIEVLLGSRRVGLKRQPLPVMLRCCMQESLRTVSS

SEQ ID NO: 8772 - protein, 1026 aa, Danio rerio
MSTFLRAVRDNIPEKDKSELTENDLKKWGLGAIHLRPYQLDGVKWLSLCMKNQQGCILGDEMGLGKTCQTISLLAYARGSLKMNGPFLVLCPLAVLENWRQELERFCPSLSVICYTGDKEKRAELQQNLKSDPRFHVLLTTYEMCLKDARYLKSWKWKILVVDEAHRLKNQESLLHQTLKEFTVGFRVLLTGTPIQNNLQEVYSLLTFIQPSVFLPEAVEDFVNAYADIQTEPALVDELHQVLQPFLLRRVKAEVAAELPKKTELVVFHGLSALQKRYYKAILMRDLDAFRTDQSTKTRLLNVLMQLRKCVDHPYLFDGVEPEPFEMGEHLVEASGKLSLLDSMLAYLQEGGHHVLLFSQMTRMLDILQDYLEYRGYSYERLDGSVRGEERNLAIKNFSTKDVFIFLLSTKAGGVGMNLTAADTVIFVDGDFNPQNDLQAAARAHRIGQTRPVKVIRLLGRDTIEEIIYSRAVSKLRLTDTVIEEGRFSLLDQAQSAASGLQLSEILKFGVDKLLSSEESSVQDVDLQLILGQSRDGQWLTDEEHAKLNESNEEEDEDMEGQNHMYYFEGKDYSKDPSAEDEKTFELLLEKQFAEMEDAEKEGRALRNKAGVSLSGPLINPARKKRPLTEAELEERRQKRQAAAAKRAKLQEERKKQQEELNYKKKMAWWDSCGYRSLCLPRVDSEGEDMEPDEDDHVSFSSTDSDHTAIRYVLGDVTHPQADREDAIIVHCVDDSGHWGRGGLFTALGLRSDEPRKQYELAGDMKDLELGNVLLFPVDDKQSRLCGRDYLALIVAQQRDKANKLSGIRLTALDEGLKKIYKAAKQKKASVHLPRIGHSTKGFNWYGTERLIRKHLATRGIFTSIYYYRRGSSHATVSSTASTTTPSSSKPAASSPSESPHSSSPPANREGLTKSAELSTTSHEGPGAPGLADFMRGVHVYFYNMAATEKKKLTRYLITYDGDEEDLMSSHVTHIVGEVESPVHKQELQDLLHQYPQALLVKKNWLESCFASQRKVSVSKYVIRLT

SEQ ID NO: 8773 - protein, 738 aa, Danio rerio
MRRSLAPSQVAKRKQGPDSDDEEDWEPDMEPQSKRDCREKYISPYRKPLTPLTNRPVCADGNEHEAFIRKILSKPFKIPIPNYTGVLGLRALGLRRAGVRKALHDPFEDGALVLYEPPAISAHDLIKADKEKLPVHVVVDPVLSKVLRPHQREGVKFLWDCVTGRRIENSYGCIMADEMGLGKTLQCITLIWTLLKQSPDCKPEIDKVIVVSPSSLVRNWYNEVGKWLGGRVQPVAIDGGSKDEIDSKLVNFISQQGMRIPTPILIISYETFRLHAEVLHKGKVGLVICDEGHRLKNSDNQTYLALNSMNAQRRVLISGTPIQNDLLEYFSLVHFVNSGILGTAQEFKKRFEIPILKGRDADASDKDRAAGEQKLQELISIVNRCLIRRTSDILSKYLPVKIEQVVCCNLTPLQKELYKLFLKQAKPVESLQTGKISVSSLSSITSLKKLCNHPALIYEKCLTGEEGFDGALDLFPQNYSTKAVEPQLSGKMLVLDYILAMTRTTTSDKVVLVSNYTQTLDLFEKLCRNRRYLYVRLDGTMSIKKRAKIVERFNNPSSPEFIFMLSSKAGGCGLNLIGANRLVMFDPDWNPANDEQAMARVWRDGQKKTCYIYRLLSTGTIEEKILQRQAHKKALSSCVVDEEQDVERHFSLGELRELFSLNEKTLSDTHDRFRCRRCVNGRQVRPPPDDSDCTCDLSNWHHCADKRGLRDPVLQASWDAAVSFVFHQRSHEDQRGVV

SEQ ID NO: 8774 - protein, 505 aa, Rachiplusia ou multiple nucleopolyhedrovirus
MDNYKLQLQEFFDQAPDNDDPNFEHQTPNLLAHQKKGIQWMINREKNGRPNGGVLADDMGLGKTLSVLMLIAKNNCLQLKTLIVCPLSLINHWVTENKKHNLNFNMLKYYKSLDADTFEHYHIVVTTYDVLLAHFKLIKQNKQSSLFSNRWHRVVLDEAHIIKNCKTGVHNAACALTATNRWCITGTPIHNKHWDMYSMINFLQCRPFNNPKVWKMLNKNNDSTNRIKSIIKKIVLKRDKSEISSNIPKHTVEYVHVNFNEEEKTLYDKLKCESEEAYVKAVAARETENALSRLQQMQHVLWLILKLRQICCHPYLAMHDKNILETNGCFKMDYMSSKCKRVLDLVDNILNTSDDKIILVSQWVEYLKIFENFFKQKNIATLMYTGQLKVEDRILAETTFNDATNTHRILLLSIKCGGVGLNLIGGNHIVMLEPHWNPQIELQAQDRISRMGQTKNTHVYKMLNVEDNSIEKYIKQRQDKKIAFVNTVFEETLLNYEDIKKFFNL

SEQ ID NO: 8775 - protein, 1163 aa, Chlamydia trachomatis
MLNFRKLRRDFTANILQDGKELFAQGAVVSAKILSMNGETVCISAQIRGSYDNVYECEIEVDRAESDTVDSNCDCSYNYDCQHIVALLFYLEQYFNEMVVTYSKEADLSSNEEVSKELQETFVVAATREEERRDREHQKEILREYNHAANVLSENPFFLPLEYSEKDSAELAVLFVPQKNEGEVFSPNQPIEFQLVLRLPGRSKPFYISNIKTFLEGVLYQEPIVFSGRRFFFTLQSFSASDRKLIDLLIRYARYATGSSEEKLLKSAFLTPASLGMILSKMFEHQMAESGGSQLGERECFQGIFCGNLEEPLLWSVSPAKMKFHLDYFDTPYKALLMKPLIVVDEEELQPEQAVLLESNYPGIIHKNVYHHFLPQIKRAHLRTFAGLRDIAIPEALFGSFCENALPVFRNYAELSNVEALNVFSTLPYTEELQGVCDISYLDGELEARLFFLYDGQKVPATSFSLQYQEVRTFVRPDGILARNLVEERKILEEVFSGFVYDERDGAFHVKSEKKIVEFMTETIPNNQHRITFNCPETLSDQFIYDETVFDLTFRAGEDINYYEAELKVHGLLKGISLDLLWDCVSAKKRFLELPKKGGQLKKARRGKASASKLPCILVLDLEKIAPVIQIFNEIGFQVLDDFVEKCPLWSLSGISPESFKDLPVNFSMTEDLAEIQKQIRGEVDFEFQEVPSQIQATLRGYQKEGVHWLERLRKMHLNGILADDMGLGKTLQTIIAVTQSRLEKGGGCSLIICPTSLVYNWKEEFRKFNPEFKTLVVDGIPSQRRKQLASLEEYDVAITSYNLLQKDIDIYKDFLFDYVVLDEAHHIKNRTTRNAKSVKMIRACHRLILTGTPIENSLEELWSLFDFLMPGLLSSYDRFVGKYIRIGNYMGNKADNVEALRRKVAPFILRRMKEDVLEDLPPVSEILYHCHLTESQRELYQSYAASARQELSRLVKQEGFERIHIHVLATLTRLKQICCHPAIFAKDTPEPGDSAKYDMLMDLLSSLVDSGHKTVVFSQYTKMLGIIRQDLEAKGIPFVYLDGSTKNRLEIVQQFNEDPGLLVFLVSLKAGGTGLNLVGADTVIHYDMWWNPAVENQATDRVHRIGQSRSVSSYKLVTLNTIEEKILSLQNRKKGLVKKVINSDDEVVSKLTWEEVLELLQI

SEQ ID NO: 8776 - protein, 1199 aa, Chlamydia trachomatis
MILNSLSMFRHQATRFLQDNRDSIAVSFSKNTYKITIPDEDSPDGEWISTLSFNDEERLSFAACSCPDGDCCEHLLTATLAAYDPTEGALLHVKFKSSFWWGLFYQLFLSKAPLHAPGDKVYTIQSQQLSVSLQCLSAEALTYWLPIVHASPEPQTISKETFSQSALYRIARELFMFSQKGASLVIQENPQGFPSLFSLQWEGIALSIEVLDVDTLKALFPLLEFSQTSLYSGEPYLLHNVHVVPEQARIYFTKEYPPLPKSIKEYQETVLGPIKYFAEAKKCTSIPKTLSLPIHIIPALDRSFREHLLSQLCYETEERPIHYAIHFLRDASLSFSAYLETPGDLSEGHIIYPGFCYIPNKGLLAVSGLLSPESSFTIRSDHIENFLDEYGPFIKEPGFETFSNQSPVGSLSYNVTEQGVLLFHYDTGNAADIELRFGKWTYYSRQGFFLNSRLDLALQDGLTIEAPQVADFILTHEVALKSIPNFFAAQPPLKSIRFEVHKEKKGSGIYLQPIFEGLEHESCRLFGQFLYRENVGFSLLPAALQMLCQIPTEIPADQVAEFLLQFSKDDRMVFSDPQLALPERVELNILAIHRPHPSSPLHLKIEIKTNIGSIPLGTVLQALKGKKDFLFSKAGFLNLDNCLFVFLKQFLSSQRYDIQENTLITMVTDIFKLDALAPMITDPNIQASEEDLAYFSQLKSACLPPIPVNLFSTDHKLRPYQNSGLLWLWFLYNHRLSGLLCDEMGLGKTHQATALLDIVAQTAKNPKFLVVCPTSVLPHWEHVLASHLPQASLFSFHGPHKPKTLPDCDILITSYGTLRQNYALFYKVSFTVAVFDEIHTAKNKSSQIHKILCRLDAQMKLGLTGTPVENNLIEFKGLLDIILPNYLPSDALFKRLFTHKNASETDEDIISSKDLLLKLTRPFILRRTKKLVLPELPEKVESLIPCRLSPEQSQLYSSTLKKEKCQIQQLEKEEDPASVNYLHVFALLNQLKQICDHPAVYFKDPESYKNHSSGKWAAFVKLLNDSLASGYKVVVFSQYIQMIRIIALYLEEHAIEYALVQGKSQNRKEEIDRFSNDPNCRVFIGSLLAAGTGINLTAGNVVIMYDRWWNPAKENQALDRVHRIGQKNTVFIYKLVTEDTLEEHIHYLIEKKMRLLNQVTTTQDSNILHVLNREDLITILSYKDEHMLSEEVQEDSGDS

SEQ ID NO: 8777 - protein, 954 aa, Mycobacterium tuberculosis CDC1551
MLLPSLRSAPLDSPELIRLAPRPAARTDPMLLAWTVPVVDLDPTAALAAFDQPAPDVRYGASVDYLAELAVFARELVERGRVLPQLRRDTHGAAACWRPVLQGRDVVAMTSLVSAMPPVCRAEVGGHDPHELATSALDAMVDAAVRAALSPMDLLPPRRGRSKRHRAVEAWLTALTCPDGRFDAEPDELDALAEALRPWDDVGIGTVGPARATFRLSEVETENEETPAGSLWRLEFLLQSTQDPSLLVPAEQAWNDDGSLRRWLDRPQELLLTELGRASRIFPELVPALRTACPSGLELDADGAYRFLSGTAAVLDEAGFGVLLPSWWDRRRKLGLVLSAYTPVDGVVGKASKFGREQLVEFRWELAVGDDPLSEEEIAALTETKSPLIRLRGQWVALDTEQLRRGLEFLERKPTGRKTTAEILALAASHPDDVDTPLEVTAVRADGWLGDLLAGAAAASLQPLDPPDGFTATLRPYQQRGLAWLAFLSSLGLGSCLADDMGLGKTVQLLALETLESVQRHQDRGVGPTLLLCPMSLVGNWQQEAARFAPNLRVYAHHGGARLHGEALRDHLERTDLVVSTYTTATRDIDELAEYEWNRVVLDEAQAVKNSLSRAAKAVRRLRAAHRVALTGTPMENRLAELWSIMDFLNPGLLGSSERFRTRYAIPIERHGHTEPAERLRASTRPYILRRLKTDPAIIDDLPEKIEIKQYCQLTTEQASLYQAVVADMMEKIENTEGIERRGNVLAAMAKLKQVCNHPAQLLHDRSPVGRRSGKVIRLEEILEEILAEGDRVLCFTQFTEFAELLVPHLAARFGRAARDIAYLHGGTPRKRRDEMVARFQSGDGPPIFLLSLKAGGTGLNLTAANHVVHLDRWWNPAVENQATDRAFRIGQRRTVQVRKFICTGTLEEKIDEMIEEKKALADLVVTDGEGWLTELSTRDLREVFALSEGAVGE

SEQ ID NO: 8778 - protein, 1013 aa, Mycobacterium tuberculosis H37Rv
MLVLHGFWSNSGGMRLWAEDSDLLVKSPSQALRSARPHPFAAPADLIAGIHPGKPATAVLLLPSLRSAPLDSPELIRLAPRPAARTDPMLLAWTVPVVDLDPTAALAAFDQPAPDVRYGASVDYLAELAVFARELVERGRVLPQLRRDTHGAAACWRPVLQGRDVVAMTSLVSAMPPVCRAEVGGHDPHELATSALDAMVDAAVRAALSPMDLLPPRRGRSKRHRAVEAWLTALTCPDGRFDAEPDELDALAEALRPWDDVGIGTVGPARATFRLSEVETENEETPAGSLWRLEFLLQSTQDPSLLVPAEQAWNDDGSLRRWLDRPQELLLTELGRASRIFPELVPALRTACPSGLELDADGAYRFLSGTAAVLDEAGFGVLLPSWWDRRRKLGLVLSAYTPVDGVVGKASKFGREQLVEFRWELAVGDDPLSEEEIAALTETKSPLIRLRGQWVALDTEQMRRGLEFLERKPTGRKTTAEILALAASHPDDVDTPLEVTAVRADGWLGDLLAGAAAASLQPLDPPDGFTATLRPYQQRGLAWLAFLSSLGLGSCLADDMGLGKTVQLLALETLESVQRHQDRGVGPTLLLCPMSLVGNWPQEAARFAPNLRVYAHHGGARLHGEALRDHLERTDLVVSTYTTATRDIDELAEYEWNRVVLDEAQAVKNSLSRAAKAVRRLRAAHRVALTGTPMENRLAELWSIMDFLNPGLLGSSERFRTRYAIPIERHGHTEPAERLRASTRPYILRRLKTDPAIIDDLPEKIEIKQYCQLTTEQASLYQAVVADMMEKIENTEGIERRGNVLAAMAKLKQVCNHPAQLLHDRSPVGRRSGKVIRLEEILEEILAEGDRVLCFTQFTEFAELLVPHLAARFGRAARDIAYLHGGTPRKRRDEMVARFQSGDGPPIFLLSLKAGGTGLNLTAANHVVHLDRWWNPAVENQATDRAFRIGQRRTVQVRKFICTGTLEEKIDEMIEEKKALADLVVTDGEGWLTELSTRDLREVFALSEGAVGE

SEQ ID NO: 8779 - protein, 1046 aa, Xenopus laevis
MSAESTEQQPDTVVKEEKEGKDPMEVDSGDGKKQEQDGEAVKEEAMEDGEPDDDDDDDSLNKSKEGNEMDPAYEKKRKTDRSNRFDYLLKQTELFAHFIQPAAQKTPTSPLKMKPGRPRLKKDEKQDLLSAGDNRHRRTEQEEDEELLTESSKTTNVCTRFEDSPAYVKSGKLRDYQVRGLNWLISLYENGINGILADEMGLGKTLQTISLLGYMKHYRSIPGPHMVLVPKSTLHNWMAEFKRWVPSLCAVCLIGDKDHRAAFVRDVLLPGEWDVCVTSYEMLIREKSVFKKFNWRYLVIDEAHRIKNEKSKLSEIVREFKTTNRLLLTGTPLQNNLHELWALLNFLLPDVFNSSEDFDSWFDTNNCLGDQKLVERLHMVLKPFLLRRIKADVEKSLKPKKEIKIYVGLSKMQREWYTKILMKDIDILNSSGKTDKMRLLNILMQLRKCCNHPYLFDGAEPGPPYTTDLHLATNSGKMMVLDKLLPKLKEQDSRILIFSQMTRVLDILEDYCMWRNYEYCRLDGQTPHEERQESIIAYNAPGSTKFIFMLSTRAGGLGINLATADVVIIYDSDWNPQVDLQAMDRAHRIGQTKTVRVFRFITDNTVEERIVERAEMKLRLDSIVIQQGRLVDQNLNKLGKDEMLQMIRHGATHVFASKDSEITDEDINAILERGEKKTAEMNEKLSNMGESSLRNFPPDTESSVYNFEGEDYREKQKMAFTQWIEPPKRERKANYAVDAYFREDLRVSEPKVPKAPRPPKQPNVRSFQFFPPRLFELLEKEILYYRKTIGYKVPRNPDLPNSAQVQKEEQLKIDEAEPLNDEELEEKEKLLTQGFTNWNKRDFNQFIKANEKWGRDDIENIAREVEGKTPEEVIEYSAVFWERCNELQDIEKTMAQIERGEARIQRRISIKKALDTKIGRYKAPFHQLRISYGTNKGKNYTEEEDRFLICMLHKLGFDKENVYDELRQCIRNSPQFRFDWFLKSRTAMELQRRCNTLITLIERENLELEEKEKAEKKKRGPRPSSAQKRKVDGTPDGRGRKKKLKL

SEQ ID NO: 8780 - protein, 1893 aa, Xenopus laevis
MASGLGPSSPGSDGEIEVMLNSSIHQDDDLNEDLSEVETPKIKKKKKPKKAKESKSTKVKRQKKEDVDDSSGEGNDYGDNDGGPIRSDSEGSDYTPGKKKKKKMTPKREKKSKVKRDEDDDDDDDDDDSKEPKSSGQLLDDWGMEDIDHVFTEDDYRTLTNYKAFSQFVRPLIAAKNPKIAVSKMMMVLGAKWREFSTNNPLKGSSGASVAAAAAAAVAVVESMVASTEVIVPPPPPPPPPVVEVPLRKAKTKEGKGPNARKKPKVVRPPETKKTPKAKKVAPLKIKLGGFGSKRKRSSSEEEDIDADSDYDEGSMNSLSVSDGSTSKSSRSRKKLKATKKKKKEEEGAAAGADGYETDHQDYCEVCQQGGEIILCDTCPRAYHMVCLDPDMDKAPEGKWSCPHCEKEGVQWEAKEDNSELDDDLDDAVGDPEEEDHHMEFCRVCKDGGELLCCDVCPSSYHIHCLNPPLPEIPNGEWLCPRCTCPPLKGKIQKILTWKWGQPPPPTPVSRPADSDPDAAPLKPLEGRPEREFFVKWHAMSYLHCSWVTELQLELHCQVMFRNYQRKNDMDEPPAGDYGVDEEEKSRKRKNKDPKYLEMEEKFYRYGIKPEWMMIHRVLNHSVDKKGYVHYLIKWRDLAYDQASWEAEESDIQDYDIYKQGYWNHRELMCGDEGRPGKKVKKVKLRKLDRPPDTPAVDPTVKYDRQPDYLDATGGTLHPYQLEGLNWLRFSWAQGTDTILADEMGLGKTVQTAVFLYSLYKEGHSKGPFLVSAPLSTIINWEREFEMWAPDMYVVTYVGDKDSRAVIRENEFSFEGNAIRGGKKASRMKKEASVKFHVLLTSYELITIDTAVLGSIDWACLVVDEAHRLKNNQSKFFRVLNGYPLQHKLLLTGTPLQNNLEELFHLLNFLTPERFNNLEGFLEEFADIAKEDQIKKLHDMLGPHMLRRLKADVFKNMPSKTELIVRVELSPMQKKYYKFILTRNFEALNTRGGGNQVSLLNVVMDLKKCCNHPYLFPVAAMEAPKMPNGMYDGSALIKGAGKLFLLQKMLRKLKDDGHRVLIFSQMTKMLDLLEDFMEHEGYKYERIDGGITGNMRQEAIDRFNAPGAQQFCFLLSTRAGGLGINLATADTVVIYDSDWNPHNDIQAFSRAHRIGQNRKVMIYRFVTRASVEERITQVAKKKMMLTHLVVRPGLGSKTGSMSKQELDDILKFGTEELFKDEATEGGENKEGEDISVIHYDDKAIARLLDRNQDETEEPELQLGMNEYLSSFKVAQYVVREEEMGDEEEVVREIIKQEESVDPDYWEKLLRHHYEQQQEDLARNLGKGKRIRKQVNYNDGSQEDRDWQDDQSDNQSDYSVASEEGDEDFDERSEAARRPNRKGLRNDKDKPLPPLLARVGGNIEVLGFNARQRKAFLNAIMRYGMPPQDAFTTQWLVRDLRGKSEKEFKAYVSLFMRHLCEPGADGAETFADGVPREGLSRQHVLTRIGVMSLIRKKVQEFEHVNGRWSMPELAEAEENKMASKIDSPSPKTPTSSTPGDTQPNTPAPPASNEDSTKSEEVPVKEETTDNEVKPTEENNETTQPTPDTQSPAAQTEEKKEEPVQQERTSPPPPPPPPPPAPEPMETDQKPEPEKVDEVITLDDKKDDVQEVTLQNGETPKETAEEKTKKASAAAAKQRFMFNIADGGFTELHSLWQNEERAATVTKKTYEIWHRRHDYWLLSGIITHGYARWQDIQNDVRYAILNEPFKGEVNRGNFLEIKNKFLARRFKLLEQALVIEEQLRRAAYLNMSEDPSHPSMALNTRFAEVECLAESHQHLSKESMAGNKPANAVLHKVLKQLEELLSDMKADVTRLPATIARIPPVAVRLQMSERNILSRLASRGGEPQPQQITQQ

SEQ ID NO: 8781 - protein, 159 aa, Chlamydophila abortus
GILADDMGLGKTLQAIIAITQSKLEKGKGCSLIVCPTSLVYNWKEEFRKFNPEFKAVIIDGVPSHRRRQLATLSDYDVAITSYNLLQKDIDVYKDFVFDYVVLDEAHHIKNRTTRNAKSVKMIRSGHRLILTGTPIENSLEELWSLFDFLMPGLLSSYD

SEQ ID NO: 8782 - protein, 1181 aa, Chlamydia muridarum
MQTGTSNRSVNPLCFRGEMLNFRKLRRDFTANILQDGKELFTQGAVVSAKILSMNSETVCISAQIRGSYDNVYECEIEVDRAESDTIDSNCDCSYNYDCQHIVALLFYLEQYFNEMVVTYSKEAGLSSNEEVSKELQETFVVAATREEERRDREHQKEILREYNHAANVLSENPFFLPLEYSEKDSAELAVLFVPQKNEKEVFSPNQPIEFQLVLRLPGRSKPFYISNIKTFLEGVLYQEPIVFSGRRFFFTLQSFSASDRKLIDLLIRYARYATGNAEEKLLKSAFLTPASLGMILSKMLEHQMAESGGVKLGERECFQGIFCGNLEEPLFWSVSPAKMKFHLDYFDTPYKALLMKPLVVVDEEEIQPEHAVLLESNCPGIIHKNVYHHFLPQIKRAHIRTFAGLRDVAIPEALFGSFCENALPVFRDYAELSNIEALNVFSTLPYTEELRGVCDISYLDGELEAKLFFLYDGQRVPATSFSLQYQDVRAFVRPDGILARNLVEERKILEEVFAGFIYDERDGAFHVKSEKKIVEFMTETIPNNQHRITFNCPETLSDQFIYDETVFDLTFRAGADINYYEAELKVHGLLKGISLDLLWDCISAKKRFLELPKKGCQLKKARRGKAQASKLPCILVLDLEKIAPVIQIFNEIGFQVLDDFVEKCPLWSLSGISSASFKNLPVNFSMTEDLAEIQKQIRGEVDFEFQEVPSQIQATLRSYQKDGVHWLERLRKMHLNGILADDMGLGKTLQTIIAVTQSRLEKGGGCSLIICPTSLVYNWKEEFRKFNPEFKTLVIDGIPSQRRKQLSSLEEYDVAITSYNLLQKDIDIYKDFLFDYVVLDEAHHIKNRTTRNAKSVKMIRACHRLILTGTPIENSLEELWSLFDFLMPGLLSSYDRFVGKYIRIGNYMGNKADNVEALRRKVAPFILRRMKEDVLEDLPPVSEILYHCHLTESQRELYQSYAASARQELSRLVKQEGFERIHIHVLATLTRLKQICCHPAIFAKDTPEPGDSAKYDMLMDLLGSLVDSGHKTVVFSQYTKMLGIIKQDLEAKGVPFVYLDGSTKNRLEIVQQFNEDPSLLVFLVSLKAGGTGLNLVGADTVIHYDMWWNPAVENQATDRVHRIGQSRSVSSYKLVTLNTIEEKILSLQNRKKGLVKKVINSDDEVVSKLTWEEVLELLQI

SEQ ID NO: 8783 - protein, 1202 aa, Chlamydia muridarum
MILMILNSLSMFRRQATRFLQDNRESIAVSFFKNTYKITIPDEDSPDGEWISTLSFNEEERLSFAACSCPDGDCCEHLLIATLAAYTPTEGALLHTKFEASFWWRLFCKLFLSKASLQAPGEKIYTVKSEQISVSIQCLSAESLTSWLPIVHNSPEPQKITEETFPQSALYRIARELFLYTQKGASLIVQENPQGFPSLFSFQWAGISLTIEILDVDTLKELFPLLELSQTSLYNGDSYLLRDVHVVPEQAKIYFTKEYPPLSKSIREYQATNLGSIEYFAGAHKCTAIPQKLSLPIHIIPALDHSFREQLLSQLCYETEERPIHYDIHFFRDASLSFSAYLETPGDLAEGHIIYPGFCYIPNKGLLAVSGLLSPESTFTIRADHIESFLDEYGALIKEPGFETFSNKSPTGTLSYSVTEQGVLLFHYDTGNSSDIELNFGKWTYYSRQGFFLNSRLDLALQDGLTIEAPHVADFILKHEVALKSIPNFFAPQPPLKTIRFEVHKEKKGVGIYLKPIFEGLEQESCRLFGQFLYRENIGFSLLPASLQMVCQIPTEVPANQVTEFLLQFSKDDRMIFPDPQLALPEQVQLNILSIQRPHPSSPLHLKLEIKTNIGSISLGTVLQALKGKKEFLFSKAGFLNLDNCLFVFLKQFLSSQRYDIQESTLITMVTDIFKLDALAPLITDPNIDASEEDLAYFSQLKSACLPPIPMNLFSTDHKLRPYQNSGLLWLWFLYNHRLSGLLCDEMGLGKTHQATALLDIVAQTAKNPKFLVVCPTSVLPHWELVLASHLPKATLFSFHGPHKPKTLPDCDIIITSYGTLRQNYALFYKVSFTVAVFDEIHMAKNKSSQIHKILCRLDAQMKLGLTGTPVENNLIEFKGLLDIILPNYLPSDGLFKRLFTHKNSSETDENIVSSKDLLLKLTRPFILRRTKKLVLPELPDKVESLIPCQLSPEQAQLYASTLKKEKCQIQQLEKEDDPAAVNYLHVFALLNQLKQICDHPAIYFKDPESYKNYASGKWAAFVKLLNDSLASGYKVVVFSQYIQMIRIISLYLEEQNIQYALVQGKSQNRKEEIDRFSNDPNCRVFIGSLLAAGTGINLTAGNVVIMYDRWWNPAKENQALDRVHRIGQKNTVFIYKLVTEDTLEEHIHYLIEKKMRLLNQVTTTQDSNILHVLNREDLITILSYKDEHGLSDEVQEDSGDS

SEQ ID NO: 8784 - protein, 1063 aa, SYNECHOCOCCUS SP. WH 8102
MSLLHATWLPAIRTSGSSGQPALLIWADTWRVATPEGPGLTPALHPFTLEPDDLKAWLQERDLLPGGSIDATACLTLPSRTVKPRKSRSKTAEPAPEEPIWTGLPMQAGEPIPKQTEWWPWQVQGLAVEPSAATEWLSRLPLSGRNPDLADELRWWSHLQRWALSLVARGRWIPQMELSKGEGYPHRARWVPLLNREEDRRRLEDLAASLPLVATCALPWREPMGRRSNRMTRLRPEAMRAANPVACCRPRSGRLRVATLLEDLVDAQLRKDFEPSTDGLDPLLTLWQDALGSETGVIEIGDEQAERLASASFHWREGIAGDFAAARTCLELQTPAEGEELWELRFGLQAESDPSLKLPAAAAWASGADQLQLGEVTVEQPGEVLLEGLGRALTVFPPIERGLETATPDTMQLTPAEAFVLVRTAARQLRDAGVGVDLPPSLSGGLASRLGLAIKAELPERSSGFSLGESLDWSWDLMIGGVTLTLRELERLSGKRSPLVRHKGAWIELRPNDLRNAERFCGANPELSLDDALRITATEGDLLMRLPVHRFEAGPRLQAVLEQYHQQKAPDPLPAPEGFCGQLRPYQERGLGWLAFLNRFDQGACLADDMGLGKTIQLLAFLQHLKAEQELKRPVLLVAPTSVLTNWRREAEAFTPELAVREHYGPRRPSTPAALKKALKDVDLVLTSYGLLQRDSELLESQDWQGVVIDEAQAIKNPSAKQSQAARDLARPAKGNRFRIALTGTPVENRVSELWALMDFLSPKVLGEEDFFRQRYRMPIERYGDMASLRDLKARVGPFILRRLKTDKTIISDLPEKVELSEWVGLSKEQKSLYSKTVEDTLDAIARAPRGQRHGQVLGLLTRLKQICNHPALALSENAVDDGFLGRSAKLQRLEEILDEVIEAGDRALLFTQFAEWGHLLQSWMQQRWKADVPFLHGGTRKNERQAMVDRFQEDPRGPQLFLLSLKAGGVGLNLTRASHVFHIDRWWNPAVENQATDRAYRIGQTNRVMVHKFITSGSVEEKIDRMIREKSRLAEDVIGSGEDWLGCLAGDQLRNLVALEDT

SEQ ID NO: 8785 - protein, 539 aa, SYNECHOCOCCUS SP. WH 8102
MGDLISDSGSLSCGLDLSAAGLIRVVCPFDAVTQAQLRRIRPRGSWMGPSRGWEFPLAAAAALIQGFGTRFPVTPQLQQWLDWCHHPLPPLPPHRDLVAAADLTMALRDGRRPLPHQRSGARWLLARRGAVLADEMGLGKTLTALLAARAMVRCAELRVMVVAPVGLHAHWRREAETVDLQPELVSWARLPAELPPAGTLLVVDEAHFAQSLQANRTAALLRLARHPRLRAIWMLTGTPMKNGRPAQLYPLLAAMDHPIARDQRQFEERYCQGHWREQRGQRRWQASGATQLEELRRLTRPLILHRRKAQVLELPPKQRREHPIALSDAESLGFDHRIDLLVDDFRRRALKGEVRSDAEPLAVLTALRRVAAEFKLPAAETLVRTLLQAGEAVVLFSGFVEPLQLLQQRLGGALLTGRQRPVERQQAVDCFQQGGEDLLLATFGTGALGFTLHRARHVVLLERPWTPGDVAQAEDRCHRLGMEDEVLTCHWLQLGPADQLVDGLVASKAERIEILLGPRRLTLERQSLPLMVRRCLQVA

SEQ ID NO: 8786 - protein, 995 aa, Bacillus halodurans
MIPNIIVHGGWFKDHFFIWGEEQASSSSGRIVRFEYPFLYSPFELRLALFRHDPHSFYGSFLQHGQAVLEVPLAERAFHSPAGTTTIYQAEPSMKSFRFPVEGIMLSADELFDYGSFLSKLGSSSSDEWVLADDFHFWLHFFLYIRQSIRNGAFSPSAQGTWVLNNPHWKAWAEAMPEVCLALTENAPLIQTTEEEPVHEQLQAIGEHLTDKWIRRLLQTDKGKDRFLSYVQSLHPSVKRTLEQMGPYGEGPTEETHSEKVDRDHFLEAVGVKPQAPFQCAFVLKEPITGKTDWTLSLCVVDKVNPSIIVEMEELSQGQHPWRMNPVPLLKERLPAVTDRLPLLQSIKLSSPVIKLSNEEAYHLFTTYDEYLKELGFRLIVPRWLTQRRPLKVKLKMDAHALHSEVEPLLNWQSVASFQYELAIGDNRVSLEEFQTFVDENRPFLQLNGEWIAWDPSLAKKLRAYLNKLEHGQTTYLDAWRLEQSEEGSFQEAVEWELEWSAEIEQKIKQLFQQNVPLRPAPASLQATLRPYQEEGASWLIHLRETGFGGCLADDMGLGKTVQTISYILYVLEHGQQNKKPFLLFCPTSLITNWVHECKTFAPSLNVYVHHGQQRHQENETAWREADIVISSYSLAYKDLDQWKDIEWNGLILDEAQQIKNVDTKQRQAVKSIRAAHRIALTGTPIENRLKELWSIMDVLNPSYLKSLTHFTRTFIKPIEREKDEARLQELQQLIQPLLLRRKKSDEALALQLPEKREHVHRVSLSVEQAALYQAVVDNMVHQLGDVTHMERRALILKTLTKLKQICNHPAHFLKDKNVDAHQSEKWELLLTLSEQIMDRQEKMLIFTQFKEMGHLMQDAFQSQIGTPIPFLHGSLSRQQRQEAVERFQNDRELPIFILSLKAGGVGLNLTAANHVIHYDRWWNPAVENQATDRAYRIGQTADVTVHKLMTEGTLEERIHQMLESKQALAEQILTAGENQLTELTDDELLALIRL

SEQ ID NO: 8787 - protein, 566 aa, Bacillus halodurans
MDIQIQYSTDWKEEFLKRLEDGGPWSNWEMGKLAYEAANYQVIPEFHGLQAPKHLPQLQPFPHQMEVAQTVIEQMNGKAILADEVGLGKTIEAGLILKEYMIRGLAKKVLILVPASLVSQWAYELSSKFYIPAIPQKKAYVWEQYDVVVASIDTAKRQPHRDIVLNQHYDLVIIDEAHKLKNPKTKNYAFIKSLKRKYCLLLTATPVQNKLEEIFNLVSLLKPGHLGDLESFEKEYRANKRAPKNEDKLKELVNKVMVRNRREETGIEWTKRIVQTVPITFSEGERAFYHAITKLKQQPDVMTNSFSLLTLQREICSSREAAFMTLKNMITKLEQEGRTSPILESLIEQVGTIEGHAKAEKALELIQQINDKVIIFTEYRATQLYLQWYLKQHGISSVPFRGGFKRGKKDWMRQLFENRAQVLIATEAGGEGINLQFCHHIINYDLPWNPMRIEQRIGRIHRLGQTEDVRIYNFAVKDTIEEQILTLLYEKIQLFERVVGELDDILTKMNVGSIEEHIRDIFVHSDSEGEMKIKLDHLSAIMNDVANEKEEDHATGATASVSDALL

SEQ ID NO: 8788 - protein, 577 aa, Bacillus halodurans
MNIIPVSKQQKLHLTKELSPLKNIKLKLQSQAIQLQKGFDRLICLDEVYLEPRPWQYETAIKVLRDMQGSAILADEVGLGKTIEAGLIIKELLVRGLINSVLILVPAPLVEQWRDEMNDKFKIQLTDLKEEGWEEQNLLISSMPYLVRSKKRQEIINKRTFDLLVVDEAHCLKNHRTQTYKFVYTIQKNNTLLMSATPIQNDMRELFNLVNILKPGFLKSRKKFREQFIVNRYTPKNIEALRDLLNKVMIRHRRSDTLVELPRRVIRNVEIELTEIERNFHNGVIDFCRDTYKKYMEGDIQIGWDKTRVHLIVLILLSLLKQNCSSPQASLSTLRTKMFPRLDGVDKKNCLDLIQLGERITAPSKAIELLKLLKQSDEQAIVYSEYRVTIDLLSELLEEHDFTVTTYHGRLSSREKQQSIERFKNKEAQVFISSESGGQGLNLQFCRRLINFDLPWNPMRIEQRIGRVHRFGQVNDVEIYTMPTKGAIDEYLLYTLTSKVNLFEVVIGELDTILSYMKNNDESFELRIGKIILESKNSAEVEEQLRSISDEFLTAKQELDQDVDQATKILNTIGVGT

SEQ ID NO: 8789 - protein, 965 aa, Dichelobacter nodosus
MESLWQYSTVHNSACKVIEEQTLWGQTVCRVWLPNQDAVVRVPRSALRPLNADLQPEIEAGRIAYVAAAAKVAEVLEGSTSATEGYVLLAPMESNVIPLPHQIHALSRAISGDRVRYLLADEVGLGKTIEAGLVMRELKLRGLVRRTLVVSPKGIATQWVAEMQTHFNEQFQLVLGDDIGTLQRLAPGADHRSSAWSMFDQVIVSLDSVKPMDKRRGWTAERVAEYNRSRFEDLITAGWDLVIVDEAHRLGGSTDQVARYKLGKGLAEAAPYVLLLSATPHQGKTDAFHRLMNLLDDDAFPDMDSVSRERVASYVIRTEKRKAIDADGKPLFKPRRTQMAPVAWESRHQLQQLLYEAVTDYVREGYNQALREKKRHIGFLMILMQRLVVSSTRAIRTTLERRLAALKDGEQQASLRLAELENGADGLESPDDEIAELYDMDGQELLDELLKSHVSALQSEGSHVETLLDAAVRCEQAGPDAKAEALIEWIYKLQAEENEPDLKVLIFTEFVPTQQMLKEFLEARGISVVTLNGSMAMEERGAAQDAFRKSHRVLVSTDAGGEGLNLQFAHVIINYDIPWNPMRLEQRIGRVDRIGQPKTVQAINFVFEDSVEFRVREVLEQKLSVIFDEFGIDKTGDVLDSAQAGELFEDVFASAILNPDGIETSVDHTVARIRDEIQQVRESSAIYGISEEPDVQTAERLRSHPLPHWVERMTVGYLNSHGGAASRKRSWWDLNWPDGQEHRKAVFSAREADRLTDATLLNLENSRIRGLALNLPQVAAGQPLPCVTVSGLPASISGLWGLFEIRLQAGMHQKTQLLRIPMVRRGYVSVFLSEEGKLFLPTARHIWDALQTAEAEVQATLGQDDSITAHERLQIAAEQAGQELFDALQQAHLASVNREEERGMVAFTSRRKAIERVGLPEVRQYRLARCAAEENEWRHELQSARQIVPEIRSLLMLRIIKGGAQ

SEQ ID NO: 8790 - protein, 211 aa, Struthio camelus
SFLNYLFHEHQLYGPFLLVVPLSTLTSWQREIQTWAPQMNAVVYLGDITSRNMIRTHEWMHPQTKRLKFNILLTTYEILLKDKSFLGGLNWAFIGVDEAHRLKNDDSLLYKTLIDFKSNHRLLITGTPLQNSLKELWSLLHFIMPEKFSSWEDFEEEHGKGREFGYASLHKELEPFLLRRVKKDVEKSLPAKVEQILRMEMSALQKQYYKW

SEQ ID NO: 8791 - protein, 1568 aa, Gallus gallus
MSTPTDPGAMPHPGPSPGPGPSPGPILGPSPGPGPSPGSVHSMMGPSPGPPSVPHQMPAMGATDYPQEGMHQMHKSIDGLHEKGMVEDVHCGSMKTMRPPHPGMGPPQSPMDQHSQGYMSPHPSPLGAPEHVSSPMSGGGPTPPQMTPSQPGPIIPGDPQVMNQPNRGPSPFSPVQLHQLRAQILAYKMLARGQPLPENLQLAVQGKRTLPGIQQQEPPSAFNRQSGIGMHPMSGAATGPGPAAGIPGHTAAITSKTWNEGQTPDMSVSSAPQKLPAPSPSGRPSPAPTAAQPAAAMPGPSVPQPPPGQPSPIVQLQQKQNRISPIQKPQGLDPVEILQEREYRLQARIAHRIQELENLPGSLPPDLRTKATVELKALRLLNFQRQLRQEVVACMRRDTTLETALNSKAYKRSKRQTLREARMTEKLEKQQKIEQERKRRQKHQEYLNSILQHAKDFKEYHRSVAGKIQKLSKAVATWHANTEREQKKETERIEKERMRRLMAEDEEGYRKLIDQKKDRRLAYLLQQTDEYVANLTNLVWEHKQAQAAKEKKKRRRRKKKAEENAEGMASGLGPDGEPIDESSQMSDLPVKVTHTETGKVLLGPEAPKASQLDAWLEMNPGYEVAPRSDSEDESGSEYEEEDDEEESSRLEADEKILLDPNSEEVSEKDAKQIIETAKQDVDDEYSMQYSARGSQSYYTVAHAITERVEKQSSLLINGTLKHYQLQGLEWMVSLYNNNLNGILADEMGLGKTIQTIALITYLMEHKRLNGPYLIIVPLSTLSNWTYEFDKWAPSVVKISYKGTPAMRRSLVPQLRSGKFNVLLTTYEYIIKDKHILAKIRWKYMIVDEGHRMKNHHCKLTQVLNTHYVAPRRILLTGTPLQNKLPELWALLNFLLPTIFKSCSTFEQWFNAPFAMTGERVDLNEEETILIIRRLHKVLRPFLLRRLKKEVESQLPEKVEYVIKCDMSALQKILYRHMQAKGILLTDGSEKDKKGKGGAKTLMNTIMQLRKICNHPYMFQHIEESFAEHLGYSNGVINGAELYRASGKFELLDRILPKLRATNHRVLLFCQMTSLMTIMEDYFAFRNFLYLRLDGTTKSEDRAALLKKFNEPGSQYFIFLLSTRAGGLGLNLQAADTVIIFDSDWNPHQDLQAQDRAHRIGQQNEVRVLRLCTVNSVEEKILAAAKYKLNVDQKVIQAGMFDQKSSSHERRAFLQAILEHEEENEEEDEVPDDETLNQMIARREEEFDLFMRMDMDRRREDARNPKRKPRLMEEDELPSWIIKDDAEVERLTCEEEEEKIFGRGSRQRRDVDYSDALTEKQWLRAIEDGNLEEMEEEVRLKKRKRRRNVDKDSGKEDGEKAKKRRGRPPAEKLSPNPPKLTKQMNAIIDTVINYKDSSGRQLSEVFIQLPSRKELPEYYELIRKPVDFKKIKERIRNHKYRSLGDLEKDVMLLCHNAQTFNLEGSQIYEDSIVLQSVFKSARQKIAKEEESEDESNDDEDEDDEEESESESKSVKVKIKLNKKDEKSREKGKGKKRQSRAKAKPVVSDDDSDEDQDENDQSEASGSDDE

SEQ ID NO: 8792 - protein, 1630 aa, Gallus gallus
MSTPDPPLGGTPRPGPSPGPGPSPGAMLGPSPGPSPGSEHSMMGPSPGPPTAGHPLPPQGPGAYAQDNMHQMHKPMDSMHEKGMAEDPRYGQMKGMGMRPGAHAGMGPPPSPMDQHSQGYPSPLGGSEHASSPVPANGPSSGPQLPSGPSGVPMDGADPQALGQQNRGPTPFNQNQLHQLRAQIMAYKMLARGQPLPDHLQMAVQGKRPMPGMQQQMPTLPPPSVSGTGAVQGPVQGPGPGPTPPNYNRPHGIGGANMPPPGPSGVPPGMSGQPPGGPPKPWPEGPMANAAAPTSAPQKLIPPQTTGRPSPAPPAVPPAVSPVCPPQTQSPGQPAQPAPMVQLHQKQNRITPIQKPRGLDPVEILQEREYRLQARIAHRIQELENLPGSLAGDLRTKATIELKALRLLNFQRQLRQEVVVCMRRDTALETALNAKAYKRSKRQSLREARITEKLEKQQKIEQERKRRQKHQEYLNSILQHAKDFKEYHRSVTGKIQKLTKAVATYHANTEREQKKENERIEKERMRRLMAEDEEGYRKLIDQKKDKRLAYLLQQTDEYVANLTELVRQHKAAQVAKEKKKKKKKKKAENAEGQTAAIGPDGEPLDETSQMSDLPVKVIHVESGKILTGTDAPKAGQLEAWLEMNPGYEVAPRSDSEESGSEEEEEEEEEEQPQPAQPTLPVEEKKKIPDPDSDDVSEVDARHIIENAKQDVDDEYGVSQALARGLQSYYAVAHAVTERVDKQSTLMVNGVLKQYQIKGLEWLVSLYNNNLNGILADEMGLGKTIQTIALITYLMEHKRINGPFLIIVPLSTLSNWAYEFDKWAPSVVKVSYKGSPAARRAFVPQLRSGKFNVLLTTYEYIIKDKHILAKIRWKYMIVDEGHRMKNHHCKLTQVLNTHYVAPRRLLLTGTPLQNKLPELWALLNFLLPTIFKSCSTFEQWFNAPFAMTGEKVDLNEEETILIIRRLHKVLRPFLLRRLKKEVEAQLPEKVEYVIKCDMSALQRVLYRHMQAKGVLLTDGSEKDKKGKGGTKTLMNTIMQLRKICNHPYMFQHIEESFSEHLGFTGGIVQGLDLYRASGKFELLDRILPKLRATNHKVLLFCQMTSLMTIMEDYFAYRGFKYLRLDGTTKAEDRGMLLKTFNEPGSEYFIFLLSTRAGGLGLNLQSADTVIIFDSDWNPHQDLQAQDRAHRIGQQNEVRVLRLCTVNSVEEKILAAAKYKLNVDQKVIQAGMFDQKSSSHERRAFLQAILEHEEQDESRCGAASSLCLTAEPEEPPLKEEDEVPDDETVNQMIARHEEEFDLFMRMDLDRRREEARNPKRKPRLMEEDELPSWIIKDDAEVERLTCEEEEEKMFGRGSRHRKEVDYSDSLTEKQWLKAIEEGTLEEIEEEVRQKKSSRKRKRDAEGPPAPPVSTRSREKDEDSKKQKKRGRPPAEKLSPNPPNLTKKMKKIVDAVIKYKDSSSGRQLSEVFIQLPSRKELPEYYELIRKPVDFKKIKERIRNHKYRSLNDLEKDVMLLCQNAQTFNLEVSLIYEDSIVLQSVFTSVRQKIEKEEESEGEDSEEEEEGEEEGSESEARSVKVKIKLGRKEKAQERLKGRRRASRGSRAKPVVSDDDSDEEQEEERSGSGTEED

SEQ ID NO: 8793 - protein, 1808 aa, Gallus gallus
MNGHSDEESVRNSSGESSRSDDDSGSASGSGSGSSSGSSSDGSSSQSGSSDSESGSESGSQSESESDTSREKKQVQAKPPKADGSEFWKSSPSILAVQRSAVLKKQQQQQKAASSDSGSEEDSSSSEDSADDSSSETKKKKHKDEDWQMSGSGSVSGTGSDSESAEDGDKSSCEESESDYEPKNKVKSRKPPSRIKPKSGKKSTGQKKRQLDSSEEEEDDDEDYDKRGSRRQATVNVSYKEAEETKTDSDDLLEVCGEDVPQTEEDEFETIEKFMDSRIGRKGATGASTTIYAVEADGDPNAGFEKSKELGEIQYLIKWKGWSHIHNTWETEETLKQQNVKGMNKLDNYKKKDQETKRWLKNASPEDVEYYNCQQELTDDLHKQYQIVERIIAHSNQKSAAGYPDYYCKWQGLPYSECSWEDGALIAKKFQARIDEYFSRNQSKTTPFKDCKVLKQRPRFVALKKQPSYIGGHESLELRDYQLNGLNWLAHSWCKGNSCILADEMGLGKTIQTISFLNYLFHEHQLYGPFLLRVPLSTLTSWQREIQTWAPQMNAVVYLGDITSRNMIRTHEWMHPQTKRLKFNILLTTYEILLKDKSFLGGLNWAFIGVDEAHRLKNDDSLLYRTLIDFKSNHRLLITGTPLQNSLKELWSLLHFIMPEKFSSWEDFEEEHGKGREYGYASLHKELEPFLLRRVKKDVEKSLPAKVEQILRMEMSALQKQYYKWILTRNYKALSKGSKGSTSGFLNIMMELKKCCNHCYLIKPPDDNEFYNKQEALQHLIRSSGKLILLDKLLIRLRERGNRVLIFSQMVRMLDILAEYLKYRQFPFQRLDGSIKGELRKQALDHFNAEGSEDFCFLLSTRAGGLGINLASADTVVIFDSDWNPQNDLQAQARAHRIGQKKQVNIYRLVTKGSVEEDILERAKKKMVLDHLVIQRMDTTGKTVLHTGSTPSSSTPFNKEELSAILKFGAEELFKEPEGEEQEPQEMDIDEILKRAETRENEPGPLTVGDELLSQFKVANFSNMDEDDIELEPERNSRNWEEIIPESQRRRIEEEERQKELEEIYMLPRMRNCAKQISFNGSEGRRSRSRRYSGSDSDSITERKRPKKRGRPRTIPRENIKGFSDAEIRRFIKSYKKFGGPLERLDAVARDAELVDKSETDLRRLGELVHNGCIKALKDNSSGQERAGGRLGKVKGPTFRISGVQVNAKLVISHEEELAPLHKSIPSDPEERKRYVIPCHTKAAHFDIDWGKEDDSNLLVGIYEYGYGSWEMIKMDPDLSLTQKILPDDPDKKPQAKQLQTRADYLIKLLNKDLARKEAQRLAGAGNSKRRKTRNKKNKMKASKIKEEIKSDSSPQPSEKSDEDDEEEDNKDEIVSVKHLHKKIKTEKENEEKPEPDIGIKKEAEEKRETKEKENKRELKREKKEKEDKKELKEKDNKEKRENKVKESTQKEKEVKEEKVNEMKSENKEKSKKIPLLDTPVHITATSEPVPISEESEELHQKTFSVCKERMRPVKAALKQLDRPEKGLSEREQLEHTRQCLIKIGDHITECLKEYTNPEQIKQWRKNLWIFVSKFTEFDARKLHKLYKHAIKKRQESQQHNDQNISSNVNTHVIRNPDVERLKETTNHDDSSRDSYSSDRHLSQYHDHHKDRHQGDAYKKSDSRKRPYSAFSNGKDHRDWDHYKQDSRYYSDSKHRKLDDHRSRDHRSNLEGNLKDSRGHSDHRSHSDHRIHSDHRSTSEYSHHKSSRDYRYHSDWQMDHRASGSGPRSPLDQRSPYGSRSPLGHRSPFEHSSDHKSTPEHTWSSRKT

SEQ ID NO: 8794 - protein, 981 aa, Gallus gallus
IQYLIKWKGWSHIHNTWESEETLKQQNVKGMKKLDNYKKKCQETKRWLKNASPEDVEYYNCQQEFTDDLHKQYQVVERIIAHSNQKSAAGYPDYYCKWQGLPYSECSWEDGALIAKKFQACIDEYFSRNQSKTTPFKDCKILKQRPRFVALKKQPSYIGGRDCLELRDYQLNGLNWLAHSWCKGNSCILADEMGLGKTIQTISFLNYLFHEHELYGPFLLVVPLSTLTSWQREIQTWAPQMNAVVYLGDITSRNMIRTHEWMHPQTKRLKFNILLTTYEILLKDKSFLGGLNRVFIGIDEAHRLKNDDSLLYKTLIDFKSNHRLLITGTPLQNSLKELWSLLHFIMPEKFSSWEDFEEEHGKGREFGYASLHKELEPFLLRRVKKDVEKSSPAKVEQILRMEMSALQKQYYKWILTRNYKALSKGSKGSTSGFLNIMMELKKCCNHCYLIKPPDDNEFYNKQEALQHLIRSSGKLILLDKLLIRLRERGNRVLIFSQMVRMLDILAEYLKYRQFPFQRLDGSIKGELRKQALDHFNAEGSEDFCFLLSTRAGGLGINLASADTVVIFDSDWNPQNDLQAQARAHRIGPKKQVNIYRLVTKGSVEEDILERAKKKMVLDHLVIQRMDTTGKTVLHTGSTPSSSTPFNKEELSAILKFGAEELFKEPEGEEEEPQEMDIDEILKRAETRENESGLLTVGDELLSQFKVANFSNMDEDDIELEPEQNLRNWEEIIPEVQWRRIEEEERQKELEEIYMLPRMRNCAKQISFNGNEGRCSRSRRYSGSDSDSISERKRPKKRGRPRTIPRENIKGFSDAEIRRFIKSYKKFGGPLERLDAIARDAELVDKSETDLRRLGELVHNGCIKALNDNDFGQGRTGGRFGKVKGPTFRIAGVQVNAKLVISHEEELAPLHKSIPSDPEERKRYVIPYHTKAAHFDIDWGKEDDSNLLIGIYEYGYGSWEMIKMDPDLSLTQKILPDDPDKK

SEQ ID NO: 8795 - protein, 918 aa, Gallus gallus
MRRSAAPSQVLGNVAKKPRFIPPGKSNALCPKIETEETDQDVKLKEIGEKHGNASLFSEMFSENQSENFTQSVESSGKVKSTKAWNSTSKCSKLEMKTQSAPKADAMHLPTSGMAKEAAAQEEPDCLTKYFSVMWCKASKKKHKKWEGDAILITKGKSVILKDMEGKDIGRGTGYKSKELDSLEEGQTLMIGGKEIEVMGVISADDFSSGRCFQAGIATHDTVPTALPQTTMKQFCKPIKSACQPSTKENILLNPQSCKPRHNPNDTNSLVMPRPNASHQCMFNKAGLPVVDVVVDPYIANNLRPHQREGIVFLYECVMGMRVSGRFGAILADEMGLGKTLQCISLVWTLLRQGVYGCKPVLKRALIVTPGSLVKNWKKEFQKWLGSERIKVFTVDQDHKVEEFISSPLYSVMIISYEMLLRSLDQIQAIEFNLLICDEGHRLKNSSIKTTTALTNLSCERRIILTGTPIQNDLQEFYALIEFVNPGVLGSLSTYRKIYEEPIVRSREPSATKEEKDLGEKRAAELTRLTGLFILRRTQEVINKFLPPKKENIIFCQPTALQLELYRKLLSSRVISSCLQGRLENSPHLICIGALKKLCNHPCLLFKALKEKCCDPKSDEHVESSLYEGLTDVFPQDYTSDTFSEIDSGKLQVLVKLLAAIRELSSSERVVLVSNYTQTLNVLLETCKCYGYSYTRLDGNTPVSQRQQIVDSFNSKFSPAFIFLLSSKAGGVGLNLVGASHLILYDIDWNPATDIQAMARVWRDGQKCTVHIYRLLTTGTIEEKIYQRQISKQDLSGAVVDLSKTSEHIHFSVEELRNLFTLHENSSCVTHDLLECDCMGNKDHQNPSSKKPSVSRCCQLRQDQGKHNSKKPLSMSQLMQWKHFSGQHQALPDPFLERIKENVSFIFQNVTNATSPTQ

SEQ ID NO: 8796 - protein, 733 aa, Gallus gallus
LAKRKAGGEEEDGEWRPPATQKRQKAGSEAESADCYRSPFRKPLTQLTNRPLCLDSSQHEAFIRSILSKPFKVPIPNYKGPTGLRALGIKRAGLRSPLHDPFEEGALVLYEPPLLSAHEQLKIDKDKVPVHVVVDPVLSRVLRPHQREGVKFLWDCVTSRRIPGSHGCIMADEMGLGKTLQCITLMWTLLRQSPDCKPEIEKAMVVSPSSLVRNWYNEVEKWLGGRIQPLAIDGGSKEEIDRKLVGSMNQRGLRVPSPILIISYETFRLHAEALQKGSVGLVICDEGHRLKNSENQTYQALNSLNTPRRVLISGTPIQNDLLEYFSLVHFVNSGILGTAQEFKRHFELPILKGRDADASEAERQKGEERLKELISIVNRCLIRRTSDILSKYLPVKIEQVVCCRLTPLQAELYKNFLKQAKPVEELKEGKINVSSLSSITSLKKLCNHPALIYDKCVEEEEGFMGALDLFPAGYSTKSVEPQLSGKMLVLDYILAVTKSTSNDKVVLVSNYTQTLDLFEKLCRNRRYLYVRLDGTMSIKKRAKVVERFNSPSSPEFIFMLSSKAGGCGLNLIGANRLVMFDPDWNPANDEQAMARVWRDGQKKTCYIYRLLSTGTIEEKIFQRQTHKKALSSCVVDEEQDVERHFSLGELKELFSLNETTISDTHDKIKCRRCVNGHQVRPPPEGSDCTSDLSQWNHCADKRGLQDSVLKAAWDAAVTFTFHHHSHEEQRGIP

SEQ ID NO: 8797 - protein, 560 aa, Gallus gallus
MELKKCCNHCYLIKPPDDNEFYNKQEALQHLIRSSGKLILLDKLLIRLRERGNRVLIFSQMVRMLDILAEYLKYRQFPFQRLDGSIKGELRKQALDHFNAEGSEDFCFLLSTRAGGLGINLASADTVVIFDSDWNPQNDLQAQARAHRIGQKKQVNIYRLVTKGSVEEDILERAKKKMVLDHLVIQRMDTTGKTVLHTGSTPSSSTPFNKEELSAILKFGAEELFKEPEGEEQEPQEMDIDEILKRAETRENEPGPLTVGDELLSQFKVANFSNMDEDDIELEPERNSRNWEEIIPESQRRRIEEEERQKELEEIYMLPRMRNCAKQISFNGSEGRRSRSRRYSGSDSDSITERKRPKKRGRPRTIPRENIKGFSDAEIRRFIKSYKKFGGPLERLDAVARDAELVDKSETDLRRLGELVHNGCIKALKDNSSGQERAGGRLGKVKGPTFRISGVQVNAKLVISHEEELAPLHKSIPSDPEERKRYVIPCHTKAAHFDIDWGKEDDSNLLVGIYEYAYGSWQCKVNGSRSQLNTEILPDDPDRTPRQNSYRPVQTTSLNY

SEQ ID NO: 8798 - protein, 675 aa, Macaca fascicularis
MRIFREGLREHAAPYFQQLRQTTAPRLLQFPELRLVQFDSGKLEALAILLQKLKSEGRRVLILSQMILMLDILEMFLNFHYLTYVRIDENASSEQRQELMRSFNRDRRIFCAILSTHSRTTGINLVEADTVVFYDNDLNPVMDAKAQEWCDRIGRCKDIHIYRLVSGNSIEEKLLKNGTKDLIREVAAQGNDYSMAFLTQRTIQELFEVYSPMDDAGFPVKAEEFVVLSQEPSVTETIAPKIARPFIEALKSIEYLEEDAQKSAEEGVPGPHTDALSSDSENMPCDEEPSQLEELADFMEQLTPIEKYALNYLELFHASTEQEKARDSEDAVMTAVRAWEFWNLKTLQEREARLRLEQEEAELLTYTREDAYSMEYVYEDVDGQAEVMPLWTPPTPPQDDSDIYLDSVMCLMYEATPIPEAKLPPVYVRKERKRHKTDPSAAGRKKKQRHGESVVPPRSLFDRATPGLLKIRREGKEQKKNILLKQQVPFAKPLPTFAKPTAEPGQDNPEWLISEDWALLQAVKQLLELPLNLTIVSPAHTPNWDLVSDVVNSCSRIYRSSKQCRNRYENVIIPREEGKSKNNRPLRTSQIYAQDENATHTQLYTSHFDLMKMTAGKRSPPIKPLLGMNPFQKNPKHASVLAERYFSSHDTFVTVWKDFIPVSSKFSEFSKSLCT

SEQ ID NO: 8799 - protein, 1052 aa, Homo sapiens
MSSAAEPPPPPPPESAPSKPAASIASGGSNSSNKGGPEGVAAQAVASAASAGPADAEMEEIFDDASPGKQKEIQEPDPTYEEKMQTDRANRFEYLLKQTELFAHFIQPAAQKTPTSPLKMKPGRPRIKKDEKQNLLSVGDYRHRRTEQEEDEELLTESSKATNVCTRFEDSPSYVKWGKLRDYQVRGLNWLISLYENGINGILADEMGLGKTLQTISLLGYMKHYRNIPGPHMVLVPKSTLHNWMSEFKRWVPTLRSVCLIGDKEQRAAFVRDVLLPGEWDVCVTSYEMLIKEKSVFKKFNWRYLVIDEAHRIKNEKSKLSEIVREFKTTNRLLLTGTPLQNNLHELWSLLNFLLPDVFNSADDFDSWFDTNNCLGDQKLVERLHMVLRPFLLRRIKADVEKSLPPKKEVKIYVGLSKMQREWYTRILMKDIDILNSAGKMDKMRLLNILMQLRKCCNHPYLFDGAEPGPPYTTDMHLVTNSGKMVVLDKLLPKLKEQGSRVLIFSQMTRVLDILEDYCMWRNYEYCRLDGQTPHDERQDSINAYNEPNSTKFVFMLSTRAGGLGINLATADVVILYDSDWNPQVDLQAMDRAHRIGQTKTVRVFRFITDNTVEERIVERAEMKLRLDSIVIQQGRLVDQNLNKIGKDEMLQMIRHGATHVFASKESEITDEDIDGILERGAKKTAEMNEKLSKMGESSLRNFTMDTESSVYNFEGEDYREKQKIAFTEWIEPPKRERKANYAVDAYFREALRVSEPKAPKAPRPPKQPNVQDFQFFPPRLFELLEKEILFYRKTIGYKVPRNPELPNAAQAQKEEQLKIDEAESLNDEELEEKEKLLTQGFTNWNKRDFNQFIKANEKWGRDDIENIAREVEGKTPEEVIEYSAVFWERCNELQDIEKIMAQIERGEARIQRRISIKKALDTKIGRYKAPFHQLRISYGTNKGKNYTEEEDRFLICMLHKLGFDKENVYDELRQCIRNSPQFRFDWFLKSRTAMELQRRCNTLITLIERENMELEEKEKAEKKKRGPKPSTQKRKMDGAPDGRGRKKKLKL

SEQ ID NO: 8800 - protein, 1052 aa, Homo sapiens
MSSAAEPPPPPPPESAPSKPAASIASGGSNSSNKGGPEGVAAQAVASAVSAGPADAEMEEIFDDASPGKQKEIQEPDPTYEEKMQTDRANRFEYLLKQTELFAHFIQPAAQKTPTSPLKMKPGRPRIKKDEKQNLLSVGDYRHRRTEQEEDEELLTESSKATNVCTRFEDSPSYVKWGKLRDYQVRGLNWLISLYENGINGILADEMGLGKTLQTISLLGYMKHYRNIPGPHMVLVPKSTLHNWMSEFKRWVPTLRSVCLIGDKEQRAAFVRDVLLPGEWDVCVTSYEMLIKEKSVFKKFNWRYLVIDEAHRIKNEKSKLSEIVREFKTTNRLLLTGTPLQNNLHELWSLLNFLLPDVFNSADDFDSWFDTNNCLGDQKLVERLHMVLRPFLLRRIKADVEKSLPPKKEVKIYVGLSKMQREWYTRILMKDIDILNSAGKMDKMRLLNILMQLRKCCNHPYLFDGAEPGPPYTTDMHLVTNSGKMVVLDKLLPKLKEQGSRVLIFSQMTRVLDILEDYCMWRNYEYCRLDGQTPHDERQDSINAYNEPNSTKFVFMLSTRAGGLGINLATADVVILYDSDWNPQVDLQAMDRAHRIGQTKTVRVFRFITDNTVEERIVERAEMKLRLDSIVIQQGRLVDQNLNKIGKDEMLQMIRHGATHVFASKESEITDEDIDGILERGAKKTAEMNEKLSKMGESSLRNFTMDTESSVYNFEGEDYREKQKIAFTEWIEPPKRERKANYAVDAYFREALRVSEPKAPKAPRPPKQPNVQDFQFFPPRLFELLEKEILFYRKTIGYKVPRNPELPNAAQAQKEEQLKIDEAESLNDEELEEKEKLLTQGFTNWNKRDFNQFIKANEKWGRDDIENIAREVEGKTPEEVIEYSAVFWERCNELQDIEKIMAQIERGEARIQRRISIKKALDTKIGRYKAPFHQLRISYGTNKGKNYTEEEDRFLICMLHKLGFDKENVYDELRQCIRNSPQFRFDWFLKSRTAMELQRRCNTLITLIERENMELEEKEKAEKKKRGPKPSTQKRKMDGAPDGRGRKKKLKL

SEQ ID NO: 8801 - protein, 680 aa, Homo sapiens
ACVMEQLDVGIVPYIVLLVVPVLGRMSDQTDSVRFMATQCFATLIRLMPLEAGIPDPPNMSAELIQLKAKERHFLEQLLDGKKLENYKIPVPINAELRKYQQDGVNWLAFLNKYKLHGILCDDMGLGKTLQSICILAGDHCHRAQEYARSKLAECMPLPSLVVCPPTLTGHWVDEVGKFCSREYLNPLHYTGPPTERIRLQHQVKRHNLIVASYDVVRNDIDFFRNIKFNYCILDEGHVIKNGKTKLSKAVKQLTANYRIILSGTPIQNNVLELWSLFDFLMPGFLGTERQFAARYGKPILASRDARSSSREQEAGVLAMDALHRQVLPFLLRRMKEDVLQDLPPKIIQDYYCTLSPLQVQLYEDFAKSRAKCDVDETVSSATLSEETEKPKLKATGHVFQALQYLRKLCNHPALVLTPQHPEFKTTAEKLAVQNSSLHDIQHAPKLSALKQLLLDCGLGNGSTSESGTESVVAQHRILIFCQLKSMLDIVEHDLLKPHLPSVTYLRLDGSIPPGQRHSIVSRFNNDPSIDVLLLTTHVGGLGLNLTGADTVVFVEHDWNPMRDLQAMDRAHRIGQKRVVNVYRLITRGTLEEKIMGLQKFKMNIANTVISQENSSLQSMGTDQLLDLFTLDKDGKAEKADTSTSGKASMKSILENLSDLWDQEQYDSEYSLENFMHSLK

SEQ ID NO: 8802 - protein, 1849 aa, Homo sapiens
MAVSRLDRLFILLDTGTTPVTRKAAAQQLGEVVKLHPHELNNLLSKVLIYLRSANWDTRIAAGQAVEAIVKNVPEWNPVPRTRQEPTSESSMEDSPTTERLNFDRFDICRLLQHGASLLGSAGAEFEVQDEKSGEVDPKERIARQRKLLQKKLGLNMGEAIGMSTEELFNDEDLDYTPTSASFVNKQPTLQAAELIDSEFRAGMSNRQKNKAKRMAKLFAKQRSRDAVETNEKSNDSTDGEPEEKRRKIANVVINQSANDSKVLIDNIPDSSSLIEETNEWPLESFCEELCNDLFNPSWEVRHGAGTGLREILKAHGKSGGKMGDSTLEEMIQQHQEWLEDLVIRLLCVFALDRFGDFVSDEVVAPVRETCAQTLGVVLKHMNETGVHKTVDVLLKLLTQEQWEVRHGGLLGIKYALAVRQDVINTLLPKVLTRIIEGLQDLDDDVRAVAAASLVPVVESLVYLQTQKVPFIINTLWDALLELDDLTASTNSIMTLLSSLLTYPQVQQCSIQQSLTVLVPRVWPFLHHTISSVRRAALETLFTLLSTQDQNSSSWLIPILPDMLRHIFQFCVLESSQEILDLIHKVWMELLSKASVQYVVAAACPWMGAWLCLMMQPSHLPIDLNMLLEVKARAKEKTGGKVRQGQSQNKEVLQEYIAGADTIMEDPATRDFVVMRARMMAAKLLGALCCCICDPGVNVVTQEIKPAESLGQLLLFHLNSKSALQRISVALVICEWAALQKECKAVTLAVQPRLLDILSEHLYYDEIAVPFTRMQNECKQLISSLADVHIEVGNRVNNNVLTIDQASDLVTTVFNEATSSFDLNPQVLQQLDSKRQQVQMTVTETNQEWQVLQLRVHTFAACAVVSLQQLPEKLNPIIKPLMETIKKEENTLVQNYAAQCIAKLLQQCTTRTPCPNSKIIKNLCSSLCVDPYLTPCVTCPVPTQSGQENSKGSTSEKDGMHHTVTKHRGIITLYRHQKAAFAITSRRGPTPKAVKAQIADLPAGSSGNILVELDEAQKPYLVQRRGAEFALTTIVKHFGGEMAVKLPHLWDAMVGPLRNTIDINNFDGKSLLDKGDSPAQELVNSLQVFETAAASMDSELHPLLVQHLPHLYMCLQYPSTAVRHMAARCVGVMSKIATMETMNIFLEKVLPWLGAIDDSVKQEGAIEALACVMEQLDVGIVPYIVLLVVPVLGRMSDQTDSVRFMATQCFATLIRLMPLEAGIPDPPNMSAELIQLKAKERHFLEQLLDGKKLENYKIPVPINAELRKYQQDGVNWLAFLNKYKLHGILCDDMGLGKTLQSICILAGDHCHRAQEYARSKLAECMPLPSLVVCPPTLTGHWVDEVGKFCSREYLNPLHYTGPPTERIRLQHQVKRHNLIVASYDVVRNDIDFFRNIKFNYCILDEGHVIKNGKTKLSKAVKQLTANYRIILSGTPIQNNVLELWSLFDFLMPGFLGTERQFAARYGKPILASRDARSSSREQEAGVLAMDALHRQVLPFLLRRMKEDVLQDLPPKIIQDYYCTLSPLQVQLYEDFAKSRAKCDVDETVSSATLSEETEKPKLKATGHVFQALQYLRKLCNHPALVLTPQHPEFKTTAEKLAVQNSSLHDIQHAPKLSALKQLLLDCGLGNGSTSESGTESVVAQHRILIFCQLKSMLDIVEHDLLKPHLPSVTYLRLDGSIPPGQRHSIVSRFNNDPSIDVLLLTTHVGGLGLNLTGADTVVFVEHDWNPMRDLQAMDRAHRIGQKRVVNVYRLITRGTLEEKIMGLQKFKMNIANTVISQENSSLQSMGTDQLLDLFTLDKDGKAEKADTSTSGKASMKSILENLSDLWDQEQYDSEYSLENFMHSLK

SEQ ID NO: 8803 - protein, 1493 aa, Homo sapiens
MPNEGIPHSSQTQEQDCLQSQPVSNNEEMAIKQESGGDGEVEEYLSFRSVGDGLSTSAVGCASAAPRRGPALLHIDRHQIQAVEPSAQALELQGLGVDVYDQDVLEQGVLQQVDNAIHEASRASQLVDVEKEYRSVLDDLTSCTTSLRQINKIIEQLSPQAATSRDINRKLDSVKRQKYNKEQQLKKITAKQKHLQAILGGAEVKIELDHASLEEDAEPGPSSLGSMLMPVQETAWEELIRTGQMTPFGTQIPQKQEKKPRKIMLNEASGFEKYLADQAKLSFERKKQGCNKRAARKAPAPVTPPAPVQNKNKPNKKARVLSKKEERLKKHIKKLQKRALQFQGKVGLPKARRPWESDMRPEAEGDSEGEESEYFPTEEEEEEEDDEVEGAEADLSGDGTDYELKPLPKGGKRQKKVPVQEIDDDFFPSSGEEAEAASVGEGGGGGRKVGRYRDDGDEDYYKQRLRRWNKLRLQDKEKRLKLEDDSEESDAEFDEGFKVPGFLFKKLFKYQQTGVRWLWELHCQQAGGILGDEMGLGKTIQIIAFLAGLSYSKIRTRGSNYRFEGLGPTVIVCPTTVMHQWVKEFHTWWPPFRVAILHETGSYTHKKEKLIRDVAHCHGILITSYSYIRLMQDDISRYDWHYVILDEGHKIRNPNAAVTLACKQFRTPHRIILSGSPMQNNLRELWSLFDFIFPGKLGTLPVFMEQFSVPITMGGYSNASPVQVKTAYKCACVLRDTINPYLLRRMKSDVKMSLSLPDKNEQVLFCRLTDEQHKVYQNFVDSKEVYRILNGEMQIFSGLIALRKICNHPDLFSGGPKNLKGLPDDELEEDQFGYWKRSGKMIVVESLLKIWHKQGQRVLLFSQSRQMLDILEVFLRAQKYTYLKMDGTTTIASRQPLITRYNEDTSIFVFLLTTRVGGLGVNLTGANRVVIYDPDWNPSTDTQARERAWRIGQKKQVTVYRLLTAGTIEEKIYHRQIFKQFLTNRVLKDPKQRRFFKSNDLYELFTLTSPDASQSTETSAIFAGTGSDVQTPKCHLKRRIQPAFGADHDVPKRKKFPASNISVNDATSSEEKSEAKGAEVNAVTSNRSDPLKDDPHMSSNVTSNDRLGEETNAVSGPEELSVISGNGECSNSSGTGKTSMPSGDESIDEKLGLSYKRERPSQAQTEAFWENKQMENNFYKHKSKTKHHSVAEEETLEKHLRPKQKPKNSKHCRDAKFEGTRIPHLVKKRRYQKQDSENKSEAKEQSNDDYVLEKLFKKSVGVHSVMKHDAIMDGASPDYVLVEAEANRVAQDALKALRLSRQRCLGAVSGVPTWTGHRGISGAPAGKKSRFGKKRNSNFSVQHPSSTSPTEKCQDGIMKKEGKDNVPEHFSGRAEDADSSSGPLASSSLLAKMRARNHLILPERLESESGHLQEASALLPTTEHDDLLVEMRNFIAFQAHTDGQASTREILQEFESKLSASQSCVFRELLRNLCTFHRTSGGEGIWKLKPEYC

SEQ ID NO: 8804 - protein, 1954 aa, Homo sapiens
MRGPVGTEEELPRLFAEEMENEDEMSEEEDGGLEAFDDFFPVEPVSLPKKKKPKKLKENKCKGKRKKKEGSNDELSENEEDLEEKSESEGSDYSPNKKKKKKLKDKKEKKAKRKKKDEDEDDNDDGCLKEPKSSGQLMAEWGLDDVDYLFSEEDYHTLTNYKAFSQFLRPLIAKKNPKIPMSKMMTVLGAKWREFSANNPFKGSSAAAAAAAVAAAVETVTISPPLAVSPPQVPQPVPIRKAKTKEGKGPGVRKKIKGSKDGKKKGKGKKTAGLKFRFGGISNKRKKGSSSEEDEREESDFDSASIHSASVRSECSAALGKKSKRRRKKKRIDDGDGYETDHQDYCEVCQQGGEIILCDTCPRAYHLVCLDPELEKAPEGKWSCPHCEKEGIQWEPKDDDDEEEEGGCEEEEDDHMEFCRVCKDGGELLCCDACPSSYHLHCLNPPLPEIPNGEWLCPRCTCPPLKGKVQRILHWRWTEPPAPFMVGLPGPDVEPSLPPPKPLEGIPEREFFVKWAGLSYWHCSWVKELQLELYHTVMYRNYQRKNDMDEPPPFDYGSGDEDGKSEKRKNKDPLYAKMEERFYRYGIKPEWMMIHRILNHSFDKKGDVHYLIKWKDLPYDQCTWEIDDIDIPYYDNLKQAYWGHRELMLGEDTRLPKRLLKKGKKLRDDKQEKPPDTPIVDPTVKFDKQPWYIDSTGGTLHPYQLEGLNWLRFSWAQGTDTILADEMGLGKTVQTIVFLYSLYKEGHSKGPYLVSAPLSTIINWEREFEMWAPDFYVVTYTGDKESRSVIRENEFSFEDNAIRSGKKVFRMKKEVQIKFHVLLTSYELITIDQAILGSIEWACLVVDEAHRLKNNQSKFFRVLNSYKIDYKLLLTGTPLQNNLEELFHLLNFLTPERFNNLEGFLEEFADISKEDQIKKLHDLLGPHMLRRLKADVFKNMPAKTELIVRVELSQMQKKYYKFILTRNFEALNSKGGGNQVSLLNIMMDLKKCCNHPYLFPVAAVEAPVLPNGSYDGSSLVKSSGKLMLLQKMLKKLRDEGHRVLIFSQMTKMLDLLEDFLEYEGYKYERIDGGITGGLRQEAIDRFNAPGAQQFCFLLSTRAGGLGINLATADTVIIYDSDWNPHNDIQAFSRAHRIGQNKKVMIYRFVTRASVEERITQVAKRKMMLTHLVVRPGLGSKSGSMTKQELDDILKFGTEELFKDDVEGMMSQGQRPVTPIPDVQSSKGGNLAASAKKKHGSTPPGDNKDVEDSSVIHYDDAAISKLLDRNQDATDDTELQNMNEYLSSFKVAQYVVREEDGVEEVEREIIKQEENVDPDYWEKLLRHHYEQQQEDLARNLGKGKRIRKQVNYNDASQEDQEWQDELSDNQSEYSIGSEDEDEDFEERPEGQSGRRQSRRQLKSDRDKPLPPLLARVGGNIEVLGFNARQRKAFLNAIMRWGMPPQDAFNSHWLVRDLRGKSEKEFRAYVSLFMRHLCEPGADGAETFADGVPREGLSRQHVLTRIGVMSLVRKKVQEFEHVNGKYSTPDLIPEGPEGKKSGEVISSDPNTPVPASPAHLLPAPLGLPDKMEAQLGYMDEKDPGAQKPRQPLEVQALPAALDRVESEDKHESPASKERAREERPEETEKAPPSPEQLPREEVLPEKEKILDKLELSLIHSRGDSSELRPDDTKAEEKEPIETQQNGDKEEDDEGKKEDKKGKFKFMFNIADGGFTELHTLWQNEERAAVSSGKIYDIWHRRHDYWLLAGIVTHGYARWQDIQNDPRYMILNEPFKSEVHKGNYLEMKNKFLARRFKLLEQALVIEEQLRRAAYLNMTQDPNHPAMALNARLAEVECLAESHQHLSKESLAGNKPANAVLHKVLNQLEELLSDMKADVTRLPSMLSRIPPVAARLQMSERSILSRLTNRAGDPTIQQGAFGSSQMYSNNFGPNFRGPGPGGIVNYNQMPLGPYVTDI

SEQ ID NO: 8805 - protein, 1388 aa, Homo sapiens
KRKNKDPLYAKMEERFYRYGIKPEWMMIHRILNHSFDKKGDVHYLIKWKDLPYDQCTWEIDDIDIPYYDNLKQAYWGHRELMLGEDTRLPKRLLKKGKKLRDDKQEKPPDTPIVDPTVKFDKQPWYIDSTGGTLHPYQLEGLNWLRFSWAQGTDTILADEMGLGKTVQTIVFLYSLYKEGHSKGPYLVSAPLSTIINWEREFEMWAPDFYVVTYTGDKESRSVIRENEFSFEDNAIRSGKKVFRMKKEVQIKFHVLLTSYELITIDQAILGSIEWACLVVDEAHRLKNNQSKFFRVLNSYKIDYKLLLTGTPLQNNLEELFHLLNFLTPERFNNLEGFLEEFADISKEDQIKKLHDLLGPHMLRRLKADVFKNMPAKTELIVRVELSQMQKKYYKFILTRNFEALNSKGGGNQVSLLNIMMDLKKCCNHPYLFPVAAVEAPVLPNGSYDGSSLVKSSGKLMLLQKMLKKLRDEGHRVLIFSQMTKMLDLLEDFLEYEGYKYERIDGGITGGLRQEAIDRFNAPGAQQFCFLLSTRAGGLGINLATADTVIIYDSDWNPHNDIQAFSRAHRIGQNKKVMIYRFVTRASVEERITQVAKRKMMLTHLVVRPGLGSKSGSMTKQELDDILKFGTEELFKDDVEGMMSQGQRPVTPIPDVQSSKGGNLAASAKKKHGSTPPGDNKDVEDSSVIHYDDAAISKLLDRNQDATDDTELQNMNEYLSSFKVAQYVVREEDGVEEVEREIIKQEENVDPDYWEKLLRHHYEQQQEDLARNLGKGKRIRKQVNYNDASQEDQEWQDELSDNQSEYSIGSEDEDEDFEERPEGQSGRRQSRRQLKSDRDKPLPPLLARVGGNIEVLGFNARQRKAFLNAIMRWGMPPQDAFNSHWLVRDLRGKSEKEFRAYVSLFMRHLCEPGADGAETFADGVPREGLSRQHVLTRIGVMSLVRKKVQEFEHVNGKYSTPDLIPEGPEGKKPGEVISSDPNTPVPASPAHLLPAPLGLPDKMEAQLGYMDEKDPGAQKPRQPLEVQALPAALDRVESEDKHESPASKERAREERPEETEKAPPSPEQLPREEVLPEKEKILDKLELSLIHSRGDSSELRPDDTKAEEKEPIETQQNGDKEEDDEGKKEDKKGKFKFMFNIADGGFTELHTLWQNEERAAVSSGKIYDIWHRRHDYWLLAGIVTHGYARWQDIQNDPRYMILNEPFKSEVHKGNYLEMKNKFLARRFKLLEQALVIEEQLRRAAYLNMTQDPNHPAMALNARLAEVECLAESHQHLSKESLAGNKPANAVLHKVLNQLEELLSDMKADVTRLPSMLSRIPPVAARLQMSERSILSRLTNRAGDPTIQQGAFGSSQMYSNNFGPNFRGPGPGGIVNYNQMPLGPYVTDI

SEQ ID NO: 8806 - protein, 769 aa, Homo sapiens
MEQDTAAVAATVAAADATATIVVIEDEQPGPSTSQEEGAAAAATEATAATEKGEKKKEKNVSSFQLKLAAKAPKSEKEMDPEYEEKMKADRAKRFEFLLKQTELFAHFIQPSAQKSPTSPLNMKLGRPRIKKDEKQSLISAGDYRHRRTEQEEDEELLSESRKTSNVCIRFEVSPSYVKGGPLRDYQIRGLNWLISLYENGVNGILADEMGLGKTLQTIALLGYLKHYRNIPGPHMVLVPKSTLHNWMNEFKRWVPSLRVICFVGDKDARAAFIRDEMMPGEWDVCVTSYEMVIKEKSVFKKFHWRYLVIDEAHRIKNEKSKLSEIVREFKSTNRLLLTGTPLQNNLHELWALLNFLLPDVFNSADDFDSWFDTKNCLGDQKLVERLHAVLKPFLLRRIKTDVEKSLPPKKEIKIYLGLSKMQREWYTKILMKDIDVLNSSGKMDKMRLLNILMQLRKCCNHPYLFDGAEPGPPYTTDEHIVSNSGKMVVLDKLLAKLKEQGSRVLIFSQMTRLLDILEDYCMWRGYEYCRLDGQTPHEEREDKFLEVEFLGQREAIEAFNAPNSSKFIFMLSTRAGGLGINLASADVVILYDSDWNPQVDLQAMDRAHRIGQKKPVRVFRLITDNTVEERIVERAEIKLRLDSIVIQQGRLIDQQSNKLAKEEMLQMIRHGATHVFASKESELTDEDITTILERGEKKTAEMNERLQKMGESSLRNFRMDIEQSLYKFEGEDYREKQKLGMVEWIEPPKRERKANYAVDAYFREALRV

SEQ ID NO: 8807 - protein, 1054 aa, Homo sapiens
MEQDTAAVAATVAAADATATIVVIEDEQPGPSTSQEEGAAAAATEATAATEKGEKKKEKNVSSFQLKLAAKAPKSEKEMDPEYEEKMKADRAKRFEFLLKQTELFAHFIQPSAQKSPTSPLNMKLGRPRIKKDEKQSLISAGDYRHRRTEQEEDEELLSESRKTSNVCIRFEVSPSYVKGGPLRDYQIRGLNWLISLYENGVNGILADEMGLGKTLQTIALLGYLKHYRNIPGPHMVLVPKSTLHNWMNEFKRWVPSLRVICFVGDKDARAAFIRDEMMPGEWDVCVTSYEMVIKEKSVFKKFHWRYLVIDEAHRIKNEKSKLSEIVREFKSTNRLLLTGTPLQNNLHELWALLNFLLPDVFNSADDFDSWFDTKNCLGDQKLVERLHAVLKPFLLRRIKTDVEKSLPPKKEIKIYLGLSKMQREWYTKILMKDIDVLNSSGKMDKMRLLNILMQLRKCCNHPYLFDGAEPGPPYTTDEHIVSNSGKMVVLDKLLAKLKEQGSRVLIFSQMTRLLDILEDYCMWRGYEYCRLDGQTPHEEREDKFLEVEFLGQREAIEAFNAPNSSKFIFMLSTRAGGLGINLASADVVILYDSDWNPQVDLQAMDRAHRIGQKKPVRVFRLITDNTVEERIVERAEIKLRLDSIVIQQGRLIDQQSNKLAKEEMLQMIRHGATHVFASKESELTDEDITTILERGEKKTAEMNERLQKMGESSLRNFRMDIEQSLYKFEGEDYREKQKLGMVEWIEPPKRERKANYAVDAYFREALRVSEPKIPKAPRPPKQPNVQDFQFFPPRLFELLEKEILYYRKTIGYKVPRNPDIPNPALAQREEQKKIDGAEPLTPEETEEKEKLLTQGFTNWTKRDFNQFIKANEKYGRDDIDNIAREVEGKSPEEVMEYSAVFWERCNELQDIEKIMAQIERGEARIQRRISIKKALDAKIARYKAPFHQLRIQYGTSKGKNYTEEEDRFLICMLHKMGFDRENVYEELRQCVRNAPQFRFDWFIKSRTAMEFQRRCNTLISLIEKENMEIEERERAEKKKRATKTPMVKFSAFS

SEQ ID NO: 8808 - protein, 976 aa, Homo sapiens [sequence omitted]

SEQ ID NO: 8809 - protein, 1586 aa, Homo sapiens
MSTPTDPGAMPHPGPSPGPGPSPGPILGPSPGPGPSPGSVHSMMGPSPGPPSVSHPMPTMGSTDFPQEGMHQMHKPIDGIHDKGIVEDIHCGSMKGTGMRPPHPGMGPPQSPMDQHSQGYMSPHPSPLGAPEHVSSPMSGGGPTPPQMPPSQPGALIPGDPQAMSQPNRGPSPFSPVQLHQLRAQILAYKMLARGQPLPETLQLAVQGKRTLPGLQQQQQQQQQQQQQQQQQQQQQQQPPQPQTQQQQQPALVNYNRPSGPGPELSGPSTPQKLPVPAPGGRPSPAPPAAAQPPAAAVPGPSVPQPAPGQPSPVLQLQQKQSRISPIQKPQGLDPVEILQEREYRLQARIAHRIQELENLPGSLPPDLRTKATVELKALRLLNFQRQLRQEVVACMRRDTTLETALNSKAYKRSKRQTLREARMTEKLEKQQKIEQERKRRQKHQEYLNSILQHAKDFKEYHRSVAGKIQKLSKAVATWHANTEREQKKETERIEKERMRRLMAEDEEGYRKLIDQKKDRRLAYLLQQTDEYVANLTNLVWEHKQAQAAKEKKKRRRRKKKAEENAEGGESALGPDGEPIDESSQMSDLPVKVTHTETGKVLFGPEAPKASQLDAWLEMNPGYEVAPRSDSEESDSDYEEEDEEEESSRQETEEKILLDPNSEEVSEKDAKQIIETAKQDVDDEYSMQYSARGSQSYYTVAHAISERVEKQSALLINGTLKHYQLQGLEWMVSLYNNNLNGILADEMGLGKTIQTIALITYLMEHKRLNGPYLIIVPLSTLSNWTYEFDKWAPSVVKISYKGTPAMRRSLVPQLRSGKFNVLLTTYEYIIKDKHILAKIRWKYMIVDEGHRMKNHHCKLTQVLNTHYVAPRRILLTGTPLQNKLPELWALLNFLLPTIFKSCSTFEQWFNAPFAMTGERVDLNEEETILIIRRLHKVLRPFLLRRLKKEVESQLPEKVEYVIKCDMSALQKILYRHMQAKGILLTDGSEKDKKGKGGAKTLMNTIMQLRKICNHPYMFQHIEESFAEHLGYSNGVINGAELYRASGKFELLDRILPKLRATNHRVLLFCQMTSLMTIMEDYFAFRNFLYLRLDGTTKSEDRAALLKKFNEPGSQYFIFLLSTRAGGLGLNLQAADTVVIFDSDWNPHQDLQAQDRAHRIGQQNEVRVLRLCTVNSVEEKILAAAKYKLNVDQKVIQAGMFDQKSSSHERRAFLQAILEHEEENEEEDEVPDDETLNQMIARREEEFDLFMRMDMDRRREDARNPKRKPRLMEEDELPSWIIKDDAEVERLTCEEEEEKIFGRGSRQRRDVDYSDALTEKQWLRAIEDGNLEEMEEEVRLKKRKRRRNVDKDPAKEDVEKAKKRRGRPPAEKLSPNPPKLTKQMNAIIDTVINYKDRCNVEKVPSNSQLEIEGNSSGRQLSEVFIQLPSRKELPEYYELIRKPVDFKKIKERIRNHKYRSLGDLEKDVMLLCHNAQTFNLEGSQIYEDSIVLQSVFKSARQKIAKEEESEDESNEEEEEEDEEESESEAKSVKVKIKLNKKDDKGRDKGKGKKRPNRGKAKPVVSDFDSDEEQDEREQSEGSGTDDE

SEQ ID NO: 8810 - protein, 1568 aa, Homo sapiens
MSTPTDPGAMPHPGPSPGPGPSPGPILGPSPGPGPSPGSVHSMMGPSPGPPSVSHPMPTMGSTDFPQEGMHQMHKPIDGIHDKGIVEDIHCGSMKGTGMRPPHPGMGPPQSPMDQHSQGYMSPHPSPLGAPEHVSSPMSGGGPTPPQMPPSQPGALIPGDPQAMSQPNRGPSPFSPVQLHQLRAQILAYKMLARGQPLPETLQLAVQGKRTLPGLQQQQQQQQQQQQQQQQQQQQQQQPPQPQTQQQQQPALVNYNRPSGPGPELSGPSTPQKLPVPAPGGRPSPAPPAAAQPPAAAVPGPSVPQPAPGQPSPVLQLQQKQSRISPIQKPQGLDPVEILQEREYRLQARIAHRIQELENLPGSLPPDLRTKATVELKALRLLNFQRQLRQEVVACMRRDTTLETALNSKAYKRSKRQTLREARMTEKLEKQQKIEQERKRRQKHQEYLNSILQHAKDFKEYHRSVAGKIQKLSKAVATWHANTEREQKKETERIEKERMRRLMAEDEEGYRKLIDQKKDRRLAYLLQQTDEYVANLTNLVWEHKQAQAAKEKKKRRRRKKKAEENAEGGESALGPDGEPIDESSQMSDLPVKVTHTETGKVLFGPEAPKASQLDAWLEMNPGYEVAPRSDSEESDSDYEEEDEEEESSRQETEEKILLDPNSEEVSEKDAKQIIETAKQDVDDEYSMQYSARGSQSYYTVAHAISERVEKQSALLINGTLKHYQLQGLEWMVSLYNNNLNGILADEMGLGKTIQTIALITYLMEHKRLNGPYLIIVPLSTLSNWTYEFDKWAPSVVKISYKGTPAMRRSLVPQLRSGKFNVLLTTYEYIIKDKHILAKIRWKYMIVDEGHRMKNHHCKLTQVLNTHYVAPRRILLTGTPLQNKLPELWALLNFLLPTIFKSCSTFEQWFNAPFAMTGERVDLNEEETILIIRRLHKVLRPFLLRRLKKEVESQLPEKVEYVIKCDMSALQKILYRHMQAKGILLTDGSEKDKKGKGGAKTLMNTIMQLRKICNHPYMFQHIEESFAEHLGYSNGVINGAELYRASGKFELLDRILPKLRATNHRVLLFCQMTSLMTIMEDYFAFRNFLYLRLDGTTKSEDRAALLKKFNEPGSQYFIFLLSTRAGGLGLNLQAADTVVIFDSDWNPHQDLQAQDRAHRIGQQNEVRVLRLCTVNSVEEKILAAAKYKLNVDQKVIQAGMFDQKSSSHERRAFLQAILEHEEENEEEDEVPDDETLNQMIARREEEFDLFMRMDMDRRREDARNPKRKPRLMEEDELPSWIIKDDAEVERLTCEEEEEKIFGRGSRQRRDVDYSDALTEKQWLRAIEDGNLEEMEEEVRLKKRKRRRNVDKDPAKEDVEKAKKRRGRPPAEKLSPNPPKLTKQMNAIIDTVINYKDSSGRQLSEVFIQLPSRKELPEYYELIRKPVDFKKIKERIRNHKYRSLGDLEKDVMLLCHNAQTFNLEGSQIYEDSIVLQSVFKSARQKIAKEEESEDESNEEEEEEDEEESESEAKSVKVKIKLNKKDDKGRDKGKGKKRPNRGKAKPVVSDFDSDEEQDEREQSEGSGTDDE

SEQ ID NO: 8811 - protein, 1586 aa, Homo sapiens
MSTPTDPGAMPHPGPSPGPGPSPGPILGPSPGPGPSPGSVHSMMGPSPGPPSVSHPMPTMGSTDFPQEGMHQMHKPIDGIHDKGIVEDIHCGSMKGTGMRPPHPGMGPPQSPMDQHSQGYMSPHPSPLGAPEHVSSPMSGGGPTPPQMPPSQPGALIPGDPQAMSQPNRGPSPFSPVQLHQLRAQILAYKMLARGQPLPETLQLAVQGKRTLPGLQQQQQQQQQQQQQQQQQQQQQQQPPQPQTQQQQQPALVNYNRPSGPGPELSGPSTPQKLPVPAPGGRPSPAPPAAAQPPAAAVPGPSVPQPAPGQPSPVLQLQQKQSRISPIQKPQGLDPVEILQEREYRLQARIAHRIQELENLPGSLPPDLRTKATVELKALRLLNFQRQLRQEVVACMRRDTTLETALNSKAYKRSKRQTLREARMTEKLEKQQKIEQERKRRQKHQEYLNSILQHAKDFKEYHRSVAGKIQKLSKAVATWHANTEREQKKETERIEKERMRRLMAEDEEGYRKLIDQKKDRRLAYLLQQTDEYVANLTNLVWEHKQAQAAKEKKKRRRRKKKAEENAEGGESALGPDGEPIDESSQMSDLPVKVTHTETGKVLFGPEAPKASQLDAWLEMNPGYEVAPRSDSEESDSDYEEEDEEEESSRQETEEKILLDPNSEEVSEKDAKQIIETAKQDVDDEYSMQYSARGSQSYYTVAHAISEWVEKQSALLINGTLKHYQLQGLEWMVSLYNNNLNGILADEMGLGKTIQTIALITYLMEHKRLNGPYLIIVPLSTLSNWTYEFDKWAPSVVKISYKGTPAMRRSLVPQLRSGKFNVLLTTYEYIIKDKHILAKIRWKYMIVDEGHRMKNHHCKLTQVLNTHYVAPRRILLTGTPLQNKLPELWALLNFLLPTIFKSCSTFEQWFNAPFAMTGERVDLNEEETILIIRRLHKVLRPFLLRRLKKEVESQLPEKVEYVIKCDMSALQKILYRHMQAKGILLTDGSEKDKKGKGGAKTLMNTIMQLRKICNHPYMFQHIEESFAEHLGYSNGVINGAELYRASGKFELLDRILPKLRATNHRVLLFCQMTSLMTIMEDYFAFRNFLYLRLDGTTKSEDRAALLKKFNEPGSQYFIFLLSTRAGGLGLNLQAADTVVIFDSDWNPHQDLQAQDRAHRIGQQNEVRVLRLCTVNSVEEKILAAAKYKLNVDQKVIQAGMFDQKSSSHERRAFLQAILEHEEENEEEDEVPDDETLNQMIARREEEFDLFMRMDMDRRREDARNPKRKPRLMEEDELPSWIIKDDAEVERLTCEEEEEKIFGRGSRQRRDVDYSDALTEKQWLRAIEDGNLEEMEEEVRLKKRKRRRNVDKDPAKEDVEKAKKRRGRPPAEKLSPNPPKLTKQMNAIIDTCINYKDSCNVEKVPSNSQLEIEGNSSGRQLSEVFIQLPSRKELPEYYELIRKPVDFKKIKERIRNHKYRSLGDLEKDVMLLCHNAQTFNLEGSQIYEDSIVLQSVFKSARQKIAKEEESEDESNEEEEEEDEEESESEAKSVKVKIKLNKKDDKGRDKGKGKKRPNRGKAKPVVSDFDSDEEQDEREQSEGSGTDDE

SEQ ID NO: 8812 - protein, 1572 aa, Homo sapiens
MSTPTDPGAMPHPGPSPGPGPSPGPILGPSPGPGPSPGSVHSMMGPSPGPPSVSHPMPTMGSTDFPQEGMHQMHKPIDGIHDKGIVEDIHCGSMKGTGMRPPHPGMGPPQSPMDQHSQGYMSPHPSPLGAPEHVSSPMSGGGPTPPQMPPSQPGALIPGDPQAMSQPNRGPSPFSPVQLHQLRAQILAYKMLARGQPLPETLQLAVQGKRTLPGLQQQQQQQQQQQQQQQQQQQQQQQPQQQPPQPQTQQQQQPALVNYNRPSGPGPELSGPSTPQKLPVPAPGGRPSPAPPAAAQPPAAAVPGPSVPQPAPGQPSPVLQLQQKQSRISPIQKPQGLDPVEILQEREYRLQARIAHRIQELENLPGSLPPDLRTKATVELKALRLLNFQRQLREEVVACMRRDTTLETALNSKAYKRSKRQTLREARMTEKLEKQQKIEQERKRRQKHQEYLNSILQHAKDFKEYHRSVAGKIQKLSKAVATWHANTEREQKKETERIEKERMRRLMAEDEESYRKLIDQKKDRRLAYLLQQTDEYVANLTNLVWEHKQAQAAKEKKKRRRRKKKAEENAEGGESALGPDGEPIDESSQMSDLPVKVTHTETGKVLFGPEAPKASQLDAWLEMNPGYEVAPRSDSEESDSDYEEEDEEEESSRQETEEKILLDPNSEEVSEKDAKQIIETAKQDVDDEYSMQYSARGSQSYYTVAHAISERVEKQSALLINGTLKHYQLQGLEWMVSLYNNNLNGILADEMGLGKTIQTIALITYLMEHKRLNGPYLIIVPLSTLSNWTYEFDKWAPSVVKISYKGTPAMRRSLVPQLRSGKFNVLLTTYEYIIKDKHILAKIRWKYMIVDEGHRMKNHHCKLTQVLNTHYVAPRRILLTGTPLQNKLPELWALLNFLLPTIFKSCSTFEQWFNAPFAMTGERVDLNEEETILIIRRLHKVLRPFLLRRLKKEVESQLPEKVEYVIKCDMSALQKILYRHMQAKGILLTDGSEKDKKGKGGAKTLMNTIMQLRKICNHPYMFQHIEESFAEHLGYSNGVINGAELYRASGKFELLDRILPKLRATNHRVLLFCQMTSLMTIMEDYFAFRNFLYLRLDGTTKSEDRAALLKKFNEPGSQYFIFLLSTRAGGLGLNLQAAHTVVIFDSDWNPHQDLQAQDRAHRIGQQNEVRVLRLCTVNSVEEKILAAAKYKLNVDQKVIQAGMFDQKSSSHERRAFLQAILEHEEENEEEDEVPDDETLNQMIARREEEFDLFMRMDMDRRREDARNPKRKPRLMEEDELPSWIIKDDAEVERLTCEEEEEKIFGRGSRQRRDVDYSDALTEKQWLRAIEDGNLEEMEEEVRLKKRKRRRNVDKDPAKEDVEKAKKRRGRPPAEKLSPNPPKLTKQMNAIIDTVINYKDSSGRQLSEVFIQLPSRKELPEYYELIRKPVDFKKIKERIRNHKYRSLGDLEKDVMLLCHNAQTFNLEGSQIYEDSIVLQSVFKSARQKIAKEEESEDESNEEEEEEDEEESESEAKSVKVKIKLNKKDDKGRDKGKGKKRPNRGKAKPVVSDFDSDEEQDEREQSEGSGTDDE

SEQ ID NO: 8813 - protein, 897 aa, Homo sapiens
MERAGATSRGGQAPGFLLRLHTEGRAEAARVQEQDLRQWGLTGIHLRSYQLEGVNWLAQRFHCQNGCILGDEMGLGKTCQTIALFIYLAGRLNDEGPFLILCPLSVLSNWKEEMQRFAPGLSCVTYAGDKEERACLQQDLKQESRFHVLLTTYEICLKDASFLKSFPWSVLVVDEAHRLKNQSSLLHKTLSEFSVVFSLLLTGTPIQNSLQELYSLLSFVEPDLFSKEEVGDFIQRYQDIEKESESASELHKLLQPFLLRRVKAEVATELPKKTEVVIYHGMSALQKKYYKAILMKDLDAFENETAKKVKLQNILSQLRKCVDHPYLFDGVEPEPFEVGDHLTEASGKLHLLDKLLAFLYSGGHRVLLFSQMTQMLDILQDYMDYRGYSYERVDGSVRGEERHLAIKNFGQQPIFVFLLSTRAGGVGMNLTAADTVIFVDSDFNPQNDLQAAARAHRIGQNKSVKVIRLIGRDTVEEIVYRKAASKLQLTNMIIEGGHFTLGAQKPAADADLQLSEILKFGLDKLLASEGSTMDEIDLESILGETKDGQWVSDALPAAEGGSRDQEEGKNHMYLFEGKDYSKEPSKEDRKSFEQLVNLQKTLLEKASQEGRSLRNKGSVLIPGLVEGSTKRKRVLSPEELEDRQKKRQEAAAKRRRLIEEKKRQKEEAEHKKKMAWWESNNYQSFCLPSEESEPEDLENGEESSAELDYQDPDATSLKYVSGDVTHPQAGAEDALIVHCVDDSGHWGRGGLFTALEKRSAEPRKIYELAGKMKDLSLGGVLLFPVDDKESRNKGQDLLALIVAQHRDRSNVLSGIKMAALEEGLKKIFLAAKKKKASVHLPRIGHATKGFNWYGTERLIRKHLAARGIPTYIYYFPRSKSAVLHSQSSSSSSRQLVP

SEQ ID NO: 8814 - protein, 1944 aa, Homo sapiens
MKAADTVILWARSKNDQLRISFPPGLCWGDRMPDKDDIRLLPSALGVKKRKRGPKKQKENKPGKPRKRKKRDSEEEFGSERDEYREKSESGGSEYGTGPGRKRRRKHREKKEKKTKRRKKGEGDGGQKQVEQKSSATLLLTWGLEDVEHVFSEEDYHTLTNYKAFSQFMRPLIAKKNPKIPMSKMMTILGAKWREFSANNPFKGSAAAVAAAAAAAAAAVAEQVSAAVSSATPIAPSGPPALPPPPAADIQPPPIRRAKTKEGKGPGHKRRSKSPRVPDGRKKLRGKKMAPLKIKLGLLGGKRKKGGSYVFQSDEGPEPEAEESDLDSGSVHSASGRPDGPVRTKKLKRGRPGRKKKKVLGCPAVAGEEEVDGYETDHQDYCEVCQQGGEIILCDTCPRAYHLVCLDPELDRAPEGKWSCPHCEKEGVQWEAKEEEEEYEEEGEEEGEKEEEDDHMEYCRVCKDGGELLCCDACISSYHIHCLNPPLPDIPNGEWLCPRCTCPVLKGRVQKILHWRWGEPPVAVPAPQQADGNPDVPPPRPLQGRSEREFFVKWVGLSYWHCSWAKELQLEIFHLVMYRNYQRKNDMDEPPPLDYGSGEDDGKSDKRKVKDPHYAEMEEKYYRFGIKPEWMTVHRIINHSVDKKGNYHYLVKWRDLPYDQSTWEEDEMNIPEYEEHKQSYWRHRELIMGEDPAQPRKYKKKKKELQGDGPPSSPTNDPTVKYETQPRFITATGGTLHMYQLEGLNWLRFSWAQGTDTILADEMGLGKTIQTIVFLYSLYKEGHTKGPFLVSAPLSTIINWEREFQMWAPKFYVVTYTGDKDSRAIIRENEFSFEDNAIKGGKKAFKMKREAQVKFHVLLTSYELITIDQAALGSIRWACLVVDEAHRLKNNQSKFFRVLNGYKIDHKLLLTGTPLQNNLEELFHLLNFLTPERFNNLEGFLEEFADISKEDQIKKLHDLLGPHMLRRLKADVFKNMPAKTELIVRVELSPMQKKYYKYILTRNFEALNSRGGGNQVSLLNIMMDLKKCCNHPYLFPVAAMESPKLPSGAYEGGALIKSSGKLMLLQKMLRKLKEQGHRVLIFSQMTKMLDLLEDFLDYEGYKYERIDGGITGALRQEAIDRFNAPGAQQFCFLLSTRAGGLGINLATADTVIIFDSDWNPHNDIQAFSRAHRIGQANKVMIYRFVTRASVEERITQVAKRKMMLTHLVVRPGLGSKAGSMSKQELDDILKFGTEELFKDENEGENKEEDSSVIHYDNEAIARLLDRNQDATEDTDVQNMNEYLSSFKVAQYVVREEDKIEEIEREIIKQEENVDPDYWEKLLRHHYEQQQEDLARNLGKGKRVRKQVNYNDAAQEDQDNQSEYSVGSEEEDEDFDERPEGRRQSKRQLRNEKDKPLPPLLARVGGNIEVLGFNTRQRKAFLNAVMRWGMPPQDAFTTQWLVRDLRGKTEKEFKAYVSLFMRHLCEPGADGSETFADGVPREGLSRQQVLTRIGVMSLVKKKVQEFEHINGRWSMPELMPDPSADSKRSSRASSPTKTSPTTPEASATNSPCTSKPATPAPSEKGEGIRTPLEKEEAENQEEKPEKNSRIGEKMETEADAPSPAPSLGERLEPRKIPLEDEVPGVPGEMEPEPGYRGDREKSEDVKGDRELRPGPRDEPRSNGRREEKTEKPRFMFNIADGGFTELHTLWQNEERAAISSGKLNEIWHRRHDYWLLAGIVLHGYARWQDIQNDAQFAIINEPFKTEANKGNFLEMKNKFLARRFKLLEQALVIEEQLRRAAYLNLSQEPAHPAMALHARFAEAECLAESHQHLSKESLAGNKPANAVLHKVLNQLEELLSDMKADVTRLPATLSRIPPIAARLQMSERSILSRLASKGTEPHPTPAYPPGPYATPPGYGAAFSAAPVGALAAAGANYSQMPAGSFITAATNGPIHRFFKKVPEIQ

SEQ ID NO: 8815 - protein, 1937 aa, Homo sapiens
MASGLGSPSPCSAGSEEEDMDALLNNSLPPPHPEDPEEDLSETETPKLKKKKKPKKPRDPKIPKSKRQKKERMLLCRQLGDSSGEGPEFVEEEEEVALRSDSEGSDYTPGKKKKKKLGPKKEKKSKSKRKEEEEEEDDDDDSKEPKSSAQLLEDWGMEDIDHVFSEEDYRTLTNYKAFSQFVRPLIAAKNPKIAVSKMMMVLGAKWREFSTNNPFKGSSGASVAAAAAAAVAVVESMVTATEVAPPPPPVEVPIRKAKTKEGKGPNARRKPKGSPRVPDAKKPKPKKVAPLKIKLGGFGSKRKRSSSEDDDLDVESDFDDASINSYSVSDGSTSRSSRSRKKLRTTKKKKKGEEEVTAVDGYETDHQDYCEVCQQGGEIILCDTCPRAYHMVCLDPDMEKAPEGKWSCPHCEKEGIQWEAKEDNSEGEEILEEVGGDLEEEDDHHMEFCRVCKDGGELLCCDTCPSSYHIHCLNPPLPEIPNGEWLCPRCTCPALKGKVQKILIWKWGQPPSPTPVPRPPDADPNTPSPKPLEGRPERQFFVKWQGMSYWHCSWVSELQLELHCQVMFRNYQRKNDMDEPPSGDFGGDEEKSRKRKNKDPKFAEMEERFYRYGIKPEWMMIHRILNHSVDKKGHVHYLIKWRDLPYDQASWESEDVEIQDYDLFKQSYWNHRELMRGEEGRPGKKLKKVKLRKLERPPETPTVDPTVKYERQPEYLDATGGTLHPYQMEGLNWLRFSWAQGTDTILADEMGLGKTVQTAVFLYSLYKEGHSKGPFLVSAPLSTIINWEREFEMWAPDMYVVTYVGDKDSRAIIRENEFSFEDNAIRGGKKASRMKKEASVKFHVLLTSYELITIDMAILGSIDWACLIVDEAHRLKNNQSKFFRVLNGYSLQHKLLLTGTPLQNNLEELFHLLNFLTPERFHNLEGFLEEFADIAKEDQIKKLHDMLGPHMLRRLKADVFKNMPSKTELIVRVELSPMQKKYYKYILTRNFEALNARGGGNQVSLLNVVMDLKKCCNHPYLFPVAAMEAPKMPNGMYDGSALIRASGKLLLLQKMLKNLKEGGHRVLIFSQMTKMLDLLEDFLEHEGYKYERIDGGITGNMRQEAIDRFNAPGAQQFCFLLSTRAGGLGINLATADTVIIYDSDWNPHNDIQAFSRAHRIGQNKKVMIYRFVTRASVEERITQVAKKKMMLTHLVVRPGLGSKTGSMSKQELDDILKFGTEELFKDEATDGGGDNKEGEDSSVIHYDDKAIERLLDRNQDETEDTELQGMNEYLSSFKVAQYVVREEEMGEEEEVEREIIKQEESVDPDYWEKLLRHHYEQQQEDLARNLGKGKRIRKQVNYNDGSQEDRGVCGRPRPPPMGRSTRAVGPAHLPSLPPDWQDDQSDNQSDYSVASEEGDEDFDERSEAPRRPSRKGLRNDKDKPLPPLLARVGGNIEVLGFNARQRKAFLNAIMRYGMPPQDAFTTQWLVRDLRGKSEKEFKAYVSLFMRHLCEPGADGAETFADGVPREGLSRQHVLTRIGVMSLIRKKVQEFEHVNGRWSMPELAEVEENKKMSQPGSPSPKTPTPSTPGDTQPNTPAPVPPAEDGIKIEENSLKEEESIEGEKEVKSTAPETAIECTQAPAPASEDEKVVVEPPEGEEKVEKAEVKERTEEPMETEPKGAADVEKVEEKSAIDLTPIVVEDKEEKKEEEEKKEVMLQNGETPKDLNDEKQKKNIKQRFMFNIADGGFTELHSLWQNEERAATVTKKTYEIWHRRHDYWLLAGIINHGYARWQDIQNDPRYAILNEPFKGEMNRGNFLEIKNKFLARRFKLLEQALVIEEQLRRAAYLNMSEDPSHPSMALNTRFAEVECLAESHQHLSKESMAGNKPANAVLHKVLKQLEELLSDMKADVTRLPATIARIPPVAVRLQMSERNILSRLANRAPEPTPQQVAQQQ

SEQ ID NO: 8816 - protein, 896 aa, Homo sapiens
ERAGATSRGGQAPGFLLRLHTEGPAEAARVQEQDLRQWGLTGIHLRSYQLEGVNWLAQRFHCQNGCILGDEMGLGKTCQTIALFIYLAGRLNDEGPFLILCPLSVLSNWKEEMQRFAPGLSCVTYAGDKEERACLQQDLKQESRFHVLLTTYEICLKDASFLKSFPWSVLVVDEAHRLKNQSSLLHKTLSEFSVVFSLLLTGTPIQNSLQELYSLLSFVEPDLFSKEEVGDFIQRYQDIEKESESASELHKLLQPFLLRRVKAEVATELPKKTEVVIYHGMSALQKKYYKAILMKDLDAFENETAKKVKLQNILSQLRKCVDHPYLFDGVEPEPFEVGDHLTEASGKLHLLDKLLAFLYSGGHRVLLFSQMTQMLDILQDYMDYRGYSYERVDGSVRGEERHLAIKNFGQQPIFVFLLSTRAGGVGMNLTAADTVIFVDSDFNPQNDLQAAARAHRIGQNKSVKVIRLIGRDTVEEIVYRKAASKLQLTNMIIEGGHFTLGAQKPAADADLQLSEILKFGLDKLLASEGSTMDEIDLESILGETKDGQWVSDALPAAEGGSRDQEEGKNHMYLFEGKDYSKEPSKEDRKSFEQLVNLQKTLLEKASQEGRSLRNKGSVLIPGLVEGSTKRKRVLSPEELEDRQKKRQEAAAKRRRLIEEKKRQKEEAEHKKKMAWWESNNYQSFCLPSEESEPEDLENGEESSAELDYQDPDATSLKYVSGDVTHPQAGAEDALIVHCVDDCGHWGRGGLFTALEKRSAEPRKIYELAGKMKDLSLGGVLLFPVDDKESRNKGQDLLALIVAQHRDRSNVLSGIKMAALEEGLKKIFLAAKKKKASVHLPRIGHATKGFNWYGTERLIRKHLAARGIPTYIYYFPRSKSAVLHSQSSSSSSRQLVP

SEQ ID NO: 8817 - protein, 890 aa, Homo sapiens
SRGGQAPGFLLRLHTEGRAEAARVQEQDLRQWGLTGIHLRSYQLEGVNWLAQRFHCQNGCILGDEMGLGKTCQTIALFIYLAGRLNDEGPFLILCPLSVLSNWKEEMQRFAPGLSCVTYAGDKEERACLQQDLKQESRFHVLLTTYEICLKDASFLKSFPWSVLVVDEAHRLKNQSSLLHKTLSEFSVVFSLLLTGTPIQNSLQELYSLLSFVEPDLFSKEEVGDFIQRYQDIEKESESASELHKLLQPFLLRRVKAEVATELPKKTEVVIYHGMSALQKKYYKAILMKDLDAFENETAKKVKLQNILSQLRKCVDHPYLFDGVEPEPFEVGDHLTEASGKLHLLDKLLAFLYSGGHRVLLFSQMTQMLDILQDYMDYRGYSYERVDGSVRGEERHLAIKNFGQQPIFVFLLSTRAGGVGMNLTAADTVIFVDSDFNPQNDLQAAARAHRIGQNKSVKVIRLIGRDTVEEIVYRKAASKLQLTNMIIEGGHFTLGAQKPAADADLQLSEILKFGLDKLLASEGSTMDEIDLESILGETKDGQWVSDALPAAEGGSRDQEEGKNHMYLFEGKDYSKEPSKEDRKSFEQLVNLQKTLLEKASQEGRSLRNKGSVLIPGLVEGSTKRKRVLSPEELEDRQKKRQEAAAKRRRLIEEKKRQKEEAEHKKKMAWWESNNYQSFCLPSEESEPEDLENGEESSAELDYQDPDATSLKYVSGDVTHPQAGAEDALIVHCVDDSGHWGRGGLFTALEKRSAEPRKIYELAGKMKDLSLGGVLLFPVDDKESRNKGQDLLALIVAQHRDRSNVLSGIKMAALEEGLKKIFLAAKKKKASVHLPRIGHATKGFNWYGTERLIRKHLAARGIPTYIYYFPRSKSAVLHSQSSSSSSRQLVP

SEQ ID NO: 8818 - protein, 1912 aa, Homo sapiens
MASGLGSPSPCSAGSEEEDMDALLNNSLPPPHPENEEDPEEDLSETETPKLKKKKKPKKPRDPKIPKSKRQKKERMLLCRQLGDSSGEGPEFVEEEEEVALRSDSEGSDYTPGKKKKKKLGPKKEKKSKSKRKEEEEEDDDDDDSKEPKSSAQLLEDWGMEDIDHVFSEEDYRTLTNYKAFSQFVRPLIAAKNPKIAVSKMMMVLGAKWREFSTNNPFKGSSGASVAAAAAAAVAVVESMVTATEVAPPPPPVEVPIRKAKTKEGKGPNARRKPKGSPRVPDAKKPKPKKVAPLKIKLGGFGSKRKRSSSEDDDLDVESDFDDASINSYSVSDGSTSRSSRSRKKLRTTKKKKKGEEEVTAVDGYETDHQDYCEVCQQGGEIILCDTCPRAYHMVCLDPDMEKAPEGKWSCPHCEKEGIQWEAKEDNSEGEEILEEVGGDLEEEDDHHMEFCRVCKDGGELLCCDTCPSSYHIHCLNPPLPEIPNGEWLCPRCTCPALKGKVQKILIWKWGQPPSPTPVPRPPDADPNTPSPKPLEGRPERQFFVKWQGMSYWHCSWVSELQLELHCQVMFRNYQRKNDMDEPPSGDFGGDEEKSRKRKNKDPKFAEMEERFYRYGIKPEWMMIHRILNHSVDKKGHVHYLIKWRDLPYDQASWESEDVEIQDYDLFKQSYWNHRELMRGEEGRPGKKLKKVKLRKLERPPETPTVDPTVKYERQPEYLDATGGTLHPYQMEGLNWLRFSWAQGTDTILADEMGLGKTVQTAVFLYSLYKEGHSKGPFLVSAPLSTIINWEREFEMWAPDMYVVTYVGDKDSRAIIRENEFSFEDNAIRGGKKASRMKKEASVKFHVLLTSYELITIDMAILGSIDWACLIVDEAHRLKNNQSKFFRVLNGYSLQHKLLLTGTPLQNNLEELFHLLNFLTPERFHNLEGFLEEFADIAKEDQIKKLHDMLGPHMLRRLKADVFKNMPSKTELIVRVELSPMQKKYYKYILTRNFEALNARGGGNQVSLLNVVMDLKKCCNHPYLFPVAAMEAPKMPNGMYDGSALIRASGKLLLLQKMLKNLKEGGHRVLIFSQMTKMLDLLEDFLEHEGYKYERIDGGITGNMRQEAIDRFNAPGAQQFCFLLSTRAGGLGINLATADTVIIYDSDWNPHNDIQAFSRAHRIGQNKKVMIYRFVTRASVEERITQVAKKKMMLTHLVVRPGLGSKTGSMSKQELDDILKFGTEELFKDEATDGGGDNKEGEDSSVIHYDDKAIERLLDRNQDETEDTELQGMNEYLSSFKVAQYVVREEEMGEEEEVEREIIKQEESVDPDYWEKLLRHHYEQQQEDLARNLGKGKRIRKQVNYNDGSQEDRDWQDDQSDNQSDYSVASEEGDEDFDERSEAPRRPSRKGLRNDKDKPLPPLLARVGGNIEVLGFNARQRKAFLNAIMRYGMPPQDAFTTQWLVRDLRGKSEKEFKAYVSLFMRHLCEPGADGAETFADGVPREGLSRQHVLTRIGVMSLIRKKVQEFEHVNGRWSMPELAEVEENKKMSQPGSPSPKTPTPSTPGDTQPNTPAPVPPAEDGIKIEENSLKEEESIEGEKEVKSTAPETAIECTQAPAPASEDEKVVVEPPEGEEKVEKAEVKERTEEPMETEPKGAADVEKVEEKSAIDLTPIVVEDKEEKKEEEEKKEVMLQNGETPKDLNDEKQKKNIKQRFMFNIADGGFTELHSLWQNEERAATVTKKTYEIWHRRHDYWLLAGIINHGYARWQDIQNDPRYAILNEPFKGEMNRGNFLEIKNKFLARRFKLLEQALVIEEQLRRAAYLNMSEDPSHPSMALNTRFAEVECLAESHQHLSKESMAGNKPANAVLHKVLKQLEELLSDMKADVTRLPATIARIPPVAVRLQMSERNILSRLANRAPEPTPQQVAQQQ

SEQ ID NO: 8819 - protein, 2000 aa, Homo sapiens [sequence omitted]

SEQ ID NO: 8820 - protein, 831 aa, Homo sapiens
MERAGATSRGGQAPGFLLRLHTEGRAEAARVQEQDLRQWGLTGIHLRSYQLEGVNWLAQRFHCQNGCILGDEMGLGKTCQTIALFIYLAGRLNDEGPFLILCPLSVLSNWKEEMQRFAPGLSCVTYAGDKEERACLQQDLKQESRFHVLLTTYEICLKDASFLKSFPWSVLVVDEAHRLKNQSSLLHKTLSEFSVVFSLLLTGTPIQNSLQELYSLLSFVEPDLFSKEEVGDFIQRYQDIEKESESASELHKLLQPFLLRRVKAEVATELPKKTEVVIYHGMSALQKKYYKAILMKDLDAFENETAKKVKLQNILSQLRKCVDHPYLFDGVEPEPFEVGDHLTEASGKLHLLDKLLAFLYSGGHRVLLFSQMTQMLDILQDYMDYRGYSYERVDGSVRGEERHLAIKNFGQQPIFVFLLSTRAGGVGMNLTAADTVIFVDSDFNPQNDLQAAARAHRIGQNKSVKVIRLIGRDTVEEIVYRKAASKLQLTNMIIEGGHFTLGAQKPAADADLQLSEILKFGLDKLLASEGSTMDEIDLESILGETKDGQWVSDALPAAEGGSRDQEEGKNHMYLFEGKDYSKEPSKEDRKSFEQLVNLQKTLLEKASQEGRSLRNKGSVLIPGLVEGSTKRKRVLSPEELEDRQKKRQEAAAKRRRLIEEKKRQKEEAEHKKKVAWWESNNYQSFCLPSEESEPEDLENGEESSAELDYQDPDATSLKYVSGDVTHPQAGAEDALIVHCVDDSGHWGRGGLFTALEKRSAEPRKIYELAGKMKDLSLGGVLLFPVDDKESRNKGQDLLALIVAQHRDRSNVLSGIKMAALEEGLKKIFLAA

SEQ ID NO: 8821 - protein, 1647 aa, Homo sapiens
MSTPDPPLGGTPRPGPSPGPGPSPGAMLGPSPGPSPGSAHSMMGPSPGPPSAGHPIPTQGPGGYPQDNMHQMHKPMESMHEKGMSDDPRYNQMKGMGMRSGGHAGMGPPPSPMDQHSQGYPSPLGGSEHASSPVPASGPSSGPQMSSGPGGAPLDGADPQALGQQNRGPTPFNQNQLHQLRAQIMAYKMLARGQPLPDHLQMAVQGKRPMPGMQQQMPTLPPPSVSATGPGPGPGPGPGPGPGPAPPNYSRPHGMGGPNMPPPGPSGVPPGMPGQPPGGPPKPWPEGPMANAAAPTSTPQKLIPPQPTGRPSPAPPAVPPAASPVMPPQTQSPGQPAQPAPMVPLHQKQSRITPIQKPRGLDPVEILQEREYRLQARIAHRIQELENLPGSLAGDLRTKATIELKALRLLNFQRQLRQEVVVCMRRDTALETALNAKAYKRSKRQSLREARITEKLEKQQKIEQERKRRQKHQEYLNSILQHAKDFKEYHRSVTGKIQKLTKAVATYHANTEREQKKENERIEKERMRRLMAEDEEGYRKLIDQKKDKRLAYLLQQTDEYVANLTELVPQHKAAQVAKEKKKKKKKKKAENAEGQTPAIGPDGEPLDETSQMSDLPVKVIHVESGKILTGTDAPKAGQLEAWLEMNPGYEVAPRSDSEESGSEEEEEEEEEEQPQAAQPPTLPVEEKKKIPDPDSDDVSEVDARHIIENAKQDVDDEYGVSQALARGLQSYYAVAHAVTERVDKQSALMVNGVLKQYQIKGLEWLVSLYNNNLNGILADEMGLGKTIQTIALITYLMEHKRINGPFLIIVPLSTLSNWAYEFDKWAPSVVKVSYKGSPAARRAFVPQLRSGKFNVLLTTYEYIIKDKHILAKIRWKYMIVDEGHRMKNHHCKLTQVLNTHYVAPRRLLLTGTPLQNKLPELWALLNFLLPTIFKSCSTFEQWFNAPFAMTGEKVDLNEEETILIIRRLHKVLRPFLLRRLKKEVEAQLPEKVEYVIKCDMSALQRVLYRHMQAKGVLLTDGSEKDKKGKGGTKTLMNTIMQLRKICNHPYMFQHIEESFSEHLGFTGGIVQGLDLYRASGKFELLDRILPKLRATNHKVLLFCQMTSLMTIMEDYFAYRGFKYLRLDGTTKAEDRGMLLKTFNEPGSEYFIFLLSTRAGGLGLNLQSADTVIIFDSDWNPHQDLQAQDRAHRIGQQNEVRVLRLCTVNSVEEKILAAAKYKLNVDQKVIQAGMFDQKSSSHERRAFLQAILEHEEQDESRHCSTGSGSASFAHTAPPPAGVNPDLEEPPLKEEDEVPDDETVNQMIARHEEEFDLFMRMDLDRRREEARNPKRKPRLMEEDELPSWIIKDDAEVERLTCEEEEEKMFGRGSRHRKEVDYSDSLTEKQWLKAIEEGTLEEIEEEVRQKKSSRKRKRDSDAGSSTPTTSTRSRDKDDESKKQKKRGRPPAEKLSPNPPNLTKKMKKIVDAVIKYKDSSSGRQLSEVFIQLPSRKELPEYYELIRKPVDFKKIKERIRNHKYRSLNDLEKDVMLLCQNAQTFNLEGSLIYEDSIVLQSVFTSVRQKIEKEDDSEGEESEEEEEGEEEGSESESRSVKVKIKLGRKEKAQDRLKGGRRRPSRGSRAKPVVSDDDSEEEQEEDRSGSGSEED

SEQ ID NO: 8822 - protein, 1647 aa, Homo sapiens
MSTPDPPLGGTPRPGPSPGPGPSPGAMLGPSPGPSPGSAHSMMGPSPGPPSAGHPIPTQGPGGYPQDNMHQMHKPMESMHEKGMSDDPRYNQMKGMGMRSGGHAGMGPPPSPMDQHSQGYPSPLGGSEHASSPVPASGPSSGPQMSSGPGGAPLDGADPQALGQQNRGPTPFNQNQLHQLRAQIMAYKMLARGQPLPDHLQMAVQGKRPMPGMQQQMPTLPPPSVSATGPGPGPGPGPGPGPGPAPPNYSRPHGMGGPNMPPPGPSGVPPGMPGQPPGGPPKPWPEGPMANAAAPTSTPQKLIPPQPTGRPSPAPPAVPPAASPVMPPQTQSPGQPAQPAPMVPLHQKQSRITPIQKPRGLDPVEILQEREYRLQARIAHRIQELENLPGSLAGDLRTKATIELKALRLLNFQRQLRQEVVVCMRRDTALETALNAKAYKRSKRQSLREARITEKLEKQQKIEQERKRRQKHQEYLNSILQHAKDFKEYHRSVTGKIQKLTKAVATYHANTEREQKKENERIEKERMRRLMAEDEEGYRKLIDQKKDKRLAYLLQQTDEYVANLTELVRQHKAAQVAKEKKKKKKKKKAENAEGQTPAIGPDGEPLDETSQMSDLPVKVIHVESGKILTGTDAPKAGQLEAWLEMNPGYEVAPRSDSEESGSEEEEEEEEEEQPQAAQPPTLPVEEKKKIPDPDSDDVSEVDARHIIENAKQDVDDEYGVSQALARGLQSYYAVAHAVTERVDKQSALMVNGVLKQYQIKGLEWLVSLYNNNLNGILADEMGLGKTIQTIALITYLMEHKRINGPFLIIVPLSTLSNWAYEFDKWAPSVVKVSYKGSPAARRAFVPQLRSGKFNVLLTTYEYIIKDKHILAKIRWKYMIVDEGHRMKNHHCKLTQVLNTHYVAPRRLLLTGTPLQNKLPELWALLNFLLPTIFKSCSTFEQWFNAPFAMTGEKVDLNEEETILIIRRLHKVLRPFLLRRLKKEVEAQLPEKVEYVIKCDMSALQRVLYRHMQAKGVLLTDGSEKDKKGKGGTKTLMNTIMQLRKICNHPYMFQHIEESFSEHLGFTGGIVQGLDLYRASGKFELLDRILPKLRATNHKVLLFCQMTSLMTIMEDYFAYRGFKYLRLDGTTKAEDRGMLLKTFNEPGSEYFIFLLSTRAGGLGLNLQSADTVIIFDSDWNPHQDLQAQDRAHRIGQQNEVRVLRLCTVNSVEEKILAAAKYKLNVDQKVIQAGMFDQKSSSHERRAFLQAILEHEEQDESRHCSTGSGSASFAHTAPPPAGVNPDLEEPPLKEEDEVPDDETVNQMIARHEEEFDLFMRMDLDRRREEARNPKRKPRLMEEDELPSWIIKDDAEVERLTCEEEEEKMFGRGSRHRKEVDYSDSLTEKQWLKAIEEGTLEEIEEEVRQKKSSRKRKRDSDAGSSTPTTSTRSRDKDDESKKQKKRGRPPAEKLSPNPPNLTKKMKKIVDAVIKYKDSSSGRQLSEVFIQLPSRKELPEYYELIRKPVDFKKIKERIRNHKYRSLNDLEKDVMLLCQNAQTFNLEGSLIYEDSIVLQSVFTSVRQKIEKEDDSEGEESEEEEEGEEEGSESESRSVKVKIKLGRKEKAQDRLKGGRRRPSRGSRAKPVVSDDDSEEEQEEDRSGSGSEED

SEQ ID NO: 8823 - protein, 1679 aa, Homo sapiens
MSTPDPPLGGTPRPGPSPGPGPSPGAMLGPSPGPSPGSAHSMMGPSPGPPSAGHPIPTQGPGGYPQDNMHQMHKPMESMHEKGMSDDPRYNQMKGMGMRSGGHAGMGPPPSPMDQHSQGYPSPLGGSEHASSPVPASGPSSGPQMSSGPGGAPLDGADPQALGQQNRGPTPFNQNQLHQLRAQIMAYKMLARGQPLPDHLQMAVQGKRPMPGMQQQMPTLPPPSVSATGPGPGPGPGPGPGPGPAPPNYSRPHGMGGPNMPPPGPSGVPPGMPGQPPGGPPKPWPEGPMANAAAPTSTPQKLIPPQPTGRPSPAPPAVPPAASPVMPPQTQSPGQPAQPAPMVPLHQKQSRITPIQKPRGLDPVEILQEREYRLQARIAHRIQELENLPGSLAGDLRTKATIELKALRLLNFQRQLRQEVVVCMRRDTALETALNAKAYKRSKRQSLREARITEKLEKQQKIEQERKRRQKHQEYLNSILQHAKDFKEYHRSVTGKIQKLTKAVATYHANTEREQKKENERIEKERMRRLMAEDEEGYRKLIDQKKDKRLAYLLQQTDEYVANLTELVRQHKAAQVAKEKKKKKKKKKAENAEGQTPAIGPDGEPLDETSQMSDLPVKVIHVESGKILTGTDAPKAGQLEAWLEMNPGYEVAPRSDSEESGSEEEEEEEEEEQPQAAQPPTLPVEEKKKIPDPDSDDVSEVDARHIIENAKQDVDDEYGVSQALARGLQSYYAVAHAVTERVDKQSALMVNGVLKQYQIKGLEWLVSLYNNNLNGILADEMGLGKTIQTIALITYLMEHKRINGPFLIIVPLSTLSNWAYEFDKWAPSVVKVSYKGSPAARRAFVPQLRSGKFNVLLTTYEYIIKDKHILAKIRWKYMIVDEGHRMKNHHCKLTQVLNTHYVAPRRLLLTGTPLQNKLPELWALLNFLLPTIFKSCSTFEQWFNAPFAMTGEKVDLNEEETILIIRRLHKVLRPFLLRRLKKEVEAQLPEKVEYVIKCDMSALQRVLYRHMQAKGVLLTDGSEKDKKGKGGTKTLMNTIMQLRKICNHPYMFQHIEESFSEHLGFTGGIVQGLDLYRASGKFELLDRILPKLRATNHKVLLFCQMTSLMTIMEDYFAYRGFKYLRLDGTTKAEDRGMLLKTFNEPGSEYFIFLLSTRAGGLGLNLQSADTVIIFDSDWNPHQDLQAQDRAHRIGQQNEVRVLRLCTVNSVEEKILAAAKYKLNVDQKVIQAGMFDQKSSSHERRAFLQAILEHEEQDESRHCSTGSGSASFAHTAPPPAGVNPDLEEPPLKEEDEVPDDETVNQMIARHEEEFDLFMRMDLDRRREEARNPKRKPRLMEEDELPSWIIKDDAEVERLTCEEEEEKMFGRGSRHRKEVDYSDSLTEKQWLKKITGKDIHDTASSVARGLQFQRGLQFCTRASKAIEEGTLEEIEEEVRQKKSSRKRKRDSDAGSSTPTTSTRSRDKDDESKKQKKRGRPPAEKLSPNPPNLTKKMKKIVDAVIKYKDSSSGRQLSEVFIQLPSRKELPEYYELIRKPVDFKKIKERIRNHKYRSLNDLEKDVMLLCQNAQTFNLEGSLIYEDSIVLQSVFTSVRQKIEKEDDSEGEESEEEEEGEEEGSESESRSVKVKIKLGRKEKAQDRLKGGRRRPSRGSRAKPVVSDDDSEEEQEEDRSGSGSEED

SEQ ID NO: 8824 - protein, 1613 aa, Homo sapiens
MSTPDPPLGGTPRPGPSPGPGLPLEPCWALAGSLAGLRHSMMGPSPGPPSAGHPIPTQGPGGYPQDNMHQMHKPMESMHEKGMSDDPRYNQMKGMGMRSGGHAGMGPPPSPMDQYSQGYPSPLGGSEHASSPVPASGPSSGPQMSSGPGGAPLDGADPQALGQQNRGPTPFNQNQLHQLRAQIMAYKMLARGQPLPDHLQMAVQGKRPMPGMQQQMPTLPPPSVSATGPGPGPGPGPGPGPGPAPPNYSRPHGMGGPNMPPPGPSGVPPGMPGQPPGGPPKPWPEGPMANAAAPTSTPQKLIPPQPTGRPSPAPPAVPPAASPVMPPQTQSPGQPAQPAPMVPLHQKQSRITPIQKPRGLDPVEILQEREYRLQARIAHRIQELENLPGSLVGDLRTKVTIELKDLRLLNFQRQLRQEVVVCMRRDTALETALNVKAYKRSKRQSLREARITEKLEKQQKIEQERKRRQKHQEYLNSILQHAKDFKEYHRSVTGTIQKLTKAVSTYHANTEREQKKENERIEKERIRRLMAEDEEGYRKLIDQKKDKRLAYLLQQTDEYVANLTELVRQHKASQVAKEIKKKKTKKKAENAEGQTPAIGPDGEPLDETSQMSDLPVKVIHVESGKILTGTDAPKAGQLEAWLEMNPGYEVAPRSDSEESGSEEEEEEEEEEQPQQAQPPTLPVEEKKKIPDPDSDDVSEVDARHIIENAKQDVDDEYGVSQALARGLQSYYAVAHAVTERVDKQSALMVNGVLKQYQIKGLEWLVSLYNNLNGILADEMGLGKTIQTIALITYLMEHKRINGPFLIIVPLSTLSNWAYEFDKWAPSVVKVSYKGSPAAKRAFVPQLRSGKFNVLLTTYEYIIKNKHILAKTRWKYMIVDEGHRMKNHHCKLKQVLNTHYVAPRRLLLTGTPLQNKLPELWALLNFLLPTIFKSCSTFEQWFNAPFAMTGEKVDLNEEETILIIRRLHKVLRPFLLRRLKKEVEAQLPEKVEYVIKCDMSALQRVLYRHMQAKGVLLTDGSEKDKKGKGGTKTLMNTIMQLRKICNHPYMFQHIEESFSEHLGFTGGIVQGLDMYRASGKFELLDRILPKLRATNHKVLLFCQMTSLMTIMEDYLAYRGFKYLRLAGTTKAEDRGMLLKTFNEPGSEYFIFLLSTRAGGLGLNLQSADTVIIFDSDWNPHQDLQAQDRAHRIGQRNEVRVLRLCTVNSVEEKILAAAKYKLNVDQKVIQAGMFDQKSSSHERRAFLQAILEHEEQDEEEDEVPDDETVNQMIARHEEEFDLFMRMDLDRRREEARNPKRKPRLMEEDELPSWIIKDDAEVERLTCEEEEEKMFGCSRHRKEVDYSDSLTEKQWLKTLKAIEEGTLEEIEEEVRQKKSSRKRKRDSDAGSSTPTTSTPAATRTTRARSRRSASGRCEKLSPNPPNLTKKMKKIVDAVIKYKDSSSGRQLSEVFIQLPSRKELPEYYELIRKPVDFKKIKERIRNHKYRSLNDLEKDVMLLCQNAQTFNLEGSLIYEDSIVLQSVFTSVRQKIEKEDDSEGEESEEEEEGEEEGSESESRSVKVKIKLGRKEKAQDRLKGGRRRPSRGSRAKPVVSDDDSEEEQEEDRSGSGSEED

SEQ ID NO: 8825 - protein, 1613 aa, Homo sapiens
MSTPDPPLGGTPRPGPSPGPGLPLEPCWALAGSLAGLRHSMMGPSPGPPSAGHPIPTQGPGGYPQDNMHQMHKPMESMHEKGMSDDPRYNQMKGMGMRSGGHAGMGPPPSPMDQYSQGYPSPLGGSEHASSPVPASGPSSGPQMSSGPGGAPLDGADPQALGQQNRGPTPFNQNQLHQLRAQIMAYKMLARGQPLPDHLQMAVQGKRPMPGMQQQMPTLPPPSVSATGPGPGPGPGPGPGPGPAPPNYSRPHGMGGPNMPPPGPSGVPPGMPGQPPGGPPKPWPEGPMANAAAPTSTPQKLIPPQPTGRPSPAPPAVPPAASPVMPPQTQSPGQPAQPAPMVPLHQKQSRITPIQKPRGLDPVEILQEREYRLQARIAHRIQELENLPGSLVGDLRTKVTIELKDLRLLNFQRQLRQEVVVCMRRDTALETALNVKAYKRSKRQSLREARITEKLEKQQKIEQERKRRQKHQEYLNSILQHAKDFKEYHRSVTGTIQRLTKAVSTYHANTEREQKKENERIEKERIRRLMAEDEEGYRKLIDQKKDKRLAYLLQQTDEYVANLTELVRQHKASQVAKEIKKKKTKKKAENAEGQTPAIGPDGEPLDETSQMSDLPVKVIHVESGKILTGTDAPKAGQLEAWLEMNPGYEVAPRSDSEESGSEEEEEEEEEEQPQQAQPPTLPVEEKKKIFDPDSDDVSEVDARHIIENAKQDVDDEYGVSQALARGLQSYYAVAHAVTERVDKQSALMVNGVLKQYQIKGLEWLVSLYNNLNGILADEMGLGKTIQTIALITYLMEHKRINGPFLIIVPLSTLSNWAYEFDKWAPSVVKVSYKGSPAAKRAFVPQLRSGKFNVLLTTYEYIIKNKHILAKTRWKYMIVDEGHRMKNHHCKLKQVLNTHYVAPRRLLLTGTPLQNKLPELWALLNFLLPTIFKSCSTFEQWFNAPFAMTGEKVDLNEEETILIIRRLHKVLRPFLLRRLKKEVEAQLPEKVEYVIKCDMSALQRVLYRHMQAKGVLLTDGSEKDKKGKGGTKTLMNTIMQLRKICNHPYMFQHIEESFSEHLGFTGGIVQGLDMYRASGKFELLDRILPKLRATNHKVLLFCQMTSLMTIMEDYLAYRGFKYLRLAGTTKAEDRGMLLKTFNEPGSEYFIFLLSTRAGGLGLNLQSADTVIIFDSDWNPHQDLQAQDRAHRIGQRNEVRVLRLCTVNSVEEKILAAAKYKLNVDQKVIQAGMFDQKSSSHERRAFLQAILEHEEQDEEEDEVPDDETVNQMIARHEEEFDLFMRMDLDRRREEARNPKRKPRLMEEDELPSWIIKDDAEVERLTCEEEEEKMFGCSRHRKEVDYSDSLTEKQWLKTLKAIEEGTLEEIEEEVRQKKSSRKRKRDSDAGSSTPTTSTPAATRTTRARSRRSASGRCEKLSPNPPNLTKKMKKIVDAVIKYKDSSSGRQLSEVFIQLPSRKELPEYYELIRKPVDFKKIKERIRNHKYRSLNDLEKDVMLLCQNAQTFNLEGSLIYEDSIVLQSVFTSVRQKIEKEDDSEGEESEEEEEGEEEGSESESRSVKVKIKLGRKEKAQDRLKGGRRRPSRGSRAKPVVSDDDSEEEQEEDRSGSGSEED

SEQ ID NO: 8826 - protein, 1033 aa, Homo sapiens
MEQDTAAVAATVAAADATATIVVIEDEQPGPSTSQEEGAAAAATEATAATEKGEKKKEKNVSSFQLKLAAKAPKSEKEMDPEYEEKMKADRAKRFEFLLKQTELFAHFIQPSAQKSPTSPLNMKLGRPRIKKDEKQSLISAGDYRHRRTEQEEDEELLSESRKTSNVCIRFEVSPSYVKGGPLRDYQIRGLNWLISLYENGVNGILADEIPGPHMVLVPKSTLHNWMNEFKRWVPSLRVICFVGDKDARAAFIRDEMMPGEWDVCVTSYEMVIKEKSVFKKFHWRYLVIDEAHRIKNEKSKLSEIVREFKSTNRLLLTGTPLQNNLHELWALLNFLLPDVFNSADDFDSWFDTKNCLGDQKLVERLHAVLKPFLLRRIKTDVEKSLPPKKEIKIYLGLSKMQREWYTKILMKDIDVLNSSGKMDKMRLLNILMQLRKCCNHPYLFDGAEPGPPYTTDEHIVSNSGKMVVLDKLLAKLKEQGSRVLIFSQMTRLLDILEDYCMWRGYEYCRLDGQTPHEEREDKFLEVEFLGQREAIEAFNAPNSSKFIFMLSTRAGGLGINLASADVVILYDSDWNPQVDLQAMDRAHRIGQKKPVRVFRLITDNTVEERIVERAEIKLRLDSIVIQQGRLIDQQSNKLAKEEMLQMIRHGATHVFASKESELTDEDITTILERGEKKTAEMNERLQKMGESSLRNFRMDIEQSLYKFEGEDYREKQKLGMVEWIEPPKRERKANYAVDAYFREALRVSEPKIPKAPRPPKQPNVQDFQFFPPRLFELLEKEILYYRKTIGYKVPRNPDIPNPALAQREEQKKIDGAEPLTPEETEEKEKLLTQGFTNWTKRDFNQFIKANEKYGRDDIDNIAREVEGKSPEEVMEYSAVFWERCNELQDIEKIMAQIERGEARIQRRISIKKALDAKIARYKAPFHQLRIQYGTSKGKNYTEEEDRFLICMLHKMGFDRENVYEELRQCVRNAPQFRFDWFIKSRTAMEFQRRCNTLISLIEKENMEIEERERAEKKKRATKTPMVKFSAFS

SEQ ID NO: 8827 - protein, 1026 aa, Homo sapiens
MNLFNLDRFRFEKRNKIEEAPEATPQPSQPGPSSPISLSAEEENAEGEVSRANTPDSDITEKTEDSSVPETPDNERKASISYFKNQRGIQYIDLSSDSEDVVSPNCSNTVQEKTFNKDTVIIVSEPSEDEESQGLPTMARRNDDISELEDLSELEDLKDAKLQTLKELFPQRSDNDLLKLIESTSTMDGAIAAALLMFGDAGGGPRKRKLSSSSEPYEEDEFNDDQSIKKTRLDHGEESNESAESSSNWEKQESIVLKLQKEFPNFDKQELREVLKEHEWMYTEALESLKVFAEDQDMQYASQSEVPNGKEVSSRSQNYPKNATKTKLKQKFSMKAQNGFNKKRKKNVFNPKRVVEDSEYDSGSDVGSSLDEDYSSGEEVMEDGYKGKILHFLQDASIGELTLIPQCSQKKAQKITELRPFNSWEALFTKMSKTNGLSEDLIWHCKTLIQERDVVIRLMNKCEDISNKLTKQVTMLTGNGGGWNIEQPSILNQSLSLKPYQKVGLNWLALVHKHGLNGILADEMGLGKTIQAIAFLAYLYQEGNNGPHLIVVPASTIDNWLREVNLWCPTLKVLCYYGSQEERKQIRFNIHSRYEDYNVIVTTYNCAISSSDDRSLFRRLKLNYAIFDEGHMLKNMGSIRYQHLMTINANNRLLLTGTPVQNNLLELMSLLNFVMPHMFSSSTSEIRRMFSSKTKSADEQSIYEKERIAHAKQIIKPFILRRVKEEVLKQLPPKKDRIELCAMSEKQEQLYLGLFNRLKKSINNLEKNTEMCNVMMQLRKMANHPLLHRQYYTAEKLKEMSQLMLKEPTHCEANPDLIFEDMEVMTDFELHVLCKQYRHINNFQLDMDLILDSGKFRVLGCILSELKQKGDRVVLFSQFTMMLDILEVLLKHHQHRYLRLDGKTQISERIHLIDEFNTDMDIFVFLLSTKAGGLGINLTSANVVILHDIDCNPYNDKQAEDRCHRVGQTKEVLVIKLISQGTIEESMLKINQQKLKLEQDMTTVDEGDEGSMPADIATLLKTSMGL

SEQ ID NO: 8828 - protein, 1709 aa, Homo sapiens
MNGHSDEESVRNSSGESSQSDDDSGSASGSGSGSSSGSSSDGSSSQSGSSDSDSGSESGSQSESESDTSRENKVQAKPPKVDGAEFWKSSPSILAVQRSAILKKQQQQQQQQQHQASSNSGSEEDSSSSEDSDDSSSEVKRKKHKDEDWQMSGSGSPSQSGSDSESEEEREKSSCDETESDYEPKNKVKSRKPQNRSKSKNGKKILGQKKRQIDSSEEDDDEEDYDNDKRSSRRQATVNVSYKEDEEMKTDSDDLLEVCGEDVPQPEEEEFETIERFMDCRIGRKGATGATTTIYAVEADGDPNAGFEKNKEPGEIQYLIKWKGWSHIHNTWETEETLKQQNVRGMKKLDNYKKKDQETKRWLKNASPEDVEYYNCQQELTDDLHKQYQIVGRIIAHSNQKSAAGYPDYYCKWQGLPYSECSWEDGALISKKFQACIDEYFSRNQSKTTPFKDCKVLKQRPRFVALKKQPSYIGGHEGLELRDYQLNGLNWLAHSWCKGNSCILADEMGLGKTIQTISFLNYLFHEHQLYGPFLLVVPLSTLTSWQREIQTWASQMNAVVYLGDINSRNMIRTHEWTHHQTKRLKFNILLTTYEILLKDKAFLGGLNWAFIGVDEAHRLKNDDSLLYKTLIDFKSNHRLLITGTPLQNSLKELWSLLHFIMPEKFSSWEDFEEEHGKGREYGYASLHKELEPFLLRRVKKDVEKSLPAKVEQILRMEMSALQKQYYKWILTRNYKALSKGSKGSTSGFLNIMMELKKCCNHCYLIKPPDNNEFYNKQEALQHLIRSSGKLILLDKLLIRLRERGNRVLIFSQMVRMLDILAEYLKYRQFPFQRLDGSIKGELRKQALDHFNAEGSEDFCFLLSTRAGGLGINLASADTVVIFDSDWNPQNDLQAQARAHRIGQKKQVNIYRLVTKGSVEEDILERAKKKMVLDHLVIQRMDTTGKTVLHTGSAPSSSTPFNKEELSAILKFGAEELFKEPEGEEQEPQEMDIDEILKRAETHENEPGPLTVGDELLSQFKVANFSNMDEDDIELEPERNSKNWEEIIPEDQRRRLEEEERQKELEEIYMLPRMRNCAKQISFNGSEGRRSRSRRYSGSDSDSISEGKRPKKRGRPRTIPRENIKGFSDAEIRRFIKSYKKFGGPLERLDAIARDAELVDKSETDLRRLGELVHNGCIKALKDSSSGTERTGGRLGKVKGPTFRISGVQVNAKLVISHEEELIPLHKSIPSDPEERKQYTIPCHTKAAHFDIDWGKEDDSNLLIGIYEYGYGSWEMIKMDPDLSLTHKILPDDPDKKPQAKQLQTRADYLIKLLSRDLAKKEALSGAGSSKRRKARAKKNKAMKSIKVKEEIKSDSSPLPSEKSDEDDDKLSESKSDGRERSKKSSVSDAPVHITASGEPVPISEESEELDQKTFSICKERMRPVKAALKQLDRPEKGLSEREQLEHTRQCLIKIGDHITECLKEYTNPEQIKQWRKNLWIFVSKFTEFDARKLHKLYKHAIKKRQESQQNSDQNSNLNPHVIRNPDVERLKENTNHDDSSRDSYSSDRHLTQYHDHHKDRHQGDSYKKSDSRKRPYSSFSNGKDHRDWDHYKQDSRYYSDREKHRKLDDHRSRDHRSNLEGSLKDRSHSDHRSHSDHRLHSDHRSSSEYTHHKSSRDYRYHSDWQMDHRASSSGPRSPLDQRSYGSRSPFEHSVEHKSTPEHTWSSRKT

SEQ ID NO: 8829 - protein, 594 aa, Homo sapiens
KTNGLSEDLIWHCKTLIQERDVVIRLMNKCEDISNKLTKQVTMLTGNGGGWNIEQPSILNQSLSLKPYQKVGLNWLALVHKHGLNGILADEMGLGKTIQAIAFLAYLYQEGNNGPHLIVVPASTIDNWLREVNLWCPTLKVLCYYGSQEERKQIRFNIHSRYEDYNVIVTTYNCAISSSDDRSLFRRLKLNYAIFDEGHMLKNMGSIRYQHLMTINANNRLLLTGTPVQNNLLELMSLLNFVMPHMFSSSTSEIRRMFSSKTKSADEQSIYEKERIAHAKQIIKPFILRRVKEEVLKQLPPKKDRIELCAMSEKQEQLYLGLFNRLKKSINNLEKNTEMCNVMMQLRKMANHPLLHRQYYTAEKLKEMSQLMLKEPTHCEANPDLIFEDMEVMTDFELHVLCKQYRHINNFQLDMDLILDSGKFRVLGCILSELKQKGDRVVLFSQFTMMLDILEVLLKHHQHRYLRLDGKTQISERIHLIDEFNTDMDIFVFLLSTKAGGLGINLTSANVVILHDIDCNPYNDKQAEDRCHRVGQTKEVLVIKLISQGTIEESMLKINQQKLKLEQDMTTVDEGDEGSMPADIATLLKTSMGL

SEQ ID NO: 8830 - protein, 1048 aa, Homo sapiens
GYKIIVHLKPPSLQVVLSTNMNLFNLDRFRFEKRNKIEEAPEATPQPSQPGPSSPISLSAEEENAEGEVSRANTPDSDITEKTEDSSVPETPDNERKASISYFKNQRGIQYIDLSSDSEDVVSPNCSNTVQEKTFNKDTVIIVSEPSEDEESQGLPTMARRNDDISELEDLSELEDLKDAKLQTLKELFPQRSDNDLLKLIESTSTMDGAIAAALLMFGDAGGGPRKRKLSSSSEPYEEDEFNDDQSIKKTRLDHGEESNESAESSSNWEKQESIVLKLQKEFPNFDKQELREVLKEHEWMYTEALESLKVFAEDQDMQYVSQSEVPNGKEVSSRSQNYPKNATKTKLKQKFSMKAQNGFNKKRKKNVFNPKRVVEDSEYDSGSDVGSSLDEDYSSGEEVMEDGYKGKILHFLQDASIGELTLIPQCSQKKAQKITELRPFNSWEALFTKMSKTNGLSEDLIWHCKTLIQERDVVIRLMNKCEDISNKLTKQVTMLTGNGGGWNIEQPSILNQSLSLKPYQKVGLNWLALVHKHGLNGILADEMGLGKTIQAIAFLAYLYQEGNNGPHLIVVPASTIDNWLREVNLWCPTLKVLCYYGSQEERKQIRFNIHSRYEDYNVIVTTYNCAISSSDDRSLFRRLKLNYAIFDEGHMLKNMGSIRYQHLMTINANNRLLLTGTPVQNNLLELMSLLNFVMPHMFSSSTSEIRRMFSSKTKSADEQSIYEKERIAHAKQIIKPFILRRVKEEVLKQLPPKKDRIELCAMSEKQEQLYLGLFNRLKKSINNLVTEKNTEMCNVMMQLRKMANHPLLHRQYYTAEKLKEMSQLMLKEPTHCEANPDLIFEDMEVMTDFELHVLCKQYRHINNFQLDMDLILDSGKFRVLGCILSELKQKGDRVVLFSQFTMMLDILEVLLKHHQHRYLRLDGKTQISERIHLIDEFNTDMDIFVFLLSTKAGGLGINLTSANVVILHDIDCNPYNDKQAEDRCHRVGQTKEVLVIKLISQGTIEESMLKINQQKLKLEQDMTTVDEGDEGSMPADIATLLKTSMGL

SEQ ID NO: 8831 - protein, 1028 aa, Homo sapiens
MNLFNLDRFRFEKRNKIEEAPEATPQPSQPGPSSPISLSAEEENAEGEVSRANTPDSDITEKTEDSSVPETPDNERKASISYFKNQRGIQYIDLSSDSEDVVSPNCSNTVQEKTFNKDTVIIVSEPSEDEESQGLPTMARRNDDISELEDLSELEDLKDAKLQTLKELFPQRSDNDLLKLIESTSTMDGAIAAALLMFGDAGGGPRKRKLSSSSEPYEEDEFNDDQSIKKTRLDHGEESNESAESSNNWEKQESIVLKLQKEFPNFDKQELREVLKEHEWMYTEALESLKVFAEDQDMQYASQSEVPNGKEVSSRSQNYPKNATKTKLKQKFSMKAQNGFNKKRKKNVFNQKRVVEDSEYDSGSDVGSSLDEDYSSGEEVMEDGYKGKILHFLQDASIGELTLIPQCSQKKAQKITELRPFNSWEALFTKMSKTNGLSEDLIWHCKTLIQERDVVIRLMNKCEDISNKLTKQVTMLTGNGGGWNIEQPSILNQSLSLKPYQKVGLNWLALVHKHGLNGILADEMGLGKTIQAIAFLAYLYQEGNNGPHLIVVPASTIDNWLREVNLWCPTLKVLCYYGSQEERKQIRFNIHSRYEDYNVIVTTYNCAISSSDDRSLFRRLKLNYAIFDEGHMLKNMGSIRYQHLMTINANNRLLLTGTPVQNNLLELMSLLNFVMPHMFSSSTSEIRRMFSSKTKSADEQSIYEKERIAHAKQIIKPFILRRVKEEVLKQLPPKKDRIELCAMSEKQEQLYLGLFNRLKKSINNLVTEKNTEMCNVMMQLRKMANHPLLHRQYYTAEKLKEMSQLMLKEPTHCEANPDLIFEDMEVMTDFELHVLCKQYRHINNFQLDMDLILDSGKFRVLGCILSELKQKGDRVVLFSQFTMMLDILEVLLKHHQHRYLRLDGKTQISERIHLIDEFNTDMDIFVFLLSTKAGGLGINLTSANVVILHDIDCNPYNDKQAEDRCHRVGQTKEALVIKLISQGTIEESMLKINQQKLKLEQDMTTVDEGDEGSMPADIATLLKTSMGL

SEQ ID NO: 8832 - protein, 1739 aa, Homo sapiens
MMRNKDKSQEEDSSLHSNASSHSASEEASGSDSGSQSESEQGSDPGSGHGSESNSSSESSESQSESESESAGSKSQPVLPEAKEKPASKKERIADVKKMWEEYPDVYGVRRSNRSRQEPSRFNIKEEASSGSESGSPKRRGQRQLKKQEKWKQEPSEDEQEQGTSAESEPEQKKVKARRPVPRRTVPKPRVKKQPKTQRGKRKKQDSSDEDDDDDEAPKRQTRRRAAKNVSYKEDDDFETDSDDLIEMTGEGVDEQQDNSETIEKVLDSRLGKKGATGASTTVYAIEANGDPSGDFDTEKDEGEIQYLIKWKGWSYIHSTWESEESLQQQKVKGLKKLENFKKKEDEIKQWLGKVSPEDVEYFNCQQELASELNKQYQIVERVIAVKTSKSTLGQTDFPAHSRKPAPSNEPEYLCKWMGLPYSECSWEDEALIGKKFQNCIDSFHSRNNSKTIPTRECKALKQRPRFVALKKQPAYLGGENLELRDYQLEGLNWLAHSWCKNNSVILADEMGLGKTIQTISFLSYLFHQHQLYGPFLIVVPLSTLTSWQREFEIWAPEINVVVYIGDLMSRNTIREYEWIHSQTKRLKFNALITTYEILLKDKTVLGSINWAFLGVDEAHRLKNDDSLLYKTLIDFKSNHRLLITGTPLQNSLKELWSLLHFIMPEKFEFWEDFEEDHGKGRENGYQSLHKVLEPFLLRRVKKDVEKSLPAKVEQILRVEMSALQKQYYKWILTRNYKALAKGTRGSTSGFLNIVMELKKCCNHCYLIKPPEENERENGQEILLSLIRSSGKLILLDKLLTRLRERGNRVLIFSQMVRMLDILAEYLTIKHYPFQRLDGSIKGEIRKQALDHFNADGSEDFCFLLSTRAGGLGINLASADTVVIFDSDWNPQNDLQAQARAHRIGQKKQVNIYRLVTKGTVEEEIIERAKKKMVLDHLVIQRMDTTGRTILENNSGRSNSNPFNKEELTAILKFGAEDLFKELEGEESEPQEMDIDEILRLAETRENEVSTSATDELLSQFKVANFATMEDEEELEERPHKDWDEIIPEEQRKKVEEEERQKELEEIYMLPRIRSSTKKAQTNDSDSDTESKRQAQRSSASESETEDSDDDKKPKRRGRPRSVRKDLVEGFTDAEIRRFIKAYKKFGLPLERLECLARDAELVDKSVADLKRLGELIHNSCVSAMQEYEEQLKENASEGKGPGKRRGPTIKISGVQVNVKSIIQHEEEFEMLHKSIPVDPEEKKKYCLTCRVKAAHFDVEWGVEDDSRLLLGIYEHGYGNWELIKTDPELKLTDKILPVETDKKPQGKQLQTRADYLLKLLRKGLEKKGAVTGGEEAKLKKRKPRVKKENKVPRLKEEHGIELSSPRHSDNPSEEGEVKDDGLEKSPMKKKQKKKENKENKEKQMSSRKDKEGDKERKKSKDKKEKPKSGDAKSSSKSKRSQGPVHITAGSEPVPIGEDEDDDLDQETFSICKERMRPVKKALKQLDKPDKGLNVQEQLEHTRNCLLKIGDRIAECLKAYSDQEHIKLWRRNLWIFVSKFTEFDARKLHKLYKMAHKKRSQEEEEQKKKDDVTGGKKPFRPEASGSSRDSLISQSHTSHNLHPQKPHLPASHGPQMHGHPRDNYNHPNKRHFSNADRGDWQRERKFNYGGGNNNPPWGSDRHHQYEQHWYKDHHYGDRRHMDAHRSGSYRPNNMSRKRPYDQYSSDRDHRGHRDYYDRYAKGCETPGANLCQELFLGRK

SEQ ID NO: 8833 - protein, 2713 aa, Homo sapiens [sequence omitted]

SEQ ID NO: 8834 - protein, 2715 aa, Homo sapiens
MKMKIQKKEKQLSNLKVLNHSPMSDASVNFDYKSPSPFDCSTDQEEKIEDVASHCLPQKDLYTAEEEAATLFPRKMTSHNGMEDSGGGGTGVKKKRKKKEPGDQEGAAKGSKDREPKPKRKREPKEPKEPRKAKEPKKAKEHKEPKQKDGAKKARKPREASGTKEAKEKRSCTDSAARTKSRKASKEQGPTPVEKKKKGKRKSETTVESLELDQGLTNPSLRSPEESTESTDSQKRRSGRQVKRRKYNEDLDFKVVDDDGETIAVLGAGRTSALSASTLAWQAEEPPEDDANIIEKILASKTVQEVHPGEPPFDLELFYVKYRNFSYLHCKWATMEELEKDPRIAQKIKRFRNKQAQMKHIFTEPDEDLFNPDYVEVDRILEVAHTKDAETGEEVTHYLVKWCSLPYEESTWELEEDVDPAKVKEFESLQVLPEIKHVERPASDSWQKLEKSREYKNSNQLREYQLEGMNWLLFNWYNRKNCILADEMGLGKTIQSITFLSEIFLRGIHGPFLIIAPLSTITNWEREFRTWTEMNAIVYHGSQISRQMIQQYEMVYRDAQGNPLSGVFKFHVVITTFEMILADCPELKKIHWSCVIIDEAHRLKNRNCKLLEGLKLMALEHKVLLTGTPLQNSVEELFSLLNFLEPSQFPSETAFLEEFGDLKTEEQVKKLQSILKPMMLRRLKDDVEKNLAPKQETIIEVELTNIQKKYYRAILEKNFSFLTKGANQHNMPNLINTMMELRKCCNHPYLINGAEEKILEDFRKTHSPDAPDFQLQAMIQAAGKLVLIDKLLPKLIAGGHKVLIFSQMVRCLDILEDYLIQRRYTYERIDGRVRGNLRQAAIDRFCKPDSDRFVFLLCTRAGGLGINLTAADTCIIFDSDWNPQNDLQAQARCHRIGQSKAVKVYRLITRNSYEREMFDKASLKLGLDKAVLQDINRKGGTNGVQQLSKMEVEDLLRKGAYGALMDEEDEGSKFCEEDIDQILQRRTHTITIQSEGKGSTFAKASFVASGNRTDISLDDPNFWQKWAKIAELDTEAKNEKESLVIDRPRVRKQTKHYNSFEEDELMEFSELDSDSDERPTRSRRLNDKARRYLRAECFRVEKNLLIFGWGRWKDILTHGRFKWHLNEKDMEMICRALLVYCVKHYKGDEKIKSFIWELITPTKDGQAQTLQNHSGLSAPVPRGRKGKKTKNQLLIPELKDADWLATCNPEVVLHDDGYKKHLKQHCNKVLLRVRMLYYLKAEILGEAAEKAFEGSPARELDVPLPDIDYMEIPVDWWDAEADKSLLIGVFKHGYERYNAMRADPALCFLEKVGMPDEKSLSAEQGVTDGTSDIPERGNTDKEDNAEDKVDGLQKQTESSSDGGDGVFSEKKDDSRAAQDGSDPDKSPWPVSSALTARLRRLVTVYQRCNRKELCRPEILGPGNQGYWVQEEMFRRTSEMDLINKEAQKRWTRREQADFYRTVSSFGVVYDQEKKTFDWTQFRIISRLDKKSDESLEQYFYSFVAMCRNVCRLPTWKDGGPPDTTIYVEPITEERAARTLYRIELLRKVREQVLKCPQLHERLQLCRPSLYLPVWWECGKHDRDLLIGTAKHGLNRTDCYIMNDPQLSFLDAYRNYAQHKRSGTQAPGNLCCLYQTNSKLYESLTYSQMSRTSESLENEPENLVRVESRDDHLSLPDVTCENFISKVQDVISINHDESLLPESLESMMYGKKVLSQEPSSFQESPSTNTESRKDVITISISKDGNCQSGGPEAEIASGPTFMGSLEAGGVAQANIKNGKHLLMSISKEGELCCSEAGQRPENIGQLEAKCLASPSLNPGNESGFVDMCSLSVCDSKRNLSSDQQLIDLLENKSLESKLILSQNHSDEEEEEEENEEENLAMAVGMGERPEVLHLTEPTTNISREKNQGFQDETKKGSLEVANQTPGLQRAFPAPAACQCHCKHMERWMHGLENDEFEIEKPKAYIPDLFKSKTNTIAMEGEPTAIPSQPFKVKHELLKEPWKESAEGQNVFPTYPLEGSELKSEDMDFENKDDYDRDGNCHSQDYPGKYSEEESKSSTSGITGDIGDELQEARAPTIAQLLQEKTLYSFSEWPKDRVIINRLDNICHVVLKGKWPSSQQYEPSGTLPTPVLTSSAGSRTSLSEPEAAEHSFSNGAALAAQIHKESFLAPVFTKDEQKHRRPYEFEVERDAKARGLEQFSATHGHTPIILNGWHGESAMDLSCSSEGSPGATSPFPVSASTPKIGAISSLQGALGMDLSGILQAGLIHPVTGQIVNGSLRRDDAATRRRRGRRKHVEGGMDLIFLKEQTLQAGILEVHEDPGQATLSTTHPEGPGPATSAPEPATAASSQAEKSIPSKSLLDWLRQQADYSLEVPGFGANFSDKPKQRRPRCKEPGKLDVSSLSGEERVPAIPKEPGLRGFLPENKFNHTLAEPILRDTGPRRRGRRPRSELLKAPSIVADSPSGMGPLFMNGLIAGMDLVGLQNMRNMPGIPLTGLVGFPAGFATMPTGEEVKSTLSMLPMMLPGMAAVPQMFGVGGLLSPPMATTCTSTAPASLSSTTKSGTAVTEKTAEDKPSSHDVKTDTLAEDKPGPGPFSDQSEPAITTSSPVAFNPFLIPGVSPGLIYPSMFLSPGMGMALPAMQQARHSEIVGLESQKRKKKKTKGDNPNSHPEPAPSCEREPSGDENCAEPSAPLPAEREHGAQAGEGALKDSNNDTN

SEQ ID NO: 8835 - protein, 2713 aa, Homo sapiens
MKIQKKEKQLSNLKVLNHSPMSDASVNFDYKSPSPFDCSTDQEEKIEDVASHCLPQKDLYTAEEEAATLFPRKMTSHNGMEDSGGGGTGVKKKRKKKEPGDQEGAAKGSKDREPKPKRKREPKEPKEPRKAEEPKKAKEHKEPKQKDGAKKARKPREASGTKEAKEKRSCTDSAARTKSRKASKEQGPTPVEKKKKGKRKSETTVESLELDQGLTNPSLRSPEESTESTDSQKRRSGRQVKRRKYNEDLDFKVVDDDGETIAVLGAGRTSALSASTLAWQAEEPPEDDANIIEKILASKTVQEVHPGEPPFDLELFYVKYRNFSYLHCKWATMEELEKDPRIAQKIKRFRNKQAQMKHIFTEPDEDLFNPDYVEVDRILEVAHTKDAETGEEVTHYLVKWCSLPYEESTWELEEDVDPAKVKEFESLQVLPEIKHVERPASDSWQKLEKSREYKNSNQLREYQLEGMNWLLFNWYNRKNCILADEMGLGKTIQSITFLSEIFLRGIHGPFLIIAPLSTITNWEREFRTWTEMNAIVYHGSQISRQMIQQYEMVYRDAQGNPLSGVFKFHVVITTFEMILADCPELKKIHWSCVIIDEAHRLKNRNCKLLEGLKLMALEHKVLLTGTPLQNSVEELFSLLNFLEPSQFPSETAFLEEFGDLKTEEQVKKLQSILKPMMLRRLKDDVEKNLAPKQETIIEVELTNIQKKYYRAILEKNFSFLTKGANQHNMPNLINTMMELRKCCNHPYLINGAEEKILEDFRKTHSPDAPDFQLQAMIQAAGKLVLIDKLLPKLIAGGHKVLIFSQMVRCLDILEDYLIQRRYTYERIDGRVRGNLRQAAIDRFCKPDSDRFVFLLCTRAGGLGINLTAADTCIIFDSDWNPQNDLQAQARCHRIGQSKAVKVYRLITRNSYEREMFDKASLKLGLDKAVLQDINRKGGTNGVQQLSKMEVEDLLRKGAYGALMDEEDEGSKFCEEDIDQILQRRTHTITIQSEGKGSTFAKASFVASGNRTDISLDDPNFWQKWAKIAKLDTEAKNEKESLVIDRPRVRKQTKHYNSFEEDELMEFSELDSDSDERPTRSRRLNDKARRYLRAECFRVEKNLLIFGWGRWKDILTHGRFKWHLNEKDMEMICRALLVYCVKHYKGDEKIKSFIWELITPTKDGQAQTLQNHSGLSAPVPRGRKGKKTKNQLLIPELKDADWLATCNPEVVLHDDGYKKHLKQHCNKVLLRVRMLYYLKAEILGEAAEKAFEGSPARELDVPLPDIDYMEIPVDWWDAEADKSLLIGVFKHGYERYNAMRADPALCFLEKVGMPDEKSLSAEQGVTDGTSDIPERGNTDKEDNAEDKVDGLQKQTESSSDGGDGVFSEKKDDSRAAQDGSDPDKSPWPVSSALTARLRRLVTVYQRCNRKELCRPEILGPGNQGYWVQEEMFRRTSEMDLINKEAQKRWTRREQADFYRTVSSFGVVYDQEKKTFDWTQFRIISRLDKKSDESLEQYFYSFVAMCRNVCRLPTWKDGGPPDTTIYVEPITEERAARTLYRIELLRKVREQVLKCPQLHERLQLCRPSLYLPVWWECGKHDRDLLIGTAKHGLNRTDCYIMNDPQLSFLDAYRNYAQHKRSGTQAPGNLCCLYQTNSKLYESLTYSQMSRTSESLENEPENLVRVESRDDHLSLPDVTCENFISKVQDVISINHDESLLPESLESMMYGKKVLSQEPSSFQESPSTNTESRKDVITISISKDGNCQSGGPEAEIASGPTFMGSLEAGGVAQANIKNGKHLLMSISKEGELCCSEAGQRPENIGQLEAKCLASPSLNPGNESGFVDMCSLSVCDSKRNLSSDQQLIDLLENKSLESKLILSQNHSDEEEEEEENEEENLAMAVGMGERPEVLHLTEPTTNISREKNQGFQDETKKGSLEVANQTPGLQRAFPAPAACQCHCKHMERWMHGLENDEFEIEKPKAYIPDLFKSKTNTIAMEGEPTAIPSQPFKVKHELLKEPWKESAEGQNVFPTYPLEGSELKSEDMDFENKDDYDRDGNCHSQDYPGKYSEEESKSSTSGITGDIGDELQEARAPTIAQLLQEKTLYSFSEWPKDRVIINRLDNICHVVLKGKWPSSQQYEPSGTLPTPVLTSSAGSRTSLSEPEAAEHSFSNGAALAAQIHKESFLAPVFTKDEQKHRRPYEFEVERDAKARGLEQFSATHGHTPIILNGWHGESAMDLSCSSEGSPGATSPFPVSASTPKIGAISSLQGALGMDLSGILQAGLIHPVTGQIVNGSLRRDDAATRRRRGRRKHVEGGMDLIFLKEQTLQAGILEVHEDPGQATLSTTHPEGPGPATSAPEPATAASSQAEKSIPSKSLLDWLRQQADYSLEVPGFGANFSDKPKQRRPRCKEPGKLDVSSLSGEERVPAIPKEPGLRGFLPENKFNHTLAEPILRDTGPRRRGRRPRSELLKAPSIVADSPSGMGPLFMNGLIAGMDLVGLQNMRNMPGIPLTGLVGFPAGFATMPTGEEVKSTLSMLPMMLPGMAAVPQMFGVGGLLSPPMATTCTSTAPASLSSTTKSGTAVTEKTAEDKPSSHDVKTDTLAEDKPGPGPFSDQSEPAITTSSPVAFNPFLIPGVSPGLIYPSMFLSPGMGMALPAMQQARHSEIVGLESQKRKKKKTKGDNPNSHPEPAPSCEREPSGDENCAEPSAPLPAEREHGAQAGEGALKDSNNDTN

SEQ ID NO: 8836 - protein, 910 aa, Homo sapiens
MRRSAAPSQLQGNSFKKPKFIPPGRSNPGLNEEITKLNPDIKLFEGVAINNTFLPSQNDLRICSLNLPSEESTREINNRDNCSGKYCFEAPTLATLDPPHTVHSAPKEVAVSKEQEEKSDSLVKYFSVVWCKPSKKKHKKWEGDAVLIVKGKSFILKNLEGKDIGRGIGYKFKELEKIEEGQTLMICGKEIEVMGVISPDDFSSGRCFQLGGGSTAISHSSQVARKCFSNPFKSVCKPSSKENRQNDFQNCKPRHDPYTPNSLVMPRPDKNHQWVFNKNCFPLVDVVIDPYLVYHLRPHQKEGIIFLYECVMGMRMNGRCGAILADEMGLGKTLQCISLIWTLQCQGPYGGKPVIKKTLIVTPGSLVNNWKKEFQKWLGSERIKIFTVDQDHKVEEFIKSIFYSVLIISYEMLLRSLDQIKNIKFDLLICDEGHRLKNSAIKTTTALISLSCEKRIILTGTPIQNDLQEFFALIDFVNPGILGSLSSYRKIYEEPIILSREPSASEEEKELGERRAAELTCLTGLFILRRTQEIINKYLPPKIENVVFCRPGALQIELYRKLLNSQVVRFCLQGLLENSPHLICIGALKKLCNHPCLLFNSIKEKECSSTCDKNEEKSLYKGLLSVFPADYNPLLFTEKESGKLQVLSKLLAVIHELRPTEKVVLVSNYTQTLNILQEVCKRHGYAYTRLDGQTPISQRQQIVDGFNSQHSSFFIFLLSSKAGGVGLNLIGGSHLILYDIDWNPATDIQAMSRVWRDGQKYPVHIYRLLTTGTIEEKIYQRQISKQGLCGAVVDLTKTSEHIQFSVEELKNLFTLHESSDCVTHDLLDCECTGEEVHTGDSLEKFIVSRDCQLGPHHQKSNSLKPLSMSQLKQWKHFSGDHLNLTDPFLERITENVSFIFQNITTQATGT

SEQ ID NO: 8837 - protein, 2004 aa, Homo sapiens
RQVKRKKYTEDLDIKITDDEEEEEVDVTGPIKPEPILPEPVQEPDGETLPSMQFFVENPSEEDAAIVDKVLSMRIVKKELPSGQYTEAEEFFVKYKNYSYLHCEWATISQLEKDKRIHQKLKRFKTKMAQMRHFFHEDEEPFNPDYVEVDRILDESHSIDKDNGEPVIYYLVKWCSLPYEDSTWELKEDVDEGKIREFKRIQSRHPELKRVNRPQASAWKKLELSHEYKNRNQLREYQLEGVNWLLFNWYNRQNCILADEMGLGKTIQSIAFLQEVYNVGIHGPFLVIAPLSTITNWEREFNTWTEMNTIVYHGSLASRQMIQQYEMYCKDSRGRLIPGAYKFDALITTFEMILSDCPELREIEWRCVIIDEAHRLKNRNCKLLDSLKHMDLEHKVLLTGTPLQNTVEELFSLLHFLEPSQFPSESEFLKDFGDLKTEEQVQKLQAILKPMMLRRLKEDVEKNLAPKQETIIEVELTNIQKKYYRAILEKNFSFLSKGAGHTNMPNLLNTMMELRKCCNHPYLINGAEEKILTEFREACHIIPHDFHLQAMVRSAGKLVLIDKLLPKLKAGGHKVLIFSQMVRCLDILEDYLIQRRYLYERIDGRVRGNLRQAAIDRFSKPDSDRFVFLLCTRAGGLGINLTAADTCIIFDSDWNPQNDLQAQARCHRIGQSKAVKVYRLITRNSYEREMFDKASLKLGLDKAVLQSMSGRDGNITGIQQFSKKEIEDLLRKGAYAAIMEEDDEGSKFCEEDIDQILLRRTTTITIESEGKGSTFAKASFVASENRTDISLDDPNFWQKWAKKADLDMDLLNSKNNLVIDTPRVRKQTRHFSTLKDDDLVEFSDLESEDDERPRSRRHDRHHAYGRTDCFRVEKHLLVYGWGRWRDILSHGRFKRRMTERDVETICRAILVYCLLHYRGDENIKGFIWDLISPAENGKTKELQNHSGLSIPVPRGRKGKKVKSQSTFDIHKADWIRKYNPDTLFQDESYKKHLKHQCNKVLLRVRMLYYLRQEVIGDQAEKVLGGAIASEIDIWFPVVDQLEVPTTWWDSEADKSLLIGVFKHGYEKYNTMRADPALCFLEKAGRPDDKAIAAEHRVLDNFSDIVEGVDFDKDCEDPEYKPLQGPPKDQDDEGDPLMMMDEEISVIDGDEAQVTQQPGHLFWPPGSALTARLRRLVTAYQRSYKREQMKIEAAERGDRRRRRCEAAFKLKEIARREKQQRWTRREQTDFYRVVSTFGVEYDPDTMQFHWDRFRTFARLDKKTDESLTKYFHGFVAMCRQVCRLPPAAGDEPPDPNLFIEPITEERASRTLYRIELLRRLREQVLCHPLLEDRLALCQPPGPELPKWWEPVRHDGELLRGAARHGVSQTDCNIMQDPDFSFLAARMNYMQNHQAGAPAPSLSRCSTPLLHQQYTSRTASPLPLRPDAPVEKSPEETATQVPSLESLTLKLEHEVVARSRPTPQDYEMRVSPSDTTPLVSRSVPPVKLEDEDDSDSELDLSKLSPSSSSSSSSSSSSSSTDESEDEKEEKLTDQSRSKLYDEESLLSLTMSQDGFPNEDGEQMTPELLLLQERQRASEWPKDRVLINRIDLVCQAVLSGKWPSSRRSQEMVTGGILGPGNHLLDSPSLTPGEYGDSPVPTPRSSSAASMAEEEASAVSTAAAQFTKLRRGMDEKEFTVQIKDEEGLKLTFQKHKLMANGVMGDGHPLFHKKKGNRKKLVELEVECMEEPNHLDVDLETRIPVINKVDGTLLVGEDAPRRAELEMWLQGHPEFAVDPRFLAYMEDRRKQKWQRCKKNNKAELNCLGMEPVQTANSRNGKKGHHTETVFNRVLPGPIAPESSKKRARRMRPDLSKMMALMQGGSTGSLSLHNTFQHSSSGLQSVSSLGHSSATSASLPFMPFVMGGAPSSPHVDSSTMLHHHHHHPHPHHHHHHHPGLRAPGYPSSPVTTASGTTLRLPPLQPEEDDDEDEEDDDDLSQGYDSSERDFSLIDDPMMPANSDSSEDADD

SEQ ID NO: 8838 - protein, 1953 aa, Homo sapiens
MQFFVENPSEEDAAIVDKVLSMRIVKKELPSGQYTEAEEFFVKYKNYSYLHCEWATISQLEKDKRIHQKLKRFKTKMAQMRHFFHEDEEPFNPDYVEVDRILDESHSIDKDNGEPVIYYLVKWCSLPYEDSTWELKEDVDEGKIREFKRIQSRHPELKRVNRPQASAWKKLELSHEYKNRNQLREYQLEGVNWLLFNWYNRQNCILADEMGLGKTIQSIAFLQEVYNVGIHGPFLVIAPLSTITNWEREFNTWTEMNTIVYHGSLASRQMIQQYEMYCKDSRGRLIPGAYKFDALITTFEMILSDCPELREIEWRCVIIDEAHRLKNRNCKLLDSLKHMDLEHKVLLTGTPLQNTVEELFSLLHFLEPSQFPSESEFLKDFGDLKTEEQVQKLQAILKPMMLRRLKEDVEKNLAPKQETIIEVELTNIQKKYYRAILEKNFSFLSKGAGHTNMPNLLNTMMELRKCCNHPYLINGAEEKILTEFREACHIIPHDFHLQAMVRSAGKLVLIDKLLPKLKAGGHKVLIFSQMVRCLDILEDYLIQRRYLYERIDGRVRGNLRQAAIDRFSKPDSDRFVFLLCTRAGGLGINLTAADTCIIFDSDWNPQNDLQAQARCHRIGQSKAVKVYRLITRNSYEREMFDKASLKLGLDKAVLQSMSGRDGNITGIQQFSKKEIEDLLRKGAYAAIMEEDDEGSKFCEEDIDQILLRRTTTITIESEGKGSTFAKASFVASENRTDISLDDPNFWQKWAKKADLDMDLLNSKNNLVIDTPRVRKQTRHFSTLKDDDLVEFSDLESEDDERPRSRRHDRHHAYGRTDCFRVEKHLLVYGWGRWRDILSHGRFKRRMTERDVETICRAILVYCLLHYRGDENIKGFIWDLISPAENGKTKELQNHSGLSIPVPRGRKGKKVKSQSTFDIHKADWIRKYNPDTLFQDESYKKHLKHQCNKVLLRVRMLYYLRQEVIGDQAEKVLGGAIASEIDIWFPVVDQLEVPTTWWDSEADKSLLIGVFKHGYEKYNTMRADPALCFLEKAGRPDDKAIAAEHRVLDNFSDIVEGVDFDKDCEDPEYKPLQGPPKDQDDEGDPLMMMDEEISVIDGDEAQVTQQPGHLFWPPGSALTARLRRLVTAYQRSYKREQMKIEAAERGDRRRRRCEAAFKLKEIARREKQQRWTRREQTDFYRVVSTFGVEYDPDTMQFHWDRFRTFARLDKKTDESLTKYFHGFVAMCRQVCRLPPAAGDEPPDPNLFIEPITEERASRTLYRIELLRRLREQVLCHPLLEDRLALCQPPGPELPKWWEPVRHDGELLRGAARHGVSQTDCNIMQDPDFSFLAARMNYMQNHQAGAPAPSLSRCSTPLLHQQYTSRTASPLPLRPDAPVEKSPEETATQVPSLESLTLKLEHEVVARSRPTPQDYEMRVSPSDTTPLVSRSVPPVKLEDEDDSDSELDLSKLSPSSSSSSSSSSSSSSTDESEDEKEEKLTDQSRSKLYDEESLLSLTMSQDGFPNEDGEQMTPELLLLQERQRASEWPKDRVLINRIDLVCQAVLSGKWPSSRRSQEMVTGGILGPGNHLLDSPSLTPGEYGDSPVPTPRSSSAASMAEEEASAVSTAAAQFTKLRRGMDEKEFTVQIKDEEGLKLTFQKHKLMANGVMGDGHPLFHKKKGNRKKLVELEVECMEEPNHLDVDLETRIPVINKVDGTLLVGEDAPRRAELEMWLQGHPEFAVDPRFLAYMEDRRKQKWQRCKKNNKAELNCLGMEPVQTANSRNGKKGHHTETVFNRVLPGPIAPESSKKRARRMRPDLSKMMALMQGGSTGSLSLHNTFQHSSSGLQSVSSLGHSSATSASLPFMPFVMGGAPSSPHVDSSTMLHHHHHHPHPHHHHHHHPGLRAPGYPSSPVTTASGTTLRLPPLQPEEDDDEDEEDDDDLSQGYDSSERDFSLIDDPMMPANSDSSEDADD

SEQ ID NO: 8839 - protein, 838 aa, Homo sapiens
MPAERPAGSGGSEAPAMVEQLDTAVITPAMLEEEEQLEAAGLERERKMLEKARMSWDRESTEIRYRRLQHLLEKSNIYSKFLLTKMEQQQLEEQKKKEKLERKKESLKVKKGKNSIDASEEKPVMRKKRGREDESYNISEVMSKEEILSVAKKNKKENEDENSSSTNLCVEDLQKNKDSNSIIKDRLSETVRQNTKFFFDPVRKCNGQPVPFQQPKHFTGGVMRWYQVEGMEWLRMLWENGINGILADEMGLGKTVQCIATIALMIQRGVPGPFLVCGPLSTLPNWMAEFKRFTPDIPTMLYHGTQEERQKLVRNIYKRKGTLQIHPVVITSFEIAMRDRNALQHCYWKYLIVDEGHRIKNMKCRLIRELKRFNADNKLLLTGTPLQNNLSELWSLLNFLLPDVFDDLKSFESWFDITSLSETAEDIIAKEREQNVLHMLHQILTPFLLRRLKSDVALEVPPKREVVVYAPLSKKQEIFYTAIVNRTIANMFGSSEKETIELSPTGRPKRRTRKSINYSKIDDFPNELEKLISQIQPEVDRERAVVEVNIPVESEVNLKLQNIMMLLRKCCNHPYLIEYPIDPVTQEFKIDEELVTNSGKFLILDRMLPELKKRGHKVLLFSQMTSMLDILMDYCHLRDFNFSRLDGSMSYSEREKNMHSFNTDPEVFIFLVSTRAGGLGINLTAADTVIIYDSDWNPQSDLQAQDRCHRIGQTKPVVVYRLVTANTIDQKIVERAAAKRKLEKLIIHKNHFKGGQSGLNLSKNFLDPKELMELLKSRDYEREIKGSREKVISDKDLELLLDRSDLIDQMNASGPIKEKMGIFKILENSEDSSPECLF

SEQ ID NO: 8840 - protein, 1967 aa, Homo sapiens
LEFKISDEEADDADAAGRDSPSNTSQSEQQESVDAEGPVVEKIMSSRSVKKQKESGEEVEIEEFYVKYKNFSYLHCQWASIEDLEKDKRIQQKIKRFKAKQGQNKFLSEIEDELFNPDYVEVDRIMDFARSTDDRGEPVTHYLVKWCSLPYEDSTWERRQDIDQAKIEEFEKLMSREPETERVERPPADDWKKSESSREYKNNNKLREYQLEGVNWLLFNWYNMRNCILADEMGLGKTIQSITFLYEIYLKGIHGPFLVIAPLSTIPNWEREFRTWTELNVVVYHGSQASRRTIQLYEMYFKDPQGRVIKGSYKFHAIITTFEMILTDCPELRNIPWRCVVIDEAHRLKNRNCKLLEGLKMMDLEHKVLLTGTPLQNTVEELFSLLHFLEPSRFPSETTFMQEFGDLKTEEQVQKLQAILKPMMLRRLKEDVEKNLAPKEETIIEVELTNIQKKYYRAILEKNFTFLSKGGGQANVPNLLNTMMELRKCCNHPYLINGAEEKILEEFKETHNAESPDFQLQAMIQAAGKLVLIDKLLPKLKAGGHRVLIFSQMVRCLDILEDYLIQRRYPYERIDGRVRGNLRQAAIDRFSKPDSDRFVFLLCTRAGGLGINLTAADTCIIFDSDWNPQNDLQAQARCHRIGQSKSVKIYRLITRNSYEREMFDKASLKLGLDKAVLQSMSGRENATNGVQQLSKKEIEDLLRKGAYGALMDEEDEGSKFCEEDIDQILLRRTHTITIESEGKGSTFAKASFVASGNRTDISLDDPNFWQKWAKKAELDIDALNGRNNLVIDTPRVRKQTRLYSAVKEDELMEFSDLESDSEEKPCAKPRRPQDKSQGYARSECFRVEKNLLVYGWGRWTDILSHGRYKRQLTEQDVETICRTILVYCLNHYKGDENIKSFIWDLITPTADGQTRALVNHSGLSAPVPRGRKGKKVKAQSTQPVVQDADWLASCNPDALFQEDSYKKHLKHHCNKVLLRVRMLYYLRQEVIGDQADKILEGADSSEADVWIPEPFHAEVPADWWDKEADKSLLIGVFKHGYEKYNSMRADPALCFLERVGMPDAKAIAAEQRGTDMLADGGDGGEFDREDEDPEYKPTRTPFKDEIDEFANSPSEDKEESMEIHATGKHSESNAELGQLYWPNTSTLTTRLRRLITAYQRSYKRQQMRQEALMKTDRRRRRPREEVRALEAEREAIISEKRQKWTRREEADFYRVVSTFGVIFDPVKQQFDWNQFRAFARLDKKSDESLEKYFSCFVAMCRRVCRMPVKPDDEPPDLSSIIEPITEERASRTLYRIELLRKIREQVLHHPQLGERLKLCQPSLDLPEWWECGRHDRDLLVGAAKHGVSRTDYHILNDPELSFLDAHKNFAQNRGAGNTSSLNPLAVGFVQTPPVISSAHIQDERVLEQAEGKVEEPENPAAKEKCEGKEEEEETDGSGKESKQECEAEASSVKNELKGVEVGADTGSKSISEKGSEEDEEEKLEDDDKSEESSQPEAGAVSRGKNFDEESNASMSTARDETRDGFYMEDGDPSVAQLLHERTFAFSFWPKDRVMINRLDNICEAVLKGKWPVNRRQMFDFQGLIPGYTPTTVDSPLQKRSFAELSMVGQASISGSEDITTSPQLSKEDALNLSVPRQRRRRRRKIEIEAERAAKRRNLMEMVAQLRESQVVSENGQEKVVDLSKASREATSSTSNFSSLSSKFILPNVSTPVSDAFKTQMELLQAGLSRTPTRHLLNGSLVDGEPPMKRRRGRRKNVEGLDLLFMSHKRTSLSAEDAEVTKAFEEDIETPPTRNIPSPGQLDPDTRIPVINLEDGTRLVGEDAPKNKDLVEWLKLHPTYTVDMPSYVPKNADVLFSSFQKPKQKRHRCRNPNKLDINTLTGEERVPVVNKRNGKKMGGAMAPPMKDLPRWLEENPEFAVAPDWTDIVKQSGFVPESMFDRLLTGPVVRGEGASRRGRRPKSEIARAA

SEQ ID NO: 8841 - protein, 1970 aa, Homo sapiens
MTQVSGPNAQLVKSDDYLPSIEQQPQQKKKKKKNNHIVAEDPSKGFGKDDFPGGVDNQELNRNSLDGSQEEKKKKKRSKAKKDPKEPKEPKEKKEPKEPKTPKAPKIPKEPKEKKAKTATPKPKSSKKSSNKKPDSEASALKKKVNKGKTEGSENSDLDKTPPPSPPPEEDEDPGVQKRRSSRQVKRKRYTEDLEFKISDEEADDADAAGRDSPSNTSQSEQQESVDAEGPVVEKIMSSRSVKKQKESGEEVEIEEFYVKYKNFSYLHCQWASIEDLEKDKRIQQKIKRFKAKQGQNKFLSEIEDELFNPDYVEVDRIMDFARSTDDRGEPVTHYLVKWCSLPYEDSTWERRQDIDQAKIEEFEKLMSREPETERVERPPADDWKKSESSREYKNNNKLREYQLEGVNWLLFNWYNMRNCILADEMGLGKTIQSITFLYEIYLKGIHGPFLVIAPLSTIPNWEREFRTWTELNVVVYHGSQASRRTIQLYEMYFKDPQGRVIKGSYKFHAIITTFEMILTDCPELRNIPWRCVVIDEAHRLKNRNCKLLEGLKMMDLEHKVLLTGTPLQNTVEELFSLLHFLEPSRFPSETTFMQEFGDLKTEEQVQKLQAILKPMMLRRLKEDVEKNLAPKEETIIEVELTNIQKKYYRAILEKNFTFLSKGGGQANVPNLLNTMMELRKCCNHPYLINGAEEKILEEFKETHNAESPDFQLQAMIQAAGKLVLIDKLLPKLKAGGHRVLIFSQMVRCLDILEDYLIQRRYPYERIDGRVRGNLRQAAIDRFSKPDSDRFVFLLCTRAGGLGINLTAADTCIIFDSDWNPQNDLQAQARCHRIGQSKSVKIYRLITRNSYEREMFDKASLKLGLDKAVLQSMSGRENATNGVQQLSKKEIEDLLRKGAYGALMDEEDEGSKFCEEDIDQILLRRTHTITIESEGKGSTFAKASFVASGNRTDISLDDPNFWQKWAKKAELDIDALNGRNNLVIDTPRVRKQTRLYSAVKEDELMEFSDLESDSEEKPCAKPRRPQDKSQGYARSECFRVEKNLLVYGWGRWTDILSHGRYKRQLTEQDVETICRTILVYCLNHYKGDENIKSFIWDLITPTADGQTRALVNHSGLSAPVPRGRKGKKVKAQSTQPVVQDADWLASCNPDALFQEDSYKKHLKHHCNKVLLRVRMLYYLRQEVIGDQADKILEGADSSEADVWIPEPFHAEVPADWWDKEADKSLLIGVFKHGYEKYNSMRADPALCFLERVGMPDAKAIAAEQRGTDMLADGGDGGEFDREDEDPEYKPTRTPFKDEIDEFANSPSEDKEESMEIHATGKHSESNAELGQLYWPNTSTLTTRLRRLITAYQRSYKRQQMRQEALMKTDRRRRRPREEVRALEAEREAIISEKRQKWTRREEADFYRVVSTFGVIFDPVKQQFDWNQFRAFARLDKKSDESLEKYFSCFVAMCRRVCRMPVKPDDEPPDLSSIIEPITEERASRTLYRIELLRKIREQVLHHPQLGERLKLCQPSLDLPEWWECGRHDRDLLVGAAKHGVSRTDYHILNDPELSFLDAHKNFAQNRGAGNTSSLNPLAVGFVQTPPVISSAHIQDERVLEQAEGKVEEPENPAAKEKCEGKEEEEETDGSGKESKQECEAEASSVKNELKGVEVGADTGSKSISEKGSEEDEEEKLEDDDKSEESSQPEAGAVSRGKNFDEESNASMSTARDETRDGFYMEDGDPSVAQLLHERTFAFSFWPKDRVMINRLDNICEAVLKGKWPVNRRQMFDFQGLIPGYTPTTVDSPLQKRSFAELSMVGQASISGSEDITTSPQLSKEDALNLSVPRQRRRRRRKIEIEAERAAKRRNLMEMVAQLRESQVVSENGQEKVVDLSKASREATSSTSNFSSLSSKFILPNVSTPVSDAFKTQMELLQAGLSRTPTRHLLNGSLVDGEPPMKRRRGRRKNVEGLDLLFMSHKRTSLSAGGC

SEQ ID NO: 8842 - protein, 628 aa, Homo sapiens
TLSNWAYEFDKWAPSVVKVSYKGSPAARRAFVPQLRSGKFNVLLTTYEYIIKDKHILAKIRWKYMIVDEGHRMKNHHCKLTQVLNTHYVAPRRLLLTGTPLQNKLPELWALLNFLLPTIFKSCSTFEQWFNAPFAMTGEKVDLNEEETILIIRRLHKVLRPFLLRRLKKEVEAQLPEKVEYVIKCDMSALQRVLYRHMQAKGVLLTDGSEKDKKGKGGTKTLMNTIMQLRKICNHPYMFQHIEESFSEHLGFTGGIVQGLDLYRASGKFELLDRILPKLRATNHKVLLFCQMTSLMTIMEDYFAYRGFKYLRLDGTTKAEDRGMLLKTFNEPGSEYFIFLLSTRAGGLGLNLQSADTVIIFDSDWNPHQDLQAQDRAHRIGQQNEVRVLRLCTVNSVEEKILAAAKYKLNVDQKVIQAGMFDQKSSSHERRAFLQAILEHEEQDEEEDEVPDDETVNQMIARHEEEFDLFMRMDLDRRREEARNPKRKPRLMEEDELPSWIIKDDAEVERLTCEEEEEKMFGRGSRHRKEVDYSDSLTEKQWLKAIEEGTLEEIEEEVRQKKSSRKRKRDSDAGSSTPTTSTRSRDKDDESKKQKKRGRPPAEKLSPNPPNLTKKMKKIVDAVIKYKD

SEQ ID NO: 8843 - protein, 661 aa, Homo sapiens
TLSNWAYEFDKWAPSVVKVSYKGSPAARRAFVPQLRSGKFNVLLTTYEYIIKDKHILAKIRWKYMIVDEGHRMKNHHCKLTQVLNTHYVAPRRLLLTGTPLQNKLPELWALLNFLLPTIFKSCSTFEQWFNAPFAMTGEKVDLNEEETILIIRRLHKVLRPFLLRRLKKEVEAQLPEKVEYVIKCDMSALQRVLYRHMQAKGVLLTDGSEKDKKGKGGTKTLMNTIMQLRKICNHPYMFQHIEESFSEHLGFTGGIVQGLDLYRASGKFELLDRILPKLRATNHKVLLFCQMTSLMTIMEDYFAYRGFKYLRLDGTTKAEDRGMLLKTFNEPGSEYFIFLLSTRAGGLGLNLQSADTVIIFDSDWNPHQDLQAQDRAHRIGQQNEVRVLRLCTVNSVEEKILAAAKYKLNVDQKVIQAGMFDQKSSSHERRAFLQAILEHEEQDESRHCSTGSGSASFAHTAPPPAGVNPDLEEPPLKEEDEVPDDETVNQMIARHEEEFDLFMRMDLDRRREEARNPKRKPRLMEEDELPSWIIKDDAEVERLTCEEEEEKMFGRGSRHRKEVDYSDSLTEKQWLKAIEEGTLEEIEEEVRQKKSSRKRKRDSDAGSSTPTTSTRSRDKDDESKKQKKRGRPPAEKLSPNPPNLTKKMKKIVDAVIKYKD

SEQ ID NO: 8844 - protein, 1561 aa, Homo sapiens
RQICSMASELGARDDGGCTELAKPLYLQYLERALRLDHFLRQTSAIFNRNISSDDSEDGLDDSNPLLPQSGDPLIQVKEEPPNSLLGETSGAGSSGMLNTYSLNGVLQSESKCDKGNLYNFSKLKKSRKWLKSILLSDESSEADSQSEDDDEEELNLSREELHNMLRLHKYKKLHQNKYSKDKELQQYQYYSAGLLSTYDPFYEQQRHLLGPKKKKFKEEKKLKAKLKKVKKKRRRDEELSSEESPRRHHHQTKVFAKFSHDAPPPGTKKKHLSIEQLNARRRKVWLSIVKKELPKANKQKASARNLFLTNSRKLAHQCMKEVRRAALQAQKNCKETLPRARRLTKEMLLYWKKYEKVEKEHRKRAEKEALEQRKLDEEMREAKRQQRKLNFLITQTELYAHFMSRKRDMGHDGIQEEILRKLEDSSTQRQIDIGGGVVVNITQEDYDSNHFKAQALKNAENAYHIHQARTRSFDEDAKESRAAALRAANKSGTGFGESYSLANPSIRAGEDIPQPTIFNGKLKGYQLKGMNWLANLYEQGINGILADEMGLGKTVQSIALLAHLAERENIWGPFLIISPASTLNNWHQEFTRFVPKFKVLPYWGNPHDRKVIRRFWSQKTLYTQDAPFHVVITSYQLVVQDVKYFQRVKWQYMVLDEAQALKSSSSVRWKILLQFQCRNRLLLTGTPIQNTMAELWALLHFIMPTLFDSHEEFNEWFSKDIESHAENKSAIDENQLSRLHMILKPFMLRRIKKDVENELSDKIEILMYCQLTSRQKLLYQALKNKISIEDLLQSSMGSTQQAQNTTSSLMNLVMQFRKVCNHPELFERQETWSPFHISLKPYHISKFIYRHGQIRVFNHSRDRWLRVLSPFAPDYIQRSLFHRKGINEESCFSFLRFIDISPAEMANLMLQGLLARWLALFLSLKASYRLHQLRSWGAPEGESHQRYLRNKDFLLGVNFPLSFPNLCSCPLLKSLVFSSHCKAVSGYSDQVVHQRRSATSSLRRCLLTELPSFLCVASPRVTAVPLDSYCNDRSAEYERRVLKEGGSLAAKQCLLNGAPELAADWLNRRSQFFPEPAGGLWSIRPQNGWSFIRIPGKESLITDSGKLYALDVLLTRLKSQGHRVLIYSQMTRMIDLLEEYMVYRKHTYMRLDGSSKISERRDMVADFQNRNDIFVFLLSTRAGGLGINLTAADTVIFYDSDWNPTVDQQAMDRAHRLGQTKQVTVYRLICKGTIEERILQRAKEKSEIQRMVISGGNFKPDTLKPKEVVSLLLDDEELEKKLRLRQEEKRQQEETNRVKERKRKREKYAEKKKKEDELDGKRRKEGVNLVIPFVPSADNSNLSADGDDSFISVDSAMPSPFSEISISSELHTGSIPLDESSSDMLVIVDDPASSAPQSRATNSPASITGSVSDTVNGISIQEMPAAGRGHSARSRGRPKGSGSTAKGAGKGRSRKSTAGSAAAMAGAKAGAAAASAAAYAAYGYNVSKGISASSPLQTSLVRPAGLADFGPSSASSPLSSPLSKGNNVPGNPKNLHMTSSLAPDSLVRKQGKGTNPSGGR

SEQ ID NO: 8845 - protein, 580 aa, Homo sapiens
KTLQCISLIWTLQCQGPYGGKPVIKKTLIVTPGSLVNNWKKEFQKWLGSERIKIFTVDQDHKVEEFIKSIFYSVLIISYEMLLRSLDQIKNIKFDLLICDEGHRLKNSAIKTTTALISLSCEKRIILTGTPIQNDLQEFFALIDFVNPGILGSLSSYRKIYEEPIILSREPSASEEEKELGEREEQLNLLASLDSLYLRRTQEIINKYLPPKIENVVFCRPGALQIELYRKLLNSQVVRFCLQGLLENSPHLICIGALKKLCNHPCLLFNSIKEKECSSTCDKNEEKSLYKGLLSVFPADYNPLLFTEKESGKLQVLSKLLAVIHELRPTEKVVLVSNYTQTLNILQEVCKRHGYAYTRLDGQTPISQRQQIVDGFNSQHSSFFIFLLSSKAGGVGLNLIGGSHLILYDIDWNPATDIQAMSRVWRDGQKYPVHIYRLLTTGTIEEKIYQRQISKQGLCGAVVDLTKTSEHIQFSVEELKNLFTLHESSDCVTHDLLDCECTGEEVHTGDSLEKFIVSRDCQLGPHHQKSNSLKPLSMSQLKQWKHFSGDHLNLTDPFLERITENVSFIFQNITTQATGT

SEQ ID NO: 8846 - protein, 1162 aa, Homo sapiens
MEEVRCPEHGTFCFLKTGVRDGPNKGKSFYVCRADTCSFVRATDIPVSHCLLHEDFVVELQGLPLPQDKKEYRLFFRCIGSKAEGKRWCGSIPWQDPDSKEHSVSNKSQHASETFHHSSNWLRNPFKVLDKNQEPALWKQLIKGEGEEKKADKKQREKGDQLFDQKKEQKPEMMEKDLSSGLVPKKKQSVVQEKKQEEGAEIQCEAETGGTHKRDFSEIKSQQCQGNELTRPSASSQEKSSGKSQDVQRESEPLREKVTQLLPQNVHSHNSISKPQKGGPLNKEYTNWEAKETKAKDGPSIQATQKSLPQGHFQERPETHSVPAPGGPAAQAAPAAPGLSLGEGREAATSSDDEEEDDVVFVSSKPGSPLLFDSTLDLETKENLQFPDRSVQRKVSPASGVSKKVEPSDPVARRVYLTTQLKQKKSTLASVNIQALPDKGQKLIKQIQELEEVLSGLTLSPEQGTNEKSNSQVPQQSHFTKTTTGPPHLVPPQPLPRRGTQPVGSLELKSACQVTAGGSSQCYRGHTNQDHVHAVWKITSEAIGQLHRSLESCPGETVVAEDPAGLKVPLLLHQKQALAWLLWRESQKPQGGILADDMGLGKTLTMIALILTQKNQEKKEEKEKSTALTWLSKDDSCDFTSHGTLIICPASLIHHWKNEVEKRVNSNKLRVYLYHGPNRDSRARVLSTYDIVITTYSLVAKEIPTNKQEAEIPGANLNVEGTSTPLLRIAWARIILDEAHNVKNPRVQTSIAVCKLQACARWAVTGTPIQNNLLDMYSLLKFLRCSPFDEFNLWRSQVDNGSKKGGERLSILTKSLLLRRTKDQLDSTGRPLVILPQRKFQLHHLKLSEDEETVYNVFFARSRSALQSYLKRHESRGNQSGRSPNNPFSRVALEFGSEEPRHSEAADSPRSSTVHILSQLLRLRQCCCHLSLLKSALDPMELKGEGLVLSLEEQLSALTLSELRDSEPSSTVSLNGTFFKMELFEGMRESTKISSLLAELEAIQRNSASQKSVIVSQWTNMLKVVALHLKKHGLTYATIDGSVNPKQRMDLVEAFNHSRGPQVMLISLLAGGVGLNLTGGNHLFLLDMHWNPSLEDQACDRIYRVGQQKDVVIHRFVCEGTVEEKILQLQEKKKDLAKQVLSGSGESVTKLTLAHLRVLFGI

SEQ ID NO: 8847 - protein, 521 aa, Homo sapiens
MQRFAPGLSCVTYAGDKEERACLQQDLKQESRFHVLLTTYEICLKDASFLKSFPWSVLVVDEAHRLKNQSSLLHKTLSEFSVVFSLLLTGTPIQNSLQELYSLLSFVEPDLFSKEEVGDFIQRYQDIEKESESASELHKLLQPFLLRRVKAEVATELPKKTEVVIYHGMSALQKKYYKAILMKDLDAFENETAKKVKLQNILSQLRKCVDHPYLFDGVEPEPFEVGDHLTEASGKLHLLDKLLAFLYSGGHRVLLFSQMTQMLDIPQDYMDYRGYSYERVDGSVRGEERHLAIKNFGQQPIFVFLLSTRAGGVGMNLTAADTVIFVDSDFNPQNDLQAAARAHRIGQNKSVKVIRLIGRDTVEEIVYRKAASKLQLTNMIIEGGHFTLGAQKPAADADLQLSEILKFGLDKLLASEGSTMDEIDLESILGETKDGQWVSDALPAAEGGSRDQEEGKNHMYLFEGKDYSKEPSKEDRKSFEQLVTFRKPFWRKLVKRADHSEIKAVFSSQALWRDLPKGSGF

SEQ ID NO: 8848 - protein, 683 aa, Homo sapiens
MQPGSAPPPGRMDPSAPQPRAETSGKDIWHPGERCLAPSPDNGKLCEASIKSITVDENGKSFAVVLYADFQERKIPLKQLQEVKFVKDCPRNLIFDDEDLEKPYFPNRKFPSSSVAFKLSDNGDSIPYTINRYLRDYQREGTRFLYGHYIHGGGCILGDDMGLGKTVQVISFLAAVLHKKGTREDIENNMPEFLLRSMKKEPLSSTAKKMFLIVAPLSVLYNWKDELDTWGYFRVTVLHGNRKDNELIRVKQRKCEIALTTYETLRLCLDELNSLEWSAVIVDEAHRIKNPKARVTEVMKALKCNVRIGLTGTILQNNMKELWCVMDWAVPGLLGSGTYFKKQFSDPVEHGQRHTATKRELATGRKAMQRLAKKMSGWFLRRTKTLIKDQLPKKEDRMVYCSLTDFQKAVYQTVLETEDVTLILQSSEPCTCRSGQKRRNCCYKTNSHGETVKTLYLSYLTVLQKVANHVALLQAASTSKQQETLIKRICDQVFSRFPDFVQKSKDAAFETLSDPKYSGKMKVLQQLLNHCRKNRDKVLLFSFSTKLLDVLQQYCMASGLDYRRLDGSTKSEERLKIVKEFNSTQDVNICLVSTMAGGLGLNFVGANVVVLFDPTWNPANDLQAIDRTQTHCRRERDAEPLSSAPGLQNGSENAVPYPWWCCVTGASISCWRCEICRIQDVLE

SEQ ID NO: 8849 - protein, 2971 aa, Homo sapiens
MAKDVRQFWSNVEKVVQFKQQSRLEEKRKKALDLHLDFIVGQTEKYSDLLSQSLNQPLTSSKAGSSPCLGSSSAASSPPPPASRLDDEDGDFQPQEDEEEDDEETIEVEEQQEGNDAEAQRREIELLRREGELPLEELLRSLPPQLLEGPSSPSQTPSSHDSDTRDGPEEGAEEEPPQVLEIKPPPSAVTQRNKQPWHPDEDDEEFTANEEEAEDEEDTIAAEEQLEGEVDHAMELSELAREGELSMEELLQQYAGAYAPGSGSSEDEDEDEVDANSSDCEPEGPVEAEEPPQEDSSSQSDSVEDRSEDEEDEHSEEEETSGSSASEESESEESEDAQSQSQADEEEEDDDFGVEYLLARDEEQSEADAGSGPPTPGPTTLGPKKEITDIAAAAESLQPKGYTLATTQVKTPIPLLLRGQLREYQHIGLDWLVTMYEKKLNGILADEMGLGKTIQTISLLAHLACEKGNWGPHLIIVPTSVMLNWEMELKRWCPSFKILTYYGAQKERKLKRQGWTKPNAFHVCITSYKLVLQDHQAFRRKNWRYLILDEAQNIKNFKSQRWQSLLNFNSQRRLLLTGTPLQNSLMELWSLMHFLMPHVFQSHREFKEWFSNPLTGMIEGSQEYNEGLVKRLHKVLRPFLLRRVKVDVEKQMPKKYEHVIRCRLSKRQRCLYDDFMAQTTTKETLATGHFMSVINILMQLRKVCNHPNLFDPRPVTSPFITPGICFSTASLVLRATDVHPLQRIDMGRFDLIGLEGRVSRYEADTFLPRHRLSRRVLLEVATAPDPPPRPKPVKMKVNRMLQPVPKQEGRTVVVVNNPRAPLGPVPVRPPPGPELSAQPTPGPVPQVLPASLMVSASPAGPPLIPASRPPGPVLLPPLQPNSGSLPQVLPSPLGVLSGTSRPPTPTLSLKPTPPAPVRLSPAPPPGSSSLLKPLTVPPGYTFPPAAATTTSTTTATATTTAVPAPTPAPQRLILSPDMQARLPSGEVVSIGQLASLAQRPVANAGGSKPLTFQIQGNKLTLTGAQVRQLAVGQPRPLQMPPTMVNNTGVVKIVVRQAPRDGLTPVPPLAPAPRPPSSGLPAVLNPRPTLTPGRLPTPTLGTARAPMPTPTLVRPLLKLVHSPSPEVSASAPGAAPLTISSPLHVPSSLPGPASSPMPIPNSSPLASPVSSTVSVPLSSSLPISVPTTLPAPASAPLTIPISAPLTVSASGPALLTSVTPPLAPVVPAAPGPPSLQPSGASPSASALTLGLATAPSLSSSQTPGHPLLLAPTSSHVPGLNSTVAPACSPVLVPASALASPFPSAPNPAPAQASLLAPASSASQALATPLAPMAAPQTAILAPSPAPPLAPLPVLAPSPGAAPVLASSQTPVPVMAPSSTPGTSLASASPVPAPTPVLAPSSTQTMLPAPVPSPLPSPASTQTLALAPALAPTLGGSSPSQTLSLGTGNPQGPFPTQTLSLTPASSLVPTPAQTLSLAPGPPLGPTQTLSLAPAPPLAPASPVGPAPAHTLTLAPASSSASLLAPASVQTLTLSPAPVPTLGPAAAQTLALAPASTQSPASQASSLVVSASGAAPLPVTMVSRLPVSKDEPDTLTLRSGPPSPPSTATSFGGPRPRRQPPPPPRSPFYLDSLEEKRKRQRSERLERIFQLSEAHGALAPVYGTEVLDFCTLPQPVASPIGPRSPGPSHPTFWTYTEAAHRAVLFPQQRLDQLSEIIERFIFVMPPVEAPPPSLHACHPPPWLAPRQAAFQEQLASELWPRARPLHRIVCNMRTQFPDLRLIQYDCGKLQTLAVLLRQLKAEGHRVLIFTQMTRMLDVLEQFLTYHGHLYLRLDGSTRVEQRQALMERFNADKRIFCFILSTRSGGVGVNLTGADTVVFYDSDWNPTMDAQAQDRCHRIGQTRDVHIYRLISERTVEENILKKANQKRMLGDMAIEGGNFTTAYFKQQTIRELFDMPLEEPSSSSVPSAPEEEEETVASKQTHILEQALCRAEDEEDIRAATQAKAEQVAELAEFNENDGFPAGEGEEAGRPGAEDEEMSRAEQEIAALVEQLTPIERYAMKFLEASLEEVSREELKQAEEQVEAARKDLDQAKEEVFRLPQEEEEGPGAGDESSCGTGGGTHRRSKKAKAPERPGTRVSERLRGARAETQGANHTPVISAHQTRSTTTPPRCSPARERVPRPAPRPRPTPASAPAAIPALVPVPVSAPVPISAPNPITILPVHILPSPPPPSQIPPCSSPACTPPPACTPPPAHTPPPAQTCLVTPSSPLLLGPPSVPISASVTNLPLGLRPEAELCAQALASPESLELASVASSETSSLSLVPPKDLLPVAVEILPVSEKNLSLTPSAPSLTLEAGSIPNGQEQEAPDSAEGTTLTVLPEGEELPLCVSESNGLELPPSAASDEPLQEPLEADRTSEELTEAKTPTSSPEKPQELVTAEVAAPSTSSSATSSPEGPSPARPPRRRTSADVEIRGQGTGRPGQPPGPKVLRKLPGRLVTVVEEKELVQRRRQQRGAASTLVPGVSETSASPGSPSVRSMSGPESSPPIGGPCEAAPSSSLPTPPQQPFIARRHIELGVTGGGSPENGDGALLAITPPAVKRRRGRPPKKNRSPADAGRGVDEAPSSTLKGKTNGADPVPGPETLIVADPVLEPQLIPGPQPLGPQPVHRPNPLLSPVEKRRRGRPPKARDLPIPGTISSAGDGNSESRTQPPPHPSPLTPLPPLLVCPTATVANTVTTVTISTSPPKRKRGRPPKNPPSPRPSQLPVLDRDSTSVLESCGLGRRRQPQGQGESEGSSSDEDGSRPLTRLARLRLEAEGMRGRKSGGSMVVAVIQDDLDLADSGPGGLELTPPVVSLTPKLRSTRLRPGSLVPPLETEKLPRKRAGAPVGGSPGLAKRGRLQPPSPLGPEGSVEESEAEASGEEEEGDGTPRRRPGPRRLVGTTNQGDQRILRSSAPPSLAGPAVSHRGRKAKT

SEQ ID NO: 8850 - protein, 730 aa, Homo sapiens
MGLGKTIQSITFLYEILLTGIRGPFLIIAPLSTIANWEREFRTWTDINVVVYHGSLISRQMIQQYEMYFRDSQGRIIRGAYRFQAIITTFEMILGGCGELNAIEWRCVIIDEAHRLKNKNCKLLEGLKLMNLEHKVLLTGTPLQNTVEELFSLLHFLEPLRFPSESTFMQEFGDLKTEEQVQKLQVILKPMMLRRLKEDVEKKLAPKEETIIEVELTNIQKKYYRAILEKNFSFLSKGAGQTNVPNLVNTMMELRKCCNHPYLIKGAEEKILGEFRDTYNPAASDFHLQAMIQSAGKLVLIDKLLPKMKAGGHKVLIFSQMVRCLDILEDYLIHKRYLYERIDGRVRGNLRQAAIDRFSKPDSDRFVFLLCTRAGGLGINLTAADTCIIFDSDWNPQNDLQAQARCHRIGQNKAVKVYRLVTRNSYEREMFDRASLKLGLDKAVLQSMSGRESNVGGIQQLSKKEIEDLLRRGAYGAIMEEEDEGSKFCEEDIDQILLRRTKTITIESEGRGSTFAKASFVASGNRTDISLDDPNFWQKWAKKAEIDIEAISGRNGLVIDTPRIRKQTRPFSATKDELAELSEAESEGDEKPKLRRPCDRSNGYGRTECFRVEKNLLVYGWGRWREILSHGRFKRQLNEHDVEIICRALLAYCLVHYRGDEKIKGFIWDLITPTEDGQTRELQNHLGLSAPVPRGRKGKKVKTQTSSFDIQKAEWLRKYNPEQLLQDEGY

SEQ ID NO: 8851 - protein, 1162 aa, Homo sapiens
MEEVRCPEHGTFCFLKTGVRDGPNKGKSFYVCRADTCSFVRATDIPVSHCLLHEDFVVELQGLLLPQDKKEYRLFFRCIRSKAEGKRWCGSIPWQDPDSKEHSVSNKSQHASETFHHSSNWLRNPFKVLDKNQEPALWKQLIKGEGEEKKADKKQREKGDQLFDQKKEQKPEMMEKDLSSGLVPKKKQSVVQEKKQEEGAEIQCEAETGGTHKRDFSEIKSQQCQGNELTRPSASSQEKSSGKSQDVQRESEPLREKVTQLLPQNVHSHNSISKPQKGGPLNKEYTNWEAKETKAKDGPSIQATQKSLPQGHFQERPETHSVPAPGGPAAQAAPAAPGLSLGEGREAATSSDDEEEDDVVFVSSKPGSPLLFDSTLDLETKENLQFPDRSVQRKVSPASGVSKKVEPSDPVARRVYLTTQLKQKKSTLASVNIQALPDKGQKLIKQIQELEEVLSGLTLSPEQGTNEKSNSQVPQQSHFTKTTTGPPHLVPPQPLPRRGTQPVGSLELKSACQVTAGGSSQCYRGHTNQDHVHAVWKITSEAIGQLHRSLESCPGETVVAEDPAGLKVPLLLHQKQALAWLLWRESQKPQGGILADDMGLGKTLTMIALILTQKNQEKKEEKEKSTALTWLSKDDSCDFTSHGTLIICPASLIHHWKNEVEKRVNSNKLRVYLYRGPNRDSRARVLSTYDIVITTYSLVAKEIPTNKQEAEIPGANLNVEGTSTPLLRIAWARIILDEAHNVKNPRVQTSIAVCKLQACARWAVTGTPIQNNLLDMYSLLKFLRCSPFDEFNLWRSQVDNGSKKGGERLSILTKSLLLRRTKDQLDSTGRPLVILPQRKFQLHHLKLSEDEETVYNVFFARSRSALQSYLKRHESRGNQSGRSPNNPFSRVALEFGSEEPRHSEAADSPRSSTVHILSQLLRLRQCCCHLSLLKSALDPMELKGEGLVLSLEEQLSALTLSELRDSEPSSTVSLNGTFFKMELFEGMRESTKISSLLAELEAIQRNSASQKSVIVSQWTNMLKVVALHLKKHGLTYATIDGSVNPKQRMDLVEAFNHSRGPQVMLISLLAGGVGLNLTGGNHLFLLDMHWNPSLEDQACDRIYRVGQQKDVVIHRFVCEGTVEEKILQLQEKKKDLAKQVLSGSGESVTKLTLADLRVLFGI

SEQ ID NO: 8852 - protein, 1106 aa, Homo sapiens [sequence omitted]

SEQ ID NO: 8853 - protein, 747 aa, Homo sapiens
MRRSLAPSQLAKRKPEGRSCDDEDWQPGLVTPRKRKSSSETQIQECFLSPFRKPLSQLTNQPPCLDSSQHEAFIRSILSKPFKVPIPNYQGPLGSRALGLKRAGVRRALHDPLEKDALVLYEPPPLSAHDQLKLDKEKLPVHVVVDPILSKVLRPHQREGVKFLWECVTSRRIPGSHGCIMADEMGLGKTLQCITLMWTLLRQSPECKPEIDKAVVVSPSSLVKNWYNEVGKWLGGRIQPLAIDGGSKDEIDQKLEGFMNQRGARVSSPILIISYETFRLHVGVLQKGSVGLVICDEGHRLKNSENQTYQALDSLNTSRRVLISGTPIQNDLLEYFSLVHFVNSGILGTAHEFKKHFELPILKGRDAAASEADRQLGEERLRELTSIVNRCLIRRTSDILSKYLPVKIEQVVCCRLTPLQTELYKRFLRQAKPAEELLEGKMSVSSLSSITSLKKLCNHPALIYDKCVEEEDGFVGALDLFPPGYSSKALEPQLSGKMLVLDYILAVTRSRSSDKVVLVSNYTQTLDLFEKLCRARRYLYVRLDGTMSIKKRAKVVERFNSPSSPDFVFMLSSKAGGCGLNLIGANRLVMFDPDWNPANDEQAMARVWRDGQKKTCYIYRLLSAGTIEEKIFQRQSHKKALSSCVVDEEQDVERHFSLGELKELFILDEASLSDTHDRLHCRRCVNSRQIRPPPDGSDCTSDLAGWNHCTDKWGLRDEVLQAAWDAASTAITFVFHQHSHEEQRGLR

SEQ ID NO: 8854 - protein, 3124 aa, Homo sapiens
MHHGTGPQNVQHQLQRSRACPGSEGEEQPAHPNPPPSPAAPFAPSASPSAPQSPSYQIQQLMNRSPATGQNVNITLQSVGPVVGGNQQITLAPLPLPSPTSPGFQFSAQPRRFEHGSPSYIQVTSPLSQQVQTQSPTQPSPGPGQALQNVRAGAPGPGLGLCSSSPTGGFVDASVLVRQISLSPSSGGHFVFQDGSGLTQIAQGAQVQLQHPGTPITVRERRPSQPHTQSGGTIHHLGPQSPAAAGGAGLQPLASPSHITTANLPPQISSIIQGQLVQQQQVLQGPPLPRPLGFERTPGVLLPGAGGAAGFGMTSPPPPTSPSRTAVPPGLSSLPLTSVGNTGMKKVPKKLEEIPPASPEMAQMRKQCLDYHYQEMQALKEVFKEYLIELFFLQHFQGNMMDFLAFKKKHYAPLQAYLRQNDLDIEEEEEEEEEEEEKSEVINDEQQALAGSLVAGAGSTVETDLFKRQQAMPSTGMAEQSKRPRLEVGHQGVVFQHPGADAGVPLQQLMPTAQGGMPPTPQAAQLAGQRQSQQQYDPSTGPPVQNAASLHTPLPQLPGRLPPAGVPTAALSSALQFAQQPQVVEAQTQLQIPVKTQQPNVPIPAPPSSQLPIPPSQPAQLALHVPTPGKVQVQASQLSSLPQMVASTRLPVDPAPPCPRPLPTSSTSSLAPVSGSGPGPSPARSSPVNRPSSATNKALSPVTSRTPGVVASAPTKPQSPAQNATSSQDSSQDTLTEQITLENQVHQRIAELRKAGLWSQRRLPKLQEAPRPKSHWDYLLEEMQWMATDFAQERRWKVAAAKKLVRTVVRHHEEKQLREERGKKEEQSRLRRIAASTAREIECFWSNIEQVVEIKLRVELEEKRKKALNLQKVSRRGKELRPKGFDALQESSLDSGMSGRKRKASISLTDDEVDDEEETIEEEEANEGVVDHQTELSNLAKEAELPLLDLMKLYEGAFLPSSQWPRPKPDGEDTSGEEDADDCPGDRESRKDLVLIDSLFIMDQFKAAERMNIGKPNAKDIADVTAVAEAILPKGSARVTTSVKFNAPSLLYGALRDYQKIGLDWLAKLYRKNLNGILADEAGLGKTVQIIAFFAHLACNEGNWGPHLVVVRSCNILKWELELKRWCPGLKILSYIGSHRELKAKRQEWAEPNSFHVCITSYTQFFRGLTAFTRVRWKCLVIDEMQRVKGMTERHWEAVFTLQSQQRLLLIDSPLHNTFLELWTMVHFLVPGISRPYLSSPLRAPSEESQDYYHKVVIRLHRVTQPFILRRTKRDVEKQLTKKYEHVLKCRLSNRQKALYEDVILQPGTQEALKSGHFVNVLSILVRLQRICNHPGLVEPRHPGSSYVAGPLEYPSASLILKALERDFWKEADLSMFDLIGLENKITRHEAELLSKKKIPRKLMEEISTSAAPAARPAAAKLKASRLFQPVQYGQKPEGRTVAFPSTHPPRTAAPTTASAAPQGPLRGRPPIATFSANPEAKAAAAPFQTSQASASAPRHQPASASSTAASPAHPAKLRAQTTAQAFTPGQPPPQPQAPSHAAGQSALPQRLVLPSQAQARLPSGEVVKIAQLASITGPQSRVAQPETPVTLQFQGSKFTLSHSQFRQFTAGQPLQLQGSVLQIVSAPGQPYLRAPGPVVMQTVSQAGAVHGALGSKPPAGGPSPAPLTPQVGVPGRVAVNALAVGEPGTASKPASPIGGPTQEEKTRLLKERLDQIYLVNERRCSQAPVYGRDLLRICALPSHGRVQWRGSLDGRRGKEAGPAHSYTSSSESPSELMLTLCRCGESLQDVIDRVAFVIPPVVAAPPSLRVPRPPPLYSHRMRILRQGLREHAAPYFQQLRQTTAPRLLQFPELRLVQFDSGKLEALAILLQKLKSEGRRVLILSQMILMLDILEMFLNFHYLTYVRIDENASSEQRQELMRSFNRDRRIFCAILSTHSRTTGINLVEADTVVFYDNDLNPVMDAKAQEWCDRIGRCKDIHIYRLVSGNSIEEKLLKNGTKDLIREVAAQGNDYSMAFLTQRTIQELFEVYSPMDDAGFPVKAEEFVVLSQEPSVTETIAPKIARPFIEALKSIEYLEEDAQKSAQEGVLGPHTDALSSDSENMPCDEEPSQLEELADFMEQLTPIEKYALNYLELFHTSIEQEKERNSEDAVMTAVRAWEFWNLKTLQEREARLRLEQEEAELLTYTREDAYSMEYVYEDVDGQTEVMPLWTPPTPPQDDSDIYLDSVMCLMYEATPIPEAKLPPVYVRKERKRHKTDPSAAGRKKKQRHGEAVVPPRSLFDRATPGLLKIRREGKEQKKNILLKQQVPFAKPLPTFAKPTAEPGQDNPEWLISEDWALLQAVKQLLELPLNLTIVSPAHTPNWDLVSDVVNSCSRIYRSSKQCRNRYENVIIPREEGKSKNNRPLRTSQIYAQDENATHTQLYTSHFDLMKMTAGKRSPPIKPLLGMNPFQKNPKHASVLAESGINYDKPLPPIQVASLRAERIAKEKKALADQQKAQQPAVAQPPPPQPQPPPPPQQPPPPLPQPQAAGSQPPAGPPAVQPQPQPQPQTQPQPVQAPAKAQPAITTGGSAAVLAGTIKTSVTGTSMPTGAVSGNVIVNTIAGVPAATFQSINKRLASPVAPGALTTPGGSAPAQVVHTQPPPRAVGSPATATPDLVSMATTQGVRAVTSVTASAVVTTNLTPVQTPARSLVPQVSQATGVQLPGKTITPAHFQLLRQQQQQQQQQQQQQQQQQQQQQQQQQQQQQQTTTTSQVQVPQIQGQAQSPAQIKAVGKLTPEHLIKMQKQKLQMPPQPPPPQAQSAPPQPAAQVQVQTSQPPQQQSPQLTTVTAPRPGALLTGTTVANLQVARLTRVPTSQLQSQGQMQTQAPQPAQVPLPKPPVVSVPAAVVSSPGVTTLPMNVAGISVAIGQPQKAAGQTVVAQPVHMQQLLKLKQQAVQQQKAIQPQAAQGPATVQQKITAQQITTPGAQQKVAYAAQPALKTQFLTTPISQAQKLAGAQQVQTQIQVAKLPQVVQQQTPVASIQQVASASQQASPQTVALTQATAAGQQVQMIPAVTATAQVVQQKLIQQQVVTTASAPLQTPGAPNPAQVPASSDSPSQQPKLQMRVPAVRLKTPTKPPCQ

SEQ ID NO: 8855 - protein, 1731 aa, Homo sapiens
IMHHGTGPQNVQHQLQRSRACPGSEGEEQPAHPNPPPSPAAPFAPSASPSAPQSPSYQIQQLMNRSPATGQNVNITLQSVGPVVGGNQQITLAPLPLPSPTSPGFQFSAQPRRFEHGSPSYIQVTSPLSQQVQTQSPTQPSPGPGQALQNVRAGAPGPGLGLCSSSPTGGFVDASVLVRQISLSPSSGGHFVFQDGSGLTQIAQGAQVQLQHPGTPITVRERRPSQPHTQSGGTIHHLGPQSPAAAGGAGLQPLASPSHITTANLPPQISSIIQGQLVQQQQVLQGPPLPRPLGFERTPGVLLPGAGGAAGFGMTSPPPPTSPSRTAVPPGLSSLPLTSVGNTGMKKVPKKLEEIPPASPEMAQMRKQCLDYHYQEMQALKEVFKEYLIELFFLQHFQGNMMDFLAFKKKHYAPLQAYLRQNDLDIEEEEEEEEEEEEKSEVINDEQQALAGSLVAGAGSTVETDLFKRQQAMPSTGMAEQSKRPRLEVGHQGVVFQHPGADAGVPLQQLMPTAQGGMPPTPQAAQLAGQRQSQQQYDPSTGPPVQNAASLHTPLPQLPGRLPPAGVPTAALSSALQFAQQPQVVEAQTQLQIPVKTQQPNVPIPAPPSSQLPIPPSQPAQLALHVPTPGKVQVQASQLSSLPQMVASTRLPVDPAPPCPRPLPTSSTSSLAPVSGSGPGPSPARSSPVNRPSSATNKALSPVTSRTPGVVASAPTKPQSPAQNATSSQDSSQDTLTEQITLENQVHQRIAELRKAGLWSQRRLPKLQEAPRPKSHWDYLLEEMQWMATDFAQERRWKVAAAKKLVRTVVRHHEEKQLREERGKKEEQSRLRRIAASTAREIECFWSNIEQVVEIKLRVELEEKRKKALNLQKVSRRGKELRPKGFDALQESSLDSGMSGRKRKASISLTDDEVDDEEETIEEEEANEGVVDHQTELSNLAKEAELPLLDLMKLYEGAFLPSSQWPRPKPDGEDTSGEEDADDCPGDRESRKDLVLIDSLFIMDQFKAAERMNIGKPNAKDIADVTAVAEAILPKGSARVTTSVKFNAPSLLYGALRDYQKIGLDWLAKLYRKNLNGILADEAGLGKTVQIIAFFAHLACNEGNWGPHLVVVRSCNILKWELELKRWCPGLKILSYIGSHRELKAKRQEWAEPNSFHVCITSYTQFFRGLTAFTRVRWKCLVIDEMQRVKGMTERHWEAVFTLQSQQRLLLIDSPLHNTFLELWTMVHFLVPGISRPYLSSPLRAPSEESQDYYHKVVIRLHRVTQPFILRRTKRDVEKQLTKKYEHVLKCRLSNRQKALYEDVILQPGTQEALKSGHFVNVLSILVRLQRICNHPGLVEPRHPGSSYVAGPLEYPSASLILKALERDFWKEADLSMFDLIGLENKITRHEAELLSKKKIPRKLMEEISTSAAPAARPAAAKLKASRLFQPVQYGQKPEGRTVAFPSTHPPRTAAPTTASAAPQGPLRGRPPIATFSANPEAKGGEVVKIAQLASITGPQSRVAQPETPVTLQFQGSKFTLSHSQLRQLTAGQPLQLQGSVLQIVSAPGQPYLRAPGPVVMQTVSQAGAVHGALGSKPPAGGPSPAPLTPQVGVPGRVAVNALAVGEPGTASKPASPIGGPTQEEKTRLLKERLDQIYLVNERRCSQAPVYGRDLLRICALPSHGRVQWRGSLDGRRGKEAGPAHSYTSSSESPSELMLTLCRCGESLQDVIDRVAFVIPPVVAAPPSLRV

SEQ ID NO: 8856 - protein, 375 aa, Homo sapiens
RLLLTGTPVQNNLLELMSLLNFVMPHMFSSSTSEIRRMFSSKTKSADEQSIYEKERIAHAKQIIKPFILRRVKEEVLKQLPPKKDRIELCAMSEKQEQLYLGLFNRLKKSINNLEKNTEMCNVMMQLRKMANHPLLHRQYYTAEKLKEMSQLMLKEPTHCEANPDLIFEDMEVMTDFELHVLCKQYRHINNFQLDMDLILDSGKFRVLGCILSELKQKGDRVVLFSQFTMMLDILEVLLKHHQHRYLRLDGKTQISERIHLIDEFNTDMDIFVFLLSTKAGGLGINLTSANVVILHDIDCNPYNDKQAEDRCHRVGQTKEVLVIKLISQGTIEESMLKINQQKLKLEQDMTTVDEGDEGSMPADIATLLKTSMGL

SEQ ID NO: 8857 - protein, 336 aa, Homo sapiens
MGLGKTIQSITFLYEILLTGIRGPFLIIAPLSTIANWEREFRTWTDINVVVYHGSLISRQMIQQYEMYFRDSQGRIIRGAYRFQAIITTFEMILGGCGELNAIEWRCVIIDEAHRLKNKNCKLLEGLKLMNLEHKVLLTGTPLQNTVEELFSLLHFLEPLRFPSESTFMQEFGDLETEEQVQKLQAILKPMMLRRLKEDVEKKLAPKEETIIEVELTNIQKKYYRAILEKNFSFLSKGAGQTNVPNLVNTMMELRKCCNHPYLIKGAEEKILGEFRDTYNPAASDFHLQAMIQSAGKLVLIDKLLPKMKAGGHKVLIFSQMVRCLDILEDYLIHKR

SEQ ID NO: 8858 - protein, 1008 aa, Homo sapiens
MSWMFKRDPVWKYLQTVQYGVHGNFPRLSYPTFFPRFEFQDVIPPDDFLTSDEEVDSVLFGSLRGHVVGLRYYTGVVNNNEMVALQRDPNNPYDKNAIKVNNVNGNQVGHLKKELAGALAYIMDNKLAQIEGVVPFGANNAFTMPLHMTFWGKEENRKAVSDQLKKHGFKLGPAPKTLGFNLESGWGSGRAGPSYSMPVHAAVQMTTEQLKTEFDKLFEDLKEDDKTHEMEPAEAIETPLLPHQKQALAWMVSRENSKELPPFWEQRNDLYYNTITNFSEKDRPENVHGGILADDMGLGKTLTAIAVILTNFHDGRPLPIERVKKNLLKKEYNVNDDSMKLGGNNTSEKADGLSKDASRCSEQPSISDIKEKSKFRMSELSSSRPKRRKTAVQYIESSDSEEIETSELPQKMKGKLKNVQSETKGRAKGSSKVIEDVAFACALTSSVPTTKKKMLKKGACAVEGSKKTDVEERPRTTLIICPLSVLSNWIDQFGQHIKSDVHLNFYVYYGPDRIREPALLSKQDIVLTTYNILTHDYGTKGDSPLHSIRWLRVILDEGHAIRNPNAQQTKAVLDLESERRWVLTGTPIQNSLKDLWSLLSFLKLKPFIDREWWHRTIQRPVTMGDEGGLRRLQSLIKNITLRRTKTSKIKGKPVLELPERKVFIQHITLSDEERKIYQSVKNEGRATIGRYFNEGTVLAHYADVLGLLLRLRQICCHTYLLTNAVSSNGPSGNDTPEELRKKLIRKMKLILSSGSDEECAICLDSLTVPVITHCAHVFCKPCICQVIQNEQPHAKCPLCRNDIHEDNLLECPPEELARDSEKKSDMEWTSSSKINALMHALTDLRKKNPNIKSLVVSQFTTFLSLIEIPLKASGFVFTRLDGSMAQKKRVESIQCFQNTEAGSPTIMLLSLKAGGVGLNLSAASRVFLMDPAWNPAAEDQCFDRCHRLGQKQEVIITKFIVKDSVEENMLKIQNKKRELAAGAFGTKKPNADEMKQAKINEIRTLIDL

SEQ ID NO: 8859 - protein, 1009 aa, Homo sapiens [sequence omitted]

SEQ ID NO: 8860 - protein, 1009 aa, Homo sapiens [sequence omitted]

SEQ ID NO: 8861 - protein, 1009 aa, Homo sapiens
MSWMFKRDPVWKYLQTVQYGVHGNFPRLSYPTFFPRFEFQDVIPPDDFLTSDEEVDSVLFGSLRGHVVGLRYYTGVVNNNEMVALQRDPNNPYDKNAIKVNNVNGNQVGHLKKELAGALAYIMDNKLAQIEGVVPFGANNAFTMPLHMTFWGKEENRKAVSDQLKKHGFKLGPAPKTLGFNLESGWGSGRAGPSYSMPVHAAVQMTTEQLKTEFDKLFEDLKEDDKTHEMEPAEAIETPLLPHQKQALAWMVSRENSKELPPFWEQRNDLYYNTITNFSEKDRPENVHGGILADDMGLGKTLTAIAVILTNFHDGRPLPIERVKKNLLKKEYNVNDDSMKLGGNNTSEKADGLSKDASRCSEQPSISDIKEKSKFRMSELSSSRPKRRKTAVQYIESSDSEEIETSELPQKMKGKLKNVQSETKGRAKAGSSKVIEDVAFACALTSSVPTTKKKMLKKGACAVEGSKKTDVEERPRTTLIICPLSVLSNWIDQFGQHIKSDVHLNFYVYYGPDRIREPALLSKQDIVLTTYNILTHDYGTKGDSPLHSIRWLRVILDEGHAIRNPNAQQTKAVLDLESERRWVLTGTPIQNSLKDLWSLLSFLKLKPFIDREWWHRTIQRPVTMGDEGGLRRLQSLIKNITLRRTKTSKIKGKPVLELPERKVFIQHITLSDEERKIYQSVKNEGRATIGRYFNEGTVLAHYADVLGLLLRLRQICCHTYLLTNAVSSNGPSGNDTPEELRKKLIRKMKLILSSGSDEECAICLDSLTVPVITHCAHVFCKPCICQVIQNEQPHAKCPLCRNDIHEDNLLECPPEELARDSEKKSDMEWTSSSKINALMHALTDLRKKNPNIKSLVVSQFTTFLSLIEIPLKASGFVFTRLDGSMAQKKRVESIQCFQNTEAGSPTIMLLSLKAGGVGLNLSAASRVFLMDPAWNPAAEDQCFDRCHRLGQKQEVIITKFIVKDSVEENMLKIQNKKRELAAGAFGTKKPNADEMKQAKINEIRTLIDL

SEQ ID NO: 8862 - protein, 887 aa, Homo sapiens [sequence omitted]

SEQ ID NO: 8863 - protein, 1009 aa, Homo sapiens [sequence omitted]

SEQ ID NO: 8864 - protein, 702 aa, Homo sapiens
MNLFNLDRFRFEKRNKIEEAPEATPQPSQPGPSSPISLSAEEENAEGEVSRANTPDSDITEKTEDSSVPETPDNERKASISYFKNQRGIQYIDLSSDSEDVVSPNCSNTVQEKTFNKDTVIIVSEPSEDEESQGLPTMARRNDDISELEDLSELEDLKDAKLQTLKELFPQRSDNDLLKLIESTSTMDGAIAAALLMFGDAGGGPRKRKLSSSSEPYEEDEFNDDQSIKKTRLDHGEESNESAESSSNWEKQESIVLKLQKEFPNFDKQELREVLKEHEWMYTEALESLKVFAEDQDMQYVSQSEVPNGKEVSSRSQNYPKNATKTKLKQKFSMKAQNGFNKKRKKNVFNPKRVVEDSEYDSGSDVGSSLDEDYSSGEEVMEDGYKGKILHFLQDASIGELTLIPQCSQKKAQKITELRPFNSWEALFTKMSKTNGLSEDLIWHCKTLIQERDVVIRLMNKCEDISNKLTKQVTMLTGNGGGWNIEQPSILNQSLSLKPYQKVGLNWLALVHKHGLNGILADEMGLGKTIQAIAFLAYLYQEGNNGPHLIVVPASTIDNWLREVNLWCPTLKVLCYYGSQEERKQIRFNIHSRYEDYNVIVTTYNCAISSSDDRSLFRRLKLNYAIFDEGHMLKNMGSIRYQHLMTINANNRLLLTGTPVQNNLLELMSLLNFVMPHMFSSSTSEIRRMFSSKTKSADEQSI

SEQ ID NO: 8865 - protein, 1668 aa, Homo sapiens
LLAPTSSHVPGLNSTVAPACSPVLVPASALASPFPSAPNPAPPLAPLPVLAPSPGAAPVLASSQTPVPVMAPSSTPGTSLASASPVPAPTPVLAPSSTQTMLPAPVPSPLPSPASTQTLALAPALAPTLGGSSPSQTLSLGTGNPQGPFPTQTLSLTPASSLVPTPAQTLSLAPGPPLGPTQTLSLAPAPPLAPASPVGPAPAHTLTLAPASSSASLLAPASVQTLTLSPAPVPTLGPAAAQTLALAPASTQSPASQASSLVVSASGAAPLPVTMVSRLPVSKDEPDTLTLRSGPPSPPSTATSFGGPRPRRQPPPPPRSPFYLDSLEEKRKRQRSERLERIFQLSEAHGALAPVYGTEVLDFCTLPQPVASPIGPRSPGPSHPTFWTYTEAAHRAVLFPQQRLDQLSEIIERFIFVMPPVEAPPPSLHACHPPPWLAPRQAAFQEQLASELWPRARPLHRIVCNMRTQFPDLRLIQYDCGKLQTLAVLLRQLKAEGHRVLIFTQMTRMLDVLEQFLTYHGHLYLRLDGSTRVEQRQALMERFNADKRIFCFILSTRSGGVGVNLTGADTVVFYDSDWNPTMDAQAQDRCHRIGQTRDVHIYRLISERTVEENILKKANQKRMLGDMAIEGGNFTTAYFKQQTIRELFDMPLEEPSSSSVPSAPEEEEETVASKQTHILEQALCRAEDEEDIRAATQAKAEQVAELAEFNENDGFPAGEGEEAGRPGAEDEEMSRAEQEIAALVEQLTPIERYAMKFLEASLEEVSREELKQAEEQVEAARKDLDQAKEEVFRLPQEEEEGPGAGDESSCGTGGGTHRRSKKAKAPERPGTRVSERLRGARAETQGANHTPVISAHQTRSTTTPPRCSPARERVPRPAPRPRPTPASAPAAIPALVPVPVSAPVPISAPNPITILPVHILPSPPPPSQIPPCSSPACTPPPACTPPPAHTPPPAQTCLVTPSSPLLLGPPSVPISASVTNLPLGLRPEAELCAQALASPESLELASVASSETSSLSLVPPKDLLPVAVEILPVSEKNLSLTPSAPSLTLEAGSIPNGQEQEAPDSAEGTTLTVLPEGEELPLCVSESNGLELPPSAASDEPLQEPLEADRTSEELTEAKTPTSSPEKPQELVTAEVAAPSTSSSATSSPEGPSPARPPRRRTSADVEIRGQGTGRPGQPPGPKVLRKLPGRLVTVVEEKELVRRRRQQRGAASTLVPGVSETSASPGSPSVRSMSGPESSPPIGGPCEAAPSSSLPTPPQQPFIARRHIELGVTGGGSPENGDGALLAITPPAVKRRRGRPPKKNRSPADAGRGVDEAPSSTLKGKTNGADPVPGPETLIVADPVLEPQLIPGPQPLGPQPVHRPNPLLSPVEKRRRGRPPKARDLPIPGTISSAGDGNSESRTQPPPHPSPLTPLPPLLVCPTATVANTVTTVTISTSPPKRKRGRPPKNPPSPRPSQLPVLDRDSTSVLESCGLGRRRQPQGQGESEGSSSDEDGSRPLTRLARLRLEAEGMRGRKSGGSMVVAVIQDDLDLADSGPGGLELTPPVVSLTPKLRSTRLRPGSLVPPLETEKLPRKRAGAPVGGSPGLAKRGRLQPPSPLGPEGSVEESEAEASGEEEEGDGTPRRRPGPRRLVGTTNQGDQRILRSSAPPSLAGPAVSHRGRKAKT

SEQ ID NO: 8866 - protein, 361 aa, Homo sapiens [sequence omitted]

SEQ ID NO: 8867 - protein, 978 aa, Homo sapiens
GNQVSLLNIMMDLKKCCNHPYLFPVAAVEAPVLPNGSYDGSSLVKSSGKLMLLQKMLKKLRDEGHRVLIFSQMTKMLDLLEDFLEYEGYKYERIDGGITGGLRQEAIDRFNAPGAQQFCFLLSTRAGGLGINLATADTVIIYDSDWNPHNDIQAFSRAHRIGQNKKVMIYRFVTRASVEERITQVAKRKMMLTHLVVRPGLGSKSGSMTKQELDDILKFGTEELFKDDVEGMMSQGQRPVTPIPDVQSSKGGNLAASAKKKHGSTPPGDNKDVEDSSVIHYDDAAISKLLDRNQDATDDTELQNMNEYLSSFKVAQYVVREEDGVEEVEREIIKQEENVDPDYWEKLLRHHYEQQQEDLARNLGKGKRIRKQVNYNDASQEDQEWQDELSDNQSEYSIGSEDEDEDFEERPEGQSGRRQSRRQLKSDRDKPLPPLLARVGGNIEVLGFNARQRKAFLNAIMRWGMPPQDAFNSHWLVRDLRGKSEKEFRAYVSLFMRHLCEPGADGAETFADGVPREGLSRQHVLTRIGVMSLVRKKVQEFEHVNGKYSTPDLIPEGPEGKKPGEVISSDPNTPVPASPAHLLPAPLGLPDKMEAQLGYMDEKDPGAQKPRQPLEVQALPAALDRVESEDKHESPASKERAREERPEETEKAPPSPEQLPREEVLPEKEKILDKLELSLIHSRGDSSELRPDDTKAEEKEPIETQQNGDKEEDDEGKKEDKKGKFKFMFNIADGGFTELHTLWQNEERAAVSSGKIYDIWHRRHDYWLLAGIVTHGYARWQDIQNDPRYMILNEPFKSEVHKGNYLEMKNKFLARRFKLLEQALVIEEQLRRAAYLNMTQDPNHPAMALNARLAEVECLAESHQHLSKESLAGNKPANAVLHKVLNQLEELLSDMKADVTRLPSMLSRIPPVAARLQMSERSILSRLTNRAGDPTIQQGAFGSSQMYSNNFGPNFRGPGPGGIVNYNQMPLGPYVTDI

SEQ ID NO: 8868 - protein, 2041 aa, Homo sapiens
LKPMMLRRLKDDVEKNLAPKQETIIEVELTNIQKKYYRAILEKNFSFLTKGANQHNMPNLINTMMELRKCCNHPYLINGAEEKILEDFRKTHSPDAPDFQLQAMIQAAGKLVLIDKLLPKLIAGGHKVLIFSQMVRCLDILEDYLIQRRYTYERIDGRVRGNLRQAAIDRFCKPDSDRFVFLLCTRAGGLGINLTAADTCIIFDSDWNPQNDLQAQARCHRIGQSKAVKVYRLITRNSYEREMFDKASLKLGLDKAVLQDINRKGGTNGVQQLSKMEVEDLLRKGAYGALMDEEDEGSKFCEEDIDQILQRRTHTITIQSEGKGSTFAKASFVASGNRTDISLDDPNFWQKWAKIAELDTEAKNEKESLVIDRPRVRKQTKHYNSFEEDELMEFSELDSDSDERPTRSRRLNDKARRYLRAECFRVEKNLLIFGWGRWKDILTHGRFKWHLNEKDMEMICRALLVYCVKHYKGDEKIKSFIWELITPTKDGQAQTLQNHSGLSAPVPRGRKGKKTKNQLLIPELKDADWLATCNPEVVLHDDGYKKHLKQHCNKVLLRVRMLYYLKAEILGEAAEKAFEGSPARELDVPLPDIDYMEIPVDWWDAEADKSLLIGVFKHGYERYNAMRADPALCFLEKVGMPDEKSLSAEQGVTDGTSDIPERGNTDKEDNAEDKVDGLQKQTESSSDGGDGVFSEKKDDSRAAQDGSDPDKSPWPVSSALTARLRRLVTVYQRCNRKELCRPEILGPGNQGYWVQEEMFRRTSEMDLINKEAQKRWTRREQADFYRTVSSFGVVYDQEKKTFDWTQFRIISRLDKKSDESLEQYFYSFVAMCRNVCRLPTWKDGGPPDTTIYVEPITEERAARTLYRIELLRKVREQVLKCPQLHERLQLCRPSLYLPVWWECGKHDRDLLIGTAKHGLNRTDCYIMNDPQLSFLDAYRNYAQHKRSGTQAPGNLCCLYQTNSKLYESLTYSQMSRTSESLENEPENLVRVESRDDHLSLPDVTCENFISKVQDVISINHDESLLPESLESMMYGKKVLSQEPSSFQESPSTNTESRKDVITISISKDGNCQSGGPEAEIASGPTFMGSLEAGGVAQANIKNGKHLLMSISKEGELCCSEAGQRPENIGQLEAKCLASPSLNPGNESGFVDMCSLSVCDSKRNLSSDQQLIDLLENKSLESKLILSQNHSDEEEEEEENEEENLAMAVGMGERPEVLHLTEPTTNISREKNQGFQDETKKGSLEVANQTPGLQRAFPAPAACQCHCKHMERWMHGLENDEFEIEKPKAYIPDLFKSKTNTIAMEGEPTAIPSQPFKVKHELLKEPWKESAEGQNVFPTYPLEGSELKSEDMDFENKDDYDRDGNCHSQDYPGKYSEEESKSSTSGITGDIGDELQEARAPTIAQLLQEKTLYSFSEWPKDRVIINRLDNICHVVLKGKWPSSQQYEPSGTLPTPVLTSSAGSRTSLSEPEAAEHSFSNGAALAAQIHKESFLAPVFTKDEQKHRRPYEFEVERDAKARGLEQFSATHGHTPIILNGWHGESAMDLSCSSEGSPGATSPFPVSASTPKIGAISSLQGALGMDLSGILQAGLIHPVTGQIVNGSLRRDDAATRRRRGRRKHVEGGMDLIFLKEQTLQAGILEVHEDPGQATLSTTHPEGPGPATSAPEPATAASSQAEKSIPSKSLLDWLRQQADYSLEVPGFGANFSDKPKQRRPRCKEPGKLDVSSLSGEERVPAIPKEPGLRGFLPENKFNHTLAEPILRDTGPRRRGRRPRSELLKAPSIVADSPSGMGPLFMNGLIAGMDLVGLQNMRNMPGIPLTGLVGFPAGFATMPTGEEVKSTLSMLPMMLPGMAAVPQMFGVGGLLSPPMATTCTSTAPASLSSTTKSGTAVTEKTAEDKPSSHDVKTDTLAEDKPGPGPFSDQSEPAITTSSPVAFNPFLIPGVSPGLIYPSMFLSPGMGMALPAMQQARHSEIVGLESQKRKKKKTKGDNPNSHPEPAPSCEREPSGDENCAEPSAPLPAEREHGAQAGEGALKDSNNDTN

SEQ ID NO: 8869 - protein, 205 aa, Homo sapiens
MGLGKTVQVISFLAAVLHKKGTREDIENNMPEFLLRSMKKEPLSSTAKKMFLIVAPLSVLYNWKDELDTWGYFRVTVLHGNRKDNELIRVKQRKCEIALTTYETLRLCLDELNSLEWSAVIVDEAHRIKNPKARVTEVMKALKCNVRIGLTGTILQNNMKELWCVMDWAVPGLLGSGTYFKKQFSDPVEHGQRHTATKRELATGR

SEQ ID NO: 8870 - protein, 954 aa, Homo sapiens
MSLPLTEEQRKKIEENRQKALGRRAEKLLAEQHQRTSSGTSIAGNPFQAKQGPSQNFPRESCKPVSHGVIFKQQNLSSSSNADQRPHDSHSFQAKGIWKKPEEMPTACPGHSPRSQMALTGISPPLAQSPPEVPKQQLLSYELGQGHAQASPEIRFTPFANPTHKPLAKPKSSQETPAHSSGQPPRDAKLEAKTAKASPSGQNISYIHSSSESVTPRTEGRLQQKSGSSVQKGVNSQKGKCVRNGDRFQVLIGYNAELIAVFKTLPSKNYDPDTKTWNFSMNDYSALMKAAQSLPTVNLQPLEWAYGSSESPSTSSEGQAGLPSAPSLSFVKGRCMLISRAYFEADISYSQDLIALFKQMDSRRYDVKTRKWSFLLQEHSKLIAKVRCLPQVQLDPLPTTLTLAFASQLKKTSLSLTPDVPEADLSEVDPKLVSNLMPFQRAGVNFAIAKGGRLLLADDMGLGKTIQAICIAAFYRKEWPLLVVVPSSVRFTWEQAFLRWLPSLSPDCINVVVTGKDRLTAGLINIVSFDLLSKLEKQLKTPFKVVIIDESHFLKNSRTARCRAAMPVLKVAKRVILLSGTPAMSRPAELYTQIIAVKPTFFPQFHAFGLRYCDAKRMPWGWDYSGSSNLGELKLLLEEAVMLRRLKSDVLSQLPAKQRKIVVIAPGRINARTRAALDAAAKEMTTKDKTKQQQKDALILFFNRTAEAKIPSVIEYILDLLESGREKFLVFAHHKVVLDAITQELERKHVQHIRIDGSTSSAEREDLCQQFQLSERHAVAVLSITAANMGLTFSSADLVVFAELFWNPGVLIQAEDRVHRIGQTSSVGIHYLVAKGTADDYLWPLIQEKIKVLAEAGLSETNFSEMTESTDYLYKDPKQQKIYDLFQKSFEKEGSDMELLEAAESFDPGSASGTSGSSSQNMGDTLDESSLTASPQKKRRFEFFDNWDSFTSPL

SEQ ID NO: 8871 - protein, 954 aa, Homo sapiens [sequence omitted]

SEQ ID NO: 8872 - protein, 808 aa, Homo sapiens
HAQASPEIRFTPFANPTHKPLAKPKSSQETPAHSSGQPPRDAKLEAKTAKASPSGQNISYIHSSSESVTPRTEGRLQQKSGSSVQKGVNSQKGKCVRNGDRFQVLIGYNAELIAVFKTLPSKNYDPDTKTWNFSMNDYSALMKAAQSLPTVNLQPLEWAYGSSESPSTSSEGQAGLPSAPSLSFVKGRCMLISRAYFEADISYSQDLIALFKQMDSRRYDVKTRKWSFLLEEHSKLIAKVRCLPQVQLDPLPTTLTLAFASQLKKTSLSLTPDVPEADLSEVDPKLVSNLMPFQRAGVNFAIAKGGRLLLADDMGLGKTIQAICIAAFYRKEWPLLVVVPSSVRFTWEQAFLRWLPSLSPDCINVVVTGKDRLTAGLINIVSFDLLSKLEKQLKTPFKVVIIDESHFLKNSRTARCRAAMPVLKVAKRVILLSGTPAMSRPAELYTQIIAVKPTFFPQFHAFGLRYCDAKRMPWGWDYSGSSNLGELKLLLEEAVMLRRLKSDVLSQLPAKQRKIVVIAPGRINARTRAALDAAAKEMTTKDKTKQQQKDALILFFNRTAEAKIPSVIEYILDLLESGREKFLVFAHHKVVLDAITQELERKHVQHIRIDGSTSSAEREDLCQQFQLSERHAVAVLSITAANMGLTFSSADLVVFAELFWNPGVLIQAEDRVHRIGQTSSVGIHYLVAKGTADDYLWPLIQEKIKVLAEAGLSETNFSEMTESTDYLYKDPKQQKIYDLFQKSFEKEGSDMELLEAAESFDPGSASGTSGSSSQNMGDTLDESSLTASPQKKRRFEFFDNWDSFTSPL

SEQ ID NO: 8873 - protein, 954 aa, Homo sapiens
MSLPLTEEQRKKIEENRQKALARRAEKLLAEQHQRTSSGTSIAGNPFQAKQGPSQNFPRESCKPVSHGVIFKQQNLSSSSNADQRPHDSHSFQAKGIWKKPEEMPTACPGHSPRSQMALTGISPPLAQSPPEVPKQQLLSYELGQGHAQASPEIRFTPFANPTHKPLAKPKSSQETPAHSSGQPPRDAKLEAKTAKASPSGQNISYIHSSSESVTPRTEGRLQQKSGSSVQKGVNSQKGKCVRNGDRFQVLIGYNAELIAVFKTLPSKNYDPDTKTWNFSMNDYSALMKAAQSLPTVNLQPLEWAYGSSESPSTSSEGQAGLPSAPSLSFVKGRCMLISRAYFEADISYSQDLIALFKQMDSRRYDVKTRKWSFLLEEHSKLIAKVRCLPQVQLDPLPTTLTLAFASQLKKTSLSLTPDVPEADLSEVDPKLVSNLMPFQRAGVNFAIAKGGRLLLADDMGLGKTIQAICIAAFYRKEWPLLVVVPSSVRFTWEQAFLRWLPSLSPDCINVVVTGKDRLTAGLINIVSFDLLSKLEKQLKTPFKVVIIDESHFLKNSRTARCRAAMPVLKVAKRVILLSGTPAMSRPAELYTQIIAVKPTFFPQFHAFGLRYCDAKRMPWGWDYSGSSNLGELKLLLEEAVMLRRLKSDVLSQLPAKQRKIVVIAPGRINARTRAALDAAAKEMTTKDKTKQQQKDALILFFNRTAEAKIPSVIEYILDLLESGREKFLVFAHHKVVLDAITQELERKHVQHIRIDGSTSSAEREDLCQQFQLSERHAVAVLSITAANMGLTFSSADLVVFAELFWNPGVLIQAEDRVHRIGQTSSVGIHYLVAKGTADDYLWPLIQEKIKVLAEAGLSETNFSEMTESTDYLYKDPKQQKIYDLFQKSFEKEGSDMELLEAAESFDPGSASGTSGSSSQNMGDTLDESSLTASPQKKRRFEFFDNWDSFTSPL

SEQ ID NO: 8874 - protein, 619 aa, Homo sapiens [sequence omitted]

SEQ ID NO: 8875 - protein, 348 aa, Homo sapiens
MFGSSEKETIELSPTGRPKRRTRKSINYSKIDDFPNELEKLISQIQPEVDRERAVVEVNIPVESEVNLKLQNIMMLLRKCCNHPYLIEYPIDPVTQEFKIDEELVTNSGKFLILDRMLPELKKRGHKVLLFSQMTSMLDILMDYCHLRDFNFSRLDGSMSYSEREKNMHSFNTDPEVFIFLVSTRAGGLGINLTAADTVIIYDSDWNPQSDLQAQDRCHRIGQTKPVVVYRLVTANTIDQKIVERAAAKRKLEKLIIHKNHFKGGQSGLNLSKNFLDPKELMELLKSRDYEREIKGSREKVISDKDLELLLDRSDLIDQMNASGPIKEKMGIFKILENSEDSSPECLF

SEQ ID NO: 8876 - protein, 306 aa, Homo sapiens
MMLLRKCCNHPYLIEYPIDPVTQEFKIDEELVTNSGKFLILDRMLPELKKRGHKVLLFSQMTSMLDILMDYCHLRDFNFSRLDGSMSYSEREKNMHSFNTDPEVFIFLVSTRAGGLGINLTAADTVIIYDSDWNPQSDLQAQDRCHRIGQTKPVVVYRLVTANTIDQKIVERAAAKRKLEKLIIHKNHFKGGQSGLNLSKNFLDPKELMELLKSRDYEREIKGSREKVISDKDLELLLDRSDLIDQMNASGPIKEKMGIFKILENSEDSSPELLRIRHRHIWEHGVARSFAFSCSYCTQTCFYIFH

SEQ ID NO: 8877 - protein, 310 aa, Homo sapiens
MMLLRKCCNHPYLIEYPIDPVTQEFKIDEELVTNSGKFLILDRMLPELKKRGHKVLLFSQMTSMLDILMDYCHLRDFNFSRLDGSMSYSEREKNMHSFNTDPEVFIFLVSTRAGGLGINLTAADTVIIYDSDWNPQSDLQAQDRCHRIGQTKPVVVYRLVTANTIDQKIVERAAAKRKLEKLIIHKNHFKGGQSGLNLSKNFLDPKELMELLKSRDYEREIKGSREKVISDKDLELLLDRSDLIDQMNASGPIKEKMGIFKILENSEDSSPELETGFHHLGLTGPELISGDLPTSASQSAGITSVSHCVA

SEQ ID NO: 8878 - protein, 1298 aa, Homo sapiens
MVVTLLIRDSTRIELRERRNLSSKRNTKEIQSGSSSSDAEESSEDNKKKKQRTSSKKKAVIVKEKKRNSLRTSTKRKQADITSSSSSDIEDDDQNSIGEGSSDEQKIKPVTENLVLSSHTGFCQSSGDEALSKSVPVTVDDDDDDNDPENRIAKKMLLEEIKANLSSDEDGSSDDEPEEGKKRTGKQNEENPGDEEAKNQVNSESDSDSEDLRAKIQHRLFGTNWLLSFGESGEEKKTKPKEHKEVKGRNRRKVSSEDSEDSDFQESGVSEEVSESEDEQRPRTRSAKKAELEENQRIYKQKKKRRRIKVQEDSSSENKSNSEEEEEEKEEEEEEEEEEEEEEEDENDDSKSPGKGRKKIRKILKDDKLRTETQNALKEEERKERRKRVRERETEKLREVIEIEDASPTKCPITTKLVLDEDEETKEPLVQVHRNMVIKLKPHQVDGVQFMWDCCCESVKKTKKSPGSGCILAHCMGLGKTLQVVSFLHTVLLCDKLDFSTALVGLSSSILAFNWMNEFEKWQEGLKDDEKLEVSELATVKRPQERSYMLQRWQEDGGVMIIGYEMYRNLAQGRNVKSRKLKEIFNKALVDPGPDFVVCDEGHILKNEASAVSKAMNSIRSRRRIILTGTPLQNNLIEYHCMVNFIKENLLGSIKEFRNRFINPIQNGQCADSTMVDVRVMKKRAHILYEMLAGCVQRKDYTALTKFLPPKHEYVLAVRMTSIQCKLYAGAKLFQDFQMLSRIWTHPWCLQLDYISKENKGYFDEDSMDEFIASDSDETSMSLSSDDYTKKKKKGKKGKKDSSSSGSGSDNDVEVIKVWNSRSRGGGEGNVDETGNNPSVSLKLEESKATSSSNPSSPAPDWYKDFVTDADAEVLEHSGKMVLLFEILRMAEEIGDKVLVFSQSLISLDLIEDFLELADKSREKTEDKPLIYKGEGKWLRNIDYYRLDGSTTAQSRKKWAEEFNDETNVRGRLFIISTKAGSLGINLVAANRVIIFDASWNPSYDIQSIFRVYRFGQTKPVYVYRFLAQGTMEDKIYDRQVTKQSLSFRVVDQQQVERHFTMNELTELYTFEPDLLDDPNSEKKKKRRDTPMLPKDTILAELLQIHKEHIVGYHEHDLFWTTKEEGELTEEERKAAWAEYEAEKKVLTMRFNIPTGTNLPPVSFNSQTPYIPFNLGALSAMSNQQLEDLINQGREKVVEATNSVTAVRIQPLEDIISAVWKENMKLTEAQVQALALSRQASQELDVKRREAIYNDVLTKQQMLISCVQRILMNRRLQQQYNQQQQQQMTYQQQHWVTT

SEQ ID NO: 8879 - protein, 1385 aa, Homo sapiens
EQLRRHQGKNLASEDPKKKRAQKPSHMRRNIRKLLREDQLQPVTKAAQQEELERRKRLEQQRKDYAAPIPTVPLEFLPEEIALRASDGPQLPPRVLAQEVICLDSSSGSEDEKSSRDEVIELSSGEEDTLHIVDSSESVSEDDEEEEKGGTHVNDVLNQRDALGRVLVNLNHPPEEENVFLAPQLARAVKPHQIGGIRFLYDNLVESLERFKTSSGFGCILAHSMGLGKTLQVISFIDVLFRHTPVKTVLAIVPVNTLQNWLAEFNMWLPPPEALPADNKPEEVQPRFFKVHILNDEHKTMASRAKVMADWVSEGGVLLMGYEMYRLLTLKKSFATGRPKKTKKRSHPVIIDLDEEDRQQEFRREFEKALCRPGPDVVICDEGHRIKNCQASTSQALKNIRSRRRVVLTGYPLQNNLIEYWCMVDFVRPDFLGTRQEFSNMFERPILNGQCIDSTPQDVRLMRYRSHVLHSLLEGFVQRRGHTVLKIHLPAKEENVILVRLSKIQRDLYTQFMDRFRDCGSSGWLGLNPLKAFCVCCKIWNHPDVLYEALQKESLANEQDLDVEELGSAGTSARCPPQGTKGKGEDSTLASSMGEATNSKFLQGVGFNPFQERGNNIVTYEWAKDLLTNYQTGVLENSPKMVLLFHLIEESVKLGDKILVFSQSLSTLALIEEFLGKREVPCPPGTEGQGAQKWVRNISYFRLDGSTPAFERERLINQFNDPSNLTTWLFLLSTRAGCLGVNLIGANRVVVFDASWNPCHDAQAVCRVYRYGQKKPCYIYRLVADYTLEKKIYDRQISKQGMSDRVVDDLNPMLNFTRKEVENLLHFVEKEPAPQVSLNVKGIKESVLQLACLKYPHLITKEPFEHESLLLNRKDHKLTKAEKKAAKKSYEEDKRTSVPYTRPSYAQYYPASDQSLTSIPAFSQRNWQPTLKGDEKPVASVRPVQSTPIPMMPRHVPLGGSVSSASSTNPSMNFPINYLQRAGVLVQKVVTTTDIVIPGLNSSTDVQARINAGESIHIIRGTKGTYIRTSDGRIFAVRATGKPKVPEDGRMAASGSQGPSCESTSNGRHSASSPKAPDPEGLARPVSPDSPEIISELQQYADVAAARESRQSSPSTNAALPGPPAQLMDSSAVPGTALGTEPRLGGHCLNSSLLVTGQPCGDRHPVLDLRGHKRKLATPPAAQESSRRRSRKGHLPAPVQPYEHGYPVSGGFAMPPVSLNHNLTTPFTSQAGENSLFMGSTPSYYQLSNLLADARLVFPVTTDPLVPAGPVSSSSTATSVTASNPSFMLNPSVPGILPSYSLPFSQPLLSEPRMFAPFPSPVLPSNLSRGMSIYPGYMSPHAGYPAGGLLRSQVPPFDSHEVAEVGFSSNDDEDKDDDVIEVTGK

SEQ ID NO: 8880 - protein, 2375 aa, Homo sapiens
MQSLPKGTVIVQPEPVLNEDKDDFKGPEFRSRSKMKTENLKKRGEDGLHGIVSCTACGQQVNHFQKDSIYRHPSLQVLICKNCFKYYMSDDISRDSDGMDEQCRWCAEGGNLICCDFCHNAFCKKCILRNLGRKELSTIMDENNQWYCYICHPEPLLDLVTACNSVFENLEQLLQQNKKKIKVDSEKSNKVYEHTSRFSPKKTSSNCNGEEKKLDDSCSGSVTYSYSALIVPKEMIKKAKKLIETTANMNSSYVKFLKQATDNSEISSATKLRQLKAFKSVLADIKKAHLALEEDLNSEFRAMDAVNKEKNTKEHKVIDAKFETKARKGEKPCALEKKDISKSEAKLSRKQVDSEHMHQNVPTEEQRTNKSTGGEHKKSDRKEEPQYEPANTSEDLDMDIVSVPSSVPEDIFENLETAMEVQSSVDHQGDGSSGTEQEVESSSVKLNISSKDNRGGIKSKTTAKVTKELYVKLTPVSLSNSPIKGADCQEVPQDKDGYKSCGLNPKLEKCGLGQENSDNEHLVENEVSLLLEESDLRRSPRVKTTPLRRPTETNPVTSNSDEECNETVKEKQKLSVPVRKKDKRNSSDSAIDNPKPNKLPKSKQSETVDQNSDSDEMLAILKEVSRMSHSSSSDTDINEIHTNHKTLYDLKTQAGKDDKGKRKRKSSTSGSDFDTKKGKSAKSSIISKKKRQTQSESSNYDSELEKEIKSMSKIGAARTTKKRIPNTKDFDSSEDEKHSKKGMDNQGHKNLKTSQEGSSDDAERKQERETFSSAEGTVDKDTTIMELRDRLPKKQQASASTDGVDKLSGKEQSFTSLEVRKVAETKEKSKHLKTKTCKKVQDGLSDIAEKFLKKDQSDETSEDDKKQSKKGTEEKKKPSDFKKKVIKMEQQYESSSDGTEKLPEREEICHFPKGIKQIKNGTTDGEKKSKKIRDKTSKKKDELSDYAEKSTGKGDSCDSSEDKKSKNGAYGREKKRCKLLGKSSRKRQDCSSSDTEKYSMKEDGCNSSDKRLKRIELRERRNLSSKRNTKEIQSGSSSSDAEESSEDNKKKKQRTSSKKKAVIVKEKKRNSLRTSTKRKQADITSSSSSDIEDDDQNSIGEGSSDEQKIKPVTENLVLSSHTGFCQSSGDEALSKSVPVTVDDDDDDNDPENRIAKKMLLEEIKANLSSDEDGSSDDEPEEGKKRTGKQNEENPGDEEAKNQVNSESDSDSEESKKPRYRHRLLRHKLTVSDGESGEEKKTKPKEHKEVKGRNRRKVSSEDSEDSDFQESGVSEEVSESEDEQRPRTRSAKKAELEENQRSYKQKKKRRRIKVQEDSSSENKSNSEEEEEEKEEEEEEEEEEEEEEEDENDDSKSPGKGRKKIRKILKDDKLRTETQNALKEEEERRKRIAEREREREKLREVIEIEDASPTKCPITTKLVLDEDEETKEPLVQVHRNMVIKLKPHQVDGVQFMWDCCCESVKKTKKSPGSGCILAHCMGLGKTLQVVSFLHTVLLCDKLDFSTALVVCPLNTALNWMNEFEKWQEGLKDDEKLEVSELATVKRPQERSYMLQRWQEDGGVMIIGYEMYRNLAQGRNVKSRKLKEIFNKALVDPGPDFVVCDEGHILKNEASAVSKAMNSIRSRRRIILTGTPLQNNLIEYHCMVNFIKENLLGSIKEFRNRFINPIQNGQCADSTMVDVRVMKKRAHILYEMLAGCVQRKDYTALTKFLPPKHEYVLAVRMTSIQCKLYQYYLDHLTGVGNNSEGGRGKAGAKLFQDFQMLSRIWTHPWCLQLDYISKENKGYFDEDSMDEFIASDSDETSMSLSSDDYTKKKKKGKKGKKDSSSSGSGSDNDVEVIKVWNSRSRGGGEGNVDETGNNPSVSLKLEESKATSSSNPSSPAPDWYKDFVTDADAEVLEHSGKMVLLFEILRMAEEIGDKVLVFSQSLISLDLIEDFLELASREKTEDKDKPLIYKGEGKWLRNIDYYRLDGSTTAQSRKKWAEEFNDETNVRGRLFIISTKAGSLGINLVAANRVIIFDASWNPSYDIQSIFRVYRFGQTKPVYVYRFLAQGTMEDKIYDRQVTKQSLSFRVVDQQQVERHFTMNELTELYTFEPDLLDDPNSEKKKKRDTPMLPKDTILAELLQIHKEHIVGYHEHDSLLDHKEEEELTEEERKAAWAEYEAEKKGLTMRFNIPTGTNLPPVSFNSQTPYIPFNLGALSAMSNQQLEDLINQGREKVVEATNSVTAVRIQPLEDIISAVWKENMNLSEAQVQALALSRQASQELDVKRREAIYNDVLTKQQMLISCVQRILMNRRLQQQYNQQQQQQMTYQQATLGHLMMPKPPNLIMNPSNYQQIDMRGMYQPVAGGMQPPPLQRAPPPMRSKNPGPSQGKSM

SEQ ID NO: 8881 - protein, 2375 aa, Homo sapiens
MQSLPKGTVIVQPEPVLNEDKDDFKGPEFRSRSKMKTENLKKRGEDGLHGIVSCTACGQQVNHFQKDSIYRHPSLQVLICKNCFKYYMSDDISRDSDGMDEQCRWCAEGGNLICCDFCHNAFCKKCILRNLGRKELSTIMDENNQWYCYICHPEPLLDLVTACNSVFENLEQLLQQNKKKIKVDSEKSNKVYEHTSRFSPKKTSSNCNGEEKKLDDSCSGSVTYSYSALIVPKEMIKKAKKLIETTANMNSSYVKFLKQATDNSEISSATKLRQLKAFKSVLADIKKAHLALEEDLNSEFRAMDAVNKEKNTKEHKVIDAKFETKARKGEKPCALEKKDISKSEAKLSRKQVDSEHMHQNVPTEEQRTNKSTGGEHKKSDRKEEPQYEPANTSEDLDMDIVSVPSSVPEDIFENLETAMEVQSSVDHQGDGSSGTEQEVESSSVKLNISSKDNRGGIKSKTTAKVTKELYVKLTPVSLPNSPIKGADCQEVPQDKDGYKSCGLNPKLEKCGLGQENSDNEHLVENEVSLLLEESDLRRSPRVKTTPLRRPTETNPVTSNSDEECNETVKEKQKLSVPVRKKDKRNSSDSAIDNPKPNKLPKSKQSETVDQNSDSDEMLAILKGVSRMSHSSSSDTDINEIHTNHKTLYDLKTQAGKDDKGKRKRKSSTSGSDFDTKKGKSAKSSIISKKKRQTQSESSNYDSELEKEIKSMSKIGAARTTKKRIPNTKDFDSSEDEKHSKKGMDNQGHKNLKTSQEGSSDDAERKQERETFSSAEGTVDKDTTIMELRDRLPKKQQASASTDGVDKLSGKEQSFTSLEVRKVAETKEKSKHLKTKTCKKVQDGLSDIAEKFLKKDQSDETSEDDKKQSKKGTEEKKKPSDFKKKVIKMEQQYESSSDGTEKLPEREEICHFPKGIKQIKNGTTDGEKKSKKIRDKTSKKKDELSDYAEKSTGKGDSCDSSEDKKSKNGAYGREKKRCKLLGKSSRKRQDCSSSDTEKYSMKEDGCNSSDKRLKRIELRERRNLSSKRNTKEIQSGSSSSDAEESSEDNKKKKQRTSSKKKAVIVKEKKRNSLRTSTKRKQADITSSSSSDIEDDDQNSIGEGSSDEQKIKPVTENLVLSSHTGFCQSSGDEALSKSVPVTVDDDDDDNDPENRIAKKMLLEEIKANLSSDEDGSSDDEPEEGKKRTGKQNEENPGDEEAKNQVNSESDSDSEESKKPRYRHRLLRHKLTVSDGESGEEKKTKPKEHKEVKGRNRRKVSSEDSEDSDFQESGVSEEVSESEDEQRPRTRSAKKAELEENQRSYKQKKKRRRIKVQEDSSSENKSNSEEEEEEKEEEEEEEEEEEEEEEDENDDSKSPGKGRKKIRKILKDDKLRTETQNALKEEEERRKRIAEREREREKLREVIEIEDASPTKCPITTKLVLDEDEETKEPLVQVHRNMVIKLKPHQVDGVQFMWDCCCESVKKTKKSPGSGCILAHCMGLGKTLQVVSFLHTVLLCDKLDFSTALVVCPLNTALNWMNEFEKWQEGLKDDEKLEVSELATVKRPQERSYMLQRWQEDGGVMIIGYEMYRNLAQGRNVKSRKLKEIFNKALVDPGPDFVVCDEGHILKNEASAVSKAMNSIRSRRRIILTGTPLQNNLIEYHCMVNFIKENLLGSIKEFRNRFINPIQNGQCADSTMVDVRVMKKRAHILYEMLAGCVQRKDYTALTKFLPPKHEYVLAVRMTSIQCKLYQYYLDHLTGVGNNSEGGRGKAGAKLFQDFQMLSRIWTHPWCLQLDYISKENKGYFDEDSMDEFIASDSDETSMSLSSDDYTKKKKKGKKGKKDSSSSGSGSDNDVEVIKVWNSRSRGGGEGNVDETGNNPSVSLKLEESKATSSSNPSSPAPDWYKDFVTDADAEVLEHSGKMVLLFEILRMAEEIGDKVLVFSQSLISLDLIEDFLELASREKTEDKDKPLIYKGEGKWLRNIDYYRLDGSTTAQSRKKWAEEFNDETNVRGRLFIISTKAGSLGINLVAANRVIIFDASWNPSYDIQSIFRVYRFGQTKPVYVYRFLAQGTMEDKIYDRQVTKQSLSFRVVDQQQVERHFTMNELTELYTFEPDLLDDPNSEKKKKRDTPMLPKDTILAELLQIHKEHIVGYHEHDSLLDHKEEEELTEEERKAAWAEYEAEKKVLTMRFNIPTGTNLPPVSFNSQTPYIPFNLGALSAMSNQQLEDLINQGREKVVEATNSVTAVRIQPLEDIISAVWKENMNLSEAQVQALALSRQASQELDVKRREAIYNDVLTKQQMLISCVQRILMNRRLQQQYNQQQQQQMTYQQATLGHLMMPKPPNLIMNPSNYQQIDMRGMYQPVAGGMQPPPLQRAPPPMRSKNPGPSQGKSM

SEQ ID NO: 8882 - protein, 2492 aa, Homo sapiens
MTAEPMSESKLNTLVQKLHDFLAHSSEESEETSSPPRLAMNQNTDKISGSGSNSDMMENSKEEGTSSSEKSKSSGSSRSKRKPSIVTKYVESDDEKPLDDETVNEDASNENSENDITMQSLPKGTVIVQPEPVLNEDKDDFKGPEFRSRSKMKTENLKKRGEDGLHGIVSCTACGQQVNHFQKDSIYRHPSLQVLICKNCFKYYMSDDISRDSDGMDEQCRWCAEGGNLICCDFCHNAFCKKCILRNLGRKELSTIMDENNQWYCYICHPEPLLDLVTACNSVFENLEQLLQQNKKKIKVDSEKSNKVYEHTSRFSPKKTSSNCNGEEKKLDDSCSGSVTYSYSALIVPKEMIKKAKKLIETTANMNSSYVKFLKQATDNSEISSATKLRQLKAFKSVLADIKKAHLALEEDLNSEFRAMDAVNKEKNTKEHKVIDAKFETKARKGEKPCALEKKDISKSEAKLSRKQVDSEHMHQNVPTEEQRTNKSTGGEHKKSDRKEEPQYEPANTSEDLDMDIVSVPSSVPEDIFENLETAMEVQSSVDHQGDGSSGTEQEVESSSVKLNISSKDNRGGIKSKTTAKVTKELYVKLTPVSLSNSPIKGADCQEVPQDKDGYKSCGLNPKLEKCGLGQENSDNEHLVENEVSLLLEESDLRRSPRVKTTPLRRPTETNPVTSNSDEECNETVKEKQKLSVPVRKKDKRNSSDSAIDNPKPNKLPKSKQSETVDQNSDSDEMLAILKEVSRMSHSSSSDTDINEIHTNHKTLYDLKTQAGKDDKGKRKRKSSTSGSDFDTKKGKSAKSSIISKKKRQTQSESSNYDSELEKEIKSMSKIGAARTTKKRIPNTKDFDSSEDEKHSKKGMDNQGHKNLKTSQEGSSDDAERKQERETFSSAEGTVDKDTTIMELRDRLPKKQQASASTDGVDKLSGKEQSFTSLEVRKVAETKEKSKHLKTKTCKKVQDGLSDIAEKFLKKDQSDETSEDDKKQSKKGTEEKKKPSDFKKKVIKMEQQYESSSDGTEKLPEREEICHFPKGIKQIKNGTTDGEKKSKKIRDKTSKKKDELSDYAEKSTGKGDSCDSSEDKKSKNGAYGREKKRCKLLGKSSRKRQDCSSSDTEKYSMKEDGCNSSDKRLKRIELRERRNLSSKRNTKEIQSGSSSSDAEESSEDNKKKKQRTSSKKKAVIVKEKKRNSLRTSTKRKQADITSSSSSDIEDDDQNSIGEGSSDEQKIKPVTENLVLSSHTGFCQSSGDEALSKSVPVTVDDDDDDNDPENRIAKKMLLEEIKANLSSDEDGSSDDEPEEGKKRTGKQNEENPGDEEAKNQVNSESDSDSEESKKPRYRHRLLRHKLTVSDGESGEEKKTKPKEHKEVKGRNRRKVSSEDSEDSDFQESGVSEEVSESEDEQRPRTRSAKKAELEENQRSYKQKKKRRRIKVQEDSSSENKSNSEEEEEEKEEEEEEEEEEEEEEEDENDDSKSPGKGRKKIRKILKDDKLRTETQNALKEEEERRKRIAEREREREKLREVIEIEDASPTKCPITTKLVLDEDEETKEPLVQVHRNMVIKLKPHQVDGVQFMWDCCCESVKKTKKSPGSGCILAHCMGLGKTLQVVSFLHTVLLCDKLDFSTALVVCPLNTALNWMNEFEKWQEGLKDDEKLEVSELATVKRPQERSYMLQRWQEDGGVMIIGYEMYRNLAQGRNVKSRKLKEIFNKALVDPGPDFVVCDEGHILKNEASAVSKAMNSIRSRRRIILTGTPLQNNLIEYHCMVNFIKENLLGSIKEFRNRFINPIQNGQCADSTMVDVRVMKKRAHILYEMLAGCVQRKDYTALTKFLPPKHEYVLAVRMTSIQCKLYQYYLDHLTGVGNNSEGGRGKAGAKLFQDFQMLSRIWTHPWCLQLDYISKENKGYFDEDSMDEFIASDSDETSMSLSSDDYTKKKKKGKKGKKDSSSSGSGSDNDVEVIKVWNSRSRGGGEGNVDETGNNPSVSLKLEESKATSSSNPSSPAPDWYKDFVTDADAEVLEHSGKMVLLFEILRMAEEIGDKVLVFSQSLISLDLIEDFLELASREKTEDKDKPLIYKGEGKWLRNIDYYRLDGSTTAQSRKKWAEEFNDETNVRGRLFIISTKAGSLGINLVAANRVIIFDASWNPSYDIQSIFRVYRFGQTKPVYVYRFLAQGTMEDKIYDRQVTKQSLSFRVVDQQQVERHFTMNELTELYTFEPDLLDDPNSEKKKKRDTPMLPKDTILAELLQIHKEHIVGYHEHDSLLDHKEEEELTEEERKAAWAEYEAEKKGLTMRFNIPTGTNLPPVSFNSQTPYIPFNLGALSAMSNQQLEDLINQGREKVVEATNSVTAVRIQPLEDIISAVWKENMNLSEAQVQALALSRQASQELDVKRREAIYNDVLTKQQMLISCVQRILMNRRLQQQYNQQQQQQMTYQQATLGHLMMPKPPNLIMNPSNYQQIDMRGMYQPVAGGMQPPPLQRAPPPMRSKNPGPSQGKSM

SEQ ID NO: 8883 - protein, 2492 aa, Homo sapiens
MTAEPMSESKLNTLVQKLHDFLAHSSEESEETSSPPRLAMNQNTDKISGSGSNSDMMENSKEEGTSSSEKSKSSGSSRSKRKPSIVTKYVESDDEKPLDDETVNEDASNENSENDITMQSLPKGTVIVQPEPVLNEDKDDFKGPEFRSRSKMKTENLKKRGEDGLHGIVSCTACGQQVNHFQKDSIYRHPSLQVLICKNCFKYYMSDDISRDSDGMDEQCRWCAEGGNLICCDFCHNAFCKKCILRNLGRKELSTIMDENNQWYCYICHPEPLLDLVTACNSVFENLEQLLQQNKKKIKVDSEKSNKVYEHTSRFSPKKTSSNCNGEEKKLDDSCSGSVTYSYSALIVPKEMIKKAKKLIETTANMNSSYVKFLKQATDNSEISSATKLRQLKAFKSVLADIKKAHLALEEDLNSEFRAMDAVNKEKNTKEHKVIDAKFETKARKGEKPCALEKKDISKSEAKLSRKQVDSEHMHQNVPTEEQRTNKSTGGEHKKSDRKEEPQYEPANTSEDLDMDIVSVPSSVPEDIFENLETAMEVQSSVDHQGDGSSGTEQEVESSSVKLNISSKDNRGGIKSKTTAKVTKELYVKLTPVSLPNSPIKGADCQEVPQDKDGYKSCGLNPKLEKCGLGQENSDNEHLVENEVSLLLEESDLRRSPRVKTTPLRRPTETNPVTSNSDEECNETVKEKQKLSVPVRKKDKRNSSDSAIDNPKPNKLPKSKQSETVDQNSDSDEMLAILKGVSRMSHSSSSDTDINEIHTNHKTLYDLKTQAGKDDKGKRKRKSSTSGSDFDTKKGKSAKSSIISKKKRQTQSESSNYDSELEKEIKSMSKIGAARTTKKRIPNTKDFDSSEDEKHSKKGMDNQGHKNLKTSQEGSSDDAERKQERETFSSAEGTVDKDTTIMELRDRLPKKQQASASTDGVDKLSGKEQSFTSLEVRKVAETKEKSKHLKTKTCKKVQDGLSDIAEKFLKKDQSDETSEDDKKQSKKGTEEKKKPSDFKKKVIKMEQQYESSSDGTEKLPEREEICHFPKGIKQIKNGTTDGEKKSKKIRDKTSKKKDELSDYAEKSTGKGDSCDSSEDKKSKNGAYGREKKRCKLLGKSSRKRQDCSSSDTEKYSMKEDGCNSSDKRLKRIELRERRNLSSKRNTKEIQSGSSSSDAEESSEDNKKKKQRTSSKKKAVIVKEKKRNSLRTSTKRKQADITSSSSSDIEDDDQNSIGEGSSDEQKIKPVTENLVLSSHTGFCQSSGDEALSKSVPVTVDDDDDDNDPENRIAKKMLLEEIKANLSSDEDGSSDDEPEEGKKRTGKQNEENPGDEEAKNQVNSESDSDSEESKKPRYRHRLLRHKLTVSDGESGEEKKTKPKEHKEVKGRNRRKVSSEDSEDSDFQESGVSEEVSESEDEQRPRTRSAKKAELEENQRSYKQKKKRRRIKVQEDSSSENKSNSEEEEEEKEEEEEEEEEEEEEEEDENDDSKSPGKGRKKIRKILKDDKLRTETQNALKEEEERRKRIAEREREREKLREVIEIEDASPTKCPITTKLVLDEDEETKEPLVQVHRNMVIKLKPHQVDGVQFMWDCCCESVKKTKKSPGSGCILAHCMGLGKTLQVVSFLHTVLLCDKLDFSTALVVCPLNTALNWMNEFEKWQEGLKDDEKLEVSELATVKRPQERSYMLQRWQEDGGVMIIGYEMYRNLAQGRNVKSRKLKEIFNKALVDPGPDFVVCDEGHILKNEASAVSKAMNSIRSRRRIILTGTPLQNNLIEYHCMVNFIKENLLGSIKEFRNRFINPIQNGQCADSTMVDVRVMKKRAHILYEMLAGCVQRKDYTALTKFLPPKHEYVLAVRMTSIQCKLYQYYLDHLTGVGNNSEGGRGKAGAKLFQDFQMLSRIWTHPWCLQLDYISKENKGYFDEDSMDEFIASDSDETSMSLSSDDYTKKKKKGKKGKKDSSSSGSGSDNDVEVIKVWNSRSRGGGEGNVDETGNNPSVSLKLEESKATSSSNPSSPAPDWYKDFVTDADAEVLEHSGKMVLLFEILRMAEEIGDKVLVFSQSLISLDLIEDFLELASREKTEDKDKPLIYKGEGKWLRNIDYYRLDGSTTAQSRKKWAEEFNDETNVRGRLFIISTKAGSLGINLVAANRVIIFDASWNPSYDIQSIFRVYRFGQTKPVYVYRFLAQGTMEDKIYDRQVTKQSLSFRVVDQQQVERHFTMNELTELYTFEPDLLDDPNSEKKKKRDTPMLPKDTILAELLQIHKEHIVGYHEHDSLLDHKEEEELTEEERKAAWAEYEAEKKVLTMRFNIPTGTNLPPVSFNSQTPYIPFNLGALSAMSNQQLEDLINQGREKVVEATNSVTAVRIQPLEDIISAVWKENMNLSEAQVQALALSRQASQELDVKRREAIYNDVLTKQQMLISCVQRILMNRRLQQQYNQQQQQQMTYQQATLGHLMMPKPPNLIMNPSNYQQIDMRGMYQPVAGGMQPPPLQRAPPPMRSKNPGPSQGKSM

SEQ ID NO: 8884 - protein, 2454 aa, Homo sapiens
MTAEPMSESKLNTLVQKLHDFLAHSSEESEETSSPPRLAMNQNTDKISGSGSNSDMMENSKEEGTSSSEKSKSSGSSRSKRKPSIVTKYVESDDEKPLDDETVNEDASNENSENDITMQSLPKEDGLHGIVSCTACGQQVNHFQKDSIYRHPSLQVLICKNCFKYYMSDDISRDSDGMDEQCRWCAEGGNLICCDFCHNAFCKKCILRNLGRKELSTIMDENNQWYCYICHPEPLLDLVTACNSVFENLEQLLQQNKKKIKVDSEKSNKVYEHTSRFSPKKTSSNCNGEEKKLDDSCSGSVTYSYSALIVPKEMIKKAKKLIETTANMNSSYVKFLKQATDNSEISSATKLRQLKAFKSVLADIKKAHLALEEDLNSEFRAMDAVNKEKNTKEHKVIDAKFETKARKGEKPCALEKKDISKSEAKLSRKQVDSEHMHQNVPTEEQRTNKSTGGEHKKSDRKEEPQYEPANTSEDLDMDIVSVPSSVPEDIFENLETAMEVQSSVDHQGDGSSGTEQEVESSSVKLNISSKDNRGGIKSKTTAKVTKELYVKLTPVSLSNSPIKGADCQEVPQDKDGYKSCGLNPKLEKCGLGQENSDNEHLVENEVSLLLEESDLRRSPRVKTTPLRRPTETNPVTSNSDEECNETVKEKQKLSVPVRKKDKRNSSDSAIDNPKPNKLPKSKQSETVDQNSDSDEMLAILKEVSRMSHSSSSDTDINEIHTNHKTLYDLKTQAGKDDKGKRKRKSSTSGSDFDTKKGKSAKSSIISKKKRQTQSESSNYDSELEKEIKSMSKIGAARTTKKRIPNTKDFDSSEDEKHSKKGMDNQGHKNLKTSQEGSSDDAERKQERETFSSAEGTVDKDTTIMELRDRLPKKQQASASTDGVDKLSGKEQSFTSLEVRKVAETKEKSKHLKTKTCKKVQDGLSDIAEKFLKKDQSDETSEDDKKQSKKGTEEKKKPSDFKKKVIKMEQQYESSSDGTEKLPEREEICHFPKGIKQIKNGTTDGEKKSKKIRDKTSKKKDELSDYAEKSTGKGDSCDSSEDKKSKNGAYGREKKRCKLLGKSSRKRQDCSSSDTEKYSMKEDGCNSSDKRLKRIELRERRNLSSKRNTKEIQSGSSSSDAEESSEDNKKKKQRTSSKKKAVIVKEKKRNSLRTSTKRKQADITSSSSSDIEDDDQNSIGEGSSDEQKIKPVTENLVLSSHTGFCQSSGDEALSKSVPVTVDDDDDDNDPENRIAKKMLLEEIKANLSSDEDGSSDDEPEEGKKRTGKQNEENPGDEEAKNQVNSESDSDSEESKKPRYRHRLLRHKLTVSDGESGEEKKTKPKEHKEVKGRNRRKVSSEDSEDSDFQESGVSEEVSESEDEQRPRTRSAKKAELEENQRSYKQKKKRRRIKVQEDSSSENKSNSEEEEEEKEEEEEEEEEEEEEEEDENDDSKSPGKGRKKIRKILKDDKLRTETQNALKEEEERRKRIAEREREREKLREVIEIEDASPTKCPITTKLVLDEDEETKEPLVQVHRNMVIKLKPHQVDGVQFMWDCCCESVKKTKKSPGSGCILAHCMGLGKTLQVVSFLHTVLLCDKLDFSTALVVCPLNTALNWMNEFEKWQEGLKDDEKLEVSELATVKRPQERSYMLQRWQEDGGVMIIGYEMYRNLAQGRNVKSRKLKEIFNKALVDPGPDFVVCDEGHILKNEASAVSKAMNSIRSRRRIILTGTPLQNNLIEYHCMVNFIKENLLGSIKEFRNRFINPIQNGQCADSTMVDVRVMKKRAHILYEMLAGCVQRKDYTALTKFLPPKHEYVLAVRMTSIQCKLYQYYLDHLTGVGNNSEGGRGKAGAKLFQDFQMLSRIWTHPWCLQLDYISKENKGYFDEDSMDEFIASDSDETSMSLSSDDYTKKKKKGKKGKKDSSSSGSGSDNDVEVIKVWNSRSRGGGEGNVDETGNNPSVSLKLEESKATSSSNPSSPAPDWYKDFVTDADAEVLEHSGKMVLLFEILRMAEEIGDKVLVFSQSLISLDLIEDFLELASREKTEDKDKPLIYKGEGKWLRNIDYYRLDGSTTAQSRKKWAEEFNDETNVRGRLFIISTKAGSLGINLVAANRVIIFDASWNPSYDIQSIFRVYRFGQTKPVYVYRFLAQGTMEDKIYDRQVTKQSLSFRVVDQQQVERHFTMNELTELYTFEPDLLDDPNSEKKKKRDTPMLPKDTILAELLQIHKEHIVGYHEHDSLLDHKEEEELTEEERKAAWAEYEAEKKGLTMRFNIPTGTNLPPVSFNSQTPYIPFNLGALSAMSNQQLEDLINQGREKVVEATNSVTAVRIQPLEDIISAVWKENMNLSEAQVQALALSRQASQELDVKRREAIYNDVLTKQQMLISCVQRILMNRRLQQQYNQQQQQQMTYQQATLGHLMMPKPPNLIMNPSNYQQIDMRGMYQPVAGGMQPPPLQRAPPPMRSKNPGPSQGKSM

SEQ ID NO: 8885 - protein, 2288 aa, Homo sapiens
MSDDISRDSDGMDEQCRWCAEGGNLICCDFCHNAFCKKCILRNLGRKELSTIMDENNQWYCYICHPEPLLDLVTACNSVFENLEQLLQQNKKKIKVDSEKSNKVYEHTSRFSPKKTSSNCNGEEKKLDDSCSGSVTYSYSALIVPKEMIKKAKKLIETTANMNSSYVKFLKQATDNSEISSATKLRQLKAFKSVLADIKKAHLALEEDLNSEFRAMDAVNKEKNTKEHKVIDAKFETKARKGEKPCALEKKDISKSEAKLSRKQVDSEHMHQNVPTEEQRTNKSTGGEHKKSDRKEEPQYEPANTSEDLDMDIVSVPSSVPEDIFENLETAMEVQSSVDHQGDGSSGTEQEVESSSVKLNISSKDNRGGIKSKTTAKVTKELYVKLTPVSLSNSPIKGADCQEVPQDKDGYKSCGLNPKLEKCGLGQENSDNEHLVENEVSLLLEESDLRRSPRVKTTPLRRPTETNPVTSNSDEECNETVKEKQKLSVPVRKKDKRNSSDSAIDNPKPNKLPKSKQSETVDQNSDSDEMLAILKEVSRMSHSSSSDTDINEIHTNHKTLYDLKTQAGKDDKGKRKRKSSTSGSDFDTKKGKSAKSSIISKKKRQTQSESSNYDSELEKEIKSMSKIGAARTTKKRIPNTKDFDSSEDEKHSKKGMDNQGHKNLKTSQEGSSDDAERKQERETFSSAEGTVDKDTTIMELRDRLPKKQQASASTDGVDKLSGKEQSFTSLEVRKVAETKEKSKHLKTKTCKKVQDGLSDIAEKFLKKDQSDETSEDDKKQSKKGTEEKKKPSDFKKKVIKMEQQYESSSDGTEKLPEREEICHFPKGIKQIKNGTTDGEKKSKKIRDKTSKKKDELSDYAEKSTGKGDSCDSSEDKKSKNGAYGREKKRCKLLGKSSRKRQDCSSSDTEKYSMKEDGCNSSDKRLKRIELRERRNLSSKRNTKEIQSGSSSSDAEESSEDNKKKKQRTSSKKKAVIVKEKKRNSLRTSTKRKQADITSSSSSDIEDDDQNSIGEGSSDEQKIKPVTENLVLSSHTGFCQSSGDEALSKSVPVTVDDDDDDNDPENRIAKKMLLEEIKANLSSDEDGSSDDEPEEGKKRTGKQNEENPGDEEAKNQVNSESDSDSEESKKPRYRHRLLRHKLTVSDGESGEEKKTKPKEHKEVKGRNRRKVSSEDSEDSDFQESGVSEEVSESEDEQRPRTRSAKKAELEENQRSYKQKKKRRRIKVQEDSSSENKSNSEEEEEEKEEEEEEEEEEEEEEEDENDDSKSPGKGRKKIRKILKDDKLRTETQNALKEEEERRKRIAEREREREKLREVIEIEDASPTKCPITTKLVLDEDEETKEPLVQVHRNMVIKLKPHQVDGVQFMWDCCCESVKKTKKSPGSGCILAHCMGLGKTLQVVSFLHTVLLCDKLDFSTALVVCPLNTALNWMNEFEKWQEGLKDDEKLEVSELATVKRPQERSYMLQRWQEDGGVMIIGYEMYRNLAQGRNVKSRKLKEIFNKALVDPGPDFVVCDEGHILKNEASAVSKAMNSIRSRRRIILTGTPLQNNLIEYHCMVNFIKENLLGSIKEFRNRFINPIQNGQCADSTMVDVRVMKKRAHILYEMLAGCVQRKDYTALTKFLPPKHEYVLAVRMTSIQCKLYQYYLDHLTGVGNNSEGGRGKAGAKLFQDFQMLSRIWTHPWCLQLDYISKENKGYFDEDSMDEFIASDSDETSMSLSSDDYTKKKKKGKKGKKDSSSSGSGSDNDVEVIKVWNSRSRGGGEGNVDETGNNPSVSLKLEESKATSSSNPSSPAPDWYKDFVTDADAEVLEHSGKMVLLFEILRMAEEIGDKVLVFSQSLISLDLIEDFLELASREKTEDKDKPLIYKGEGKWLRNIDYYRLDGSTTAQSRKKWAEEFNDETNVRGRLFIISTKAGSLGINLVAANRVIIFDASWNPSYDIQSIFRVYRFGQTKPVYVYRFLAQGTMEDKIYDRQVTKQSLSFRVVDQQQVERHFTMNELTELYTFEPDLLDDPNSEKKKKRDTPMLPKDTILAELLQIHKEHIVGYHEHDSLLDHKEEEELTEEERKAAWAEYEAEKKGLTMRFNIPTGTNLPPVSFNSQTPYIPFNLGALSAMSNQQLEDLINQGREKVVEATNSVTAVRIQPLEDIISAVWKENMNLSEAQVQALALSRQASQELDVKRREAIYNDVLTKQQMLISCVQRILMNRRLQQQYNQQQQQQMTYQQATLGHLMMPKPPNLIMNPSNYQQIDMRGMYQPVAGGMQPPPLQRAPPPMRSKNPGPSQGKSM

SEQ ID NO: 8886 - protein, 1641 aa, Homo sapiens
MDNQGHKNLKTSQEGSSDDRERKQERETFSSAEGTVDKDTTIMELRDRLPKKQQASASTDGVDKLSGKEQSFTSLEVRKVAETKEKSKHLKTKTCKKVQDGLSDIAEKFLKKDQSDETSEDDKKQSKKGTEEKKKPSDFKKKVIKMEQQYESSSDGTEKLPEREEICHFPKGIKQIKNGTTDGEKKSKKIRDKTSKKKDELSDYAEKSTGKGDSCDSSEDKKSKNGAYGREKKRCKLLGKSSRKRQDCSSSDTEKYSMKEDGCNSSDKRLKRIELRERRNLSSKRNTKEIQSGSSSSDAEESSEDNKKKKQRTSSKKKAVIVKEKKRNSLRTSTKRKQADITSSSSSDIEDDDQNSIGEGSSDEQKIKPVTENLVLSSHTGFCQSSGDEALSKSVPVTVDDDDDDNDPENRIAKKMLLEEIKANLSSDEDGSSDDEPEEGKKRTGKQNEENPGDEEAKNQVNSESDSDSEESKKPRYRHRLLRHKLTVSDGESGEEKKTKPKEHKEVKGRNRRKVSSEDSEDSDFQESGVSEEVSESEDEQRPRTRSAKKAELEENQRSYKQKKKRRRIKVQEDSSSENKSNSEEEEEEKEEEEEEEEEEEEEEEDENDDSKSPGKGRKKIRKILKDDKLRTETQNALKEEEERRKRIAEREREREKLREVIEIEDASPTKCPITTKLVLDEDEETKEPLVQVHRNMVIKLKPHQVDGVQFMWDCCCESVKKTKKSPGSGCILAHCMGLGKTLQVVSFLHTVLLCDKLDFSTALVGLSSSILAFNWMNEFEKWQEGLKDDEKLEVSELATVKRPQERSYMLQRWQEDGGVMIIGYEMYRNLAQGRNVKSRKLKEIFNKALVDPGPDFVVCDEGHILKNEASAVSKAMNSIRSRRRIILTGTPLQNNLIEYHCMVNFIKENLLGSIKEFRNRFINPIQNGQCADSTMVDVRVMKKRAHILYEMLAGCVQRKDYTALTKFLPPKHEYVLAVRMTSIQCKLYQYYLDHLTGVGNNSEGGRGKAGAKLFQDFQMLSRIWTHPWCLQLDYISKENKGYFDEDSMDEFIASDSDETSMSLSSDDYTKKKKKGKKGKKDSSSSGSGSDNDVEVIKVWNSRSRGGGEGNVDETGNNPSVSLKLEESKATSSSNPSSPAPDWYKDFVTDADAEVLEHSGKMVLLFEILRMAEEIGDKVLVFSQSLISLDLIEDFLELASREKTEDKDKPLIYKGEGKWLRNIDYYRLDGSTTAQSRKKWAEEFNDETNVRGRLFIISTKAGSLGINLVAANRVIIFDASWNPSYDIQSIFRVYRFGQTKPVYVYRFLAQGTMEDKIYDRQVTKQSLSFRVVDQQQVERHFTMNELTELYTFEPDLLDDPNSEKKKKRDTPMLPKDTILAELLQIHKEHIVGYHEHDSLLTTKKKKRLTEEERKAAWAEYEGEKRVLTMRFNIPTGTNLPPVSFNSQTPYIPFNLGALSAMSNQQLEDLINQGREKVVEATNSVTAVRIQPLEDIISAVWKENMNLSEAQVQALALSRQASQELDVKRREAIYNDVLTKQQMLIQLCSANTYEQKAPAAVQSAATATNDLSTTTLGHHMMPKPRNLIMNPSNYQQIDMRGMYQPVAGGMQPPPLQRCTTPNEKQKIQDLPKGNQCDFALKA

SEQ ID NO: 8887 - protein, 973 aa, Homo sapiens
VIEIEDASPTKCPITTKLVLDEDEETKEPLVQVHRNMVIKLKPHQVDGVQFMWDCCCESVKKTKKSPGSGCILAHCMGLGKTLQVVSFLHTVLLCDKLDFSTALVVCPLNTALNWMNEFEKWQEGLKDDEKLEVSELATVKRPQERSYMLQRWQEDGGVMIIGYEMYRNLAQGRNVKSRKLKEIFNKALVDPGPDFVVCDEGHILKNEASAVSKAMNSIRSRRRIILTGTPLQNNLIEYHCMVNFIKENLLGSIKEFRNRFINPIQNGQCADSTMVDVRVMKKRAHILYEMLAGCVQRKDYTALTKFLPPKHEYVLAVRMTSIQCKLYQYYLDHLTGVGNNSEGGRGKAGAKLFQDFQMLSRIWTHPWCLQLDYISKENKGYFDEDSMDEFIASDSDETSMSLSSDDYTKKKKKGKKGKKDSSSSGSGSDNDVEVIKVWNSRSRGGGEGNVDETGNNPSVSLKLEESKATSSSNPSSPAPDWYKDFVTDADAEVLEHSGKMVLLFEILRMAEEIGDKVLVFSQSLISLDLIEDFLELASREKTEDKDKPLIYKGEGKWLRNIDYYRLDGSTTAQSRKKWAEEFNDETNVRGRLFIISTKAGSLGINLVAANRVIIFDASWNPSYDIQSIFRVYRFGQTKPVYVYRFLAQGTMEDKIYDRQVTKQSLSFRVVDQQQVERHFTMNELTELYTFEPDLLDDPNSEKKKKRDTPMLPKDTILAELLQIHKEHIVGYHEHDSLLDHKEEEELTEEERKAAWAEYEAEKKGLTMRFNIPTGTNLPPVSFNSQTPYIPFNLGALSAMSNQQLEDLINQGREKVVEATNSVTAVRIQPLEDIISAVWKENMNLSEAQVQALALSRQASQELDVKRREAIYNDVLTKQQMLISCVQRILMNRRLQQQYNQQQQQQMTYQQATLGHLMMPKPPNLIMNPSNYQQIDMRGMYQPVAGGMQPPPLQRAPPPMRSKNPGPSQGKSM

SEQ ID NO: 8888 - protein, 2337 aa, Homo sapiens
MQSLPKEDGLHGIVSCTACGQQVNHFQKDSIYRHPSLQVLICKNCFKYYMSDDISRDSDGMDEQCRWCAEGGNLICCDFCHNAFCKKCILRNLGRKELSTIMDENNQWYCYICHPEPLLDLVTACNSVFENLEQLLQQNKKKIKVDSEKSNKVYEHTSRFSPKKTSSNCNGEEKKLDDSCSGSVTYSYSALIVPKEMIKKAKKLIETTANMNSSYVKFLKQATDNSEISSATKLRQLKAFKSVLADIKKAHLALEEDLNSEFRAMDAVNKEKNTKEHKVIDAKFETKARKGEKPCALEKKDISKSEAKLSRKQVDSEHMHQNVPTEEQRTNKSTGGEHKKSDRKEEPQYEPANTSEDLDMDIVSVPSSVPEDIFENLETAMEVQSSVDHQGDGSSGTEQEVESSSVKLNISSKDNRGGIKSKTTAKVTKELYVKLTPVSLSNSPIKGADCQEVPQDKDGYKSCGLNPKLEKCGLGQENSDNEHLVENEVSLLLEESDLRRSPRVKTTPLRRPTETNPVTSNSDEECNETVKEKQKLSVPVRKKDKRNSSDSAIDNPKPNKLPKSKQSETVDQNSDSDEMLAILKEVSRMSHSSSSDTDINEIHTNHKTLYDLKTQAGKDDKGKRKRKSSTSGSDFDTKKGKSAKSSIISKKKRQTQSESSNYDSELEKEIKSMSKIGAARTTKKRIPNTKDFDSSEDEKHSKKGMDNQGHKNLKTSQEGSSDDAERKQERETFSSAEGTVDKDTTIMELRDRLPKKQQASASTDGVDKLSGKEQSFTSLEVRKVAETKEKSKHLKTKTCKKVQDGLSDIAEKFLKKDQSDETSEDDKKQSKKGTEEKKKPSDFKKKVIKMEQQYESSSDGTEKLPEREEICHFPKGIKQIKNGTTDGEKKSKKIRDKTSKKKDELSDYAEKSTGKGDSCDSSEDKKSKNGAYGREKKRCKLLGKSSRKRQDCSSSDTEKYSMKEDGCNSSDKRLKRIELRERRNLSSKRNTKEIQSGSSSSDAEESSEDNKKKKQRTSSKKKAVIVKEKKRNSLRTSTKRKQADITSSSSSDIEDDDQNSIGEGSSDEQKIKPVTENLVLSSHTGFCQSSGDEALSKSVPVTVDDDDDDNDPENRIAKKMLLEEIKANLSSDEDGSSDDEPEEGKKRTGKQNEENPGDEEAKNQVNSESDSDSEESKKPRYRHRLLRHKLTVSDGESGEEKKTKPKEHKEVKGRNRRKVSSEDSEDSDFQESGVSEEVSESEDEQRPRTRSAKKAELEENQRSYKQKKKRRRIKVQEDSSSENKSNSEEEEEEKEEEEEEEEEEEEEEEDENDDSKSPGKGRKKIRKILKDDKLRTETQNALKEEEERRKRIAEREREREKLREVIEIEDASPTKCPITTKLVLDEDEETKEPLVQVHRNMVIKLKPHQVDGVQFMWDCCCESVKKTKKSPGSGCILAHCMGLGKTLQVVSFLHTVLLCDKLDFSTALVVCPLNTALNWMNEFEKWQEGLKDDEKLEVSELATVKRPQERSYMLQRWQEDGGVMIIGYEMYRNLAQGRNVKSRKLKEIFNKALVDPGPDFVVCDEGHILKNEASAVSKAMNSIRSRRRIILTGTPLQNNLIEYHCMVNFIKENLLGSIKEFRNRFINPIQNGQCADSTMVDVRVMKKRAHILYEMLAGCVQRKDYTALTKFLPPKHEYVLAVRMTSIQCKLYQYYLDHLTGVGNNSEGGRGKAGAKLFQDFQMLSRIWTHPWCLQLDYISKENKGYFDEDSMDEFIASDSDETSMSLSSDDYTKKKKKGKKGKKDSSSSGSGSDNDVEVIKVWNSRSRGGGEGNVDETGNNPSVSLKLEESKATSSSNPSSPAPDWYKDFVTDADAEVLEHSGKMVLLFEILRMAEEIGDKVLVFSQSLISLDLIEDFLELASREKTEDKDKPLIYKGEGKWLRNIDYYRLDGSTTAQSRKKWAEEFNDETNVRGRLFIISTKAGSLGINLVAANRVIIFDASWNPSYDIQSIFRVYRFGQTKPVYVYRFLAQGTMEDKIYDRQVTKQSLSFRVVDQQQVERHFTMNELTELYTFEPDLLDDPNSEKKKKRDTPMLPKDTILAELLQIHKEHIVGYHEHDSLLDHKEEEELTEEERKAAWAEYEAEKKGLTMRFNIPTGTNLPPVSFNSQTPYIPFNLGALSAMSNQQLEDLINQGREKVVEATNSVTAVRIQPLEDIISAVWKENMNLSEAQVQALALSRQASQELDVKRREAIYNDVLTKQQMLISCVQRILMNRRLQQQYNQQQQQQMTYQQATLGHLMMPKPPNLIMNPSNYQQIDMRGMYQPVAGGMQPPPLQRAPPPMRSKNPGPSQGKSM

SEQ ID NO: 8889 - protein, 1359 aa, Homo sapiens
MRRNIRKLLREDQLEPVTKAAQQEELERRKRLEQQRKDYAAPIPTVPLEFLPEEIALRASDGPQLPPRVLAQEVICLDSSSGSEDEKSSRDEVIELSSGEEDTLHIVDSSESVSEDDEEEEKGGTHVNDVLNQRDALGRVFVNLNHPPEEENVFLAPQLARAVKPHQIGGIRFLYDNLVESLERFKTSSGFGCILAHSMGLGKTLQVISFIDVLFRHTPAKTVLAIVPVNTLQNWLAEFNMWLPPPEALPADNKPEEVQPRFFKVHILNDEHKTMASRAKVMADWVSEGGVLLMGYEMYRLLTLKKSFATGRPKKTKKRSHPVIIDLDEEDRQQEFRREFEKALCRPGPDVVICDEGHRIKNCQASTSQALKNIRSRRRVVLTGYPLQNNLIEYWCMVDFVRPDFLGTRQEFSNMFERPILNGQCIDSTPQDVRLMRYRSHVLHSLLEGFVQRRGHTVLKIHLPAKEENVILVRLSKIQRDLYTQFMDRFRDCGSSGWLGLNPLKAFCVCCKIWNHPDVLYEALQKESLANEQDLDVEELGSAGTSARCPPQGTKGKGEDSTLASSMGEATNSKFLQGVGFNPFQERGNNIVTYEWAKDLLTNYQTGVLENSPKMVLLFHLIEESVKLGDKILVFSQSLSTLALIEEFLGKREVPCPPGTEGQGAQKWVRNISYFRLDGSTPAFERERLINQFNDPSNLTTWLFLLSTRAGCLGVNLIGANRVVVFDASWNPCHDAQAVCRVYRYGQKKPCYIYRLVADYTLEKKIYDRQISKQGMSDRVVDDLNPMLNFTRKEVENLLHFVEKEPAPQVSLNVKGIKESVLQLACLKYPHLITKEPFEHESLLLNRKDHKLTKAEKKAAKKSYEEDKRTSVPYTRPSYAQYYPASDQSLTSIPAFSQRNWQPTLKGDEKPVASVRPVQSTPIPMMPRHVPLGGSVSSASSTNPSMNFPINYLQRAGVLVQKVVTTTDIVIPGLNSSTDVQARINAGESIHIIRGTKGTYIRTSDGRIFAVRATGKPKVPEDGRMAASGSQGPSCESTSNGRHSASSPKAPDPEGLARPVSPDSPEIISELQQYADVAAARESRQSSPSTNAALPGPPAQLMDSSAVPGTALGTEPRLGGHCLNSSLLVTGQPCGDRHPVLDLRGHKRKLATPPAAQESSRRRSRKGHLPAPVQPYEHGYPVSGGFAMPPVSLNHNLTTPFTSQAGENSLFMGSTPSYYQLSNLLADARLVFPVTTDPLVPAGPVSSSSTATSVTASNPSFMLNPSVPGILPSYSLPFSQPLLSEPRMFAPFPSPVLPSNLSRGMSIYPGYMSPHAGYPAGGLLRSQVPPFDSHEVAEVGFSSNDDEDKDDDVIEVTGK

SEQ ID NO: 8890 - protein, 348 aa, Homo sapiens [sequence omitted]

SEQ ID NO: 8891 - protein, 1162 aa, Homo sapiens
ARGLGKTLQVISFIDVLFRHTPAKTVLAIVPVNTLQNWLAEFNMWLPPPEALPADNKPEEVQPRFFKVHILNDEHKTMASRAKVMADWVSEGGVLLMGYEMYRLLTLKKSFATGRPKKTKKRSHPVIIDLDEEDRQQEFRREFEKALCRPGPDVVICDEGHRIKNCQASTSQALKNIRSRRRVVLTGYPLQNNLIEYWCMVDFVRPDFLGTRQEFSNMFERPILNGQCIDSTPQDVRLMRYRSHVLHSLLEGFVQRRGHTVLKIHLPAKEENVILVRLSKIQRDLYTQFMDRFRDCGSSGWLGLNPLKAFCVCCKIWNHPDVLYEALQKESLANEQDLDVEELGSAGTSARCPPQGTKGKGEDSTLASSMGEATNSKFLQGVGFNPFQERGNNIVTYEWAKDLLTNYQTGVLENSPKMVLLFHLIEESVKLGDKILVFSQSLSTLALIEEFLGKREVPCPPGTEGQGAQKWVRNISYFRLDGSTPAFERERLINQFNDPSNLTTWLFLLSTRAGCLGVNLIGANRVVVFDASWNPCHDAQAVCRVYRYGQKKPCFIYRLVADYTLEKKIYDRQISKQGMSDRVVDDLNPMLNFTRKEVENLLHFVEKEPAPQVSLNVKGIKESVLQLACLKYPHLITKEPFEHESLLLNRKDHKLTKAEKKAAKKSYEEDKRTSVPYTRPSYAQYYPASDQSLTSIPAFSQRNWQPTLKGDEKPVASVRPVQSTPIPMMPRHVPLGGSVSSASSTNPSMNFPINYLQRAGVLVQKVVTTTDIVIPGLNSSTDVQARINAGESIHIIRGTKGTYIRTSDGRIFAVRATGKPKVPEDGRMAASGSQGPSCESTSNGRHSASSPKAPDPEGLARPVSPDSPEIISELQQYADVAAARESRQSSPSTNAALPGPPAQLMDSSAVPGTALGTEPRLGGHCLNSSLLVTGQPCGDRHPVLDLRGHKRKLATPPAAQESSRRRSRKGHLPAPVQPYEHGYPVSGGFAMPPVSLNHNLTTPFTSQAGENSLFMGSTPSYYQLSNLLADARLVFPVTTDPLVPAGPVSSSSTATSVTASNPSFMLNPSVPGILPSYSLPFSQPLLSEPRMFAPFPSPVLPSNLSRGMSIYPGYMSPHAGYPAGGLLRSQVPPFDSHEVAEVGFSSNDDEDKDDDVIEVTGK

SEQ ID NO: 8892 - protein, 220 aa, Homo sapiens
MGADRDSPTLLPAGGSNWLAQRFHCQNGCILGDEMGLGKTCQTIALFIYLAGRLNDEGPFLILCPYVCFEQLERRNAEICSRSFLCNICSDKEERACLQQDLKQESRFHVLLTTYEICLKDASFLKSFPWSVLVVDEAHRLKNQSSLLHKTLSEFSVVFSLLLTGTPIQNSLQELYSLLSFVEPDLFSKEEWEILFNATRILRKNLSQQVNCTNSCSHFC

SEQ ID NO: 8893 - protein, 757 aa, Homo sapiens
MIQAAGKLVLIDKLLPKLIAGGHKVLIFSQMVRCLDILEDYLIQRRYTYERIDGRVRGNLRQAAIDRFCKPDSDRFVFLLCTRAGGLGINLTAADTCIIFDSDWNPQNDLQAQARCHRIGQSKAVKVYRLITRNSYEREMFDKASLKLGLDKAVLQDINRKGGTNGVQQLSKMEVEDLLRKGAYGALMDEEDEGSKFCEEDIDQILQRRTHTITIQSEGKGSTFAKASFVASGNRTDISLDDPNFWQKWAKIAELDTEAKNEKESLVIDRPRVRKQTKHYNSFEEDELMEFSELDSDSDERPTRSRRLNDKARRYLRAECFRVEKNLLIFGWGRWKDILTHGRFKWHLNEKDMEMICRALLVYCVKHYKGDEKIKSFIWELITPTKDGQAQTLQNHSGLSAPVPRGRKGKKTKNQLLIPELKDADWLATCNPEVVLHDDGYKKHLKQHCNKVLLRVRMLYYLKAEILGEAAEKAFEGSPARELDVPLPDIDYMEIPVDWWDAEADKSLLIGVFKHGYERYNAMRADPALCFLEKVGMPDEKSLSAEQGVTDGTSDIPERGNTDKEDNAEDKVDGLQKQTESSSDGGDGVFSEKKDDSRAAQDGSDPDKSPWPVSSALTARLRRLVTVYQRCNRKELCRPEILGPGNQGYWVQEEMFRRTSEMDLINKEAQKRWTRREQADFYRTVSSFGVVYDQEKKTFDWTQFRIISRLDKKSDESLEQYFYSFVAMCRNVCRLPTWKDGGPPDTTIYVRVSLQGV

SEQ ID NO: 8894 - protein, 368 aa, Homo sapiens [sequence omitted]

SEQ ID NO: 8895 - protein, 251 aa, Homo sapiens
MDFARSTDDRGEPVTHYLVKWCSLPYEGSTWERRQDIDQAKIEEFEKLMSREPETERVERPPADDWKKSESSREYKNNNKLREYQLEGVNWLLFNWYNMRNCILADEMGLGKTIQSITFLYEIYLKGIHGPFLVIAPLSTIPNWEREFRTWTELNVVVYHGSQASRRTIQLYEMYFKDPQGRVIKGSYKFHAIITTFEMILTDCPELRNIPWRCVVIDEAHRLKNRNCKLLEGLKMMDLVSDHIGDCTEPE

SEQ ID NO: 8896 - protein, 799 aa, Ferroplasma acidarmanus
MLRMFISEVIDSISRRFAYNPGKPVKGSVGDAAKWVNSLSLDNPFVTYGRSLAMQKLVSWSEKIKSTLNFPFRTCMDLIPPENNGQWFLKFFLQSKKDPSLMVPYGKIWDRKDSETISLINKYTAFPEEFLLRSIGIAQSIFSPIGKNITSKPDGVYLSDEEVFDLLKTYSSSMEEAGFGILFPEWWGKKENKLGIKIKVKAGDINNSVKLGINALLDYSLDIVLNGEPVSKSDLEKLAIMKSHLVQIGKKWVEIDNDQLNKILKLLDKGNKKMSLPELLTMENSNSIPVVEISGEGWVGDIISGNAKTLPIDEPENFIGNLRAYQKHGVAWLKFMTGAGFGCCLADDMGLGKTIEIIAFLLDRLENNGSTSLILCPTSVISNWEHEIHKFAPSLNVYIHHGNSRKKDDNFIDNITDYKIVLTSYSLLQRDIKFLSQVNWDGIIADEAQYIKNYSTKQSRAIRSLQGNFKIALTGTPIENRLQDLRSIFEFINPGYLSGEKKFRETFSIPIERYGDENAMNALNTLVNPMILRRVKTDKSIIQDLPDKEEVKVYIPLTGEQASLYEAAVNTMLESVNTKKGIERKSVILSTITKLKRLLDHPSLVSGDLDRRLDRSEKLVRLREMLEEAIDSNQKTLVFTQYTDAGKIIKEEMLKKLGEEALYLNGSTPMSLRQNMVERFQDPDGPKIFIISVKAGGAGINLTAATNVIHFDRWWNPSVEDQATDRAYRIGQMKNVHVYKFISTGTIEEKIDDIIEGKSMLREKIIGASDESWITGLSSTDLKNVFSLRREVIASEDDE

SEQ ID NO: 8897 - protein, 977 aa, Cytophaga hutchinsonii
MKVSTTEPFQIIYSLFEHEYLGYLFESFVIQLDHQRRLTLKHQNISAKNADEFARELDDVDFKLIDLIDSIQQEAIVKKFYNKKITPAEFFLKIYHKEKGDELIQDAIRSYIELKKNQILCLLENKMLFEMGHDGEPTWKRLALAPQKANILFHFMRNEDNTHYFPTIKYDGQKIDFQYKNAIIVCSMPAWLLVDNTVYHFNKDVDGNKLKPFLNKKFILVPRKMEETYYEKFVTQIVSSFDVHAKGFTIHAEEYAPKPVLTLTELAVAKAPVSLFDTAGQDTAVDTVEENKILVSLDFQYGTFIFSSDKLSPSFVKMEKTDDSYIFHKVKRDSDKEKDFLDLLRNSDLEFKSGKVTLDKSKIFSWLSANRAALEAQGLVVRQNLKDGKRYFVGASSISLEVKENNDWFDIYAVVRFGEFEIPFLKLKQYILKKKKEFVLPNGEIAVIPEEWFSQYSDLFAFIEDDSDDLKLRKHHMALVKELQNDRLAEVSMDRKLERLRDFQEIEDYDLPAEFKGELRPYQKAGYNWMRFLNQYNFGGCLADDMGLGKTVQTLALLQSLQKTADGKASLLIMPTSLVYNWEMEARKFTPDLKILNFTGINRDKNVEQFHNYDIIITSYGTVRIDIELFKQYQFYYTILDESQVIKNPESIIAKAVKELNSKHRLILTGTPVENSTMDLWSQMTFVNPGLLGSQQFFRNEFLNPIEKKHDEVKTKRLYSIIKPFILRRQKSQVVKDLPEKIENVHYCTMSPEQEQEYEKTKSNYRNLILESIDEKGLAGSQILLLQGLTKLRQIANHPSLVEDTFEGTSGKMEDVNYMLDNALELGHKILVFSQFVKHLHLYAKLLDKAGIKYAYLDGQTRDRQAEVERFQNEEGIRVFLISLKAGGLGLNLTAADYVFLLDPWWNPAVEAQAVDRAYRIGQKNTVFTYKFITKNTVEEKILNLQKNKLKLANDLISSEETFFKALSKEDIQSIFD

SEQ ID NO: 8898 - protein, 1005 aa, Oryctolagus cuniculus
MSWMFKRDPVWKYLQTVQYGVHGNFSRLSYPTFFPRFEFQDIIPPDDFLTSDEELDSVLFGTLRGHVVGLRYYTGVVNNNEMVALQREPNNPYDKNAIKVNNVNGNQVGYLKKELAAALAYIMDNKLAQIEGVVPYGANNAFTMPLQMTFWGKEENRKAVLDQLKKHGFKLGPAPKTLGFSLESGWGSGRAGPSYSMPVHAAIQMTTEQLKTEFDKLFEDLKEDDKTQEMEPAEAVETPLLPHQKQALAWMVSRENSRELPPFWELRNDLYYNTITNFSEKDQPENVHGGILADDMGLGKTLTAIAVILTNFHDGKPLPVERMKKNQVKKECNSSESDKPGRKDTIKKTDGLSKEGSRYSEEPSISDVKKNKYSMSELSSSQPKRKKIAVQYIESSDSEEIEISELPQKMKGKLKNVQSETKRVKVGPSKIKEDTAFACALTSSASTTTKKILKKGASAQRVQRKLMFEERPRTTLIICPLSVLSNWIDQFGQHIKSDVHLNFYVYYGPDRIRDPALLSKQDIVLTTYNILTHDYGTKGDSPLHSIRWLRVILDEGHAIRNPNAQQTKAVLDLEAERRWVLTGTPIQNSLKDLWSLLSFLKLKPFVDREWWHRTIQRPVTMGDEGGLRRLQSLIKNITLRRTKTSKIKGKPVLELPERPVFIQHITLSDEERKIYQSVKSEGKATIGRYFNEGTVLAHYADVLGLLLRLRQICCHTHLLTNTVSSSGPSGNDTPEELRKKLIKKMKLILSSGSDEECAICLDSLTVPVITHCAHVFCKPCICQCIQNEQPHAKCPLCRNDIHGDNLLECPPEELACDSEKKSNMEWTSSSKINALMHALIDLRTKNPNIKSLVVSQFTTFLSLIETPLKASGFVFTRLDGSMAQKKRVESIQCFQNTEAGSPTIMLLSLKAGGVGLNLCAASRVFLMDPAWNPAAEDQRFDRCHRLGQKQEVIITKFIVKDSVEENMLKIQNTKRELAAGAFGTKKNANEMKQAKINEIRTLIDL

SEQ ID NO: 8899 - protein, 836 aa, Oryctolagus cuniculus
MSWMFKRDPVWKYLQTVQYGVHGNFSRLSYPTFFPRFEFQDIIPPDDFLTSDEELDSVLFGTLRGHVVGLRYYTGVVNNNEMVALQREPNNPYDKNAIKVNNVNGNQVGYLKKELAAALAYIMDNKLAQIEGVVPYGANNAFTMPLQMTFWGKEENRKAVLDQLKKHGFKLGPAPKTLGFSLESGWGSGRAGPSYSMPVHAAIQMTTEQLKTEFDKLFEDLKEDDKTQEMEPAEAVETPLLPHQKQALAWMVSRENSRELPPFWELRNDLYYNTITNFSEKDQPENVHGGILADDMGLGKTLTAIAVILTNFHDGKPLPVERMKKNQVKKECNSSESDKPGRKDTIKKTDGLSKEGSRYSEEPSISDVKKNKYSMSELSSSQPKRKKIAVQYIESSDSEEIEISELPQKMKGKLKNVQSETKRVKVGPSKIKEDTAFACALTSSASTTTKKILKKGASAQRVQRKLMFEERPRTTLIICPLSVLSNWIDQFGQHIKSDVHLNFYVYYGPDRIRDPALLSKQDIVLTTYNILTHDYGTKGDSPLHSIRWLRVILDEGHAIRNPNAQQTKAVLDLEAERRWVLTGTPIQNSLKDLWSLLSFLKLKPFVDREWWHRTIQRPVTMGDEGGLRRLQSLIKNITLRRTKTSKIKGKPVLELPERPVFIQHITLSDEERKIYQSVKSEGKATIGRYFNEGTVLAHYADVLGLLLRLRQICCHTHLLTNTVSSSGPSGNDTPEELRKKLIKKMKLILSSGSDEECAICLDSLTVPVITHCAHVFCKPCICQCIQNEQPHAKCPLCRNDIHGDNLLECPPEELACDSEKKSNMEWTSSSKRFLSC

SEQ ID NO: 8900 - protein, 616 aa, Staphylococcus aureus
MNQIEEALTGLISKDPAIVNENANKDSDTFSTMRDLTAGIVSKSYALNHLLPKHVADAHQRGDIHFHDLDYHPFQPLTNCCLIDAKNMLHNGFEIGNANVTSPKSIQTASAQLVQIIANVSSSQYGGCTVDRVDELLSTYARHNEEQHRNIAKQFVKESEIDRYVDQQVTKDINDAIESLEYEINTLYTSNGQTPFVTLGFGLGTDHLSRKIQQAILNTRIKGLGKDRTTAIFPKLVFSIKKGTNFSPQDPNYDIKQLALKCSTKRMYPDILNYDKLVEILGDFKAPMGCRSFLPSWKDAEGHFENNGRCNLGVVTLNLPRMALESAGNMTKFWEIFYERIDVLHDALLYRINRLKDAVPNNAPILYKSGAFNYKLKETDDVAELFKNKRATISMGYIGLYETATVFYGPNWETSQEAKAFTLEILKEMKRYQTKWTELYDIWFSIYSTPSESLTDRFCRLDQERFGDIKDITDKGYYQNSFHYDVRKDVTPFEKLDFEKDYPYYASGGFIHYCEYPKLQHNLKALEAVWDYSYDKVGYLGTNIPIDHCYECDYDGDFEATEKGFKCPNCGNDNPKTVDVVKRTCGYLGNPVQRPVIKGRHKEICARVKHMKAPKE

SEQ ID NO: 8901 - protein, 594 aa, Enterococcus faecium
MNENANKDSNVFNTQRDLTAGIVGKSIGLKMLPPHIANAHQKGDIHYHDLDYHPYTPMTNCCLIDFKGMLNNGFKIGNAEVESPKSIQTATAQISQIIANVASSQYGGCSADRTDELLAPFAELNYKKHLKDAEEWIDSPERQKEYAKAKTKKDIFDAMQSLEYEINTLFTSNGQTPFTSLGFGLGENWFEREIQKAILQIRINGLGSEKRTAIFPKLIFTLKKGVNLNPEDPNYDIKQLALECATKRMYPDILNYDKIVELTGSFKVPMGCRSFLQGWKDENGQEVNVGRMNLGVVTLNLPRIAIESKGDQNKFWQLLSDRLEIMKDALLYRVERCKEAIPANAPILYMYGAFGKRLSRTDSVNELFKNRRATVSLGYIGLYEVASAFFGGEWETNPEAKAFTLDIVKELKANADAWGDEYGYHFSVYSTPSESLTDRFCRLDTEKFGIIENITDKEYYTNSFHYDVRKNPTPFEKLEFEKDYPKYCSGGFIHYCEYPMLQQNPKALEAVWDFAYDKIGYLGTNTPIDHCYQCGFEGDFKPTERGFECPECGNHDPKTCDVVKRTCGYLGNPQARPMVHGRHKEISSRVKHMK

SEQ ID NO: 8902 - protein, 235 aa, Enterococcus faecium
MKVNYEEKTVVTQQPETSQMKVIKRDGRHVDFDEQKINEALIKAEKKIHGSLSPLTYEKIQMIADLVVQEIKSRFAENVKIYEIQNIVEHILLEKNEYELAEEYINYRTKRDFARSKATDINFSIEKLINKDQTVVNENANKDSNVFNTQRDLTAGIVGKSIGLKMLPPHIANAHQKGDIHYHDLDYHPYTPMTNCCLIDFKGMLNNGFKIGMPKSNRQNLSRPPQHKSHRLLPM

SEQ ID NO: 8903 - protein, 747 aa, Lactococcus lactis subsp. cremoris
MKTEVKYQDVTLEEINVIKRDGRSVKFNSEKIFDALTKAAKKVELTDKSVLSELTDRVVSEIFSRFSENVKIYEIQSIVEQELLESGETALAEEYISYRANRDLARTKATDINFTIEKLINRDQTVVNENANKDSNVFNTQRDLTAGAVSKAIGLKLLPPHVANAHQKGDIHYHDLDYSPFTTMANCCLIDFKNMFENGFKLGNAQVDSPKSIQTATAQASQIIANVASSQYGGCSFDRADEVLAPYAKLNYQKHLKDAQKWIDGDEKREAYAREKTAKDIYDAMQSLEYEINTLFTSNGQTPFVTVGFGLGDDWYAREIQKAILKVRIGGLGSEHRTAIFPKLIFTLKRGLNLEVGTPNYDIKELALECSTKRMYPDILSYDKIVELTGSFKASMGCRSFLQGWKDANGNDVTAGRNNLGVVTVNLPRIALEAAGNKEKFWEIFNERVEIAHDALAFRVERAKEAQPKNAPILFMNGALGRLDSEGSVDDLYNNERATVSLGYIGLYEVATTFYGPTWESNPEAKAFTIEIVKRMHEDCEDWSKASGYHYSVYSTPSESLTDRFCRMDKEKFGSVADITDKDYYTNSFHYDVRKNPTPFEKLEFEKDYPVYANGGFIHYCEYPVLQQNPKALEAVWDFAYDRIGYLGTNAPIDHCYACGFEGDFTPTERGFKCPQCGNDDPKTCDVVKRTCGYLGNPQARPMVHGRHKEISSRVKHMNGSVGALNDGNLIDSVEVDEAKSKYFAEK

SEQ ID NO: 8904 - protein, 747 aa, Lactococcus lactis subsp. lactis
MKSEVKYQDVTLEEINVIKRDGRSVKFNSEKIFDALTKAAKKVELTDMSVLSELTDRVVSEIFTRFSENVKIYEIQSIVEQELLESGETQLAEEYISYRANRDLARTKATDINFTIEKLINRDQTVVNENANKDSNVFNTQRDLTAGAVSKAIGLKLLPPHVANAHQKGDIHYHDLDYSPFTTMANCCLIDFKNMFENGFKLGNAQVDSPKSIQTATAQASQIIANVASSQYGGCSFDRADEVLAPYAKLNYKKHLKDAQKWIDGAEKQEAYAREKTAKDIYDAMQSLEYEINTLFTSNGQTPFVTVGFGLGDDWYAREIQKAILNVRIGGLGSEHRTAIFPKLIFTLKRGLNLEVGTPNYDIKELALECSTKRMYPDILSYDKIVELTGSFKASMGCRSFLQGWKDENGNDVTAGRNNLGVVTVNLPRIALEAAGNKEKFWEIFNERIEIAHDALAFRVERAKEAQPKNAPILFMNGALGRLDAEGSVDELYNKERATVSLGYIGLYEVATTFYGPTWENNPEAKAFTIEIVKRMHEDCEDWSKASGYHYSVYSTPSESLTDRFCRMDKEKFGSVADITDKDYYTNSFHYDVRKNPTPFEKLEFEKDYPVYANGGFIHYCEYPVLQQNPKALEAVWDFAYDRIGYLGTNAPIDHCYACGFEGDFAATERGFKCPQCGNDDPKTCDVVKRTCGYLGNPQARPMVHGRHKEISSRVKHMNGSVGALNDGNLIDSVEVDEAKSKYFAEK

SEQ ID NO: 8905 - protein, 712 aa, Escherichia coli O157:H7 EDL933
MTPHVMKRDGCKVPFKSERIKEAILRAAKAAEVDDADYCATVAAVVSEQMQGRNQVDINEIQTAVENQLMSGPYKQLARAYIEYRHDRDIEREKRGRLNQEIRGLVEQTNASLLNENANKDSKVIPTQRDLLAGIVAKHYARQHLLPRDVVQAHERGDIHYHDLDYSPFFPMFNCMLIDLKGMLTQGFKMGNAEIEPPKSISTATAVTAQIIAQVASHIYGGTTINRIDEVLAPFVTASYNKHRKTAEEWNIPDAEGYANSRTIKECYDAFQSLEYEVNTLHTANGQTPFVTFGFGLGTSWESRLIQESILRNRIAGLGKNRKTAVFPKLVFAIRDGLNHKKGDPNYDIKQLALECASKRMYPDILNYDQVVKVTGSFKTPMGCRSFLGVWENENGEQIHDGRNNLGVISLNLPRIALEAKGDEATFWKLLDERLVLARKALMTRIARLEGVKARVAPILYMEGACGVRLNADDDISEIFKNGRASISLGYIGIHETINALFGGEHVYDNEQLRAKGIAIVERLRQAVDQWKEETGYGFSLYSTPSENLCDRFCRLDTAEFGVVPGVTDKGYYTNSFHLDVEKKVNPYDKIDFEAPYPPLANGGFICYGEYPNIQHNLKALEDVWDYSYQHVPYYGTNTPIDECYECGFTGEFECTSKGFTCPKCGNHDASRVSVTRRVCGYLGSPDARPFNAGKQEEVKRRVKHLGNGQIG

SEQ ID NO: 8906 - protein, 616 aa, Staphylococcus aureus subsp. aureus Mu50
MNQIEEALTGLISKDPAIVNENANKDSDTFSTMRDLTAGIVSKSYALNYLLPKHVADAHQRGDIHFHDLDYHPFQPLTNCCLIDAKNMLHNGFEIGNANVTSPKSIQTASAQLVQIIANVSSSQYGGCTVDRVDELLSTYARHNEEQHRNIAKQFVKESEIDRYVDQQVTKDINDAIESLEYEINTLYTSNGQTPFVTLGFGLGTDHLSRKIQQAILNTRIKGLGKDRTTAIFPKLVFSIKKGTNFSPQDPNYDIKQLALKCSTKRMYPDILNYDKLVEILGDFKAPMGCRSFLPSWKDAEGHFENNGRCNLGVVTLNLPRMALESAGNMTKFWEIFYERIDVLHDALLYRINRLKDAVPNNAPILYKSGAFNYKLKETDDVAELFKNKRATISMGYIGLYETATVFYGPDWETSQEAKAFTLEILKEMKRYQTKWTELYDIWFSIYSTPSESLTDRFCRLDQERFGDIKDITDKGYYQNSFHYDVRKDVTPFEKLDFEKDYPYYASGGFIHYCEYPKLQHNLKALEAVWDYSYDKVGYLGTNIPIDHCYECDYDGDFEATEKGFKCPNCGNDNPKTVDVVKRTCGYLGNPVQRPVIKGRHKEICARVKHMKAPKE

SEQ ID NO: 8907 - protein, 738 aa, Lactobacillus gasseri
MTMLQQDAQIKSITQMTLPETAIKRDGSIYPFALYKIEMVLDNLHLTKHEADILPSILKKLNGVKQTSTKDIADAFVQTLTELGFDDEANAYVDYRREDEANFEKQTETTNRLDRLVHHDPTIVNENANKDSRVFSTQRDLTAGVVGKTIGLTMMPEHIAKAHLRGDIHWHDLDYTPLSPLTNCCLIDFKEMLSHGFTIGNANIESPHSIETATAQMSQIIANVASSQYGGCSADRVDEVLAPYAEKNYHKNINEAREFFDDEEKIKAFAIKRTKKDIYDAMQALEYEINTLLSSQGQTPFTTLGFGLGTSWIEREIQKAILKIRIEGLGKDKRTAIFPKLVFTLKKGLNLHPGDPNYDIKELALECSTKRMYPDIVSYDMIKKITGSFKAPMGCRSFLQGWKDPETGKEVNSGRMNLGVVTLNLPRIAMESKGDKDLFWQIFREKVQTAHEALQIKAKRCTEAVPDNAPILYEYGAFGKRLNAEDNVNDLFKNGRCTISLGYIGLYEVGTVFYGPNWEHNEEAHQFTINIVKELHDYCAKWEKEDPNHYHYSVYSTPSESLTDRFCRLDTKKFGKVKDITDKEYYTNSFHYDVRKHPTPFEKLAFEAPYPFYAAGGFIHYCEYPNLKQNPKALEAVWDWAYDKVGYLGTNTPIDQCYKCGFKGEFKATAKGFECPQCGNHDPETCDCVKRTCGYLGNPLKRPMVHGRHEEIVHRVKHLNLGMEEKMAKDEVRKNDEY

SEQ ID NO: 8908 - protein, 732 aa, Streptococcus pyogenes M1 GAS
MVSLEEDKVTVQPDIKVIKRDGRLVNFDSTKIYSALLKASMKVTRMSPLVEAKLEAISDRIIAEIIERFPTNIKIYEIQNIVEHKLLAANEYAIAKEYINYRTQRDFARSQATDINFSIDKLINKDQTVVNENANKDSDVFNTQRDLTAGIVGKSIGLKMLPSHVANAHQKGDIHYHDLDYSPYTPMTNCCLIDFKGMLANGFKIGNAEVESPKSIQTATAQISQIIANVASSQYGGCTADRIDEFLAPYAELNFKKHMADAKKWIVETKRESYAFEKTQKDIYDAMQSLEYEINTLFTSNGQTPFTSLGFGLGTSWFEREIQKAILTIRINGLGSEHRTAIFPKLIFTVKRGLNLEPDSPNYDIKTLALECATKRMYPDMLSYDKIIDLTGSFKSPMGCRSFLQGWKDENGQDVTSGRMNLGVVTLNLPRIAMESNGDMDKFWELFNERMLISKDALIYRVERVTEAKPANAPILYQYGAFGKRLEKTGNVNDLFKNRRATVSLGYIGLYEVASVFYGGQWEGNPDAKAFTLSIVKAMKQACEDWSDEYGYHFSVYSTPSESLTDRFCRLDTEKFGIVTDITDKEYYTNSFHYDVRKSPTPFEKLDFEKDYPEAGASGGFIHYCEYPVLQQNPKALEAVWDYAYDRVGYLGTNTPIDKCYNCQFEGDFTPTERGFTCPNCGNNDPKTVDVVKRTCGYLGNPQARPMVNGRHKEISARVKHMNGSTIKYPGL

SEQ ID NO: 8909 - protein, 716 aa, Listeria innocua
MYVEQLNEQMVIKRDGRKANFDLIKIRNAVEASMKAIELEDETFLEEILLEVVSELPNKTDMTIDEIQQCVENTLMKSTYPDVARAYIEYRHDRDHERENITDMHKSVEKLLQKDKTVVNENANKDATVFNTQRDLTAGAVAKSYALKYMLPKHVSNAHLKGEIHFHDLDYSPYHAMTNCCLIDIEGMLSKGFTIGNANVESPKSIQTATAQIAQIIANVASSQYGGCSVDRIDEVLSVYARLNFEKHKKDAAEWVVPEKQEGYAAEKTRKDIYDAMQSLEYEINTLYTSNGQTPFVTLGFGLGEDWFAREIQKAILKVRIGGVGKDKHTAIFPKLVFSIRRGTNLNAEDPNYDIKQLALECSSKRMYPDVLNYDSLVRLTGDFKVPMGCRSFLPAWKNENGEHVNAGRNNLGVVTLNIPRIAIQSGGDKERFWEIFHERMKTVKDALLFRLNRVRQARPENAPILYKYGAFGKRLQDGENVDQLFNKERSTISIGYIGLYEAATVFYGGEWEGDKEAKNFTLDIVKELKAYADNWKDEYGYWFSVYSTPSESLTDRFNRLDKEKYGVIKDITDKDYYQNSFHYDVRKKITPFEKIDFEKDYPEFCSGGFIHYCEYPKMVHNTKALEAVWDYSYDRVAYLGTNTPIDKCYECDFEGEFVPTEEGFKCPSCGNTDPEKADVVKRTCGYLGNPMKRPMVHGRHVEISNRVKHMENLGE

SEQ ID NO: 8910 - protein, 710 aa, Listeria monocytogenes EGD-e
MYVEQLNEQMVIKRDGRKASFDLIKIRNAVEASMKAINLEDETFLEEILLEVVSELPNKADMTIDEIQHCVENTLMKSTYPDVARAYIEYRHDRDHERENITDMHKSVEKLLQKDKTVVNENANKDATVFNTQRDLTAGAVAKSYALKYMLPKHVSNAHLKGEIHFHDLDYSPYHAMTNCCLIDIEGMLSKGFTIGNANVESPKSIQTATAQIAQIIANVASSQYGGCSVDRIDEVLSVYARLNFEKHKKDAMEWVVPEKQEGYAAEKTRKDIYDAMQSLEYEINTLYTSNGQTPFVTLGFGLGEDWFAREIQKAILKVRIGGVGKDKHTAIFPKLVFSIRRGTNLNAEDPNYDIKQLALECSSKRMYPDVLNYDSLVRLTGDFKVPMGCRSFLPAWENENGEHVNAGRNNLGVVTLNIPRIAIQSGGDKERFWEIFHERMKTVKDALLFRLNRVRQARPENAPILYKYGAFGKRLQDGEDVDQLFNKERSTISIGYIGLYEAATVFYGGEWEGDKEAKNFTLDIVKELKAYADNWKDEYGYWFSVYSTPSESLTDRFNRLDKEKYGVIKDITDKDYYQNSFHYDVRKKIDFEKDYPEFCSGGFIHYCEYPKMVHNTKALEAVWDYSYDRVAYLGTNTPIDKCYECDFEGEFVPTEEGFKCPSCGNTDPEKADVVKRTCGYLGNPMKRPMVHGRHVEISNRVKHMENLGE

SEQ ID NO: 8911 - protein, 735 aa, Streptococcus pneumoniae TIGR4
MIALEEKITILPTLFVEKRDGRRVVFDVDKIDKALHKAADKVMDVTPLVEKCLNDLTERIITEIHSRFPQGIKIYEIQNIVEHELLEAKEYALAEEYITYRTQRDFERSKATDINFSIHKLLNKDQTVVNENANKDSDVFNTQRDLTAGIVGKSIGLQMLPKHVANAHQKGDIHYHDLDYSPYTPMTNCCLIDFKGMLENGFKIGNAEVESPKSIQTATAQISQIIANVASSQYGGCSADRIDEILAPYAEKNYQKHLKDAEEWVLPEKQEDYAWKKAQKDIYDAMQSLEYEINTLFTSNGQTPFTSLGFGLGTSRFEREIQKAILNIRIKGLGSEHRTAIFPKLIFTLKRGLNLEEGTPNYDIKQLALECATKRMYPDVLSYDKIVDLTGSFKVPMGCRSFLQGWKDENGVEVNSGRMNLGVVTVNLPRIALESEGDMNKFWEIFNERMNIAEDALVYRVERTKEATPANAPILYQYGAFGHRLGKEESVDQLFKNRRATVSLGYIGLYEVATVFFGNSWESNPDAKEFTLDIIHDMKRRVEEWSDQYGYHFSIYSTPSESLTDRFCRLDIDKFGSIPDITDKEYYTNSFHYDVRKNPTPFEKLDFEKVYPEAGASGGFIHYCEYPVLQQNPKALEAVWDYAYDRVGYLGTNTPIDRCYKCDFEGDFEPTERGFACPNCGNSDPKTVDVVKRTCGYLGNPQARPMVNGRHKEIAARVKHMNGSTIKIAGHQVTN

SEQ ID NO: 8912 - protein, 737 aa, Streptococcus pneumoniae R6
MRMIALEEKITILPTLFVEKRDGRRVVFDVDKIDKALHTAADKVMDVTPLVEKRLNDLTERIITEIHSRFPQGIKIYEIQNIVEHELLEAKEYALAEEYITYRTQRDFERSKATDINFSIHKLLNKDQTVVNENANKDSDVFNTQRDLTAGIVGKSIGLQMLPKHVANAHQKGDIHYHDLDYSPYTPMTNCCLIDFKGMLENGFKIGNAEVESPKSIQTATAQISQIIANVASSQYGGCSADRIDEILAPYAEKNYQKHLKDAEEWVLPEKQEDYAWKKAQKDIYDAMQSLEYEINTLFTSNGQTPFTSLGFGLGTSRFEREIQKAILNIRIKGLGSEHRTAIFPKLIFTLKRGLNLEEGTPNYDIKQLALECATKRMYPDVLSYDKIVDLTGSFKVPMGCRSFLQGWKDENGVEVNSGRMNLGVVTVNLPRIALESEGDMNKFWEIFNERMNIAEDALVYRVERTKEATPANAPILYQYGAFGHRLGKEESVDQLFKNRRATVSLGYIGLYEVATVFFGNSWESNPDAKEFTLDIIHDMKRRVEEWSDQYGYHFSIYSTPSESLTDRFCRLDIDKFGSIPDITDKEYYTNSFHYDVRKNPTPFEKLDFEKVYPEAGASGGFIHYCEYPVLQQNPKALEAVWDYAYDRVGYLGTNTPIDRCYKCDFEGDFEPTERGFACPNCGNSDPKTVDVVKRTCGYLGNPQARPMVNGRHKEIAARVKHMNGSTIKIAGHQVTN

SEQ ID NO: 8913 - protein, 616 aa, Staphylococcus epidermidis ATCC 12228
MTTLETSLTRLITKDPTILNENANKDSNTFSTMRDLTAGTVSKSYALDHLLPKHVAHAHQSGDIHFHDLDYHPFQPLTNCCLIDAKDMLENGFEIGNANVTTPQSIQTASAQLVQIIANVSSSQYGGCTVDRVDELLSKYAQMNAQHHREVANDFVQPDKIENYVDTQVTKDIGDAIESLEYEINTLYTSNGQTPFVTLGFGLGTDQLSRKIQQAILHTRIKGLGKDRVTAIFPKLVFSIKKGVNFSPEDPNYDIKQLALECSTKRMYPDILNYDKLVELLGDFKAPMGCRSFLPSWKNDEGQLENNGRCNLGVVTLNVPRIAIEADGAMQQFWDIFEKRMQLLHDALVYRIQRLQDAIPDNAPILYKSGAFKNKLTSEDTVDSLFTKQRATISMGYIGLYEAATLFYGPNWEHNPEAKTFTLDILREMKRYQVEWTKQYDIWFSIYSTPSESLTDRFCRLDKEKFGFIPDVTDKGYYQNSFHYDVRKDVTPFEKLDFEKDYPYYASGGFIHYCEYPKLNHNLKALEAVWDYAYDKVGYLGTNIPIDHCYRCGYDGDFETTANGYRCPHCGNTDPKTVDVVKRTCGYLGNPVQRPVIEGRQKEICARVKHMKEPRS

SEQ ID NO: 8914 - protein, 728 aa, Fusobacterium nucleatum subsp. nucleatum ATCC 25586
MKRVIKRDGSVVEFDRSRIINAIKKTFEQASREPNMKLIEKIASQVEDLPDKVLAVEQIQDIVVKKLMGSSEKDIAMSYQSYRTLKAEIREKEKGIYRQIGELVDASNEKLLSENANKDAKTISVQRDLLAGISSRDYYLNKIVPEHIKLAHIKGEIHLHDLDYLLFRETNCELVNIEAMLKGGCNIGNAKMLEPNSVDVAVGHIVQIIASVSSNTYGGCSIPYLDRALVRYIKKTFKKHFLRGAKYIDDLNEEQIEELKKENLEYSNEIIKNKYPKTYEYSVDMTEESVKQAMQGLEYEINSLSTVNGQTPFTTVGIGTETSWEGRLVQKYVLKTRMAGFGAKKETAIFPKIVYAMCEGLNLNEGDPNWDISQLAFECMTKSIYPDILFITPEQLKNETVVYPMGCRAFLSPWKDKNGKEKYAGRFNIGATSINLPRIAIKNRGDEEGFYKELDRILEICKDNCLFRAKYLENTVAEMAPILWMSGALAEKNQKDTIKDLIWGGYSTVSIGYIGLSEVSQLLYGKDFSESEEVYEKTFNILKYIADKVLEYKQKYNLGFALYGTPSESLCDRFARVDKQEFGDIKGITDKGYYDNSFHVSSRINMSPFEKLRLEALGHKYSAGGHISYIETDSLTKNLDAIPDILRYAKMVGIHYMGINQPVDKCHICGYKGEFTATKEGFTCPQCGNHDSNEMSVIRRVCGYLSQPNARPFNKGKQEEIMHRVKHS

SEQ ID NO: 8915 - protein, 605 aa, Bacillus anthracis str. A2012
MFETIVHGNEQDLMQENANVDGRSPMGVMGTFASESAKYYAVEKLLSDQVKKAINENILYPHDLDFYATGTTTCSQIPLAQMLANGFHTGHGHMRQPQDIKSALALSSIIFQANQNMQHGGQSFALFDVDLAPYVRKTVERHKKRLQSYPLTKEQIEEFAWKETENDTYQACEAFIHNSNSMHSRGGGQVPFISINYGTDTSKEGRLLIKQLLKATQAGLGKGETPIFPIQIFKMKKGVNFEGSDPNYDLFELALETTAERLFPNFSFLDAPFNAVHYDGRPESEVCYMGCRTRVMSNIHGEETAIGRGNLSFTSINLVKLALISGSKEAFYEALNYYLDLGIKQLLERFEYQCTKRARDFRFLYSQGVWRGGEKLQPEDSVASILKQGTLSLGFIGLAECLVALTGKHHGEDEESWKLGYEIISFMRDRMDKATEEHELNFSVIATPAEGLSGKFVKKDREEFGVISGITNHNYYTNSFHIPVYYNMQAINKIRLEGPFHALCNGGHITYIELDGAAMHNKKALKQIVQAMAEHGVGYGSINHPVDRCKCCSYHGVIGNECPSCGNEDEANIERIRRITGYLVGDMSKWNSAKRSEEMDRVKHK

SEQ ID NO: 8916 - protein, 728 aa, Corynebacterium efficiens YS-314
MTAPDTLPAEELIIGLSVLKKDGRVVDYRPRKILNSLEAAERTSGEPLHAPSDQLLGEITRRVAEHHIISTEDLSRLVEQTLAQSPAVLAAYRDYQRRQEEKINSSTDITHAITGVVEGDAKILAENGNKDARTFTTQREILAGAVSKAKGLQMLPEDIRRAHLKGLIHVHDLDRSPFAAMPNCSLPDFDYLLSHGFTLGNARIEPPRSIGVAATLLVQLLGAISGEQYGGISIHEIDRLLEPYAELTLQKNRRLYSDASGLLCSDSATDAQDDLVEELARRKTAKDIFDAMQAFEYQVNTLTTAAAQTPFTSISLGMTTSWCGREIQKSILAVRENGMSGETAIFPKIIFFVDEGVNHAPGDPNYDIKMAAMRCSMRRIYPDLVSVPRIRELKQGQLITPMGCRSFLHPWKNSDGDYELLGRNNLGVVSINLPRIAIAAQQSVDDFFTGLDEAIDLGVRALRIREEVVLSADLEQAPIMYTQGGMGNPAGKTSVRDFYTGDNHKRSSISLGYTGIHNAMVALTGEEHWHTVAGHRALSHRILEHMNTRVVAVQDQFHATVSVYATPSESLCDRFAELDRDRFGELPGINDRDYYENSFHFPSYLHTNPMDKIHFEAQYMPLTPGGFMYYVEAPNLLVNPMAFESIWDEAFDHVGYFGINSPVDHCLVCGFEGEFHCDEQGYTCPGCSNRDETQASVTRRLCGYLGAPMKRPVVSGRQAEINSRIKHM

SEQ ID NO: 8917 - protein, 712 aa, Shigella flexneri 2a str. 301
MTPHVMKRDGCKVPFKSERIKEAILRAAKAAEVDDADYCATVAAVVNEQMQGRNQVDINEIQTAVENQLMSGPYKQLARAYIEYRHDRDIEREKRGRLNQEIRGLVEQTNASLLNENANKDSKVIPTQRDLLAGIVAKHYARQHLLPRDVVQAHERGDIHYHDLDYSPFFPMFNCMLIDLKGMLTQGFKMGNAEIEPPKSISTATAVTAQIIAQVASHIYGGTTINRIDEVLAPFVTASYNKHRKTAEEWNIPDAEGYANSRTIKECYDAFQSLEYEVNTLHTANGQTPFVTFGFGLGTSWESRLIQESILRNRIAGLGKNRKTAVFPKLVFAIRDGLNHKKGDPNYDIKQLALECASKRMYPDILNYDQVVNVTGSFKTPMGCRSFLGVWENENGEQIHDGRNNLGVISLNLPRIALEAKGDEATFWKLLDERLVLARKALMTRIARLEGVKARVAPILYMEGACGVRLNADDDVSEIFKNGRASISLGYIGIHETINALFSGEHVYDNEKLRAKGIAIVERLRQAVDQWKEETGYGFSLYSTPSENLCDRFCRLDTAEFGVVPGVTDKGYYTNSFHLDVEKKVNPYDKIDFEAPYPPLANGGFICYGEYPNIQHNLKALEDVWDYSYQHVPYYGTNTPIDECYECGFTGEFECTSKGFTCPKCGNHDASRVSVTRRVCGYLGSPDARPFNAGKQEEVKRRVKHLGNGQIG

SEQ ID NO: 8918 - protein, 732 aa, Streptococcus pyogenes MGAS315
MVSLEEDKVTVQPDIKVIKRDGRLVNFDSTKIYSALLKASMKVTRMSPLVEAKLEAISDRIIAEIIERFPTNIKIYEIQNIVEHKLLAANEYTIAKEYINYRTQRDFARSQATDINFSIDKLINKDQTVVNENANKDSDVFNTQRDLTAGIVGKSIGLKMLPSHVANAHQKGDIHYHDLDYSPYTPMTNCCLIDFKGMLANGFKIGNAEVESPKSIQTATAQISQIIANVASSQYGGCTADRIDEFLAPYAELNFKKHMADAKKWIVETKRESYAFEKTQKDIYDAMQSLEYEINTLFTSNGQTPFTSLGFGLGTSWFEREIQKAILTIRINGLGSEHRTAIFPKLIFTVKRGLNLEPDSPNYDIKTLALECATKRMYPDMLSYDKIIDLTGSFKSPMGCRSFLQGWKDENGQDVTSGRMNLGVVTLNLPRIAMESNGDMDKFWELFNERMLISKDALIYRVERVTEAKPANAPILYQYGAFGKRLEKTGNVNDLFKNRRATVSLGYIGLYEVASVFYGGQWEGNPDAKAFTLSIVKAMKQACEDWSDEYGYHFSVYSTPSESLTDRFCRLDTEKFGIVTDITDKEYYTNSFHYDVRKSPTPFEKLDFEKDYPGAGASGGFIHYCEYPVLQQNPKALEAVWDYAYDRVGYLGTNTPIDKCYNCQFEGDFTPTERGFTCPNCGNNDPKTVDVVKRTCGYLGNPQARPMVNGRHKEISARVKHMNGSTIKYPGL

SEQ ID NO: 8919 - protein, 712 aa, Escherichia coli CFT073
MTPHVMKRDGCKVPFKSERIKEAILRAAKAAEVDDADYCATVAAVVSEQMQGRNQVDINEIQTAVENQLMSGPYKQLARAYIEYRHDRDIEREKRGRLNQEIRGLVEQTNSSLLNENANKDSKVIPTQRDLLAGIVAKHYARQHLLPRDVVQAHERGDIHYHDLDYSPFFPMFNCMLIDLKGMLTQGFKMGNAEIEPPKSISTATAVTAQIIAQVASHIYGGTTINRIDEVLAPFVTASYNKHRKTAEEWNIPDAEGYANSRTIKECYDAFQSLEYEVNTLHTANGQTPFVTFGFGLGTSWESRLIQESILRNRIAGLGKNRKTAVFPKLVFAIRDGLNHKKGDPNYDIKQLALECASKRMYPDILNYDQVVKVTGSFKTPMGCRSFLGVWENENGEQIHDGRNNLGVISLNLPRIALEAKGDEATFWKLLDERLVLARKALMTRIARLEGVKARVAPILYMEGACGVRLNADDDVSEIFKNGRASISLGYIGIHETINALFGGEHVYDNEQLRAKGIAIVERLRQAVDQWKEETGYGFSLYSTPSENLCDRFCRLDTAEFGVVPGVTDKGYYTNSFHLDVEKKVNPYDKIDFEAPYPPLANGGFICYGEYPNIQHNLKALEDVWDYSYQHVPYYGTNTPIDECYECGFTGEFECTSKGFTCPKCGNHDTSRVSVTRRVCGYLGSPDARPFNAGKQEEVKRRVKHLGNGQIG

SEQ ID NO: 8920 - protein, 736 aa, Leuconostoc mesenteroides subsp. mesenteroides ATCC 8293
MNNTIKLMKLPDLTVIKHSGEGTQFYAYKINFILEKLNLSENIINDINRDLYQMLANQASITAIEIRNLLVSLLKKYEQLDAVDAYNSYYVADQQKFSDASNVQKRIEKLFAQDESVVHENANKDSRVFNTQRDLEAGAASRALGLQMLPPLVAKAHLRGDIHWHDLDYSPVTPATNCCLIDFENLLTNGYKIGNAWVDSPHSIQTATAQMAQIIANVASSQYGGCSANRIDQLLAPYAQINYDKHLVDAKKWIDADRQEEYAKEKTCKDIYDAMQGLEYEINTLYSSQGQTPFTTVNFGLGTSWLEREIQKAILQIRIKGLGKERRTAIFPKLIFTLKKGLNFSQEDPNYDIKQLALECSTKRMYPDLLMYDKIVELTGSFKTPMGCRSFLQGWEDETGVEVNSGRMNLGVVSVNLPRISLFAKGDMNLFWKIFDEKMALCHDALAYRIERTKEAVPENAPLLYMYGAFGKRLKATDSVDEVFKNGRATISLGYVGVYETCIAFFGPDWEKNPEAHQFAEAVVKRMHDYCQEWAAESGYHYSLYSTPAESLTDTFCHLDQEKFGAVPDITDKQYYTNSFHYDVRKHPTPFEKIAFEETFPKYASGGFIHYCEYPNLKQNPQALEAVWNWAYDHVGYLGTNTCIDKCFKCGFAGEFKSTARGFMCPECGNHDPELCDVVKRTCGYLGNPQQRPMVHGRHVEIISRQKNLTKEMIENVATFAKTKQSDAQRMDRAKV

SEQ ID NO: 8921 - protein, 733 aa, Oenococcus oeni MCW
MINQDNDSPATLTAIKIQEDDGSISQLKDGQIEKVLLHANDKVDQPLDSQLIKNIVDQVMTKIPLSDNSVATRQDLNTAILRSLKEQGNPQLAQVANNQLLSAEINSSKATDINFTIQKLLNKDKTVVNENANKDSHVFNTQRDLTAGTVARSIGLKMLPPRVAKAHMSGDIHWHDLDYQPYSPMTNCCLIDFKEMLTNGFKIGNAELESPNSIQTATAQMAQIIANVASSQYGGCSADRTDEFLAPFAEKNYHKNLAEAKQWIEDQDKQEAFARQKTEKDIYDAMQGLEYEINTLYSSQGQTPFTTVGFGLGTSWIERSIQKAILQVRIKGLGKERRTAIFPKLVFTIKRGLNLKPEDPNYDIKQLAIECATKRMYPDVLMYDKIVELTGSFKAPMGCRSFLQGWWDESGREVNAGRMNLGVVTVNLPRIAMESKGDQAKFWKIFEDRLDVCKEALVFKINRAKEASPENAPILYEYGAFGKRLKPNDSIDQLFNKSRSTVSLGYIGIYEVGTVFFGHAWEHNPEAKAFSVKIVKTLWEHCKDWEKEYGYHFSVYSTPSESLTDTFCRLDTKKFGIVKDITDKEYYTNSFHYDVRKKITPFEKIDFEKDYPKYCSGGFIHYCEYPNLKQNPKALEAVWDYAYDKIGYLGTNTPIDQCFKCGFKGEFEATARGFKCPKCGNTDPATCDVVKRTCGYLGNPLQRPMIHGRHQEIISRVKHMSLGNDSTSSARQG

SEQ ID NO: 8922 - protein, 821 aa, Bifidobacterium longum DJO10A
MRPKCGTQESVRLIGKGCPMGAQVLEETVTYNETKVAAKASTVLVEKRDGRVVDFDPINIISAVKSAFGDLNKEVGPEEDAMIRGFANQVEGEIKERYAGPAKIEDIQNLVEHALIDAHLYDVARAYTNYRLDKDIQRAKATDVNEAVARFINHDPTLIHENANKDSNVYSTQRDLLAGAVSKAAAFNMLPPAVSNAHMKGDIHFHDADYSPFTAQSNCSLPNFWDMLANGFTLGNAPMASPKSIAIAATQITQIMKDVASSQYGGQTANRADEHLAQYAKKDYEKFLEEARETIPDGMPVEFARRQVESAKKNEPAKLHFGSREPLPMDTPFHTDVDELEQEREILAKIRTRKAIYDAMQTMEYQINSNRVSNGQTPFVTVGFGLGTDWFSREVQRAILLNRIRGLGKEHHTAIFPKLVFTVKHGVNADPGDPNYDLKQLALESATKRMYPDVVFYENIVKITGSFKAPMGCRSFLQGWINPETGKDEEDGRMNLGVVTVNVPRIAIESHGDKARFWKLFDERMEVAHQALQFRIMRCKEATPVNAPTLFRFGAFGRLGANDNVDQLFKNERATVSLGYIGLAETTAVFYGKNWIRDHGWDPEGKEFALSIVKRMNELCKQWSKAEGYHYSVYSTPAESLTDRFNRMDREKFGRIEGVTDHDFYTNSFHYPVWLQPTPMEKLSYEKDFPYYASGGFINYCEYPCLQDNPKALEAVWDYAYNIGIGYLGTNTPIDHCFVCGFQGDFEPTEEGFKCPECGNSNPDKCNVTKRTCGYLGSPVQRPMVHGRHEEIAHRVKHMSGETGRVTLDDGTTREWFEETK

SEQ ID NO: 8923 - protein, 707 aa, Haemophilus somnus 129PT
  unsure (1)..(707): unsure at all Xaa locations
MGSFFVIKRDGSRAEFEIQRIINAIKKAASAVNIQDEMFCHKIGQLVCDDIFAHHQKEIDISRIQEIVENHLMGSQYPQVARAYIEYRHERDLAREKRSNLTKEIEGLIQQSNVELLXXXXXXXXXXXXXXXXXXXXXXXXXXXXXXXXXXXXXXXXXXXXXXXXXXXXXXXXXXXXXXXXXXXXXXXGFKMGNAEIEPPKSIGTATAVTAQIIAQVASHIYGGTTVNRIDEVLAPYVQLSYEKHLKTAALWQIPDPKAYADSLIQKECFDAFQSLEYEVNTLHTANGQTPFVTFGFGLGISWQERLIQKAILQNRIRGLGKNHKTPVFPKLVFTIKKGVNQNSGDPNYDIKQLALECASKRMYPDILNYDQVVKVTGSFKAPMGCRSFLGAYEENNELVHDGRNNLGVVSLNLPRIALEAKGDEQQFYTLLEARLDLAKKALMTRIARLENTKARVAPILYMEGACGVRLKADDNVAQIFKNGRASISLGYIGIHETINALFGGKHIYDDTKLRKKGIEIVSFLSEKVKHWKAETGYAFSLYSTPSENLCDRFCRLDTKQFGVVDGVTDKGYYTNSYHLDVEKKVNPYDKLDFEMPYPPLASGGFICYGEYPNIQHNLKALEDVWDYSYERVPYYGTNTPIDECYECGFTGEFSCTSKGFTCPKCGNHDSEKVSVTRRVCGYLGSPDARPFNAGKQEEVKRRVKHL

SEQ ID NO: 8924 - protein, 802 aa, Bifidobacterium longum NCC2705
MGAQVLEETVTDNETKVAAKASTVLVEKRDGRVVDFDPINIISAVKSAFGDLNKEVGPEEDAMIRGFANQVEGEIKGRYTGPAKIEDIQNLVEHALIDAHLYDVARAYTNYRLDKDIQRAKATDVNEAVARFINHDPTLIHENANKDSNVYSTQRDLLAGAVSKAAAFNMLPPAVSNAHMKGDIHFHDADYSPFTAQSNCSLPNFWDMLANGFTLGNAPMASPKSIAIAATQITQIMKDVASSQYGGQTANRADEHLAQYAKKDYEKFLEEARETIPDGMPVEFARRQVESAKKNEPAKLHFGSREPLPMDTPFHTDVDELEQEREILAKIRTRKAIYDAMQTMEYQINSNRVSNGQTPFVTVGFGLGTDWFSREVQRAILLNRIRGLGKEHHTAIFPKLVFTVKHGVNADPGDPNYDLKQLALESATKRMYPDVVFYENIVKITGSFKAPMGCRSFLQGWINPETGKDEEDGRMNLGVVTVNVPRIAIESHGDKARFWKLFDERMEVAHQALQFRIMRCKEATPVNAPTLFRFGAFGRLGANDNVDQLFKNERATVSLGYIGLAETTAVFYGKNWIRDHGWDPEGKEFALSIVKRMNELCKQWSKAEGYHYSVYSTPAESLTDRFNRMDREKFGRIEGVTDHDFYTNSFHYPVWLQPTPMEKLSYEKDFPYYASGGFINYCEYPCLQDNPKALEAVWDYAYNIGIGYLGTNTPIDHCFVCGFQGDFEPTEEGFKCPECGNSNPDKCNVTKRTCGYLGSPVQRPMVHGRHEEIAHRVKHMSGETGRVTLDDGTTREWFEETK

SEQ ID NO: 8925 - protein, 723 aa, Streptococcus agalactiae 2603V/R
MTESDIKVIKRDGRLVSFDKYKIYTALLKASNKVIKMSPLVEAKLEMIADHVIAEIYNRFKDNIKIYEIQNIVEHKLLEANEYAIAQEYINYRTQRDFERSQATDINFSIGKLINKDQTVVNENANKDSDVFNTQRDLTAGIVGKSIGLKMLPSHVANAHQKGDIHYHDLDYSPYTPMTNCCLIDFKGMLANGFKIGNAEVESPKSIQTATAQISQIIANVASSQYGGCTADRIDEFLAPYAQLNYQKHLKDAKEWVIEDKQEDYARAKTQKDIYDAMQSLEYEINTLFTSNGQTPFTSLGFGLGTNWFEREIQKAILKIRIQGLGSEHRTAIFPKLIFTLKKGLNLEEDSPNYDIKQLALECATKRMYPDVLSYDKIIDLTGSFKAPMGCRSFLQGWRDANGQDVTSGRMNLGVVTVNLPRVAMESNGDMDKFWEIFNERMSIARDALVYRVERVKEAIPANAPILYQYGAFGERLGKYDNVDRLFNHRRATVSLGYIGLYEVASVFYGGDWEDNHQAKAFTVDIVRKMKQLCADWSDEYDYHFSVYSTPSESLTDRFCRLDTEKFGIVTDITDKEYYTNSFHYDVRKNPTPFEKLDFEKIYPETGASGGFIHYCEYPVLQQNPKALEAVWDYAYDRVGYLGTNTPIDKCYQCQFEGDFTPTDRGFTCPNCGNSDPKTVDVVKRTCGYLGNPQARPMVNGRHKEISARVKHMNGSSIKNQGN

SEQ ID NO: 8926 - protein, 728 aa, Fusobacterium nucleatum subsp. vincentii ATCC 49256
MKRVIKRDGSVVEFDKSRIINAIKKTFEQASREPNMKLIEKIASQVEDLPDKVLAVEQIQDIVVKKLMGSSEKDIAMSYQSYRTLKAEIREKEKGIYRQIGELVDASNEKLLSENANKDAKTISVQRDLLAGISSRDYYLNKIVPEHIKLAHIKGEIHLHDLDYLLFRETNCELVNIETMLRGGCNIGNAKMLEPNSVDVAVGHIVQIIASVSSNTYGGCSIPYLDRALVRYIKKTFKKHFLRGVKYIDDLNEEQIEELKKQDLEYLNEEIKNKYPKTYEYSVDMTEESVKQAMQGLEYEINSLSTVNGQTPFTTIGIGTETSWEGRLVQKYVLKTRMAGFGAKKETAIFPKIVYAMCEGLNLNEGDPNWDISQLAFECMTKSIYPDILFITPEQLKNETVVYPMGCRAFLSLWKDENGKEKYAGRFNIGATSINLPRIAIKNRGDEEGFYKELDRILEICKDNCLFRARYLENTVAEMAPILWMSGALAEKKPKDTIKDLIWGGYSTVSIGYIGLSEVSQLLYGKDFSESEEVYQKTFNILKYIADKVLEYKEKYNLGFALYGTPSESLCDRFARIDKQEFGDIKGITDKGYYDNSFHVSSRINMSPFEKLRLEALGHKYSAGGHISYIETDSLTKNLDAIPDILRYAKSVGIHYMGINQPVDKCHICGYKGEFTATKEGFTCPQCGNHDSNEMSVIRRVCGYLSQPNARPFNKGKQEEIMHRVKHS

SEQ ID NO: 8927 - protein, 734 aa, Streptococcus mutans UA159
MIALEKENIFVKPDVIVIKRDGRHVAFDKDKIYQAIVRASNQVTELTPFIEAKLSGIADRVVAEIYERFTENIKIYEIQNIVEHELLQAGEYVIAQEYINYRAKRDFERSQATDINFTIDKLINKDQAVVNENANKDSDVFNTQRDLTAGIVGKSIGLKMLPEHVANAHLKGDIHFHDLDYSPYTPMTNCCLIDFKGMLHSGFKIGNAEVESPKSIQTATAQISQIIANVASSQYGGCSADRIDETLAPYAELNYQKHLKDAEKWVSEDKREDYAREKTKKDIYDAMQSLEYEINTLFTSNGQTPFTSLGFGLGKDWFEREIQKAILNIRIKGLGSEHRTAIFPKLIFTLKRGLNLEPGTPNYDIKKLALECATKRMYPDMLSYEKIIELTGSFKVPMGCRSFLQGWKDENGVEVNSGRMNLGVVTVNLPRIALESNGNIDKFWDIFKEKMAIAKDALVYRVERVKEATPANAPILYQYGAFGKRLGKDDSVDELFKERRATVSLGYIGLYEVATVFYGGNWESNPVAKDFTIDIVRQMKDLCGKWSNEYDYHFSVYSTPSESLTDRFCRLDTEKFGIIKDITDKEYYTNSFHYDVRKNPTPFEKLDFEKDYPDAGATGGFIHYCEYPVLQQNPKALEAVWDYAYDRVGYLGTNTPIDHCYKCDFEGDFTPTERGFMCPNCGNTDPKTADVVKRTCGYLGNPQARPMVNGRHKEISARVKHMNGSTIKNPGHKA

SEQ ID NO: 8928 - protein, 732 aa, Streptococcus agalactiae NEM316
MMVLERERFMTESDIKVIKRDGRLVSFDKYKIYTALLKASNKVIKMSPLVEAKLEMIADHVIAEIYNRFKDNIKIYEIQNIVEHKLLEANEYAIAQEYINYRTQRDFERSQATDINFSIGKLINKDQTVVNENANKDSDVFNTQRDLTAGIVGKSIGLKMLPSHVANAHQKGDIHYHDLDYSPYTPMTNCCLIDFKGMLANGFKIGNAEVESPKSIQTATAQISQIIANVASSQYGGCTADRIDEFLAPYAQLNYQKHLKDAKEWVIEDKQEDYARAKTQKDIYDAMQSLEYEINTLFTSNGQTPFTSLGFGLGTNWFEREIQKAILKIRIQGLGSEHRTAIFPKLIFTLKKGLNLEEDSPNYDIKQLALECATKRMYPDVLSYDKIIDLTGSFKAPMGCRSFLQGWRDANGQDVTSGRMNLGVVTVNLPRVAMESNGDMDKFWEIFNERMSIARDALVYRVERVKEAIPANAPILYQYGAFGERLGKYDNVDRLFNHRRATVSLGYIGLYEVASVFYGGDWEDNHQAKAFTVDIVRKMKQLCADWSDEYDYHFSVYSTPSESLTDRFCRLDTEKFGIVTDITDKEYYTNSFHYDVRKNPTPFEKLDFEKIYPETGASGGFIHYCEYPVLQQNPKALEAVWDYAYDRVGYLGTNTPIDKCYQCQFEGDFTPTDRGFTCPNCGNSDPKTVDVVKRTCGYLGNPQARPMVNGRHKEISARVKHMNGSSIKNQGN

SEQ ID NO: 8929 - protein, 705 aa, Shewanella oneidensis MR-1
MPVVIKRDGCRTPFDETRIRDAVIAAANSVGIEDTDYAATVAACVSARVANMAEVEIHHLQDVVENLLMEGPYKSLARVYIEYRHDRDICRDATSKLNLEIRGLVEQSNAALLNENANKDSKVIPTQRDLLAGIVAKHYAKSHILPKDVVAAHEMGEIHYHDLDYSPFFPMFNCMLIDLAGMLTHGFKMGNAEIETPKSISTATAVTAQIIAQVASHIYGGTTINRIDEVLAPFVAKSYDKHYQVALNWQIKDAKAYATAQTEKECHDAFQSLEYEVNTLHTANGQTPFVTFGFGLGTSWESRLIQQSMLKVRMAGLGKNRKTAVFPKLVFAIRDGINHKVGDCNYDVKQLALKCATMRMYPDILNYEQVEKVTGSFKTPMGCRSFLGSYKENGELVHEGRNNLGVVSLNLPRVALEAKGDEAEFYRILDERLLLARRALDTRIERLNGVKARVAPILYMEGACGVRLRADDDIAQIFKNGRASISLGYIGLHETINALYGTETHVFDNAQLREKAVAIVAYLKAATDAWKAETGYGFSLYSTPSESLCSRFCKLDARQFGVVTGVTDKGYYTNSFHLDVEKRVNPYDKIDFEQPYPAIANGGFICYGEYPNMQHNIEALENVWDYSYSRVPYYGTNTPIDECYDCGFTGEFSCTSKGFTCPKCGNHEPSRVSVTRRVCGYLGSPDARPFNHGKQEEVKRRIKHL

SEQ ID NO: 8930 - protein, 712 aa, Yersinia pestis CO92
MKTVVIKRDGCQVPFDEVRIKEAVERAALAVGVVDADYCATVARVVAQTMENQPKVDIREIQNAVENQLMAGQYKQLARAYIEYRHDRDISRELRGRLNQEIQGLVEQSNKALLNENANKDSKVIPTQRDLLAGIVAKHYAKQHLLPRDVVLAHERGEIHYHDLDYAPFFPMFNCMLIDLEGMLTQGFKMGNAEIEPPKSISTATAVTAQIIAQVASHIYGGTTINRIDEVLAPFVTESFNKHKAVAEEWQIPDVAGYAMSRTEKECYDAFQSLEYEVNTLHTANGQTPFVTFGFGLGTSWQSRMIQQAILRNRIAGLGKNRKTAVFPKLVFAIRDGLNHKFGDANYDIKQLALECATKRMYPDILNYDQVVKVTGSFKTPMGCRSFLGVYEEEGQQIHDGRNNLGVISLNLPRIALEAKGDENQFWQLLDERLLIAKKALMTRIARLEGIKARVAPILYMEGACGVRLQADDNIAEIFKNGRASISLGYIGIHETINALFGHQTHLFDDQKLREKAIAIVAHLKQATDDWKDETGYAFSLYSTPSENLCDRFCRLDTAEFGVVEGVTDKGYYTNSFHLDVEKKVNPYDKLDFEAPYPPLANGGFICYGEYPNLQHNIRALEDVWDYSYSRVPYYGTNTPIDECYECGFTGEFSCTSKGFTCPKCGNHEPSKVSVTRRVCGYLGSPDARPFNAGKQEEVKRRVKHLANGQLG

SEQ ID NO: 8931 - protein, 706 aa, Vibrio vulnificus CMCP6
MKPIVIKRDGSRAPFSRDRIQAAVEAAAENVDKEIAIYALNVALAVELQLKDHDEVHIHEIQTRVENELMQGPYKSLARAYIEYRHDRDIAREKQSTLTREIEGLIEESNVDLINENANKDGKVIPTQRDLLAGIVAKHYAKTHILPRDVVQAHDEGDIHYHDLDYAPFFPMFNCMLIDLKGMLTHGFKMGNAEIDTPKSISTATAVTAQIIAQVASHIYGGTTINRIDEILEPYVNASYEKHLKIAQEWDIHNPEGFAIARTEKECYDAFQSLEYEVNTLHTANGQTPFVTFGFGLGTSWASKLIQQSILKNRIAGLGKNRKTAVFPKLVFAIKDGLNHKPTDPNYDIKQLALECASKRMYPDILNYDKVVEITGSFKTPMGCRSFLGTYEENGELIHEGRNNLGVVSLNLPRIALKANGDEEKFYALLDEKLKLARRALETRISRLENVKARVAPILYMEGACGVRLKADQPIADIFKHGRASISLGYIGIHETINALFGNQTHVYDDNELREKALNIVKRMKKAVEAWSEETGYGFSLYGTPSENLCSRFCRIDTKEFGVIEGVTDKGYYTNSFHLDVEKKVNPYDKIDFEMPYPEISSGGFICYGEFPNMQKNIEALENVWDYSYSKVPYYGTNTPIDECYECGYTGEFDCTSKGFTCPKCGNHDSSKVSVTRRVCGYLGSPDARPFNFGKQEEVKRRVKHL

SEQ ID NO: 8932 - protein, 740 aa, Lactobacillus plantarum WCFS1
MLTTTTNDILDQLRPLTVTKRGGAQTKFHPYKIDFVLRRLLATDDEVRVVKQALVAQYQDADNIDTRELRSTMMQILNAQGLTAAAKAYQDYFEAEQQRFAAATNVQGRIEKLFERDASVVHENANKDSTIFNTQRDLEAGAASRAMGLKMLPDVVAKAHLRGDIHWHDLDYSPVTPETNCCLIDFDGMFKNGYKIGNAEVASPRSIQTATAQMAQIIANVASLQYGGCSANRVDQLLAPYAAINYQKHMTDAKKWVPADQREAYAKAKTKKDIYDAMQALEYEINTLYSSQGQTPFTTVNFGLGTSWIEREIQKAILQIRIKGLGKEHRTAIFPKLIFTMKRGLNLSPNDPNYDIKMLAIECSTKRMYPDLLMYDKIKELTGSFKTPMGCRSFLQGWRDENGVEVNSGRMNLGVVTVNLPRIALAAHGDQQLFWEIFEERMATCHEALAYRIERTKEAKPENAPLLYMYGAFGKRLPAGGNVDELFKNQRATISLGYIGIYEVCTTFFGPNWEQDEHALAFAETVVKALRDKCAQWAAESGYHYSLYSTPAESLTDTFCRDDIAKFGRIADITDKEYYTNSFHYDVRKHPTPFDKLTLEERFPQYASGGFIHYCEYPNLTQNPKALEAVWDWAYDHVGYLGTNTSIDQCFKCGFKGEFKATARGFVCPECGNHDPKYCDVVKRTCGYLGNPQQRPMVHGRHVEIASRAKNMSPEMIKNAARYERTKQSDAQRMAGRGLK

SEQ ID NO: 8933 - protein, 706 aa, Vibrio parahaemolyticus RIMD 2210633
MKPIVIKRDGSRAPFNRDRIQAAVEAAAENKDKDVAIYALNVALAVELQLKDHDEVHIHEIQDLVENELMQGPYKALARSYIEYRHDRDIAREKQSALTREIEGLIEESNLDLINENANKDGKVIPTQRDLLAGIVAKHYAKTHILPRDVVQAHEVGDIHYHDLDYAPFFPMFNCMLIDLKGMLTHGFKMGNAEIDTPKSISTATAVTAQIIAQVASHIYGGTTINRIDEVLAPYVMTSYEKHLEIAKEWNIAEPEEFAKARTEKECYDAFQSLEYEVNTLHTANGQTPFVTFGFGLGTSWASRLIQQSILKNRIAGLGKNRKTAVFPKLVFGIKDGLNHKAEDPNYDIKKLALECASKRMYPDILNYDKVVEVTGSFKTPMGCRSFLGTYEEDGELIHEGRNNLGVVSLNLPRIALRAKGSEAKFYELLDDRLRLARKALETRISRLENVKARVAPILYMEGACGVRLKADDSIAEIFKNGRASISLGYIGVHETINALFGIEAHVYDDAVLREKAVAIIKHLKDAVNQWADETGYGFSLYATPSENLCSRFCRIDTKEFGLIEGVTDKGYYTNSFHLDVEKKVNPYDKIDFEMPYPEISSGGFICYGEFPNMQRNVEALENVWDYSYTRVPYYGTNTPIDECYECGYTGEFECTSKGFTCPSCGNHDSTKVSVTRRVCGYLGSPDARPFNFGKQEEVKRRVKHL

SEQ ID NO: 8934 - protein, 727 aa, Enterococcus faecalis V583
MMKITDEKAEDVNLSTIKVVKRDGRLVTFDDQKIYDALIKAEQKIHDQVTPLTHQKVQSIVADVNREIAERFTNNVKIYEIQNIVEHTLLSNNEYALAEEYIHYRTQRDFERSKATDINVSIGKLINKDQTVVNENANKDSDVFNTQRDLTAGIVGKSIGLKMLPSHVANAHQKGDIHYHDLDYHPYTPMTNCCLIDFKGMLNNGFKIGNADVESPKSIQTATAQISQIIANVASSQYGGCSADRIDELLAPFAERNYEKHLADAQEWIEGEERQKAFARKKTKKDIFDAMQSLEYEINTLFTSNGQTPFTSLGFGLGTNWFEREIQRAILQIRINGLGIEKRTAIFPKLIFTIKRGVNAQPTDPNYDIKQLALECATKRMYPDVLNYDKIVELTGSFKVPMGCRSFLQGWKDEQGEEVNVGRMNLGVVTLNLPRIALEAQGSQEKFWQILNERLAIVKDALVYRVERVKEAKPANAPILYMYGAFGKRLATQDAVDELFKNKRATVSLGYIGLYEVASAFYGGAWEDNQEAKNFTLDILKELKKNADNWGNEYGYHFSVYSTPSESLTDRFCRLDTEKFGIVENITDKEYYTNSFHYDVRKNPTPFEKLDFEKDYPKYCSGGFIHYCEYPMLQQNPKALEAVWDYAYDKVGYLGTNTPIDHCYACGFEGDFHPTERGFECPECGNHDPKTCDVVKRTCGYLGNPQARPMVHGRHKEISSRVKHLKN

SEQ ID NO: 8935 - protein, 797 aa, Bacteroides thetaiotaomicron VPI-5482
MNYAEICIIKRDGKREDFSISKIKNAIGKAFSATGIQNEQQLIADVTMSVISQFTNPTITVEEIQDLVEKALMKVRPEVAKKYIIYREWRNTERDKKTQMKHVMDGIVAIDKNDVNLSNANMSSHTPAGQMMTFASEVTKDYTYKYLLPKRFAEAHQLGDVHIHDLDYYPTKTTTCIQYDMDDLFERGFRTKNGSIRTPQSIQSYATLATIIFQTNQNEQHGGQAIPAFDFFMAKGVAKSFRKHLASFINFYVAMENGTQADEKAIRTLIKEHLPSIKSTEAERETLRIALIALQIIIDKEHLTRIAEKAYQQTKKDTHQAMEGFIHNLNTMHSRGGNQVVFSSINYGTDTSAEGRLVIEELLKATIEGLGTRGEVPVFPIQIFKVKDGVSYSEKDFEKAMKAENIEDAMRGTYEAPNFDLLLRACQTTSKALFPNFMFLDTPFNKNEKWKADDPKRYIYELATMGCRTRVFENVAGEKSSLGRGNLSFTTLNMPRLAIEARIKAENLIEGERNKDAIEQKAKEIFMESVRNMATLVADQLYERYQYQRTALARQFPFMMGNDVWKGGGALNPNEQVGDALRSGTLGIGFIGGHNAMVALYGEGHGHSQKAWDTLYEAVMEMNKVVDEYKEKYNLNYSVLATPAEGLSGRFTKIDRRKYGKIPGVTDRDYYVNSFHVDVKEPISITEKIRCEAPFHAITRGGHITYVELDGEAQKNVRAIAKIVKVMHDEGIGYGSINHPVDTCHNCGYKGVIFDKCPVCQSENILRMRRITGYLTGDLSSWNSAKRAEEKDRVKHL

SEQ ID NO: 8936 - protein, 618 aa, Bacillus cereus ATCC 14579
MLQNNTRGEELMKVFETIVHGNEQDLMQENANVDGRSPMGVMGTFASESAKYYAVENLLSDQVKKAINENILYPHDLDFYATGTTTCSQIPLAQMLANGFHTGHGHMRQPQDIKSALALSSIIFQANQNMQHGGQSFALFDIDLAPYVRKTIERHKKRLQSYPLKKEQIEEFAWKETENDTYQACEAFVHNSNSMHSRGGGQVPFISINYGTDTSKEGRMLIKQLLKATQAGLGKGETPIFPIQIFKMKKGVNFEESDPNYDLFELALETTAERLFPNFSFLDAPFNAVHYDGRPESEVCYMGCRTRVMSNIHGEETAIGRGNLSFTSINLVKLALISGSKEAFFEALNYYLDLGIKQLLERYAYQCTKRARDFQFLYSQGVWRGGETLQPEDSVASILKQGTLSIGFIGLAECLVALTGKHHGEDEESWKLGYEIISFMRDRMDKATEEHQLNFSVIATPAEGLSGKFVKKDRKEFGVISGITNHNYYTNSFHIPVYYNIQAINKIRLEGPFHALCNGGHITYIELDGAAMHNKKALKQIVQAMAEHGVGYGSINHPVDRCKCCSYHGVIGNECPSCGNEDEANIERIRRITGYLVGDMSKWNSAKRSEEIDRVKHK

SEQ ID NO: 8937 - protein, 713 aa, Mycoplasma penetrans
MLMYTNEQLIIIKKDNTKQSFDPNKIKTAVSKSAVRVMVNFTEQDLDKIVNNVLDKIRQSEYSEIHISLMHNLVEKSLEELYPAVAKSYKDYRNYKQDFIHMLDDVYKRSQSIMYIGDKENSNSDSALVSTKRSLIFNELNKALYKKFFLTTDELQAFNDGYIYIHDSSARRDTMNCCLFDLANVLKGGFEMGNIWYNEPKTLSSAFNVIGDVVLSTAAQQYGGFTLPEIDKILGKYAKLSYEKYLNKYLSLGLNYDKAQEVALSDLENDFTQGWQGIEYKFNTVGSSRGDYPFIAITIGLGTDQFSKMAAKTCLQVRAKGQGEEGKKRPVLFPKIVFLYDENLHGENKVNEDLFEEGVLCSSKTMYPDWLSLTGEGYVCDIYKKYKEVISPMGCRAFLSPWYEKGGMYPLDETDKPVYVGRFNIGAISLHLPMILEKSRKENKDFHETLDYYLEMIRQLHIRTYNYLGEMRASTNPLAYCQGGFYGGNLKPNEKIKPILKTCTASFGFTALNELQMLYNNKTLVEDGEFAIKTLEYINEKVLSFKNEDKILYAIYATPAESLCGLQVEQFRSKYGIVEGVSDKPYVSNSFHCHVTEDITPIQKQDLEKRFWNLSNGGKIQYVKYPINYNVGAIKSLIKRAMKMGFYEGVNLSLSYCGDCGHQELNMNKCPQCSSTNLTKIERMNGYLSYSRVSGDTRLNDAKMAEIAERKSM

SEQ ID NO: 8938 - protein, 256 aa, Desulfitobacterium hafniense
TRVTVPPLRSADVGPYKQLARAYIEYRHDRDSQREKRGRLNQEIRGLVEQTNSALLNENANKDSKVIPTQRDLLAGIVAKHYARQHLLPHDVVMAHERGVIHYHDLDYSPFFPMFNCMLIDLKGMLTQGFKMGNAEIEPPKSISTATAVTAQIIAQVASHIYGGTTINRIDEVLAPFVTESFNKHRKIAEEWHIPDAEGYARSRTEKECYDAFQSLEYEVNTLHTANGQTPFVTFGFGLGTSWESRLIQQSILRNR

SEQ ID NO: 8939 - protein, 120 aa, Enterobacteria phage RB49
IAGAVSKQIAKTVLPEHIYKAHVDGDIHYHDMDYAPAMPFTNCCLVNLKDMLENGFKLGSSQIESPKSIGVACAVTAQIIAQVASHQYGGTTIANIDEVLAPYVKKTYHKHLADAEPTES

SEQ ID NO: 8940 - protein, 712 aa, Escherichia coli
MTPHVMKRDGCKVPFKSERIKEAILRAAKAAEVDDADYCATVAAVVSEQMQGRNQVDINEIQTAVENQLMSGPYKQLARAYIEYRHDRDIEREKRGRLNQEIRGLVEQTNASLLNENANKDSKVIPTQRDLLAGIVAKHYARQHLLPRDVVQAHERGDIHYHDLDYSPFFPMFNCMLIDLKGMLTQGFKMGNAEIEPPKSISTATAVTAQIIAQVASHIYGGTTINRIDEVLAPFVTASYNKHRKTAEEWNIPDAERYANSRTIKECYDAFQSLEYEVNTLHTANGQTPFVTFGFGLGTSWESRLIQESILRNRIAGLGKNRKTAVFPKLVFAIRDGLNHKKGDPNYDIKQLALECASKRMYPDILNYDQVVKVTGSFKTPMGCRSFLGVWENENGEQIHDGRNNLGVISLNLPRIALEPKGDEATFWKLLDERLVLARKALMTRIARLEGVKARVAPILYMEGACGVRLNADDDVSEIFKNGRASISLGYIGIHETINALFGGEHVYDNEQLRAKGIAIVERLRQAVDQWKEETGYGFSLYSTPSENLCDRFCRLDTAEFGVVPGVTDKGYYTNSFHLDVEKKVNPYDKIDFEAPYPPLANGGFICYGEYPNIQHNLKALEDVWDYSYQHVPYYGTNTPIDECYECGFTGEFECTSKGFTCPKCGNHDASRVSVTRRVCGYLGSPDARPFNAGKQEEVKRRVKHLGNGQIG

SEQ ID NO: 8941 - protein, 229 aa, Escherichia coli
MTPHVMKRDGCKVPFKSERIKEAILRAAKAAEVDDADYCATVAAVVSEQMQGRNQVDINEIQTAVENQLMSGPYKQLARAYIEYRHDRDIEREKRGRLNQEIRGLVEQTNASLLNENANKDSKVIPTQRDLLAGIVAKHYARQHLLPRDVVQAHERGDIHYHDLDYSPFFPMFNCMLIDLKGMLTQGFKMGNAEIEPPKSISTATAVTAQIIAQVASHIYGGTTINRID

SEQ ID NO: 8942 - protein, 706 aa, Vibrio cholerae
MKPIVIKRDGSKAPFNRDRIQAAVESAAEHADQEIAIYALNVALAVELKLRDYDEVHITEIQTLVENELMQGPYKALARSYIEYRHDRDVAREKQSKLTKEIEGLIQESNADLLNENANKDGKVIPTQRDLLAGIVAKHYAKTRILPRDVVQAHESGDIHYHDLDYAPFFPMFNCMLIDLKGMLTHGFKMGNAEIDTPKSISTATAVTAQIIAQVASHIYGGTTINRIDEVLAPYVTASYEKHLEIAREWDIHSPEAFAKARTEKECYDAFQSLEYEVNTLHTANGQTPFVTFGFGLGTSWESRLIQQSILKNRIAGLGKNRKTAVFPKLVFAIKDGLNHKTEDPNYDIKQLALECASKRMYPDILNYDKVVEVTGSFKTPMGCRSFLNPYEENGELIHEGRNNLGVVSLNLPRIALQAKGDINKFYALLDDKLKLARRALDTRINRLENVKARVAPILYMEGACGVRLKANDSIADIFKHGRASISLGYIGVHETIMALFGQQKHVYDDVQLREEAVKIIQHLRNAVEQWKKETGYAFSLYGTPSENLCSRFCRIDAKQFGVVEGVTDKGYYTNSFHLDVQKKVNPYDKIDFEMPYPEISSGGFICYGEFPNMQRNVEALENVWDYSYHRVPYYGTNTPIDECYECGFTGEFDCTSKGFVCPRCGNHEPTKVSVTRRVCGYLGSPDARPFNVGKQEEVKRRVKHL

SEQ ID NO: 8943 - protein, 707 aa, Haemophilus influenzae Rd
MSNFGVIKRDGSRAEFEIQRIINAIKKAASAVNISDEFYCHQIGQEVGNEIFTRHQGEIDINQIQKIVEDKLMASRYPEVARAYIEYRHDRDLAREKRSQLTKEIEGLIEQSNVELLNENANKDAKVIPTQRDLLAGIVAKHYAKHNILPRDVVEAHEKGEIHYHDLDYAPFFPMFNCMLVDLEGMLSRGFKMGNAEIEPPKSIGTATAVTAQIIAQVASHIYGGTTINRIDEVLSPYVQISYEKHLKHAQEWNVPDVEGYAKALIEKECFDAFQSLEYEVNTLHTSNGQTPFVTFGFGLGTSWQSRLIQQAILKNRIRGLGKNHKTPVFPKLVFTIKKGLNQNKGDPNYDIKQLALECASKRMYPDILNYDQVVKVTGSFKAPMGCRSFLGAYEEKGHEIHDGRNNLGVVSLNLPRIALESKNEEDFYRTLDERLAIAKKALMTRIARLENTKARVAPILYMEGACGVRLKADENVAQIFKNGRASISLGYIGIHETINALYNKGHIFDDEQLREKGIAIVRHLSEAVKRWQKETGYAFSLYSTPSENLCDRFCRLDTKKFGVIEGVTDKGYYTNSYHLDVEKKVNPYDKLDFEMTYPPLASGGFICYGEYPNIQHNLKALEDVWDYSYDRVPYYGTNTPIDECYECGFTGEFECTSKGFVCPKCGNHDSTKVSVTRRVCGYLGSPDARPFNAGKQEEVKRRVKHL

SEQ ID NO: 8944 - protein, 713 aa, Pasteurella multocida
MATFFVIKRDGSRTGFEIQRIINAIKKAAQAVNIEDERYCHTMGQQVCNDIFTRYQQEIDISHIQKIVENTLMAGKYPEIARAYIEYRHDRDLAREKRSQLTKEIEGLIQQSNVELLNENANKDAKVIPTQRDLLAGIVAKHYAKRYILPRDVVDAHEKGEIHYHDLDYAPFFPMFNCMLVDLKGMLSNGFKMGNAEIEPPKSITTATAVSAQIIAQVASHIYGGTTINRIDEILAPYVQLSYEKHLKNAAEWKVPEPEAYAKALIEKECFDAFQSLEYEVNTLHTSNGQTPFVTFGFGLGTTWQSRLIQRSILKNRIRGLGKNHKTPVFPKLVFTIKKGINHSPSDPNYDIKQLALECASKRMYPDILNYDQVVKVTGSFKAPMGCRSFLGAYQEQGQEIHDGRNNLGVVSLNLPRIAIEANATNSAQSAVEFYKILDQRLAIAKKALMTRIARLEHTKARVAPILYMEGACGVRLKADDNVAQIFKNGRASISLGYIGIHETINALYGDKHIYDDEQLRQKGIEIVEYLHETVQRWKQETGYAFSLYSTPSENLCDRFCRLDTKQFGLIEGVTDKGYYTNSYHLDVEKKVNPYDKIDFELPYPPFASGGFICYGEYPNVQHNLKALEDVWDYSYDRVPYYGTNTPIDECYECGFSGEFECTSKGFTCPKCGNHDSEKVSVTRRVCGYLGSPDARPFNAGKQEEVKRRVKHL

SEQ ID NO: 8945 - protein, 712 aa, Escherichia coli K12
MTPHVMKRDGCKVPFKSERIKEAILRAAKAAEVDDADYCATVAAVVSEQMQGRNQVDINEIQTAVENQLMSGPYKQLARAYIEYRHDRDIEREKRGRLNQEIRGLVEQTNASLLNENANKDSKVIPTQRDLLAGIVAKHYARQHLLPRDVVQAHERGDIHYHDLDYSPFFPMFNCMLIDLKGMLTQGFKMGNAEIEPPKSISTATAVTAQIIAQVASHIYGGTTINRIDEVLAPFVTASYNKHRKTAEEWNIPDAEGYANSRTIKECYDAFQSLEYEVNTLHTANGQTPFVTFGFGLGTSWESRLIQESILRNRIAGLGKNRKTAVFPKLVFAIRDGLNHKKGDPNYDIKQLALECASKRMYPDILNYDQVVKVTGSFKTPMGCRSFLGVWENENGEQIHDGRNNLGVISLNLPRIALEAKGDEATFWKLLDERLVLARKALMTRIARLEGVKARVAPILYMEGACGVRLNADDDVSEIFKNGRASISLGYIGIHETINALFGGEHVYDNEQLRAKGIAIVERLRQAVDQWKEETGYGFSLYSTPSENLCDRFCRLDTAEFGVVPGVTDKGYYTNSFHLDVEKKVNPYDKIDFEAPYPPLANGGFICYGEYPNIQHNLKALEDVWDYSYQHVPYYGTNTPIDECYECGFTGEFECTSKGFTCPKCGNHDASRVSVTRRVCGYLGSPDARPFNAGKQEEVKRRVKHLGNGQIG

SEQ ID NO: 8946 - protein, 712 aa, Salmonella enterica subsp. enterica serovar Typhi
MTPHVMKRDGCKVPFKSERIKEAILRAAKAAGVDDADYCATVAEVVSSQMNARSQVDINEIQTAVENQLMSGPYKQLARAYIEYRHDRDIQREKRGRLNQEIRGLVEQTNSALLNENANKDSKVIPTQRDLLAGIVAKHYARQHLLPRDVVQAHERGDIHYHDLDYSPFFPMFNCMLIDLKGMLTQGFKMGNAEIEPPKSISTATAVTAQIIAQVASHIYGGTTINRIDEVLAPFVTESYNKHRKTADEWQIPDAEGYARSRTEKECYDAFQSLEYEVNTLHTANGQTPFVTFGFGLGTSWESRLIQASILRNRIAGLGKNRKTAVFPKLVFAIRDGLNHKFGDPNYDIKQLALECASKRMYPDILNYDQVVKVTGSFKTPMGCRSFLGVWENENGEQIHDGRNNLGVISLNLPRIALEAKGDETAFWKLLDERLALARKALMTRIARLEGVKARVAPILYMEGACGVRLKADDDVSEIFKNGRASISLGYIGIHETINALFGGEHLYDSEQLRAKGIAIVERLRQAVDQWKDETGYGFSLYSTPSENLCDRFCRLDTAEFGVVPGVTDKGYYTNSFHLDVEKKVNPYDKISFEAPYPPLANGGFICYGEYPNIQHNLKALEDVWDYSYQHVPYYGTNTPIDECYECGFTGEFECTSKGFTCPKCGNHDAARVSVTRRVCGYLGSPDARPFNAGKQEEVKRRVKHLGNGQIG

SEQ ID NO: 8947 - protein, 712 aa, Salmonella typhimurium LT2
MTPHVMKRDGCKVPFKSERIKEAILRAAKAAGVDDADYCATVAEVVSSQMNARSQVDINEIQTAVENQLMSGPYKQLARAYIEYRHDRDIQREKRGRLNQEIRGLVEQTNSALLNENANKDSKVIPTQRDLLAGIVAKHYARQHLLPRDVVQAHERGDIHYHDLDYSPFFPMFNCMLIDLKGMLTQGFKMGNAEIEPPKSISTATAVTAQIIAQVASHIYGGTTINRIDEVLAPFVTESYNKHRKTADEWQIPDAEGYARSRTEKECYDAFQSLEYEVNTLHTANGQTPFVTFGFGLGTSWESRLIQASILRNRIAGLGKNRKTAVFPKLVFAIRDGLNHKFGDPNYDIKQLALECASKRMYPDILNYDQVVKVTGSFKTPMGCRSFLGVWENENGEQIHDGRNNLGVISLNLPRIALEAKGDETAFWKLLDERLALARKALMTRIARLEGVKARVAPILYMEGACGVRLKADDDVSEIFKNGRASISLGYIGIHETINALFGGEHLYDSEQLRAKGIAIVERLRQAVDQWKDETGYGFSLYSTPSENLCDRFCRLDTAEFGVVPGVTDKGYYTNSFHLDVEKKVNPYDKIDFEAPYPPLANGGFICYGEYPNIQHNLKALEDVWDYSYQHVPYYGTNTPIDECYECGFTGEFECTSKGFTCPKCGNHDAARVSVTRRVCGYLGSPDARPFNAGKQEEVKRRVKHLGNGQIG

SEQ ID NO: 8948 - protein, 190 aa, Mus musculus
METQVLTPHVYWAQRHRELYLRVELSDVQNPAISITDNVLHFKAQGHGAKGDNVYEFHLEFLDLVKPEPAYRLTQRQVNITVQKKGSHWWERLTKQEKRPLFLAPDFDRWLDESDAEMELRAKEEERLNKLRLEREGSPETLTNLRKGYLFMYNLVQLLGFSWIFVNLTVRFFILGKESFYDTFHNVADM

SEQ ID NO: 8949 - protein, 185 aa, Giardia lamblia ATCC 50803
MHHPTIYWAQRKDVVYMRLSVSSATDVKFKIAEETIHFACKSGGNDYACKLTLFAPINPDESKYKVTGPCIESILQKKEASDEFWTSLTKTKLPYVRIDWDRWVDEGEDENTAGALPNPNDMDFASMMKNMGGGMPGLDGMNFDPSNFKMPEGADFGDEEDDDNKDEEDGPDEEKKESGEEKAEE

SEQ ID NO: 8950 - protein, 276 aa, Plasmodium falciparum 3D7
MQKLYPIVLWAQKKECLYLTIELQDIENVKIDLKEDKLYFYGTKDKNEYEFTLNFLKPINVEESKYSTQRNIKFKIIKKEQERWKTLNNDGKKHWVKCDWNSWVDTDEEDKANDYDDMGMNSFGGMGGMPDMSQFGNMGGLGNMGGLGNMGGLGNMGGLGNMGGLGNMGGLGNMGGLGNMGGMGDLDFSKLGNMGGDMPNFAGLGGMDQFKNMPNMNNMNDDDSSSYGDDTSDEEDDDDEEDEDVEVDNKTLDSDKLKDEENKIPDAAVEVQEPVA

SEQ ID NO: 8951 - protein, 178 aa, Brassica napus
MSRHPTVKWAQRSDWVYITVELPDAEDVKLKLEPEGKFFFSATSGASKTLYEVDLDLLDSVDVNESKASVSSRSVFYLVKKAESKWWNRLTKPEGKHPLYLKVDWDKWVDEDDEDKGGEGDMDFGDFDFNGLNMGDTDEIGEEVAEEDGDGEGETAAETKEKKIDGEKDEEGVNAKKD

SEQ ID NO: 8952 - protein, 174 aa, Glycine max
  unsure (1)..(174): unsure at all Xaa locations
MSRHPEVKWAQRLDKVYITVQLADSKNAKVDLTPDGIFTFSGSAGAEDHQYELKLELFDKVNVEESKINVGVRSIFCVVQKAEDGWWKRLLRGEGKPPHYVKVDWDKWVDEDEDDGNNGEVDLGGMDFSKFGGMGADAMGAMGGMGAGAMGGMDFSKXXGGMGGKGGRSRXKTX

SEQ ID NO: 8953 - protein, 160 aa, Glycine max
  unsure (1)..(160): unsure at all Xaa locations
ISSHFAPCHSKTSQNPRSPHSPPPPPPPPVPSKXSRHPEVRWAQRIDKVYITVQLPDAKDAKVKLEPDGVFSFFATAGTDGNSYESKLDLNDKVNVEASKVSVGVRSIFCILEKADAKWWNKLVHDQKAPHFVKVDWDKWVDEDDDGADVNVDGMDFSNX

SEQ ID NO: 8954 - protein, 210 aa, Glycine max
  unsure (1)..(210): unsure at all Xaa locations
MSRHPEVKWAQRLDKVYITVQLADSKNAKVDLTPDGIFTFSGSAGAEDHQYELKLELFDKVNVEESKINVGERSIFIVVQKAEDGWWKRLLRGEGKTPHYVKVDWDKWVDEDEDEGNTGEVDLGGMDFSKFGGMGADAMGGMDAMGGMGGMDFSKXXGGMGGLMQWMTLMRVTMKSKKCQSLLNKMQARGRPRKKRLLQAHNVVAIKTLP

SEQ ID NO: 8955 - protein, 175 aa, Glycine max
  unsure (1)..(175): unsure at all Xaa locations
MSRHPEVKWAQRLDKVYITVQLADSKNAKVDLTPDGIFTFSGSAGAEDHQYELKLELFDKVNVEESKINVGERSIFIVVQKAEDGWWKRLLRGEGKTPHYVKVDWDKWVDEDEDEGNTGEVDLGGMDFSKFGGMGADAMGGMDAMGGMGGMDFSKXXGGMGFIGIMSPVXLFSXK

SEQ ID NO: 8956 - protein, 128 aa, Glycine max
  unsure (1)..(128): unsure at all Xaa locations
XPPTPENLTKTLAPHNPPSPTPPPVPAASRXSRHPEVKWAQRIDKVYITVQLPDAKDAKVNLEPDGVFTFSGSVGTNLYELKLDLNDKVNVEASKISVGVRSIFCIVEKAEAKWWKKLVRDDQRAPHX

SEQ ID NO: 8957 - protein, 157 aa, Glycine max
  unsure (1)..(157): unsure at all Xaa locations
MSRHPEVKWAQRLDKVYITVQLADSKNAKVDLTPDGIFTFSGSAGAEDHQYELKLELFDKVNVEESKINVGVRSIFCVVQKAEDGWWKRLLRGEGKPPHYVKVDWDKFVXVEWVMQWMTLMRVMMKSKKCQSLLNRMLARHQQRKKRLLQAHDAVAV

SEQ ID NO: 8958 - protein, 179 aa, Lycopersicon esculentum
MSRHPTIKWAQMSDKLFITVELPDAKNVKLKLEPEGKFLFSATAGADNVPYEVDLDLFDKINVDESKSSTTSRSIVYLVKKAEDKWWSRLVKQEGLRPVFLKVDWDKWVDEDEEDSKPEPDMDFGDMDFSKLNMGEGPSNFDVDVPEGDDDSDTEEIEEEENSEPKAAVPPSTEPGVKA

SEQ ID NO: 8959 - protein, 235 aa, Oryza sativa
  unsure (1)..(235): unsure at all Xaa locations
MSRHPEVKWAQRIDKVYITVQLADAKDAKVNLEPEGVFSFSATAGTDGNLYESKLELNDKVNVEESKISVGVRSIFCIVEKAEAKWWKKLVRDDQKAPHFVKVDWDKWVDEDDDGADVNVDGMDFSNFGGMGGMGGMGGMGDMMGGMGGMGGMGGMAEMMGGMGGMGGMGGMGGMDEFEDESDDEEEVSKPQDAEKAAEAGKSQESDAKAETSXSNRRPLYIIPFSVASRLLWIW

SEQ ID NO: 8960 - protein, 186 aa, Schizosaccharomyces pombe
MSLNTQIPEVLWAQRSNKDDAEKNVIYLTVLIPDAVDPKINLTPEKLVIDSKSGANAHYAVQIDFFKDIDVEKSKYSVTGRYIFFVLYKKELQEEFWPRLTKEKLRLHWLRTDFDRWVDEDEQEAQPEVSPFGAGGMPDLSALGGMGGMDFSQFGNLGGAGAGEDASDSEPELEEEEEVGSNEKKE

SEQ ID NO: 8961 - protein, 216 aa, Saccharomyces cerevisiae
MSDKVINPQVAWAQRSSTTDPERNYVLITVSIADCDAPELTIKPSYIELKAQSKPHVGDENVHHYQLHIDLYKEIIPEKTMHKVANGQHYFLKLYKKDLESEYWPRLTKEKVKYPYIKTDFDKWVDEDEQDEVEAEGNDAAQGMDFSQMMGGAGGAGGAGGMDFSQMMGGAGGAGSPDMAQLQQLLAQSGGNLDMGDFKENDEEDEEEEIEPEVKA

SEQ ID NO: 8962 - protein, 465 aa, Neurospora crassa
MASTVTPEVRWAQRSSATDPENNFIYLTISVPDVPTSNLKLDLKPTGLVFTGHSDTLKKTYHVELEFYAEIDPAASQVHHTARDVEMKLRKKELDAHYWPRLLKEPKKVHFLKTDFDKWVDEDEQHEAAEDDFSNFGGMEGMGGMPGMGGMNGMGGMGGDFGGIDFSKLGGAGLPGGDDEEDSDDDMPPLEGEGEADKAEEAKDAKETVDTSKEAAEPSIPNLHHSNVHPSPSVYSRSSFLHHFRKRDAVLSSEAADPSHWYPIVVRLPEAARREYRKPILRCLAFSKISGLFSGRGHDLQSYSGSLDQSYGECLSNGRFHLPPPIADVASSPAMRHADIATMPPRCRAAQCSVLTPRRSTQLLSVPSPWKSLEHFTARILNRYTDLAPFEKANLSRCSGEPSSHHYHRLRLDLERNKLQQIFLTHPKLRTTYGKKWWTTAGVDCIITENGHKRCEVLEELSVAV

SEQ ID NO: 8963 - protein, 216 aa, Neurospora crassa
MASTVTPEVRWAQRSSATDPENNFIYLTISVPDVPTSNLKLDLKPTGLVFTGHSDTLKKTYHVELEFYAEIDPAASQVHHTARDVEMKLRKKELDAHYWPRLLKEPKKVHFLKTDFDKWVDEDEQHEAAEDDFSNFGGMEGMGGMPGMGGMNGMGGMGGDFGGIDFSKLGGAGLPGGDDEEDSDDDMPPLEGEGEADKAEEAKDAKETVDTSKEAA

SEQ ID NO: 8964 - protein, 145 aa, Plasmodium berghei
TTEYDDMAMNSFGGMGGLPDMSQFGGMGGMGGMGGMGGMGGLGGMGGMGGMGGMGDIDFSKLGNMGGDMSNLAGLGGMDQFKNMPNMNDDDSSSYGDDSSDDDDEDDDTNKSDADHSHACNDAKCNIDKDGAIHNDDAKVQEPVA

SEQ ID NO: 8965 - protein, 195 aa, Plasmodium falciparum
RNIKFKIIKKEQERWKTLNNDGKKHWVKCDWNSWVDTDEEDKANDYDDMGMNSFGGMGGMPDMSQFGNMGGLGNMGGLGNMGGLGNMGGLGNMGGLGNMGGMGDLDFSKLGNMGGDMPNFAGLGGMDQFKNMPNMNNMNDDDSSSYGDDTSDEEDDDDEEDEDVEVDNKTLDSDKLKDEENKIPDAAVEVQEPVA

SEQ ID NO: 8966 - protein, 175 aa, Caenorhabditis elegans
MAKQPTVLWAQRESLVYLTIEVDEAKIEELKGEGNKLHFQGSSKTDKYEATLEFFDEIDPASVKHTGSSTRVVEITVQKKTPAWWPRLLQNKGKVHWLKVDFGKWKDEDEDDEAEDAGAGIGGGMANGFDLNQYMSQMGGAGGADFGGLEDDEEDDDMPDLEDNEEEEGKNGTRA

SEQ ID NO: 8967 - protein, 256 aa, Plasmodium yoelii yoelii
LFPIVLWAQKKECLYLTIELQDAEDVKIDLKEDSLYFYGTKEKNEYEFTLNFLKPINVEESKYTTKRNIKFKIIKKEKERWKSINNDGKKHWIKCDWNSWVDTDEEDKTTEYDDMAMNSFGGMGGLPDMSQFGGMGGMGGMGGMGGLGGMGGMGGLGGMGGMGGMGDIDFSKLGNMGGDMSNLAGLGGMDQFKNMPNMNDDDSSSYGDDSSDDDDEDDDTNKSDADHSHACNDAKCNIDKEGAIHNDDAKVQEPVA

SEQ ID NO: 8968 - protein, 123 aa, Streptomyces coelicolor A3(2)
MSIDKPEVDFPGGEPPADLEIKDIWEGDGPVAEAGQTVTVHYVGVTFSTGEEFDASWNRGAPFRFPLGGGRVIKGWDQGVQGMKVGGRRQLTIPAHLAYGDQSPAPAIPPGSTLIFVVDLLGV

SEQ ID NO: 8969 - protein, 335 aa, Streptomyces coelicolor A3(2)
MRRRSLLIAVPTGLVTLAACGDSDDSGSSSNASESPSPDASATSAAPPPKIVDGPLPAITAGTKFDEKPTVAKGSGEPSKDLAVKTVIAGGGKAVAENDFVSANYLGQVWQSAKVFDNSYDRKTPLVIQLAQGSIIDGWRYALTGKKTGSRVQFSVPPTWGYGEQGNEQAGIKGDDTLVFVVDVQDTFNAKSSAQGKKVAQDDAALPKVGTNTDGKAPSIEVPKADAPKKLVAEYVLEGDGAEVGAQDSVLVQYKGVLWDGGKEFDSTYGRKQLTSFSLQQVVKGWAQGLTGKKVGSRVLIVIPPDLGYGDSPPEGSGIEKDSTLVFSVDILAKM

SEQ ID NO: 8970 - protein, 458 aa, Mus musculus
MTAEEMKAAENGAQSAPLPLEGVDISPKQDEGVLKVIKREGTGTETPMIGDRVFVHYTGWLLDGTKFDSSLDRKDKFSFDLGKGEVIKAWDIAVATMKVGEVCHITCKPEYAYGAAGSPPKIPPNATLVFEVELFEFKGEDLTEEEDGGIIRRIRTRGEGYARPNDGAMVEVALEGYHKDRLFDQRELCFEVGEGESLDLPCGLEEAIQRMEKGEHSIVYLKPSYAFGSVGKERFQIPPHAELRYEVRLKSFEKAKESWEMSSAEKLEQSNIVKERGTAYFKEGKYKQALLQYKKIVSWLEYESSFSGEEMQKVRALRLASHLNLAMCHLKLQAFSAAIESCNKALELDSNNEKGLFRRGEAHLAVNDFDLARADFQKVLQLYPSNKAAKTQLAVCQQRTRRQLAREKKLYANMFERLAEEEHKVKAEVAAGDHPTDAEMKGERNNVAENQSRVETEA

SEQ ID NO: 8971 - protein, 458 aa, Mus musculus
MTAEEMKAAENGAQSAPLPLEGVDISPKQDEGVLKVIKREGTGTETPMIGDRVFVHYTGWLLDGTKFDSSLDRKDKFSFDLGKGEVIKAWDIAVATMKVGEVCHITCKPEYAYGAAGSPPKIPPNATLVFEVELFEFKGEDLTEEEDGGIIRRIRTRGEGYARPNDGAMVEVALEGYHKDRLFDQRELCFEVGEGESLDLPCGLEEAIQRMEKGEHSIVYLKPSYAFGSVGKERFQIPPHAELRYEVRLKSFEKAKESWEMSSAEKLEQSNIVKERGTAYFKEGKYKQALLQYKKIVSWLEYESSFSGEEMQKVHALRLASHLNLAMCHLKLQAFSAAIESCNKALELDSNNEKGLFRRGEAHLAVNDFDLARADFQKVLQLYPSNKAAKTQLAVCQQRTRRQLAREKKLYANMFERLAEEEHKVKAEVAAGDHPTDAEMKGERNNVAENQSRVETEA

SEQ ID NO: 8972 - protein, 456 aa, Mus musculus
MTTDEGTSNNGENPAATMTEQGEDITTKKDRGVLKIVKRVGTSDEAPMFGDKVYVHYKGMLSDGKKFDSSHDRKKPFAFSLGQGQVIKAWDIGVSTMKKGEICHLLCKPEYAYGSAGHLQKIPSNATLFFEIELLDFKGEDLFEDSGVIRRIKRKGEGYSNPNEGATVKVHLEGCCGGRTFDCRDVVFVVGEGEDHDIPIGIDKALVKMQREEQCILYLGPRYGFGEAGKPKFGIDPNAELMYEVTLKSFEKAKESWEMDTKEKLTQAAIVKEKGTVYFKGGKYTQAVIQYRKIVSWLEMEYGLSEKESKASESFLLAAFLNLAMCYLKLREYNKAVECCDKALGLDSANEKGLYRRGEAQLLMNDFESAKGDFEKVLAVNPQNRAARLQISMCQRKAKEHNERDRRVYANMFKKFAERDAKEEASKAGSKKAVEGAAGKQHESQAMEEGKAKGHV

SEQ ID NO: 8973 - protein, 453 aa, Mus musculus
HEAAENGAQSAPLPLEGVDISPKQDEGVLKVIKREGTGTETPMIGDRVFVHYTGWLLDGTKFDSSLDRKDKFSFDLGKGEVIKAWDIAVATMKVGEVCHITCKPEYAYGAAGSPPKIPPNATLVFEVELFEFKGEDLTEEEDGGIIRRIRLGVKAMQGPNDGAMVEVALEGYHKDRLFDQRELCFEVGEGESLDLPCAWRRPFSAWRKESIPSCTSNLAMLLAVWGRRGSRSHRTAELRYEVRLKSFEKAKESWEMSSARSWSRATYVKERGTAYFKEGKYKQALLQYKKIVSWLEYESSFSGEEMQKVHALRLASHLNLAMCHLKLQAFSAAIESCNKALELDSNNEKGLFRRGEAHLAVNDFDLARADFQKVLQLYPSNKAAKTQLAVCQQRTRRQLAREKKLYANMFERLAEEEHKVKAEVAAGDHPTDAEMKGERNNVAENQSRVETEA

SEQ ID NO: 8974 - protein, 519 aa, Mus musculus
MIGDRVFVHYTGWLLDGTKFDSSLDRKDKFSFDLGKGEVIKAWDIAVATMKVGEVCHITCKPEYAYGAAGSPPKIPPNATLVFEVELFEFKGEDLTEEEDGGIIRRIRLGVKAMQGPNDGAMVEVALEGYHKDRLFDQRELCFEVGEGESLDLPCAWRRPFSAWRKESIPSCTSNLAMLLAVWGRRGSRSHRTAELRYEVRLKSFEKAKESWEMSSARSWSRATYVKERGTAYFKEGKYKQALLQYKKIVSWLEYESSFSGEEMQKVHALRLASHLNLAMCHLKLQAFSAAIESCNKALELDSNNEKGLFRRGEAHLAVNDFDLARADFQKVLQLYPSNKAAKTQLAVCQQRTRRQLAREKKLYANMFERLAEEEHKVKAEVAAGDHPTDAERKSLPRVWPPMDTKMQSLPTTHPHPHSSSRPQSHTSNQCNQCTCSHHCRSCSQAGHAGSSSSPSPGPPMKHPKPSVHSRHSPARPSHRGSCPKNRKTFEGKVSKRKAVRRRKRTHRAKRRSSGRRYK

SEQ ID NO: 8975 - protein, 411 aa, Mus musculus
MIGDRVFVHYTGWLLDGTKFDSSLDRKDKFSFDLGKGEVIKAWDIAVATMKVGEVCHITCKPEYAYGAAGSPPKIPPNATLVFEVELFEFKGEDLTEEEDGGIIRRIRLGVKAMQGPNDGAMVEVALEGYHKDRLFDQRELCFEVGEGESLDLPCAWRRPFSAWRKESIPSCTSNLAMLLAVWGRRGSRSHRTAELRYEVRLKSFEKAKESWEMSSARSWSRATYVKERGTAYFKEGKYKQALLQYKKIVSWLEYESSFSGEEMQKVHALRLASHLNLAMCHLKLQAFSAAIESCNKALELDSNNEKGLFRRGEAHLAVNDFDLARADFQKVLQLYPSNKAAKTQLAVCQQRTRRQLAREKKLYANMFERLAEEEHKVKAEVAAGDHPTDAEMKGERNNVAENQSRVETEA

SEQ ID NO: 8976 - protein, 570 aa, Mus musculus
MALGARGWRRRSLLLLLLWVTGQAAPVLGLAVSSELQIQQSFVPDECPRTVHSGDFVRYHYVGTFLDGQKFDSSYDRDSTFNVFVGKGQLIAGMDQALVGMCVNERRLVTIPPNLAYGSEGVSGVIPPNSVLHFDVLLVDIWNSEDQVHIQTYFKPPSCPRTIQVSDFVRYHYNGTFLDGTLFDSSHNRMKTYDTYVGIGWLIPGMDKGLLGMCVGEKRIITVPPFLAYGEEGDGKDIPGQASLVFDVALLDLHNPKDTISIENKVVPENCERRSQSGDFLRYHYNGTLLDGTLFDSSYSRNHTFDTYIGQGYVIPGMDEGLLGVCIGERRRIVVPPHLGYGEKGRGSIPGSAVLVFDIHVIDFHNPSDSISITSHYKPPDCSVLSKKGDYLKYHYNASLLDGTLLDSTWNLGKTYNIVLGSGQVVLGMDMGLREMCVGEKRTVIIPPHLGYGEAGVDGEVPGSAVLVFDIELLELVSGLPEGYMFIWNGEVSPNLFEEIDRDGNGEVLLEEFSEYIHAQVATGKGKLAPGFNAEMIVKNMFTNQDRSGDGKVTAEEFKLKDQEAKHDEL

SEQ ID NO: 8977 - protein, 570 aa, Mus musculus
MALGARGWRRRSLLLLLLWVTGQAAPVLGLAVSSELQIQRSFVPDECPRTVHSGDFVRYHYVGTFLDGQKFDSSYDRDSTFNVFVGKGQLIAGMDQALVGMCVNERRLVTIPPNLAYGSEGVSGVIPPNSVLHFDVLLVDIWNSEDQVQIQTYFKPPSCPRTIQVSDFVRYHYNGTFLDGTLFDSSHNRMKTYDTYVGIGWLIPGMDKGLLGMCVGEKRIITVPPFLAYGEEGDGKDIPGQASLVFDVALLDLHNPKDTISIENKVVPENCERRSQSGDFLRYHYNGTLLDGTLFDSSYSRNHTFDTYIGQGYVIPGMDEGLLGVCIGERRRIVVPPHLGYGEKGRGSIPGSAVLVFDIHVIDFHNPSDSISITSHYKPPDCSVLSKKGDYLKYHYNASLLDGTLLDSTWNLGKTYNIVLGSGQVVLGMDMGLREMCVGEKRTVIIPPHLGYGEAGVDGEVPGSAVLVFDIELLELVSGLPEGYMFIWNGEVSPNLFEEIDRDGNGEVLLEEFSEYIHAQVATGKGKLAPGFNAEMIVKNMFTNQDRNGDGKVTAEEFKLKDQEAKHDEL

SEQ ID NO: 8978 - protein, 570 aa, Mus musculus
MALGARGWRRRSLLLLLLWVTGQAAPVLGLAVSSELQIQQSFVPDECPRTVHSGDFVRYHYVGTFLDGQKFDSSYDRDSTFNVFVGKGQLIAGMDQALVGMCVNERRLVTIPPNLAYGSEGVSGVIPPNSVLHFDVLLVDIWNSEDQVHIQTYFKPPSCPRTIQVSDFVRYHYNGTFLDGTLFDSSHNRMKTYDTYVGIGWLIPGMDKGLLGMCVGEKRIITVPPFLAYGEEGDGKDIPGQASLVFDVALLDLHNPKDTISIENKVVPENCERRSQSGDFLRYHYNGTLLDGTLFDSSYSRNHTFDTYIGQGYVIPGMDEGLLGVCIGERRRIVVPPHLGYGEKGRGSIPGSAVLVFDIHVIDFHNPSDSISITSHYKPPDCSVLSKKGDYLKYHYNASLLDGTLLDSTWNLGKTYNIVLGSGQVVLGMDMGLREMCVGEKRTVIIPPHLGYGEAGVDGEVPGSAVLVFDIELLELVSGLPEGYMFIWNGEVSPNLFEEIDRDGNGEVLLEEFSEYIHAQVATGKGKLAPGFNAEMIVKNMFTNQDRNGDGKVTAEEFKLKDQEAKHDEL

SEQ ID NO: 8979 - protein, 570 aa, Mus musculus
MALGARGWRRRSLLLLLLWVTGQAAPVLGLAVSSELQIQQSFVPDECPRTVHSGDFVRYHYVGTFLDGQKFDSSYDRDSTFNVFVGKGQLIAGMDQALVGMCVNERRLVTIPPNLAYGSEGVSGVIPPNSVLHFDVLLVDIWNSEDQVHIQTYFKPPSCPRTIQVSDFVRYHYNGTFLDGTLFDSSHNRMKTYDTYVGIGWLIPGMDKGLLGMCVGEKRIITVPPFLAYGEEGNGEDIPGQASLVFDVALLDLHNPKDTISIENKVVPENCERRSQSGDFLRYHYNGTLLDGTLFDSSYSRNHTFDTYIGQGYVIPGMDEGLLGVCIGERRRIVVPPHLGYGEKGRGSIPASAVLVFDIHFIDVHNPSDSISITSHYNPPDCSVLIKKGDYLKYHYNASLLDGTLLDSTWNLGKTYNIVLGSGQVVLGMDMGLREMCVGEKRTVIIPPHLGYGEAGVDGEVPGSAVLVFDIELLDLVSGLPEGYMFIWNGEVSPNLFEEIDRDGNGEVLLEEFSEYIHAQVATGKGKLAPGFNAEMIVKNMFTNQDRNGNGKVTAEEFKLKDQEAKHDEL

SEQ ID NO: 8980 - protein, 416 aa, Mus musculus
KPPSCPRTIQVSDFVRYHYNGTFLDGTLFDSSHNRMKTYDTYVGIGWLIPGMDKGLLGMCVGEKRIITVPPFLAYGEEGDGKDIPGQASLVFDVALLDLHNPKDTISIENKVVPENCERRSQSGDFLRYHYNGTLLDGTLFDSSYSRNHTFDTYIGQGYVIPGMDESLLGVCIGERRRIVVPPHLGYGEKGRGSIPGSTVLVFDIHVIDFHNPSDSISITSHYKPPDCSVLSKKGDYLKYHYNASLLDGTLLDSTWNLGKTYNIVLGSGQVVLGMDMGLREMCVGEKRTVIIPPHLGYGEAGVDGEVPGSAVLVFDIELLELVSGLPEGYMFIWNGEVSPNLFEEIDRDGNGEVLLEEFSEYIHAQVATGKGKLAPGFNAEMIVKNMFTNQDRNGDGKVTAEEFKLKDQEAKHDEL

SEQ ID NO: 8981 - protein, 581 aa, Mus musculus
MFLVGSSSHTLHRLRILPLLLLLQTLERGLGRASPAGAPLEDVVIERYHIPRACPREVQMGDFVRYHYNGTFEDGKKFDSSYDRSTLVAIVVGVGRLITGMDRGLMGMCVNERRRLIVPPHLGYGSIGVAGLIPPDATLYFDVVLLDVWNKADTVQSTILLRPPYCPRMVQNSDFVRYHYNGTLLDGTAFDNSYSRGGTYDTYIGSGWLIKGMDQGLLGMCPGEKRKIIIPPFLAYGEKGYGTVIPPQASLVFYVLLLDVHNPKDTVQLETLELPQGCVRRAVAGDFMRYHYNGSLMDGTLFDSSYSRNHTYNTYVGQGYIIPGMDQGLQGACIGERRRITVPPHLAYGENGTGDKIPGSAVLIFDVHVIDFHNPSDPVEIKTLSRPPENCNETSKIGDFIRYHYNCSLLDGTRLFSSHDYEAPQEITLGANKVIEGLDRGLQGMCVGERRQLIVPPHLAHGENGARGVPGSAVLLFEVELVSREDGLPTGYLFVWYQDPSTSLFEDMDLNKDGEVPPEEFSSFIKAQVNEGKGRLMPGQDPDKTISDMFQNQDRNQDGKITAEELKLKSDEDQERVHEEL

SEQ ID NO: 8982 - protein, 581 aa, Mus musculus
MFLVGSSSHTLHRVRILPLLLLLQTLERGLGRASPAGAPLEDVVIERYHIPRACPREVQMGDFVRYHYNGTFEDGKKFDSSYDRSTLVAIVVGVGRLITGMDRGLMGMCVNERRRLIVPPHLGYGSIGVAGLIPPDATLYFDVVLLDVWNKADTVQSTILLRPPYCPRMVQNSDFVRYHYNGTLLDGTGFDNSYSRGGTYDTYIGSGWLIKGMDQGLLGMCPGEKRKIIIPPFLAYGEKGYGTVIPPQASLVFYVLLLDVHNPKDTVQLETLELPQGCVRRAVAGDFMRYHYNGSLMDGTLFDSSYSRNHTYNTYVGQGYIIPGMDQGLQGACIGERRRITVPPHLAYGENGTGDKIPGSAVLIFDVHVIDFHNPSDPVEIKTLSRPPENCNETSKIGDFIRYHYNCSLLDGTRLFSSHDYEAPQEITLGANKVIEGLDRGLQGMCVGERRQLIVPPHLAHGENGARGVPGSAVLLFEVELVSREDGLPTGYLFVWYQDPSTSLFEDMDLNKDGEVPPEEFSSFIKAQVNEGKGRLMPGQDPDKTISDMFQNQDRNQDGKITAEELKLKSDEDQERVHEEL

SEQ ID NO: 8983 - protein, 356 aa, Mus musculus
MGQPTVEEAEQPGALAREFLAATEPEPAPAPAPEEWLDILGNGLLRMKTLVPGPKGSSRPLKGQVVTVHLQMSLENGTRVQEEPELAFTLGDCDVIQALDLSVPLMDVGETAMVTADSKYCYGPQGSRSPYIPPHAALCLEVTLKTAEDGPDLEMLSGQERVALANRKRECGNAHYQRADFVLAANSYDLAIKAITSNTKVDMTCEEEEELLQLKVKCLNNLAASQLKLDHYRAALRSCSQVLEHQPDNIKALFRKGKVLAQQGEYSEAIPILRAALKLEPSNKTIHAELSKLVKKRAAQRSTETALYRKMLGNPSRLPAKCPGKGAWSIPWKWLFGATAVALGGVALSVVIAARN

SEQ ID NO: 8984 - protein, 356 aa, Mus musculus
MGQPTVEEAEQPGALAREFLAATEPEPAPAPAPEEWLDILGNGLLRMKTLVPGPKGSSRPLKGQVVTVHLQMSLENGTRVQEEPELAFTLGDCDVIQALDLSVPLMDVGETAMVTADSKYCYAPQGSRSPYIPPHAALCLEVTLKTAEDGPDLEMLSGQERVALANRKRECGNAHYQRADFVLAANSYDLAIKAITSNTKVDMTCEEEEELLQLKVKCLNNLAASQLKLDHYRAALRSCSQVLEHQPDNIKALFRKGKVLAQQGEYSEAIPILRAALKLEPSNKTIHAELSKLVKKRAAQRSTETALYRKMLGNPSRLPAKCPGKGAWSIPWKWLFGATAVALGGVALSVVIAARN

SEQ ID NO: 8985 - protein, 355 aa, Mus musculus
MGQPTVEEAEQPGALAREFLAATEPEPAPAPAPEEWLDILGNGLLRMKTLVPGPKGSSRPLKGQVVTVHLQMSLENGTRVQEEPELAFTLGDCDVIQALDLSVPLMDVGETAMVTADSKYCYGPQGRSPYIPPHAALCLEVTLKTAEDGPDLEMLSGQERVALANRKRECGNAHYQRADFVLAANSYDLAIKAITSNTKVDMTCEEEEELLQLKVKCLNNLAASQLKLDHYRAALRSCSQVLEHQPDNIKALFRKGKVLAQQGEYSEAIPILRAALKLEPSNKTIHAELSKLVKKRAAQRSTETALYRKMLGNPSRLPAKCPGKGAWSIPWKWLFGATAVALGGVALSVVIAARN

SEQ ID NO: 8986 - protein, 402 aa, Mus musculus
MASWAEPSEPAALRLPGAPLLEGFEVLDGVDDAEEEDDLSGLPPLEDMGQPTVEEAEQPGALAREFLAATEPEPAPAPAPEEWLDILGNGLLRMKTLVPCPKGSSRPLKGQVVTVHLQMSLENGTRVQEEPELAFTLGDCDVIQALDLSVPLMDVGETAMVTADSKYCYGPQGRSPYIPPHAALCLEVTLKTAEDGPDLEMLSGQERVALANRKRECGNAHYQRADFVLAANSYDLAIKAITSNTKVDMTCEEEEELLQLKVKCLNNLAASQLKLDHYRAALRSCSQVLEHQPDNIKALFRKGKVLAQQGEYSEAIPILRAALKLEPSNKTIHAELSKLVKKRAAQRSTETALYRKMLGNPSRLPAKCPGKGAWSIPWKWLFGATAVALGGVALSVVIAGRN

SEQ ID NO: 8987 - protein, 355 aa, Mus musculus
MGQPTVEEAEQPGALAREFLAATEPEPAPAPAPEEWLDILGNGLLRMKTLVPCPKGSSRPLKGQVVTVHLQMSLENGTRVQEEPELAFTLGDCDVIQALDLSVPLMDVGETAMVTADSKYCYGPQGRSPYIPPHAALCLEVTLKTAEDGPDLEMLSGQERVALANRKRECGNAHYQRADFVLAANSYDLAIKAITSNTKVDMTCEEEEELLQLKVKCLNNLAASQLKLDHYRAALRSCSQVLEHQPDNIKALFRKGKVLAQQGEYSEAIPILRAALKLEPSNKTIHAELSKLVKKRAAQRSTETALYRKMLGNPSRLPAKCPGKGAWSIPWKWLFGATAVALGGVALSVVIAGRN

SEQ ID NO: 8988 - protein, 108 aa, Mus musculus
MGVEIETISPGDGRTFPKKGQICVVHYTGMLQNGKKFDSSRDRNKPFKFRIGKQEVIKGFEEGTAQMSLGQRAKLTCTPDVAYGATGHPGVIPPNATLIFDVELLSLE

SEQ ID NO: 8989 - protein, 154 aa, Mus musculus
DSSRTSSGSAVAARRRAGVPAGSAPERSRGRGSREDPLGGGACGTVMGVEIETISPGDGRTFPKKGQICVVHYTGMLQKGKKFDSSRDRNKPFKFRIGKQEVIKGFEEGTAQMSLGQRAKLTCTPDVAYGATGHPGVIPPNATLIFDVELLSLE

SEQ ID NO: 8990 - protein, 108 aa, Mus musculus
MGVQVETISPGDGRTFPKRGQTCVVHYTGMLEDGKKFDSSRDRNKPFKFTLGKQEVIRGWEEGVAQMSVGQRAKLIISSDYAYGATGHPGIIPPHATLVFDVELLKLE

SEQ ID NO: 8991 - protein, 327 aa, Mus musculus
MGGSTRDPGALEGAGILGQSPYERLSQRMLDISGDRGVLKDIIREGTGDTVTPDASVLVKYSGYLEHMDKPFDSNCFRKTPRLMKLGEDITLWGMELGLLSMRKGELARFLFKPAYAYGTLGCPPLIPPNATVLFEIELIDFLDSAESDKFCALSAEQQEQFPLQKVLKVAATEREFGNYLFRQNRFCDAKVRYKRALLLLHRRLATCEEQHLVEPAVLLVLLNLSFVYLKLDRPAMALRYGEQALLIDKRNAKALFRCGQACLLLTEYERARDFLVRAQKEQPCNHDINNELKKLSSHYRDYVDREREMCHRMFAPCGSRSSVGGN

SEQ ID NO: 8992 - protein, 327 aa, Mus musculus
MSVFSRLRNGIPPSRDDCHSPYERLSQRMLDISGDRGVLKDIIREGTGDTVTPDASVLVKYSGYLEHMDKPFDSNCFRKTPRLMKLGEDITLWGMELGLLSMRKGELARFLFKPAYAYGTLGCPPLIPPNATVLFEIELIDFLDSAESDKFCALSAEQQEQFPLQKVLKVAATEREFGNYLFRQNRFCDAKVRYKRALLLLHRRLATCEEQHLVEPAVLLVLLNLSFVYLKLDRPAMALRYGEQALLIDKRNAKALFRCGQACLLLTEYERARDFLVRAQKEQPCNHDINNELKKLSSHYRDYVDREREMCHRMFAPCGSRSSVGGN

SEQ ID NO: 8993 - protein, 327 aa, Mus musculus
MSVFSRLRNGIPPSRDDCQSPYERLSQRMLDISGDRGVLKDIIREGTGDTVTPDASVLVKYSGYLEHMDKPFDSNCFRKTPRLMKLGEDITLWGMELGLLSMRKGELARFLFKPAYAYGTLGCPPLIPPNATVLFEIELIDFLDSAESDKFCALSAEQQEQFPLQKVLKVAATEREFGNYLFRQNRFCDAKVRYKRALLLLHRRLATCEEQHLVEPAVLLVLLNLSFVYLKLDRPAMALRYGEQALLIDKRNAKALFRCGQACLLLTEYERARDFLVRAQKEQPCNHDINNELKKLSSHYRDYVDREREMCHRMFAPCGSRSSVGGN

SEQ ID NO: 8994 - protein, 458 aa, Rattus norvegicus
MTAEEMKVAENGAQSAPLPLEGVDISPKQDEGVLKVIKREGTGTETAMIGDRVFVHYTGWLLDGTKFDSSLDRKDKFSFDLGKGEVIKAWDIAVATMKVGEVCHITCKPEYAYGSAGSPPKIPPNATLVFEVELFEFKGEDLTEDEDGGIIRRIRTRGEGYARPNDGAMVEVALEGYYNDRLFDQRELCFEVGEGESLDLPCGLEEAIQRMEKGEHSIVYLKPSYAFGSVGKERFQIPPHAELRYEVHLKSFEKAKASWEMNSEEKLEQSNIVKERGTVYFKEGKYKQALLQYKKIVSWLEYESSFSGEEMQKVHALRLASHLNLAMCHLKLQAFSAAIESCNKALELDSNNEKGLFRRGEAHLAVNDFDLARADFQKVLQLYPSNKAAKTQLAVCQQRTRRQLAREKKLYANMFERLAEEEHKAKTEVAAGDHPTDAEMKGEPNNVAGNQAQVKTEA

SEQ ID NO: 8995 - protein, 402 aa, Rattus norvegicus
YTGWLLDGTKFDSSLDRKDKFSFDLGKGEVIKAWDIAVATMKVGEVCHITCKPEYAYGSAGSPPKIPPNATLVFEVELFEFKGEDLTEDEDGGIIRRIRTRGEGYARPNDGAMVEVALEGYYNDRLFDQRELCFEVGEGESLDLPCGLEEAIQRMEKGEHSIVYLKPSYAFGSVGKERFQIPPHAELRYEVHLKSFEKAKASWEMNSEEKLEQSNIVKERGTVYFKEGKYKQALLQYKKIVSWLEYESSFSGEEMQKVHALRLASHLNLAMCHLKLQAFSAAIESCNKALELDSNNEKGLFRRGEAHLAVNDFDLARADFQKVLQLYPSNKAAKTQLAVCQQRTRRQLAREKKLYANMFERLAEEEHKAKTEVAAGDHPTDAEMKGEPNNVAGNQAQVKTEA

SEQ ID NO: 8996 - protein, 108 aa, Rattus norvegicus
MGVQVETISSGDGRTFPKRGQTCVVHYTGMLEDGKKFDSSRDRNKPFKFTLGKQEVIRGWEEGVAQMSVGQRAKLIISPDYAYGATGHPGIIPPHATLVFDVELLKLE

SEQ ID NO: 8997 - protein, 108 aa, Rattus norvegicus
MGVQVETISSGDGRTFPKRGQTCVVHYTGMLEDGKKFDSSRDRNKPFKFTLGKQEVIRGWEEGVAQMSVGQRAKLIISPDYAYGATGHTGIIPPHATLVFDVELLKLE

SEQ ID NO: 8998 - protein, 108 aa, Rattus norvegicus
MGVEIETISPGDGRTFPKKGQICVVHYTGMLQNGKKFDSSRDRNKPFKFRIGKQEVIKGFEEGAAQMSLGQRAKLTCTPDVAYGATGHPGVIPPNATLIFDVELLNLE

SEQ ID NO: 8999 - protein, 165 aa, Nostoc sp. PCC 7120
MLACVVVLVLAQVGNKQDSAIAANLPQTPLATISVTENNTPIKKNIMSEASKPPVTTDSGLKYVEIEEGTGATPKSGQTVVVHYTGTLEDGTKFDSSRDRNRPFSFTIGVGQVIKGWDEGLSTMKVGGRRQLIIPSELGYGARGAGGVIPPYATLLFDVELLEVK

SEQ ID NO: 9000 - protein, 241 aa, Buchnera aphidicola str. APS (Acyrthosiphon pisum)
MILYVPKSFSISAPISDIHLQSVLETKNTFHNNNEKLGYILGLSFGNYVNQTFEKQKKIGIELDRNSLLKGIQDAISGNLKLSHQDISSGLKELEKKLKHATKIQLKKNAKENFIQGELYMKNFSKLKGVKKTSSGLLYLLERAGEGEALKDETKITVHYKGTLINGLEFDNSYKRGRPVSLRLKDVILGWKEGLKYIKKGGKIKLVIPPNLAYGTEEVNGIPANSTLIFDIELLDVVNGV

SEQ ID NO: 9001 - protein, 237 aa, Chloroflexus aurantiacus
MTTASGLQYVEIQAGDGEQPQPGAIVAVHYRGMLADGSVFDSSYERGEPIRFPLGVGMVIPGWDEGIGLMRVGGKARLIIPPHLGYGAMGYPPVIPPNATLTFDVELVEVLPGPPEAPQDLPADRYTTSASGLQYADLTVGDGATAMAGRTVTVHYTGWLTDGSMFDSSLSRGEPFVFPLGAGRVIRGWDEGVAGMRVGGRRQLIIPAALAYGNRGAGGVIPPGATLIFEVELLEVR

SEQ ID NO: 9002 - protein, 258 aa, Chlamydophila pneumoniae CWL029
MNRRWNLVLATVALALSVASCDVRSKDKDKDQGSLVEYKDNKDTNDIELSDNQKLSRTFGHLLARQLRKSEDMFFDIAEVAKGLQAELVCKSAPLTETEYEEKMAEVQKLVFEKKSKENLSLAEKFLKENSKNAGVVEVQPSKLQYKIIKEGAGKAISGKPSALLHYKGSFINGQVFSSSEGNNEPILLPLGQTIPGFALGMQGMKEGETRVLYIHPDLAYGTAGQLPPNSLLIFEINLIQASADEVAAVPQEGNQGE

SEQ ID NO: 9003 - protein, 115 aa, Ralstonia metallidurans
MQTTPSGLQFEDTVVGSGDEAKAGKHVTVHYTGWLFENGQAGRKFDSSKDRNDPFVFPLGAGHVIRGWDEGVQGMKVGGTRRLVIPADLGYGARGAGGVIPPNATLLFEVELLAV

SEQ ID NO: 9004 - protein, 131 aa, Ralstonia metallidurans
MKKLSLILAAVALGAAGIAQAETLPSGVVIEHVTKGTGASPKATDTVKVHYRGTLTDGKEFDSSYKRGQPISFPLNRVIPCWTEGVQKMQVGGKAKLTCPASTAYGERGVPGTIPPNATLNFEVELLGIGG

SEQ ID NO: 9005 - protein, 109 aa, Neisseria meningitidis MC58
MGGLIIEDLQEGFGKEAVKGKEITVHYTGWLENGTKFDSSLDRRQPLTITLGVGQVIKGWDEGFGGMKEGGKRKLTIPSEMGYGAHGAGGVIPPHATLIFEVELLKVYE

SEQ ID NO: 9006 - protein, 272 aa, Neisseria meningitidis MC58
MNTIFKISALTLSAALALSACGKKEAAPASASEPAAASSAQGDTSSIGSTMQQASYAMGVDIGRSLKQMKEQGAEIDLKVFTEAMQAVYDGKEIKMTEEQAQEVMMKFLQEQQAKAVEKHKADAKANKEKGEAFLKENAAKDGVKTTASGLQYKITKQGEGKQPTKDDIVTVEYEGRLIDGTVFDSSKANGGPVTFPLSQVIPGWTEGVQLLKEGGEATFYIPSNLAYREQGAGDKIGPNATLVFDVKLVKIGAPENAPAKQPAQVDIKKVN

SEQ ID NO: 9007 - protein, 109 aa, Neisseria meningitidis Z2491
MGSLIIEDLQEGFGKEAVKGKEITVHYTGWLENGTKFDSSLDRRQPLTITLGVGQVIKGWDEGFGGMKEGGKRKLTIPSEMGYGARGAGGVIPPHATLIFEVELLKVYE

SEQ ID NO: 9008 - protein, 272 aa, Neisseria meningitidis Z2491
MNTIFKISALTLSAALALSACGKKEAAPASASEPAAASSAQGDTSSIGSTMQQASYAMGVDIGRSLKQMKEQGAEIDLKVFTEAMQAVYDGKEIKMTEEQAQEVMMKFLQEQQAKAVEKHKADAKANKEKGEAFLKENAAKDGVKTTASGLQYKITKQGEGKQPTKDDIVTVEYEGRLIDGTVFDSSKANGGPVTFPLSQVILGWTEGVQLLKEGGEATFYIPSNLAYREQGAGDKIGPNATLVFDVKLVKIGAPENAPAKQPAQVDIKKVN

SEQ ID NO: 9009 - protein, 152 aa, Deinococcus radiodurans
MTAASYAGQLTFSTSHLSTCDPHDLHGCFTEFLASGRARYSRRMTQDLQVEKYQEGSGQPAEKGKMVSVHYTGTLENGQKFDSSRDRGQPIEFPLGVGYVIPGWDQGIAQMRVGDKARLTIPGHLAYGEAGVPGVIPPNATLIFDVELMDVR

SEQ ID NO: 9010 - protein, 112 aa, Burkholderia fungorum
MSVTTESGLKYEDIVEGTGAEAVAGKTVSVHYTGWLTDGQKFDSSKDRNDPFAFVLGGGMVIKGWDEGVQGMKVGGTRKLTIPPQLGYGVRGAGGVIPPNATLVFEVELLGV

SEQ ID NO: 9011 - protein, 270 aa, Escherichia coli O157:H7 EDL933
  unsure (1)..(270): unsure at all Xaa locations
MKSLFKVTLLATTMAVALHAPITFAAEAAKPATTADSKAAFKNDDQKSAYALGASLGRYMENSLKEQEKLGIKLDKDQLIAGVQDAFADKSKLSDQEIEQTLQAFEARVKSSAQAKMEKDAADNEAKGKEYREKFAKEKGVKTSSTGLVYQVVEAGKGEAPKDSDTVVVNYKGTLIDGKEFDNSYTRGEPLSFRLDGVIPGWTEGLKNIKKGGKIKLVIPPELAYGKAGVPGIPPNSTXVFDVELLDVKPAPKADAKPEADAKAADSAKK

SEQ ID NO: 9012 - protein, 259 aa, Escherichia coli O157:H7 EDL933
  unsure (1)..(259): unsure at all Xaa locations
MMSVVNPPLLYSYGILLLFLFPWDLSSFPRQSFTQRSVADMLPATLYPKKGNTMTTPTFDTIEAQASYGIGLQVGQQLSESGLEGLLPEALVAGIADALEGKHPAVPVDVVHRALREIHERADAVRRQRFQAMAAEGVKYLEENAKKEGVNSTESGLQFRVINQGEGAIPARTDRVRVHYTGKLIDGTVFDSSVARGEPAEFPVNGVIPGWIEALTLMPVGSKWELTIPQELAYGERGAGASIXPFSTLVFEVELLEIL

SEQ ID NO: 9013 - protein, 318 aa, Xylella fastidiosa Dixon
MKIQMRHAVVSLLVAAMSASLPAMSKQSVSVVNNQEKTVLSTEKEKVSYAIGLDIARSHVFELIAQDIDVAALQRAIENVFKGGPPLISEEVAQTTDTALRAMLAARSGQQEASGTAPPAVSKENIGLMLGSYMVGPSLLAIKDDIDLPVLLQALRTRFAKRTPLMDEQEMTTRMQAFVASKNAVVAGKNRDEGSAFLSKNKNEKGVVTTASGLQYMVLRQGSGSRPTPSNNVRVNYEGKLLSGQVFDSSYQRGQPAEFGLGQVIKGWSEGLSLMPVGSKYRFWIPADLAYGQQGTPGGPIGPDATLTFDVELLSILP

SEQ ID NO: 9014 - protein, 318 aa, Xylella fastidiosa Ann-1
MKIQMRHAVVSLLVAAMSASLPAMSKQSVSVVNNQEKTVLSTEKEKVSYAIGLDIARSHVFELIAQDIDVAALQRAIENVFKGGPPLISEEVAQTTDTALRAMLAARSGQQEASGTAPPAVSKENIGLMLGSYMVGPSLLAIKDDIDLPVLLQALRTRFAKRTPLMDEQEMTTRMQAFVASKNAVVAGKNRDEGSAFLSKNKNEKGVVTTASGLQYMVLRQGSGSRPTPSNNVRVNYEGKLLSGQVFDSSYQRGQPAEFGLAQVIKGWSEGLSLMSVGSKYRFWIPADLAYGQQGTPGGPIGPDATLTFDVELLSILP

SEQ ID NO: 9015 - protein, 142 aa, Magnetococcus sp. MC-1
RALVTEKKDSLKKDNLKEAEAFLKENGRKPGVRTTMSGLQYKELKAGTGAKPANRTAKVKVHYEGRLLDGTIFDSSYKRNEPVEFTLSQVVMGWTEGLQLMKTGSIYELYLPPHLAYGEAGRPPVIAPNKLLIFKVELLEVK

SEQ ID NO: 9016 - protein, 264 aa, Treponema pallidum
MILKKEAAGVCSFALLLLAGMSIFSCRKGAEGVSSAGEAADKKALTADQLDPRKVQEQERQKTPLSKKSVGYAFGVLMGVTLQDSKLDVDLGQVWKGLKKTVSADKDKQALADAQDVLQRAFEAYRQKEVEKNSQEAKAFLEENAKKPGVQVTSSGLQYEVVKAADGPKPQGGQRVRTQYKGTLLDGTVFDASRDKPAEFPVDGMVPGVSEGLKLMPVGSTYRFYVPSSLGYGERGIEGVIPPGALLVFEIELQEILPDSASKK

SEQ ID NO: 9017 - protein, 205 aa, Pseudomonas putida KT2440
MSELNLSTDETRVSYGIGRQLGGQLRDNPPPGVSLEAILAGLTDAFNGADSRVSEADLSASFKVIREVMQAEAAAKAEAAAAAGKEFLVENAKREGITTLASGLQFEVLTAGEGAKPTREDNVRTHYHGTLIDGTVFDSSYERGQPAEFPVGGVIAGWTEALQLMNAGSKWRLYVPSELAYGAQGVGSIPPHSVLVFDVELLDVL

SEQ ID NO: 9018 - protein, 250 aa, Pseudomonas putida KT2440
MKQHRLAAAVALVGLVLAGCDQQASSPELKTPAQKASYGIGLNMGKSLAQEGMEDLDSKAVALGIEDAVSKKEQRIKDEELVEAFTALQKRAEERLAKASEEAASAGKKFLEENAKKPGVVTTASGLQYEVVKKADGPQPKPTDVVTVHYEGKLIDGKVFDSSVERGSPIDLPVSGVIPGWVEGLQLMHVGEKYKLFIPAELAYGAQSPSPLIPANSVLVFDLELIAIKDPAQLQGAEPQAEAPEEAPAK

SEQ ID NO: 9019 - protein, 295 aa, Xylella fastidiosa 9a5c
MSKQSVSVVNNEEKTVLSTEKEKVSYAIGLDIARSHVFELIAQDIDVAALQRAIENVFKGGPPLISEEVAQTTDTALRAMLAARSGQQEASGTAPPAVSKENIGLMLGSYMVGPSLLAIKDDIDLPVLLQALRTSFAKRTPLMDEQEMTTRMQAFVASKNAAVAGKNRDEGSAFLSKNKNEKGVITTASGLQYMVLRQGSGSRPTPSNNVRVNYEGKLLSGQVFDSSYQRGQPAEFGLGQVIKGWSEGLSLMPVGSKYRFWIPADLAYGQQGTPGGPIGPDATLTFDVELLSILP

SEQ ID NO: 9020 - protein, 195 aa, Legionella drancourtii
AVLGLALSTAMAADALVTDKDKLSYSIGADLGKNFKTQGIDINPEALAKGMQDGMSGGQLILTEQQMKDVLNKFQKDLMAKRSADFNKKADENKVKGEAFLTSNKAKTGVVVLPSGLQYKILEAGTGAKPSKTDTVTVDYTGTLIDGTVFDSTQKTGKPATFQVSQVIPGWTEALQLMPAGSTWEVYVPADLAYG

SEQ ID NO: 9021 - protein, 198 aa, Legionella drancourtii
VLGLALSTAMAADALVTDKDKLSYSIGADLGKNFKTQGIDINPEALAKGMQDGMSGGQLILTEQQMKDVLNKFQKDLMAKRSADFNKKADENKVKGEAFLTSNKAKTGVVVLPSGLQYKILEAGTGAKPSKTDTVTVDYTGTLIDGTVFDSTQKTGKPATFQVSQVIPGWTEALQLMPAGSTWEVYVPADLAYGPRSV

SEQ ID NO: 9022 - protein, 122 aa, Mycobacterium smegmatis
MTSTEKPEVEFQAGPPPSELTMTDLIVGEGAEAVRGGVVDVHYVGVDYETGEEFDSSWDRGQSANFPLDRLIPGWQEGIPGMKVGGRRQLTVPPELAYGPAGAGHRLSGRTLVFVIDLLGVA

SEQ ID NO: 9023 - protein, 108 aa, Cryptococcus neoformans var. grubii
MGVTVENISAGDGKTFPQPGDNVTIHYVGTLLDGSKFDSSRDRGTPFVCRIGQGQVIRGWDEGVPQLSVGQKANLICTPDYAYGARGFPPVIPPNSTLKFEVELLKVN

SEQ ID NO: 9024 - protein, 454 aa, Anopheles gambiae str. PEST
KPYEMEEYHDLSGDGGVQKRILQEGTGDERPSKGCSVSLHYTGTLDADGKKFDSSRDRNEPFQFTLGTGSVIKAFDMGVASMRLGERCILRCAPEYAYGSSGSPPNIPPNATLNFELEILGWKGEDLSPKSDGGIQRFIVQSGSSKKRPTAGGLVKVHLVGRHEGRVFEERDVEFCLDEGKEVGVVAGVELALEKFHKEETARLLLKPQYAFGAQGNSELGVPPNATVEYTVTLTDFEALVERSMMSQDEMLAQAKLLREKGTKYLKEEKHELALKLYNRALTYLYDQSKEGEAAKLAIYLNKILCLQKLNSHDEAKVACVEALKMDSKNVKALYRRGMSNLALGDLDRALQDFSAVLEIEPENKAALNQVTICKHKIKAYNDQQKKVFANMFTKFAQSDSKKAQEEQSRQPDVMKQKFGEWGADEREHEPTRFEQENPDVIMLNDLHKQFRNM

SEQ ID NO: 9025 - protein, 232 aa, Xylella fastidiosa Temecula1
MISEEVAQTTDTALRAMLAARSGQQEASGTAPPAVSKENIGLMLGSYMVGPSLLAIKDDIDLPVLLQALRTRFAKRTPLMDEQEMTTRMQAFVASKNAVVAGKNRDEGSAFLSKNKNEKGVVTTASGLQYMVLRQGSGSRPTPSNNVRVNYEGKLLSGQVFDSSYQRGQPAEFGLGQVIKGWSEGLSLMPVGSKYRFWIPADLAYGQQGTPGGPIGPDATLTFDVELLSILP

SEQ ID NO: 9026 - protein, 109 aa, Giardia lamblia ATCC 50803
MSAQLEKKVLTPGDGVTKPQAGKKVTVHYDGRFPDGKQFDSSRSRGKPFQFTLGAGEVIKGWDQGVATMTLGEKALFTIPYQLAYGERGYPPVIPPKATLVFEVELLAV

SEQ ID NO: 9027 - protein, 338 aa, Giardia lamblia ATCC 50803
MFDNSAPEPAGEVTEVFMPTFCSDEEREIYNKFKESPETIDVKGNGAILKQVLVAGPEDAEVCPQSDATVYVHYTGKLLNGTVFDSSVTRGQPFNFDIGNMSVIRGWDEGVCGMRVGEKSLFTIASDYAYGSKGSGSIPADATLQFEIELLDVVEKDHEYPHTNEEKLAAAKVRQEAGNALFKSGKYKKAAAKYDKGTQLLEYFIDSTPEVEEERCVLRATLFGNWALCNLRMKDYADCCSHAREGMKILEEKEERASKNVELRLKLCQRVGRGAMGAGRSAEARKYIDMGLDIAKAAGQNDKVQEFENDLKKCDAQIALEARKQQDIYKRLMANMGK

SEQ ID NO: 9028 - protein, 215 aa, Giardia lamblia ATCC 50803
MWLFVSLLVAAASSCFNNPKLILKEKVLCVSYEAPAKKQCSLQAREMYKAKLEFEAKDGQQVVYHNHNAVYGAIDACFVNTDHHFTFAKGQVQFTMGNETVAVTNIEANELIYVSLAPGSGPAPSKGETVMAHYTGMYLNGTVFDTSRKRSFPFMFHLGQNEVISGWDLTFASMQAKEKGIIVVPYQYGYGEQGIPPTIPPRSTLVFEVELVQIN

SEQ ID NO: 9029 - protein, 111 aa, Giardia lamblia ATCC 50803
MSLALYKHILRHGDRRTYPQKGSSVLVHYTAAFKNGKVFDSTRFTNKPISFKVGINQTIRAWDIAIPTMSEGEHAILQVPAEFGYGPRGLFEIVPPNTDLIYDIHLVKVLH

SEQ ID NO: 9030 - protein, 279 aa, Yersinia pestis KIM
MLGVRVLKPMEKWMKSLFKVTLLATAMTLTLNTSTVFAADATSPVVTNSAFKNNDQQSAYALGASLGRYMDNSLKEQEKLGIKLDKDQLIAGVQDAFANKSKLTDEEIEKTLQNFEARVKASAQAKMEQDAKENADKGAKYRDTFAKEKGVKKTASGLLYKVENAGTGDAPKDSDTVVVNYKGTLADGTEFDNSYKRGEPLSFRLDGVIPGWTEGLKQIKKGGKITLVIPPELAYGKAGVPGIPANSTLIFDVELLDVKAAAKADAQEQQPAVDTKAKK

SEQ ID NO: 9031 - protein, 185 aa, Magnetospirillum magnetotacticum
  unsure (1)..(185): unsure at all Xaa locations
MVIAARLMPISQXEGKSSGDRARPGPGDPRRVGRPAPARAFLHPTRGNLVTDQPTLPTASGSFGEKPTLTFPETDAPSGLQVVVLTEGDGPAVTSGRNIVVHYLGQTWGGHVFDNSYDRGDTIAFPIGVGAVIGGWDKGLVGQNVGSRVLLSIPPEHGYGQRGVPQAGIGGTDTLVFVVDVVDVQ

SEQ ID NO: 9032 - protein, 160 aa, Methanosarcina acetivorans C2A
MTEETIKNPDKTIENGDTISVDYVGKLEDGTVFDTSEKEAASEAGIYNEMRDYKPLTFTVGAGQMIKGFDEGVVGMKVGEEKTLEIPPEEAYGEYMEEYVRELPRNAVNFTPETGMQLATENGLRGKVTEVGEENFVVDFNHELAGKTLIFKIKVISLEA

SEQ ID NO: 9033 - protein, 129 aa, Leptospira interrogans serovar lai str. 56601
MKFTRLIFVLAILCAVVAPTFAEDLVIKEIRIGTGKEAFSGSNVTVHYVGTLTNGKKFDSSRDRKNPFTFNLGAGEVIKGWDRGVRGMKEGGIRKLTIPPELGYGSRGAGAAIPPNSTLIFEVELLKVY

SEQ ID NO: 9034 - protein, 311 aa, Streptomyces chrysomallus
RRIAGLLVAPLLLLSAVACGSDDKASDSASSKNGVPAITAGAKFGEKPTLSKGEGDPPKELKTDVISEGDGAKLKNGDAIQVNYLGQAWDSTKPFDNSFDRKQPFDLTLGAGMVIQGWDKGLVGQKVGSRVELVIPPELGYGEQGQGDIKPNATLVFVVDILKATQIPASAKGTEVAQDNVDLPKVGVKTDGKAPTVTIPKSDPPKKLVSNYVLESDGEVVKESDSVVVNYVGMIWKGAKEFDNTYTTGKTQTFPLSQVTLKGLKNGLIDKKVGSRVLLVIPPDQAFGDQQQQAIPKNSTLVFAVDILAKV

SEQ ID NO: 9035 - protein, 312 aa, Streptomyces chrysomallus
MRRIAGLLVAPLLLLSAVACGSDDKASDSASSKNGVPAITAGAKFGEKPTLSKGEGDPPKELKTDVISEGDGAKLKNGDAIQVNYLGQAWDSTKPFDNSFDRKQPFDLTLGAGMVIQGWDKGLVGQKVGSRVELVIPPELGYGEQGQGDIKPNATLVFVVDILKATQIPASAKGTEVAQDNVDLPKVGVKTDGKAPTVTIPKSDPPKKLVSNYVLESDGEVVKESDSVVVNYVGMIWKGAKEFDNTYTTGKTQTFPLSQVTLKGLKNGLIDKKVGSRVLLVIPPDQAFGDQQQQAIPKNSTLVFAVDILAKV

SEQ ID NO: 9036 - protein, 123 aa, Streptomyces chrysomallus
SIEKPEVDFPGGEPPADLAIKDIWEGDGPVAQAGQTVSVHYVGVAFSTGEEFDASWNRGTPLQFQLGAGQVISGWDQGVQGMKVGGRRELIIPAHLAYGDRGAGGGKIAPGETLIFVCDLVAV

SEQ ID NO: 9037 - protein, 124 aa, Streptomyces chrysomallus
MSIEKPEVDFPGGEPPADLAIKDIWEGDGPVAQAGQTVSVHYVGVAFSTGEEFDASWNRGTPLQFQLGAGQVISGWDQGVQGMKVGGRRELIIPAHLAYGDRGAGGGKIAPGETLIFVCDLVAV

SEQ ID NO: 9038 - protein, 177 aa, Caulobacter crescentus CB15
MLAGRRILIEVPMHRRALLVTLAAAGVALSACGPSKKAQENLAAADAFMAKNAKEPGVVTLPQGLQYKVVREGPNGGMHPNKADEVKVHYEGKLIDGTVFDSSYERGVPAVFPLDGLVPAWVIALQRMKAGDEWILYVPPALGYGAQDKGPIPGNSVMIFRIELLDVNRIGPGKPKE

SEQ ID NO: 9039 - protein, 114 aa, Caulobacter crescentus CB15
MVSLPSGLQYKVIASGPKDGPSPKLGDIIKVNYEGKLLSGAVFDSSFARGKAAIMPADGLIRGWLEALPLMKVGDEWTLFIPPELGYGSRDMGEIPPDSTLVFRLKLEGMLSVD

SEQ ID NO: 9040 - protein, 163 aa, Methanosarcina mazei Goe1
MIVMTEDIIENSNKVVEKGDAVSVHYVGKLDDGTVFDTSEKEEAMEAGIYNEMRDYEPLKFTVGAGQMIKGFDEGVVGMKAGEEKILKIPPEEAYGEYVEEYARELPRDAVDFVPEVGMQLATETGLRGTVTEVGEENFVIDFNHALAGKTLTFKVKVISVEE

SEQ ID NO: 9041 - protein, 121 aa, Corynebacterium efficiens YS-314
MNLMEKPQIEAQTGPVPEDLVIKDLIVGDGAEAQPGGVVEVHYVGVDFETGEEFDSSWDRGQTNQFPLTGLIAGWQEGIPGMKVGGRRQLTIPPEAAYGPEGSGHPLSGRTLVFIIDLISA

SEQ ID NO: 9042 - protein, 118 aa, Corynebacterium glutamicum ATCC 13032
MEKPQIELPVGPAPEDLVISDIIVGEGAEARPGGEVEVHYVGVDFETGEEFDSSWDRGQTSQFPLNGLIAGWQEGIPGMKVGGRRQLTIPPEAAYGPEGSGHPLSGRTLVFIIDLISA

SEQ ID NO: 9043 - protein, 162 aa, Thermosynechococcus elongatus BP-1
MVKQWVHRGCGWLLCGIVLVVVWLVAAPMAIASVPLEASTEAAGLMGNPKVVTTPSGLQYEDIVVGSGAQPQVGDRVTVHYTGMLTDGRIFDSSRDRGQPFQFQIGVGQVIKGWDEGVGSMHVGGQRRLIIPPNLGYGARGVGGVIPPNATLIFDVELLGVQ

SEQ ID NO: 9044 - protein, 270 aa, Shigella flexneri 2a str. 301
MKSLFKVTLLATTMAVALHAPITFAAEAAKPATTADSKASFKNDDQKSAYALGASLGRYMENSLKEQEKLGIKLDKDQLIAGVQDAFADKSKLSDQEIEQTLQAFEARVKSSAQAKMEKDAADNEAKGKEYREKFAKEKGVKTSSTGLVYQVVEAGKGEAPKDSDTVVVNYKGTLIDGKEFDNSYTRGEPLSFRLDGVIPGWTEGLKNIKKGGKIKLVIPPELAYGKAGVPGIPPNSTLVFDVELLDVKPAPKADAKPEADAKAADSAKK

SEQ ID NO: 9045 - protein, 223 aa, Shigella flexneri 2a str. 301
MWLICCPLLLYPKKGNTMTTPTFDTIEAQASYGIGLQVGQQLSESGLEGLLPEALVAGIADALEGKHPAVPVDVVHRALREIHERADAVRRQRFQAMAAEGVKYLEENAKKEGVNSTESGLQFRVINQGEGAIPARTDRVRVHYTGKLIDGTVFDSSVARGEPAEFPVNGVIPGWIEALTLMPVGSKWELTIPQELAYGERGAGASIPPFSTLVFEVELLEIL

SEQ ID NO: 9046 - protein, 259 aa, Escherichia coli CFT073
MMSVVNPPLLYSYGILLLFLFPRDLSSFPRQSFTQRSVADMLPATLYPKKGNTMTTPTFDTIEAQASYGIGLQVGQQLSESGLEGLLPEALVAGIADALEGKHPAVPVDVVHRALREIHERADAVRRQRFQTMAAEGVKYLEENAKKEGVNSTESGLQFRVINQGEGAIPARTDRVRVHYTGKLIDGTVFDSSVARGEPAEFPVNGVIPGWIEALTLMPVGSKWELTIPQELAYGERGAGASIPPFSTLVFEVELLEIL

SEQ ID NO: 9047 - protein, 246 aa, Microbulbifer degradans 2-40
MCDFAPILASAQQAFASRGRLRAFNFAKAFLFIRKRGFFMSDNQYTTVEQRVSYGIGRQMGDQLASNPFEGVEPSAVAQGVIDALEGKESPVSPEDLNEAFRVIREKLEAEEKERAKTMGAEGEAFLAENAKKEGVTVTESGLQYEILTEGTGEKPKATSTVKTHYHGTLIDGTVFDSSVERGQPAEFPVNGVIAGWTEALQLMPVGSKWRLSIPYQLAYGERGAGGAIKPFAALVFDVELLEIVA

SEQ ID NO: 9048 - protein, 156 aa, Trichodesmium erythraeum IMS101
MVASQNTPDTIGSTEIQEQVAEGTILNPTITMAENIMAQDDEKVTTTDSGLQYVDVVEGDGATPQRGQTVVVHYTGTLEDGSKFDSSRDRNQPFQFKVGVGQVIKGWDEGVGSMKVGGRRKLIIPSDLGYGSRGAGGVIPPNATLIFDVELLRIAN

SEQ ID NO: 9049 - protein, 329 aa, Bifidobacterium longum DJO10A
MRKSVKSMLSPLGKAVALACSLAMCVSLAACSSSSSDSKSSSSDSSSSSDSSDKKGQIAGVTAKGKLGEKPTISFNTPMTVSDGSYVVLQKGDGDVIEEGDRVCAQGIALNVKDGTELMDTWTKNTPDCSLKVDSKTLSSTYYNQIKGAKINTTIGFGVNAQDSSGYSYILAMTFVSKSKDLEKATGEEVKDVPANLPKVTRAKNGEPSIDMNGQGSVDSLISQTLIKGNGAKLTDKNTVVVKYTGWLTNGKQFDSSWDRDSTIDADLFSDSSGQHQVIEGWQKGLVGQTVGSQVLLVIPPDQAYGDKEQGPIPANSTLVFVIDILAAY

SEQ ID NO: 9050 - protein, 228 aa, Haemophilus somnus 129PT
MLKIKKRSAIALIASAVVSQSVFADKQFNDDVSYALGYFMGKYLTVMGEEHKDVASYNYEKIVAGIKDVVENKSTLTDEKAQETLQELENKARHAKMAKIKAENEKFTAEFAKKSNVKKTESGLLYRIEKMGEGKSIKPTDRVKVHYTGKLANGKVFDSSRERGQPAEFKLNQVILGWKEGLQFIKKGGKIELVIPADLAYGERGAGLIPPSSTLYFDIEILDVTSEK

SEQ ID NO: 9051 - protein, 210 aa, Haemophilus somnus 129PT
MTKQFFAQVALDDVSAQGSYGIGLQIGQQLVDSKLAVKAEAVAKGIYDALNQNPPALELNEVAKALQELQQQASEIAQAQFKQIEEEGKKYLEENAKKDCVKVTETGLQYEVLVEGNGAIPTRQDQVRVHYTGTLIDGTVFDSSVNRGQPAEFPVSGVIAGWIEALSMMPLGSKWKLTIPHHLAYGERGAGASIPPFSTLVFEVELLDIL

SEQ ID NO: 9052 - protein, 124 aa, Pseudomonas syringae pv. syringae B728a
MTERAATGSIAMSKELQITDLHLGEGKAAVKGALITTHYTGTLEDGTVFDSSHERGKPFQCVIGTGRVIKGWDQGLMGMKVGGKRQLFVPAHLAYGDRSMGAHIKPGADLTFEIELLEVLTRDD

SEQ ID NO: 9053 - protein, 284 aa, Pseudomonas syringae pv. syringae B728a
MPVAIDRGGLISSRLYSFALLAHEQGISMKQHRLAAAIALVGLVLAGCDKQASTVELKTPAQKASYGIGLNMGKSLAQEGMDDLDSKAVALGIEDAVGKKDQKLKDEELVEAFSALQKRSEERLAKMSEEASAAGKKFLEENGKKDGVVTTASGLQYQIIKKADGAQPKPTDVVTVHYEGKLIDGKVFDSSVERGSPIDLPVGGVIPGWVEGLQLMHVGEKIKLFIPSDLAYGAQSPSPAIPANSVLVFDLELLGIKDPAAAPTPGADADEEEAAPAASAPAKK

SEQ ID NO: 9054 - protein, 210 aa, Pseudomonas syringae pv. syringae B728a
MRSSVMSEVNLSTDETRVSYGIGRQLGDQLRDNPPPGVDLEAIVAGLRDAFGGQPSRVGQEEMSASFKVIREIMQAEAAAKAEQAAGAGKAYLAENAKREGVTTLASGLQFEVVTAGTGAKPTREDQVRVHYHGTLIDGNVFDSSYDRGEPAEFPVSGVIAGWTEALQLMNAGSKWRLHVPSELAYGAQGVGSIAPHSVLVFDVELLDVL

SEQ ID NO: 9055 - protein, 221 aa, Pseudomonas fluorescens PfO-1
MYARRVPRPSAQRSSVMSEVNLSTDETRVSYGIGRQLGDQLRDNPPPGVSLDAILAGLTDAFAGKESRVSQEAMSASFKVIREIMQAEAAAKAEAAAGEGLAFLAENAKKEGITTLASGLQFEVLTQGEGAKPSREDTVRTHYHGTLIDGTVFDSSYERGQPAEFPVGGVIAGWTEALQLMNAGSKWRLYVPSELAYGAQGVGSIPPHSVLVFDVELLEVL

SEQ ID NO: 9056 - protein, 268 aa, Pseudomonas fluorescens PfO-1
MPVAIGRGGLISSRLYSIALSAHEQGNSMKQHRLAAAVALVSLVLAGCDSQTSVELKTPAQKASYGIGLNMGKSLAQEGMDDLDSKAVAQGIEDAVGKKEQKLKDEELVEAFAALQKRAEERMAKMSEESAAAGKKFLEENGKKAGVTTTASGLQYEVVKKADGPQPKPTDVVTVHYTGKLTNGTVFDSSVERGSPIDLPVSGVIPGWVEGLQLMHVGEKYKLYIPSDLAYGAQSPSPAIPANSVLVFDLELLAIKDPAKEDAAAAKQ

SEQ ID NO: 9057 - protein, 135 aa, Bifidobacterium longum NCC2705
MTDQMPQVNAEFGTTPVIEFPTPEAPKGLKVVELTEGDGPIVRRGDTVTVNYHGVVWGKDTPFDSSFDRHQPASFGIGVGQVIKGWDQTVPGHNVGSRLVVSIPPEYGYGSRGIPQAGIGGEDTLVFVIDIISTR

SEQ ID NO: 9058 - protein, 329 aa, Bifidobacterium longum NCC2705
MRKSVKSMLSPLGKAVALACSLAMCVSLAACSSSSSDSKSSSSDSSSSSDSSDKKGQIAGVTAKGKLGEKPTISFNTPMTVSDGSYVVLQKGDGDVIEEGDRVCAQGIALNVKDGTELMDTWTKNTPDCSLKVDSKTLSSTYYNQIKGAKINTTIGFGVNAQDSSGYSYILAMTFVSKSKDLEKATGEEVKDVPANLPKVTRAKNGEPSIDMNGQGSVDSLISQTLIKGNGAKLTDKNTVVVKYTGWLTDGKQFDSSWDRDSTIDADLFSDSSGQHQVIEGWQKGLVGQTVGSQVLLVIPPDQAYGDKEQGPIPANSTLVFVIDILAAY

SEQ ID NO: 9059 - protein, 161 aa, Desulfovibrio desulfuricans G20
MAEQAKVTMFLYAKNHARSFYMAIKNGDTVRVHYTGTLDDGTVFDSSRDREPLEFTMGEGMLIPGFEAALMGLAAGDTTKTTIQPEDAYGEPNDELILAVAREQVPDHITPEVGLMLQVQTEEGMMDVTITDVTDEQVVLDANHPLAGESLTFEIEVMEVL

SEQ ID NO: 9060 - protein, 253 aa, Pseudomonas aeruginosa PAO1
MKQHRLAAAIALVGLVLSGCDSQTNVELKTPAQKASYGIGLNMGKSLSQEGMDDLDSKAVAKGIEDALGKKKQQLTDEELTEAFAFLQKRAEERMAAIGDENAKAGKKFLEENGKRDGVTTTASGLQYEIVKKADGPQPKATDVVTVHYEGRLTDGTVFDSSIERGSPIDLPVSGVIPGWVEALQLMHVGEKIKLYIPSELAYGAQSPSPAIPANSVLVFDMELLGIKDPSKPDAEPEAGAAAQPEAKADAKK

SEQ ID NO: 9061 - protein, 205 aa, Pseudomonas aeruginosa PAO1
MSELNLTTDEARVSYGIGRQLGDQLRENPVPGMTLDAVLAGLSDAFAGIDSRVSGEALSASFQVIRERMQAEAQAKAEAAAGEGRAYLAENAKREGVTVLPSGLQFEVLSTGEGAKPSREDTVRTHYHGTLIDGTVFDSSYQRGQPAEFPVGGVIAGWVEALQLMNAGSKWRLHVPSELAYGGQAVGSIPPHSVLVFDVELLEIL

SEQ ID NO: 9062 - protein, 113 aa, Pseudomonas aeruginosa PAO1
MNDRLQIEDLLLGDGKEVVKGALITTQYKGTLEDGTLFDSSYERGRPFQCVIGTGRVIKGWDQGLMGMKVGGKRRLFVPSHLAYGERQVGAHIKPHSNLLFEIELLEVLTRDD

SEQ ID NO: 9063 - protein, 255 aa, Shewanella oneidensis MR-1
MKSIYKLSLVALAVIGLSACNQEEKATNASTNVELTTEAQKEAYSVGASIGRYMSGHIKEQEELGLPVDRTLIVTGFTSGLNDQLKLTEEEMQTILQSLDKKLNDKRQEQAKAIAVKNLEDGKKFLDENKAKSGVVTTESGLQYEVLTPGSGEKPAAEDTVEVDYVGTLIDGKEFDSSYKRGESLKFPLNRVIPGWTEGVQLMPVGAKYKFVIPANLAYGDRDNGTIPPNSTLIFEVELKSIEKAAAPAAEPAKK

SEQ ID NO: 9064 - protein, 156 aa, Shewanella oneidensis MR-1
MKMLLAVVVIAGVIFYFFTTMNNQKAAQENIRLGNEFLAQNKTKEGVVTTASGLQYQVLNQGSGTIHPKASDTVTVHYHGTLIDGTIFDSSVERGDPIAFPLNRVIKGWTEGVQLMVEGDKYRFFIPSDLAYGNRSTGKIGGGSVLIFDVELLKIN

SEQ ID NO: 9065 - protein, 111 aa, Shewanella oneidensis MR-1
MTELEIIDLVVGDGKEAVKGALITTQYRGFLQDGTQFDSSYDRGQAFQCVIGTGRVIKGWDQGIMGMKVGGKRKLLVPAHLAYGERQVGAHIKPNSDLTFEIELLEVLTRD

SEQ ID NO: 9066 - protein, 205 aa, Shewanella oneidensis MR-1
MSDKFSTVEQQASYGVGRQMGEQLAANSFEGVDIPAVQAGLADAFAGLESAVSMQELQVAFTEISRRIQAAQEQAAAEASAEGEAFLVENANREGVIVTESGLQYEVLVQGNGAKPTYEDTVRTHYHGSFINGDVFDSSVVRGQPAEFPVSGVIAGWTEALQLMPVGTKLKLYVPHHLAYGERGAGASIPPYSTLVFEVELLDIV

SEQ ID NO: 9067 - protein, 259 aa, Shewanella oneidensis MR-1
MKKSMPTSFIPKTITVATCAALFVSMASFAAPSLKTDADKASYSIGASVGNYISGQVYNQVELGAEVNVDLVVQGFVDALKKQQQLTDEEVVTYLNQRAEELNQVRKANAEKLAAENIKAGEAFLAENKKKAGVTVTESGLQYEVLTKGTGNKPNPEDVVTVEYVGKLIDGTEFENTVGRKEPTRFALMTVIPGWEEGLKLMPMGSKYRFVIPANLAYGNEFVGEIPPQSTLIFEIELKNIEKPSEKKEARMMGMMPAH

SEQ ID NO: 9068 - protein, 266 aa, Yersinia pestis CO92
MKSLFKVTLLATAMTLTLNTSTVFAADATSPVVTNSAFKNNDQQSAYALGASLGRYMDNSLKEQEKLGIKLDKDQLIAGVQDAFANKSKLTDEEIEKTLQNFEARVKASAQAKMEQDAKENADKGAKYRDTFAKEKGVKKTASGLLYKVENAGTGDAPKDSDTVVVNYKGTLADGTEFDNSYKRGEPLSFRLDGVIPGWTEGLKQIKKGGKITLVIPPELAYGKAGVPGIPANSTLIFDVELLDVKAAAKADAQEQQPAVDTKAKK

SEQ ID NO: 9069 - protein, 206 aa, Yersinia pestis CO92
MTTPSFDSVEAQASYGIGLQIGQQLQESGLQGLLPEALLAGLRDAMEGNTPTVPVDVIHRALQEVHEKADKVRIERQQALVDEGKTFLEENAKRDDVTTTESGLQFSVLQAGDGPIPSRQDRVRVHYTGRLVDGTVFDSSVERGQPADFPVSGVIPGWIEALSMMPVGSKWKLYIPHNLAYGERGAGATIPPFSALMFEVELLEIL

SEQ ID NO: 9070 - protein, 260 aa, Vibrio vulnificus CMCP6
MKSVLKVSLLAATVMLAVGCQKEEAKPAAAPQAEQVQAETGKAVHFKSEDDKAAYAIGVSFANYLSASLDKPSEIGINLNKDLVLKGIEHVFAGNPELNEEETRAALEALDKRVAETMQKKAAEKAEAAKKAGDEFRAEFEKQEGVVKTDTGLLYQVITPAEGEKPKDTDTVQVHYKGTLTDGTQFDSSYDRGEPATFPLNRVIPGWTEGVQLMPVGSKFKFVIPPELAYGAQDTPSIPANSTLVFEVELLKIENGDNAQ

SEQ ID NO: 9071 - protein, 141 aa, Vibrio vulnificus CMCP6
MIYRTWNNHKAAEVNFEKGQAFLLENSKKEGVITTESGLQYQVLEKGHGDKHPSASSKVKVHYHGMLTDGTVFDSSVERGSPISFNLNQVIKGWQEGLQYMVEGEKVRLFIPSTLGYGKGGSGPIPPASVLIFDVELLEIQ

SEQ ID NO: 9072 - protein, 186 aa, Vibrio vulnificus CMCP6
MGQQLAGSGLDGLNVAAIAAGIATSLTGDMPAVEVDEINKALHELYTRAESARAEAAKAAAADGEVFLKDNALRPEVTVLESGLQYEIITEGNGEIPTSDKTVRVHYHGELVDGTVFDSSVSRGQPAQFPVTGVIKGWVEALQLMPVGSKWKLYIPHDLAYGERGAGASIPPFAALVFEVELLDIV

SEQ ID NO: 9073 - protein, 192 aa, Methanosarcina barkeri
MKGMKTRNEAVFFIVILLLVSIIFGSGCTDNGNEGGDSRAVKSGDSVKVDYTGKLEDGTVFDTSREDVAKQAGIYVERKEYTPLSFVVGSGQVISGFDEGVIGMKVGEEKTLTIPPDKAYGEYDEARVLAVPVEELNLTNRSEIPEVGQTLRDMYGNQYKVTAVNDTHITLDANHELAGKTLIFDIKVISIE

SEQ ID NO: 9074 - protein, 113 aa, Pseudomonas syringae pv. tomato str. DC3000
MSKALQITDLHIGEGKAAVKGALITTHYTGTLEDGTVFDSSHERGKPFQCVIGTGRVIKGWDQGLIGMKVGGKRTLFVPAHLAYGDRTIGAHIKPGADLKFEIELLEVLTRDD

SEQ ID NO: 9075 - protein, 257 aa, Pseudomonas syringae pv. tomato str. DC3000
MKQHRLAAAIALVGLVLAGCDKQASTVELKTPAQKASYGIGLNMGKSLAQEGMDDLDSKAVALGIEDAVGKKDQKLKDEELVEAFSALQKRSEERLAKMSEEASAAGKKFLEENGKKDGVVTTASGLQYQIIKKADGAQPKPTDVVTVHYEGKLIDGKVFDSSVERGSPIDLPVGGVIPGWVEGLQLMHVGEKVKLFIPSDLAYGAQSPSPAIPANSVLVFDLELLGIKDPAAAPAVGADADEEEDAAPAASAPAKK

SEQ ID NO: 9076 - protein, 224 aa, Pseudomonas syringae pv. tomato str. DC3000
MTVQVLRNYRLRAPQRSSVMSEVNLSTDETRVSYGIGRQLGDQLRDNPPPGVNLEAIVAGLRDAFGGQPSRVGQEEMSASFKVIREIMQAEAAAKAEQAAGAGKAYLAENAKREGVTTLASGLQFEALTSGDGAKPTREDQVRVHYHGTLIDGTVFDSSYDRGEPAEFPVSGVIAGWTEALQLMNAGSKWRLHVPSELAYGAQGVGSIAPHSVLVFDVELLDVL

SEQ ID NO: 9077 - protein, 260 aa, Vibrio parahaemolyticus RIMD 2210633
MKSVLKVSLLAATVMLAVGCQKEETKPEAAPQAEQVQAETGKAVHFKTDDDKAAYAIGVSFANYLSTSIEKPSEIGINLNKDLVLKGIEDVFKGNAELNEEETRAALESLDKRVAEKMQAQAAEKAAAAKKAGDDFRAEFEKQEGVVKTDTGLLYQVITPAEGEKPKDTDTVQVHYKGTLIDGTQFDSSYDRGEPATFPLNRVIPGWTEGVQLMPVGSKFKFVIPPELAYGDQDTPSIPANSTLVFEVELLKVENDKAEQ

SEQ ID NO: 9078 - protein, 157 aa, Vibrio parahaemolyticus RIMD 2210633
MSKFLFPIIIFVLAAFFIYRTWTNHKVADENFAKGQAFLLENAKKEGVITTESGLQYLVLEKGTGDVHPTATSKVKVHYHGTLIDGTVFDSSVNRGEPITFGLNQVIKGWQEGLQYMVVGEKIRLFVPSTLGYGKNGTGPIPPASVLIFDVELLEIQ

SEQ ID NO: 9079 - protein, 206 aa, Vibrio parahaemolyticus RIMD 2210633
MSEIKFETAEQKASYGIGLQMGQQLAGSGLEGLSVDAIAAGIATALTGEMPSIEIDEINNALQELHSRAEAARQEAAKAAAADGEAFLKDNALRPEVNVLESGLQYEIINEGTGEIPTADKSVRVHYHGELTDGTVFDSSVSRGQPAEFPVTGVIKGWVEALQLMPVGSKWKLYIPQDLAYGERGAGAAIPPFAALVFEVELLDIL

SEQ ID NO: 9080 - protein, 251 aa, Buchnera aphidicola str. Bp (Baizongia pistaciae)
MILLKIIHIIFVMIFLSIFFPKSLYASTSLIRKDHIIQKNLENFDDQSAYALGVSLGNYINHSFREQKRLGVILDKNSLLSGIRDSLSGKTILSDQEISMELIKLEKKLKYFEDIVLKKEAHNNKIQGDLYIKKMLKKKDARHTSSGLVFFIKKKGSGKFLHDSDVITVHYKGSLINGNEFDNSYKRGQPLSFSLDSVIPGWIEGLKYIKKGGLIKLVIPPKLAYGETGVPGIPGNSTLIFEIELIDIQSK

SEQ ID NO: 9081 - protein, 194 aa, Bacteroides thetaiotaomicron VPI-5482
MDKFSYAIGLGIGQNLLSMGAKGIAVDDFAQAIKDVLEGNQTAISHQEAREIVNKYFEELEAKMGAAAIEQGKAFLEENKKKPGVVTLPSGLQYEVINEGTGKKAKATDQVKCHYEGTLIDGTLFDSSIKRGEPAVFGVNQVIPGWVEALQLMPEGSKWKLYIPSDLAYGARGAGEMIPPHSTLVFEVELLEVL

SEQ ID NO: 9082 - protein, 291 aa, Bacteroides thetaiotaomicron VPI-5482
MKKVSIFMAIAAAASLASCTAQAPKANLKTDIDSLSYSIGMAQTQGLKGYLTGRLDVDTAYMAEFIKGLNEGANKTSKKDIAYMAGLQIGQQISNQMMKGINQELFAGDSTKTISKDNFMAGFIAGTLEKGGVMTMEAAQEYTRTAMETIKAKAMEEKYADNKAAGEKFLAENKTKEGVKTTESGLQYKVITEGKGEIPADTCKVKVNYKGTLIDGTEFDSSYKRNEPATFRANQVIKGWTEALTMMPVGSKWELYIPQELAYGSRESGQIKPFSTLIFEVELVGIEKDKK

SEQ ID NO: 9083 - protein, 133 aa, Bacteroides thetaiotaomicron VPI-5482
MGRKQEYKETNLEFLKELSSQEGVYALPCGIYYKVLETGTGTVFPNVRSIVTVHYKGSLINGRVFDNSYERNCPEAFRLCDVIDGWQLALQRMRAGDKWIIYIPYTMGYGTRASGPIPAFSTLVFEVELLGVA

SEQ ID NO: 9084 - protein, 230 aa, Coxiella burnetii RSA 493
MKRLILPFLSVGLLLGTTAHAATPLKTEQDKLSYSMGVMTGKAFRKHDIKIDPQTFSMGLSDAYLGKETQMTEAEMRQTLQQFEKQSLQKMQHKMKQTAQQNAEKSRAFLTANKNKPGVKTLANGLQYKVLQAGQGQSPTLNDEVTVNYEGRLINGTVFDSSYKRGQPATFPLKSVIKGWQEALTRMKPGAIWEIYVPPQLAYGEQGAPGVIGPNEALIFKVNLISVKKK

SEQ ID NO: 9085 - protein, 124 aa, Streptomyces avermitilis MA-4680
MSIEKPEIDFPGGEPPADLEIKDIWEGDGPVAKAGNTVSVHYVGVAFSTGEEFDASWNRGTPLQFQLGAGQVIKGWDQGVQGMKVGGRRQLTIPAHLAYGDRGAGGGRIAPGETLIFVCDLVAV

SEQ ID NO: 9086 - protein, 334 aa, Streptomyces avermitilis MA-4680
MRRRSVLLAVPAGLVTLAGCGDEKSDTAKTKPSTSPSPSASASSAPPPKIVDGPLPAITAGTKFDEKPTVAKGSGDPSKDVAVKTVIAGSGKTVAENDYIQANYLGQVWDTAKVFDNSYDRKTPLVIQLAQGSIIDGWRYALAGKKAGSRVLMSVPPTWGYGKQGNSQAGIKGTDTLVFVVDIQNTFNAKSSAQGKDVAQGDAKLPKVGTNTDGKAPSIDVPKTAAPTKLVANYVIEGDGDVVKADSSVLVQYKGVLWDTGKEFDSTYSRSALTSFSLQQVVKGWSQGLTGKKVGSRVLIVVPPKLGYGDSPPSGSGIEKDSTLVFSVDILAKM

SEQ ID NO: 9087 - protein, 255 aa, Chlamydophila caviae GPIC
MKKRWHLMIITMVVSFSIASCDSSSQRGNQIAQVEEKSAANDSQLSVNQQISRTFGHLLARQLRKSEDIMMDIAEVAKGLQGELECKSAPLTESEYEEKMAEIQKLVFEKKAKENLSLAERFLQENKKNSGVVEVQADKLQYRIVKEGTGRAISGKPSALLHYKGTFIDGQVFSSSEANKEPILLPLAQTIPGFALGMQGMKEGETRILYIHPDLAYGTSGQLPPNSLLIFEINLIETTDDSVAAQNTENENTAS

SEQ ID NO: 9088 - protein, 167 aa, Pyrus communis
MIGLLFGVSSAVTGAFEAEGAGLPPEEKPRLCDNSCEKELLKVPMVTTESGLQYKDIKVGQGPSPPVGFQVAANYVAMVPSGQIFDSSLEKGQVYIFRVGSGQVIKGLDEGILSMKVGGKRRLYIPGSLAFPKGLNSAPGRPRVAPSSPVVFDVSLEYVPGLDIEEE

SEQ ID NO: 9089 - protein, 243 aa, Amoeba proteus symbiotic bacterium
MKMRLVAATVIGLAMSTTMAASAAPDAATTASSATSLTTDMDKLSYSIGADLGKNLKKQGIDISPAAMAKGLQDGISGGQLLLTEQQMKDVLNKFQKDLMARRTADFNKKAEENKTKGDSFLNQNKGKDGVVSLPSGLQYKVIQKGDGAKPSKEDTVTVDYTGTLLDGQVFDTTEKTGKPATFKVSQVIPGWTEALQLMPAGSTWEVFVPAGLAYGPRSVGGPIGPNETLIFKIHLISVKKSS

SEQ ID NO: 9090 - protein, 457 aa, Saimiri boliviensis
MTTDEGAKNSRGNPAATVAEQGEDVTSKKDRGVLKIVKRVGHGEETPMIGDRVYVHYNGKLANGKKFDSSHDRNEPFVFSIGKGQVIKAWDIGVATMKKGEICHLLCKPEYAYGATGSLPKIPSNATLFFEVELLDFKGEDLLEDGGIIRRTKRRGEGYSNPNEGARVQIHLEGRCGGRVFDCRDVAFTVGEGEDHDIPIGIDKALEKMQREEQCILHLGPRYGFGEAGKPKFGIEPNAELIYEVTLKSFEKAKESWEMDTKEKLEQAAIVKEKGTVYFKGGKYVQAVIQYGKIVSWLEMEYGLSEKESKASESFLLAAFLNLAMCYLKLREYTKAVECCDKALGLDSANEKGLYRRGEAQLLMNEFESAKGDFEKVLEVNPQNKAARLQIFMCQKKAKEHNERDRRTYANMFKKFAEQDAKEEANKAMSKKTSEGVTNEKLTASHAVEEEKPEGHV

SEQ ID NO: 9091 - protein, 372 aa, Saimiri boliviensis
MDAALLLNVEGVKKTILHGGTGELPNFITGSRVIFHFRTMKCDEERTVIDDSREVGQPMHIIIGNMFKLEVWEILLTSMRVREVAEFWCDTIHTGVYPILSRSLRQMAQGKDPTEWHVHTCGLANMFAYHTLGYEDLDELQKEPQPLIFVIELLQVDAPSDYQRETWNLSNHEKMKVVPVLHGEGNRLFKLGRYEEASSKYQEAIICLRNLQTKEKPWEVQWLKLEKMINTLILNYCQCLLKKEEYYEVLEHTSDILRHHPGIVKAYYVRARAHAEVWNEAEAKADLQKVLELEPSMQKAVRRELRLLENRMAEKQEEERLRCRNMLSQGATWSPAEPPAEPPAESSTEPPAEPPAEPPAELTLTPGHPLQH

SEQ ID NO: 9092 - protein, 232 aa, Legionella anisa
MKMKLVTAAVMGLAMSTVMAADATSLVTDKDKLSYSIGADLGKNFKNQGIDINPDALAKGMQDGMSGAQLILTEQQMKDVLNKFQKELMAKRSAEFNKKAEENKSKGDAFLSTNKSKSGVTVLPSGLQYKVIEAGTGNKPGKADTVTVEYTGTLIDGTVFDSTEKTGKPATFQVSQVIPGWTEALQLMPAGSTWEIYVPSDLAYGPRSVGGPIGPNETLIFKIHLISVKKSA

SEQ ID NO: 9093 - protein, 200 aa, Legionella anisa
TAAVMGLAMSTVMAADATSLVTDKDKLSYSIGADLGKNFKNQGIDINPDALAKGMQDGMSGAQLILTEQQMKDVLNKFQKELMAKRSAEFNKKAEENKSKGDAFLSTNKSKSGVTVLPSGLQYKVIEAGTGNKPGKSDTVTVEYTGTLIDGTVFDSTEKTGKPATFQVSQVIPGWTEALQLMPAGSTWEIYVPSDLAYGP

SEQ ID NO: 9094 - protein, 233 aa, Legionella birminghamensis
MKMKLVAAATMGLAMSTAIAASDVTLSTDMDKLSYSIGADLGKNFKKQGIEINPTAMAKGLQDGMSGSQLMLTEDQMKEVLNNFQKDLMAKRNAEFSKKSEENKAKGETFLSQNKSKEGVVSLPSGLQYKIIETGSGAKPAKDDTVTVEYTGRTIDGQVFDSTDKSGKPATFKVSQVIPGWTEALQLMPAGSTWEIYIPSGLAYGPRSVGGPIGPNETLIFKIHLISVKKAGA

SEQ ID NO: 9095 - protein, 233 aa, Legionella cherrii
MKMKLVTAAIMGLAMSTAMAATDATSLVTDKDKLSYSIGADLGKNFKNQGIDINPDALAKGMQDGMSGAQLILTEQQMKDVLNKFQKDLMAKRSAEFNKKAEENKAKGEAFLSTNKSKSGVVVLPSGLQYKIIEAGTGAKPGKSDTVTVEYTGTLIDGTVFDSTEKAGKPATFQVSQVIPGWTEALQLMPAGSTWEIFVPSDLAYGPRSVGGPIGPNETLIFKIHLISVKKAA

SEQ ID NO: 9096 - protein, 233 aa, Legionella cincinnatiensis
MKMKLVTAAIMGLAMSTAMATTDATSLTTDKDKLSYSIGADLGKNFKNQGIDINPEALAKGMQDGMSGAQLILTEEQMKDVLSKFQKDLMAKRSAEFNKKAEENKAKGEAFLSANKSKPGIVVLPSGLQYKIIDAGTGAKPGKSDTVTVEYTGTLIDGTVFDSTEKAGKPATFQVSQVIPGWTEALQLMPSGSTWEVYVPADLAYGPRSVGGPIGPNETLIFKIHLISVKKAA

SEQ ID NO: 9097 - protein, 204 aa, Legionella cincinnatiensis
TAAIMGLAMSTAMAATDATSLTTDKDKLSYSIGADLGKNFKNQGIDVNPEALAKGMQDGMSGAQLILTEEQMKDVLSKFQKDLMAKRSAEFNKKAEENKAKGEAFLSANKSKAGIVVLPSGLQYKIIDAGTGAKPGKSDTVTVEYTGTLIDGTVFDSTEKAGKPATFQVSQVIPGWTEALQLMPSGSTWEVYVPADLAYGPRSV

SEQ ID NO: 9098 - protein, 204 aa, Legionella cincinnatiensis
TAAIMGLAMSTAMATTDATSLTTDKDKLSYSIGADLGKNFKNQGIDINPEALAKGMQDGMSGAQLILTEEQMKDVLSKFQKDLMAKRSAEFNKKAEENKAKGEAFLSANKSKPGIVVLPSGLQYKIIDAGTGAKPGKSDTVTVEYTGTLIDGTVFDSTEKAGKPATFQVSQVIPGWTEALQLMPSGSTWEVYVPADLAYGPRSV

SEQ ID NO: 9099 - protein, 233 aa, Legionella sainthelensi
MKMKLVTAAIMGLAMSTAMAATDATSLTTDKDKLSYSIGADLGKNFKNQGIDINPDVLAKGMQDGMSGAQLILTEEQMKDVLSKFQKDLMAKRSAEFNKKAEENKAKGEAFLSANKSKPGIVVLPSGLQYKIIDAGTGAKPGKSDTVTVEYTGTLIDGTVFDSTEKAGKPATFQVSQVIPGWTEALQLMPSGSTWEVYVPADLAYGPRSVGGPIGPNETLIFKIHLISVKKAA

SEQ ID NO: 9100 - protein, 234 aa, Legionella wadsworthii
MKMKLVNAAILGLAMSTAMAATDATSLVTDKDKLSYSIGADLGKNFKTQGIDINPDALAKGMQDGMSGAQLILTEQQMKDVLNKFQKDLMAKRSAEFNKKAEENKSKGDSFLSSNKSKSGVVVLPSGLQYKVIEAGTGNKPSKTDTVTVEYTGTLIDGTVFDSTEKTGKPATFQVSQVIPGWTEALQLMPAGSTWEIYVPSDLAYGPRSVGGPIGPNETLIFKIHLISVKKASA

SEQ ID NO: 9101 - protein, 79 aa, Neisseria subflava
HYTGWLEDGTKFDSSLDRRQPLTITLGVGQVIKGWDEGFGGMKEGGKRKLTIPSEMGYGEHGAGGVIPLHATLIFEVEL

SEQ ID NO: 9102 - protein, 249 aa, Legionella brunensis
MKMRLVAAAVIGLTMSTAIVAADASATATPAPATSATPTTSLNSDMDKLSYSIGADLGKNFKKQGIDINPSAMAKGLQDGMSGGQLLLTEQQMKDVLNKFQKDLMAKRTAEFSKKADENKAKGEAFLNQNKAKEGVVSLPSGLQYKIIQKGDGAKPSKEDTVTVEYTGTLIDGQVFDSTDKAGKPATFKVSQVIPGWTEALQLMPAGSTWEVYVPADLAYGPRSVGGPIGPNETLIFKIHLISVKKSDA

SEQ ID NO: 9103 - protein, 234 aa, Legionella oakridgensis
MKLKLVAAAVMGLAMSTAMAATDASSLTTDTDKLSYSIGIDLGKNFKRQGIEINPQAMVQGLQDGISGNKQQLTEEQMKDVLTKFQRDLMTKRTAEYNKKAEDNKKKGEEFLEQNKSKEGVVTLPSGLQYKILKAGDGQKPVKEDTVTVEYTGRLINGEVFDSTEKNGKPASFKLSQVIPGWTEALQLMPAGSVWEVYVPSDLAYGSRSVGGPIGPNETLIFKIHLISVKKSDA

SEQ ID NO: 9104 - protein, 117 aa, Ralstonia solanacearum
MTITTTQSGLQYEDVTVGDGAEATAGKYVTVHYTGWLYENGQAGRKFDSSKDRNDPFAFPLGAGHVIKGWDEGVQGMKVGGTRKLIIPAELGYGARGAGGVIPPNATLLFEVDLLEV

SEQ ID NO: 9105 - protein, 141 aa, Ralstonia solanacearum
MKRLSLLLCATSLALAAYNVQAASAVSAAPAESLPSGVTIQHVAKGSGPSPKATDTVKVHYRGTLADGTEFDSSYKRGQPISFPLNRVIPCWTEGVQKMQVGGKAKLTCPPATAYGARGVPGTIPPNATLNFEVELLGIGG

SEQ ID NO: 9106 - protein, 177 aa, Azotobacter vinelandii
MAARRVLSGRSGRLVESRTECFRWGFWGLIEHSSGRRLPIPATPEKKPPTGAAPNGPPTERERAMSSELQIEDIQPGDGKAVVKGALITTQYNGYLEDGTKFDSSYDRGKPFQCVIGTGRVIKGWDQGLMGMRVGGKRRLFVPARLAYGERQVGAQIKPNSNLIFEIELLEVLTRDD

SEQ ID NO: 9107 - protein, 250 aa, Azotobacter vinelandii
MRQHRLAAAMALVGLVLSGCDSQTNAELKTPAQKASYGIGLNMGKSLAQEGMDDLDSKAVAQGIEDAIGKKEQRLSDEELIEAFAALQKRAEERMAALGEENAKAGKKFLEENAKRTGVVTTASGLQYEVLKKADGAQPKPSDVVTVHYEGRLTDGSVFDSSIERGSPIDLPVSGVIPGWVEGLQLMHVGEKFKLYIPSDLAYGEQSPSPSIPANSVLVFELELLGIKDQPAEQPGGSAPDVEQGEAQGQ

SEQ ID NO: 9108 - protein, 242 aa, Azotobacter vinelandii
MDGGPWRARPSSSRSRSRSRSRACASLSGLFTDWKSVMSELNLSTDEARVSYGIGRQLGDQIRDNPPPGVELEAILAGLADAFGGQASRVEPAALSASFKVIRERMQAETQAKAEAAAASGVSFLAENARREGVTVLASGLQYEVLKAGEGRKPGREDRVRTHYHGTLIDGSVFDSSYQRGQPAEFPVNGVIAGWTEALQLMNSGSKWRLYVPSELAYGDQAIGSIPPHSVLVFDVELLDVL

SEQ ID NO: 9109 - protein, 304 aa, Plasmodium falciparum 3D7
MTTEQEFEKVELTADGGVIKTILKKGDEGEENIPKKGNEVTVHYVGKLESTGKVFDSSFDRNVPFKFHLEQGEVIKGWDICVSSMRKNEKCLVRIESMYGYGDEGCGESIPGNSVLLFEIELLSFREAKKSIYDYTDEEKVQSAFDIKEEGNEFFKKNEINEAIVKYKEALDFFIHTEEWDDQILLDKKKNIEISCNLNLATCYNKNKDYPKAIDHASKVLKIDKNNVKALYKLGVANMYFGFLEEAKENLYKAASLNPNNLDIRNSYELCVNKLKEARKKDKLTFGGMFDKGPLYEEKKNSAN

SEQ ID NO: 9110 - protein, 333 aa, Plasmodium falciparum 3D7
MGVKTSEDVYNFVKDSIKIKEELDNQKKVKKSERKICELKKKPSKYELDYSKFEECINDIENEEKEERHREEHKHDFINNKNPCSHDHSKERQLYEKSTKEKINASNLFNEEGKKAFYEKNYKLACVYFRKGLIQLDYSFPDTNEEEKEQRKLEINLHLNMALTKFHMSKFYECISECSTVLNIDKDNIKAYYRKGQAYMSLDLYDDAKREFLKVLEINPNDNNTKKSLIVLRQKIIIYNKKKKLVCAKFFSSNEKDTSINEKEKYINDKSSVEKNELNMMNRNINKNNIINNNNTIDNNKNRIHINENKNNFFIYISNIFKKCSNFFIAIDY

SEQ ID NO: 9111 - protein, 524 aa, Plasmodium falciparum 3D7
MVDDKNKDKNCSKKDEKNNKIDEDKEFDEKVKNMSFDDKVRKILDLKLEGNNDYKNKNYEKAINKYNEGMKYMKKIENKNEKIKELEIALYLNLSICYSNVEKYNEAYDNITKVLSLDKTNAKGMFRLCQIEFNRCNFDVAKDKIQEFIKIYPDNIEAKKLLKNIILKQNEHNKKQKEAFSKIFEKASGLYDDREKEIMRKKKEKYEKEMKERKEKNEDIIKFEEWEILDNEKRIKEDEEKRKEKEKEREKQNEKEKQKQKEMEKKNKNKNDSLMSSSTTNNNSSYLDIDEEDQKIINETKKMGYCYFKKDIKEDDKKFFEKNIPKKIDTTNYENSNTLYNNQNNKAISSWNAAGTTYEEKDMTKWAKNKIEECLKNIHFKNDDDSDFLNLNNQNGNNFSSVNYPDILPIQYLSKIQLNDVKNLSVDAQIVVIRGTKRHIFELSCNLDITIFINITELHVHKVLVEIKELSSELEAGKTWKNFITIKKNDKLKIPDNLFNDIYDFVIEKVQQQIKNFTQEYNKM

SEQ ID NO: 9112 - protein, 551 aa, Arabidopsis thaliana
MDANFEMPPVGGMNDDDDMDFGDGASFLKVGEEKEIQQGLKKKLLKEGEGYETPENGDEVEVHYTGTLLDGTKFDSSRDRATPFKFTLGQGQVIKGWDIGIKTMKKGENAVFTIPAELAYGESGSPPTIPANATLQFDVELLKWDSVKDICKDGGVFKKILAVGEKWENPKDLDEVLVKFEAKLEDGTVVGKSDGVEFTVKDGHFCPALTKAVKTMKKGEKVLLTVKPQYGFGEKGKPASAGEGAVPPNATLEINLELVSWKTVSEVTDDNKVVKKVLKEGDGYERPNEGAVVKVKLIGKLQDGTVFLKKGHGENEEPFEFKTDEEQVVDGLDRAVMKMKKGEVALVTIDPEYAFGSNESQQELAVVPPNSTVTYEVDLLTFDKERESWDMNTEEKIEAASKKKEEGNSKFKGGKYSLASKRYEKAVKFIEYDTSFSEEEKKQAKALKVACNLNDAACKLKLKDYKQAEKLCTKVLELESTNVKALYRRAQAYMELSDLDLAEFDVKKALEIDPNNREVKLEQKRLKEKMKEFNKKEAKFYGNMFAKLSKE

SEQ ID NO: 9113 - protein, 551 aa, Arabidopsis thaliana
MDANFEMPPVGGMNDDDDMDFGDGASFLKVGEEKEIQQGLKKKLLKEGEGYETPENGDEVEVHYTGTLLDGTKFDSSRDRATPFKFTLGQGQVIKGWDIGIKTMKKGENAVFTIPAELAYGESGSPPTIPANATLQFDVELLKWDSVKDICKDGGVFKKILAVGEKWENPKDLDEVLVKFEAKLEDGTVVGKSDGVEFTVKDGHFCPALTKAVKTMKKGEKVLLTVKPQYGFGEKGKPASAGEGAVPPNATLEINLELVSWKTVSEVTDDNKVVKKVLKEGDGYERPNEGAVVKVKLIGKLQDGTVFLKKGHGENEEPFEFKTDEEQVVDGLDRAVMKMKKGEVALVTIDPEYAFGSNESQQELAVVPPNSTVTYEVDLLTFDKERESWDMNTEEKIEAASKKKEEGNSKFKGGKYSLASKRYEKAVKFVEYDTSFSEEEKKQAKALKVACNLNDAACKLKLKDYKQAEKLCTKVLELESTNVKALYRRAQAYMELSDLDLAEFDVKKALEIDPNNREVKLEQKRLKEKMKEFNKKEAKFYGNMFAKLSKE

SEQ ID NO: 9114 - protein, 555 aa, Arabidopsis thaliana
MDANFEMPPVGGMNDDDDMDFGDGASFLKVGEEKEIQQGLKKKLLKEGEGYETPENGDEVEVHYTGTLLDGTKFDSSRDRATPFKFTLGQGQVIKGWDIGIKTMKKGENAVFTIPAELAYGESGSPPTIPANATLQFDVELLKWDSVKDICKDGGVFKKILAVGEKWENPKDLDEVLVKFEAKLEDGTVVGKSDGVEFTVKDGHFCPALTKAVKTMKKGEKVLLTVKPQYGFGEKGKPASAGEGAVPPNATLEINLELVSWKTVSEVTDDNKVVKKVLKEGDGYERPNEGAVVKVKLIGKLQDGTVFLKKGHGENEEPFEFKTDEEQVVDGLDRAVMKMKKGEVALVTIDPEYAFGSNESQQELAVVPPNSTVTYEVDLLTFDKERESWDMNTEEKIEAASKKKEEGNSKFKGGKYSLASKRYEKAVKFIEYDTSFSEEEKKQAKALKVACNLNDAACKLKLKDYKQAEKLCTKVLELESTNVKALYRRAQAYMELSDLDLAEFDVKKALEIDPNNREVKLEQKRLKEKMKEFNKKEAKFYGNMFAKLSVSISMV

SEQ ID NO: 9115 - protein, 578 aa, Arabidopsis thaliana
MEDDFDTQNQFPEEEPEEMDMDLPDNDEADSAPYLKIGEEMEIGKSGLKKKLVKECEKWDTPENGDEVEVHYTGTLLDGTKFDSSRDRGTPFKFTLGQGHVIKGWDLGIKTMKKGENAIFTIPPELAYGETGSPPTIPPNATLQFDVELIAWRSVKDICGDGGVSKKIIVEGEKWEKPKDLDEVYVKYEARLEDGTIVGKSDGVEFTVKEGHFCPALSKAVKTMKRGEKVLLTVKPQYGFGEFGRPASDGLQAAIPPNATLQIDLELVSWKTVVEVTDDRKVIKKILKEGEGYERPNEGAIVKLKLIGKLQDGTTVFVKKGHEEDEEPFEFKIDEEQVIEGLEKAVMGMKKGEVALITISPEYAFGSSESKQELAVIPPNSTVYYEVELVSFIKEKESWDMNTQERIEAAGKKKEEGNVLFKAGKYARASKRYERGVKYIEYDSTFDEEEKKKSKDLKIACNLNDAACKLKLKDYKEAAKLSTKVLEMDSRNVKAMYRRAHAYLETADLDLAELDIKKALEIDPDNKEVKIEYKKLKEKVKEYNKKDAKFYSNMLSKMLEPHKGTQKEAQAMSIDTKA

SEQ ID NO: 9116 - protein, 457 aa, Aotus nancymaae
MTTDEGAKNSRENPTATVAEQGEDVTSKKDRGVLKIVKRVGHGEETPMIGDKVYVHYNGKLSNGKKFDSSHDRNEPFVFSIGKGQVIKAWDIGVATMKKGEICHLLCKPEYAYGATGSLPKIPSNATLFFEIELLDFKGEDLLEDGGIIRRTKRRGEGYSNPNEGARVQIHLEGRCGGRVFDCRDVAFTVGEGEDHDIPIGIDKALEKMQREEQCILHLGPRYGFGEAGKPKFGIEPNAELIYEVTLKSFEKAKESWEMDTKEKLEQAAIVKEKGTLYFKGGKYVQAVIQYGKIVSWLEMEYGLSEKESKASESFLLAAFLNLAMCYLKLREYTKAVECCDKALGLDSANEKGLYRRGEAQLLMNEFESAKGDFEKVLEVNPQNKAARLQIFMCQKKAKEHNERDRRIYANMFKKFAEQDAKEEANKAMSKKTSEGVTNEKLAVSHAVEEEKPEGHV

SEQ ID NO: 9117 - protein, 582 aa, Glycine max
  unsure (1)..(582): unsure at all Xaa locations
MDEDFDMPTAEAMGEDFDFAGATGGDLDGSSSNPILKVGEEKEIEEGLKKKLLKEGEGWDTPEVGDEVQVHYTGTLLDGTKFDSSRDRGTPFSFTLGQGQVIKGWDQGIITMKKGENSLFTIPAELAYGETGSPPTIPPNATLQFDVELLSWTSVKDICKDGGLFKKILTKGEKWXENPKDPDEVLVKYEACLEDGTLVAKSDGVEFTVNDGYFCPALSKAVKTMKKGEKVLLTVKPQYGFGEKGKPAHDEEGAVPPNATLQITLELVSWKTVSEVTEDKKIIKKILKEGEGYERPNEGAIVKLKVIGKLQDGTLFLKKGHDDEGELFEFKTDEEQVIDGLDRAVLTMKKGEIALLIIGPEYAFGSSESQLELAVVPPNSTVYYEVELVSFEKEKESWDMDTPEKIEAAGKKKEEGNALFKAGKYARASKRYEKAVKFIEYDTAFSEEEKKSSKALKVACNLNNAACKLKLKDYKQAEKLCTKVLDLESTNVKALYRRAQAYIQLADLDLAEFDIKKALEIDPNNRDVKLEYKTLKEKMKEYNKKEAKFYGNMFNKLHKLDSLDSNKPASKDAQPMNIDSKA

SEQ ID NO: 9118 - protein, 566 aa, Glycine max
MGEDFEFPSAGNMEMPEEEEFESPILKVGEEKEIGKMGLKKKLLKEGEGWDTPDSGDQVEVHYTGTLLDGTKFDSSRDRGTPFKFKLGQGQVIKGWDEGIKTMKKGENALFTIPPELAYGESGSPPTIPPNATLQFDVELLSWTSVKDICKDGGILKNIITEGEKWDNPKDLDEVFVKFEARLEDGTVISKSDGVEFTVEEGYFCPALAKAVKTMKKGEKVLLNVKPQYAFGESGRPALGDEGAVPPNAYLQLDLELVSWKTVSDITKDRKVLKKTLKEGEGYERPNDGAVVQVKLIGKLQDGTVFVKKGYVDEQPFEFKIDEEQVIDGLDQAVKNMKKGEIALLIIQPEYAFGPSGSSQELANVPPNSTVYYEVELLSFVKEKESWDLNTQEKIEAAGKKKEEGNAFFKVGKYERASKRYEKAIKFVEYDSSFSDEEKQQTKALKITCNLNNAACKLKLKDYKQAEKMCTKVLELDSRNVKALYRRAQAYLHLVDLDLAEMDIKKALEIEPNNRDVKMEYKILKQKVREHNKKDAQFYGSIFAKMNKLEQATKQEPVPMTIDSKA

SEQ ID NO: 9119 - protein, 544 aa, Glycine max
MEEDFDIPGGEEMDLGEDRVGEEREIGSRGLKKKLLKEGQGWETPEVGDEVQVHYTGTLLDGTKFDSSRDRDSPFSFTLGQGQVIKGWDEGIKTMKKGENAIFTIPPELAYGESGSPPTIPPNATLQFDVELLSWTSVKDICKDGGIFKKIVTEGDKWENPKDPDEVLVKYEVHLENGKLVAKSDGVEFTVREGHYCPALSKAVKTMKKGEKVLLTVKPQYGFGEKGKPEQGDEGAVPPNATLQITLELVSWKTVSEVTDDKKVIKKILKEGEGYERPNEGAIVKVKLIGKLQDGAAFLKKGHDEEEKLFEFKTDEEQVVDGLDRAVLTMKKGEVALLTIAPEYAFGSSESQQELAVVPPNSTVYFEVELVSFEKEKESWDLNTEEKLEAAGKKKEEGNVLFKAGKHARASKRYEKAVKYIEYDSSFGEEEKKQAKTLKVACNLNNAACKLKLKDYKEAEKLCTKVLDLESTNVKALYRRAQAYMQLTDLDLAELDIKKALEIDPNNRDVKLEYRTLKEKVKANNRKEAQFYGNMINKMTKIGS

SEQ ID NO: 9120 - protein, 574 aa, Glycine max
  unsure (1)..(574): unsure at all Xaa locations
MDEDFDMAAAEPMGEDFDXSRGSGSNLLKVGEEKEIEEGLKKKLLKEGEGWDTPEAGDEVQVHYTGTLLDGTKFDSSRDRGTPFSFTLGQGQVIKGWDQGIITMKKGENALFTIPAELAYGESGSPPTIPPNATLQFDVELLSWTSVKDICKDGGLFKKILTXEGEKWENPKDPDEVLVKYEAHLEDGTLVAKSDGVEFTVNDGHFCPAFSKAVKTMKKGEKVLLTVKPQYGFGEKGKPAHGDEGAVPPNATLQITLELVSWKTVSEVTDDKKVIKKILKEGEGYEHPNEGAIVKLKVIGKLQDGTLFLKKGHDDEGGLFEFKTDEEQVIDGLDRAVLTMKKGEVALLTIAPEYAFGSSESQQELAVVPPNSTLYYEIELVSFEKEKESWDMDTPEKIEAAGKKKEEGNALFKAGKYARASKRYEKAVKFIEYDTAFSEEEKKSSKSLKVACNLNNAACKLKLKDYKQAEKLCTKVLDLESTNVKALYRRTQAYIQLADLDLAEFDIKKALELEPNNRDVKLEYVTLKEKMKEYNKKEAKFYGNMFNKLHKLDSLDNSKPASKDAQPINIDSKS

SEQ ID NO: 9121 - protein, 584 aa, Glycine max
  unsure (1)..(584): unsure at all Xaa locations
TRPGQQNSLEPLSHNSKEGKTKTKTPLSFSESSSERKAAMEEDFDIPGGEEMDLGEDXXVGEEREIGSGGLKKKLLKEGQGWETPEVGDEVQVHYTGTLLDGTKFDSSRDRDSPFSFTLGQGQVIKGWDEGIKTMKKGENAIFTIPPELAYGESGSPPTIPPNATLQFDVELLSWTSVKDICKDGGIFKKIITEGEKWENPKDPDEVLVKYEVHLENGKLLAKSDGEEFTVREGHYCPALSKAVKTMKKGEKVLLTVKPQYGFGEKGKPEQGDEGAVPPNATLQITLELVSWKTVSEVTDDKKVIKKILKEGEGYERPNEGAIVKVKLIGKLQDGTAFLKKGHDEEEKLFEFKTDEEQVVDGLDRAVLTMKKGEVALLTIAPDYAFGTSESQQELAVVPPNSAVYFEVELVSFEKEKESWDLNTEEKLEAAGKKKEEGNVLFKASKYARASKRYEKAVKYIEYDSSFGEEEKKQAKTLKVACNLNNAACKLKLKDYKEAEKLCTKVLDLESTNVKALYRRAQAHMQLTNLDLAELDIKKALDIDPNNRDVKLEYRTLKEKVKENNRKEAQFYGNMINKMTKIGS

SEQ ID NO: 9122 - protein, 568 aa, Glycine max
  unsure (1)..(568): unsure at all Xaa locations
MGEDFEFPSAGNMEMPEEEEFESPILKVGEEKEIGKMGLKKKLLKEGEGWDTPDSGDQVEVHYTGTLLDGTKFDSSRDRGTPFKFKLGQGQVIKGWDEGIKTMKKGENALFTIPPELAYGESGSPPTIPPNATLQFXDVELLSWTSVKDICKYGGILKNIITEEEKWDNPKELYEVVXVKFXARLKDAKVISKSEAVEFTVEEGYFCPALAKAVKTMKKGEKVLLNVKPQYAFGESGRPALGDEGAVPPNAYLQLDLELVSWKTVSDITKDRKVLKKTLKEGEGYERPNDGAVVQVKLIGKLQDGTVFVKKGYVDEQPFEFKIDEEQVIDGLDQAVKNMKKGEIALLIIQPEYAFGPSGSSQELANVPPNSTVYYEVELLSFVKEKESWDLNTQEKIEAAGKKKEEGNAFFKVGKYERASKRYEKAIKFVEYDSSFSDEEKQQTKALKITCNLNNAACKLKLKDYKQAEKMCTKVLELDSRNVKALYRRAQAYLHLVDLDLAEMDIKKALEIEPNNRDVKMEYKILKQKVREHNKKDAQFYGSIFAKMNKLEQATKQEPVPMTIDSKA

SEQ ID NO: 9123 - protein, 587 aa, Glycine max
  unsure (1)..(587): unsure at all Xaa locations
TRPGQQNSLEPLSHNSKEGKTKTKTPLSFSESSSERKAAMEEDFDIPGGEEMDLGEDXXVGEEREIGSGGLKKKLLKEGQGWXETPEVGDEVQVHYTGTLLDGTKFDSSRDRDSPFSFTLGQGQVIKGWDEGIKTMKKGENAIFTIPPELAYGESGSPPTIPPNATLQFDVELLSWTSVKDICKDGGIFKKIITEGEKWENPKDPDEVLVKYEVHLENGKLLAKSDGEEFTVREGHYCPALSKAVKTMKKGEKVLLTVKPQYGFGEKGKPEQGDEGAVPPNATLQITLELVSWKTVSEVTDDKKVIKKILKEGEGYERPNEGAIVKVKLIGKLQDGTAFLKKGHDEEEKLFEFKTDEEQVVDGLDRAVLTMKKGEVALLTIAPDYAFGTSESQQELAVVPPNSAVYFEVELVSFEKEKESWDLNTEEKLEAAGKKKEEGNVLFKASKYARASKRYEKAVKYIEYDSXSFGEEEKKQAQTLKVAXCNLNNAACKLKFKDYKEAEKLCTKVLDLESTNVKALYRRAQAHMQLTNLDLAELDIKKALDIDPNNRDVKLEYRTLKEKVKENNRKEAQFYGNMINKMTKIGS

SEQ ID NO: 9124 - protein, 517 aa, Glycine max
  unsure (1)..(517): unsure at all Xaa locations
MEEDFDIPGGEEMDLGEDKVGEEREIGSRGLKKKLLKEGQGWETPEVGDEVQVHYTGTLLDGTKFDSSRDRDSPFSFTLGQGQVIKGWDEGIKTMKKGENAIFTIPPELAYGESGSPPTIPPNATLQFDVELLSWTSVKDICKDGGIFKKIVTEGDKWENPKDPDEVLVKYEVHLENGKLVAKSDGVEFTVREGHYCPALSKAVKTMKKGEKVLLTVKPQYGFGEKGKPEQGDEGAVPPNATLQITLELVSWKTVXEVTDDKKVIKKILKEGEGYERPNEGAIVKVKLIGKLQDGAAFLKKGHDEEEKLFEFKTDEEQVVDGLDRAVLTMKKGEVALLTIAPEYAFGSSESQQELAVVPPNSTVYFEVELVSFEKEKESWDLNTEEKLEAAGKKKEEGNXLFKXSKYARXSXXYEKAVKYIEYDSSFXEEEKKQAKTLKVACNLNNXACKLKXKDXKEAEKLCTKVLDLESTNVKAXYRRAQAHMQLTNLDLXELDIXKAFDIDPNNRDVKLEXRXL

SEQ ID NO: 9125 - protein, 599 aa, Glycine max
  unsure (1)..(599): unsure at all Xaa locations
HLIVVLTIRGRLFENRLERKKHGGAVVGGGXIRRGARRGSGLKVGEEREFSGFKKKLFKPGQGLEFPNFDDVVTFAVLEXGTLLDGTTFDSTRERDQPRTFALGKDDIGAGLDRAIITMKKGEVALFTLPGXXGGDGDVSLDSDDSSAVRFEVELVSWITVVDVCKDGGVVKKILEKGSGIERPGDLDEVLVKYRVVLGDGTVVVETRGVEFHMKDGHLFPILPKVIMTMTRGEKAELILQPQYAFGEKGREAGSGLCSIPPNSVLHVNIELVSFKPVINVTGDSKVIKKILKEGEGAFTANEGANVTVSFTAMLEDGTVFEKRGIGETLPLEFITDEEQVITGLDRAVATMKKGERAIISIHPDYAFGDVEVRRDIAIVPPGSNVVYDIEMMDFIKEKAPWELNSKEKIEVAGRMKEEGNVLFKVGNYQRAGKKYEKAADFVDEDGSFGFDEQKQAQTLKVSCWLNSAACSLKLNDFPGAIKLCSQVLDVEFCNVKAFYRRAQAYIETGDYLLADVDIKKALVVDPQNRDVKVIQKKLKQLQADSDKKDAKLYENMLARKTKDPSMAIKRLKVEKDQGENEEVARMEIDEVADSAVIQ

SEQ ID NO: 9126 - protein, 199 aa, Glycine max
  unsure (1)..(199): unsure at all Xaa locations
NQTFLPTTPIPTFRQHGRGLRHADGSSSSNPILKVGEEKEIGKEGLKKKLLKEGEGWDTPEVGDEVQVHYTGTLLDGTKFDSSRDRGTPFSFTLGQGQVIKGWDQGIITMKKGENSLFTIPAELAYGETGSPPTIPPNATLQFDVELLSWTSVKDICKDGGLFKKILTKGEKWENPKDPDEVLVKYEACLEDGLLCKIX

SEQ ID NO: 9127 - protein, 216 aa, Glycine max
  unsure (1)..(216): unsure at all Xaa locations
XGDKKILKKIKNLGEGFDRPNEGSQVKVIYLCKGEDGMIIESKXXSEEEPFEFTTQEEQVPEGLERAIMTMKKGEQALVTVDAEYLCDYNNSKGNTAXXNKVLYYEVELVDFVKEKPFWKMDTQEKIEACERKKHDGNLLFKVENFRHASKKYEKAVKYIEFDHSFSEDEKCRANTLHLSCNLNNAACKLKLGEYIEASRLCTKVLEQDPLNIKAL

SEQ ID NO: 9128 - protein, 173 aa, Glycine max
  unsure (1)..(173): unsure at all Xaa locations
TKTYTSLFFSEPYSDRKAAREEDWHIPGRKEMDLGEHXXVCEEREIGSCGLNKKLLXEGHGWETPXEVGDEAQVHFRGTLLHGTKLDYSRERDSSLRLTLGQGQVIEGCDEGIXRTMMKGENAIMTIRAQLAYGESGSPTTIPANATLQLDVELVSXTSAQDICKDGGLFNNI

SEQ ID NO: 9129 - protein, 411 aa, Glycine max
  unsure (1)..(411): unsure at all Xaa locations
XRVSYVGPPPQQKEGLIKEILREGTGDEHPQSGLNVHVHYVGTLTNGKKFDSSRDRDEPFTFKLNAGQVIKGWDVGVSSMKRGELAKFTLQPDYAYGATGAGRDIPPNATLIFEVELLDWEDEEDISDARNESIKMKSLNRTGQSTVDVGDRVTVKIIARVLTVDDQNKPSVESEIETAELTFTIDDEEVLPAVEKSPKETTYLKHSETFLNAVKNLNNQRDRKLELEIEILNVEAYKGKSAESPKEKLEAAKSLKDEGNKLFQQGRYGIAKRKYKRATDLCDYLDSFEKDEIAASKDVQLPVYLNLAAVDLKEKDYKSAIDNSTKALAIDAKNVKGLYRRAQAHQGLGDLEQAKTDLAAALVAEPSNAAVQTLLNKIKQDIVNAKTKEKQLYGRMFKXINYYYXKKKKKX

SEQ ID NO: 9130 - protein, 145 aa, Glycine max
  unsure (1)..(145): unsure at all Xaa locations
LVSCKTVSEVTHDNKVIRKILKXGAGYERPNEGAIAKVQRVGKLQDGAAFLEKVHHTEEQTXFAFFPGEEQVADGLNRGVFPMKKGEVALMTIAPEYAFGSSKSQQEGLVVPPTPTVYLEVXVVSFEKEKESWDLFTKEKLEAAG

SEQ ID NO: 9131 - protein, 214 aa, Glycine max
  unsure (1)..(214): unsure at all Xaa locations
PEFPARPRVRTVQQTQRRGCCCFDNPRKMVVVLSDQDEFDEEPGEVVDSAPPQKVGEERQFSGFKKKLLKRGQGWEFPNFDDVVTVRCVGIGTLLDGTXRFDYTRERDRPRTFALGKDDVVLGWTVGFAPMKKGEGGICSRLPRRWVGXXGDFTRDSDGSVVRFEVELVSWITVVDVCKDGGVVKKIMEKGSGNERPGDLDEVLVKYQVVLDDG

SEQ ID NO: 9132 - protein, 159 aa, Glycine max
  unsure (1)..(159): unsure at all Xaa locations
KHTHFFCAERLALLDEDFDLPCGDVMDLGDYMVREERKITSRALQKTLLMVRKGLQTPNCLDETTXLYAGTLLDGTDDYISTDRDXACICALGQGRDIXGWGDGIKTMKKGENAILTIPPELFYGECGCNSTITANATLQIDAYLVSWTSVKDICKDGX

SEQ ID NO: 9133 - protein, 133 aa, Glycine max
  unsure (1)..(133): unsure at all Xaa locations
XARGLAPMEDDFYLLGGXEMDLGQYDVSEEREIGSGGLMKKLLTDCLGWDTLEFGDHVLVHYTGTLLDGTKFDSSRDRDLLLRLTLGHWHVTKGWDEGITTMKKCENAHFTVPTELAYGESGSHSTITTNATL

SEQ ID NO: 9134 - protein, 151 aa, Vicia faba
MKLFSIFLIFTIFIIASALVAAKSAADVTELQIGVKYKPASCEVQAHKGDKVKVHYRGKLTDGTVFDSSFERNSPIDFELGGGQVIKGWDQGLLGMCLGEKRKLKIPAKLGYGEQGSPPTIPGGATLIFDTELVGVNDKSLSEEKSTSSEL

SEQ ID NO: 9135 - protein, 583 aa, Oryza sativa (japonica cultivar-group)
MDDDFEMPPPGADDDLMMGEDGMGDFGGADGPPLKVGEEKEIGKQGLRKKLLKEGEGWETPEVGDEVEVHYTGTLLDGKKFDSSRDRGTPFKFKLGQGQVIKGWDLGIKTMKKGENAVFTIPPDLAYGESGSPPTIPASATLQFDVELLSWTSVKDICQDGGIFKKILKEGEKWENPKDLDEVFVKYEARLEDGTVISKSEGAEFTVKDGFFCPALAKAVKTMKKAEKVLLTVKPQYGFGENGRPAAGEEGAVPPNATLLVNLELVSWKTVTEIGDDKKILKKVLTEGTGYERPNEGAVVKVKITGKLQDGTIFTKKGHDEPEPFEFKTDEEEVIDGIDRAVLNMKNGEVALVTIPPEYAFGSTESKQDLAVVPPNSTVIYEVELVSFVKDKESWDLNNTEKIETAGAKKEEGNALFKLGKYVRASKRYEKAAKFIEYDSSFSEDEKKQSKQLKVTCNLNNAACKLKLKDYKQAEKLCTKVLELDSQNVKALYRRAQAYMQLADLELAEVDIKKALEIDPDNRQVLDVKLTYKNLKEKVKEYNKKDAKFYSNMFAKMTKQPAEDGKAGSGAESKQGSEPVTAA

SEQ ID NO: 9136 - protein, 552 aa, Oryza sativa (japonica cultivar-group)
MKLSELGKPDEYLFVWRGEIGRLENFGSERGGGRGSSPGFAKWTVQEPAGERFDWLETEGFYCCEAQVHFTGKRLDGTWFASTREDGVPLTFILGQENVMRGFSMAVSSMQAGEKAVFTIPPELAGTKSRCPVDIPGNIAPNEALRFDIELISLVTITDILDDEGILKKIIKRGLGSDKPCDLDEALVNYNACLEDGMSVSMSEGIEFNLAEGFFCPAFARAVETMTEGEEAVLIVKPEYGFGERGRPSIGDEAGVPPDATLYVYLQLMSWKTVRHIGENGTILKKTLCRGNLEGQQTENEAVVGVRLIGKLQDGAVFDQRGHEGDEPFKFMVDEEQVSEGLEEAVLTMREGEVSLFTIPPHRVQDQLLVVPVGSSVTYEIELVSVVNDKPPRLMSQAETIEAAAEKEKEGDKLFSSSKFLRAYRRYYKARQIILLRFGRGETDEEIKQMLISLTFKAAECANQLQRYEQAYHRYREILEYDPGNVKAREMTGRAFPEASLGIDTAAMHRGLDQVILARRKDPLEYKEYIVLLRLWPDAATAGMDDDGAQRS

SEQ ID NO: 9137 - protein, 589 aa, Oryza sativa (japonica cultivar-group)
MKSRSNKTWHKINGVHFTGELVDGTQFVSSRENDIPERFILGQEDVMHGFNLAVSSMQPGEKAIFTIPSALTMTKAGSPASIPSNIPPNQTLRFEIELIAMFTIIDIFKDEGILKKIVKNAEPDRKQSHSSDFVFVKYDACLMDGTSVSKSEGVEFSLTDGFFCPAFAHAVHTMKEGEEAVLIVKPKYAFGEQGRPSQGEEAAVPPDATLYVHLLFVCWIRRIGEDQAIAKKTLRIGNSQRIHTQSQAVVKVRLLGKLQDGTVFDRRGYGDDEPFEFVVDEGQVIDGLDESVMTMEEGEVAEFTIPPQHAFDAVGSDQHQFAFVPRNATVVYKIELLSVVNEKHPLYIPSRDEIVEYASRKEEEGDIYFNLGKHLRAHRRYFKARQIIEYSRFGVRRGKINLIKLLSIPTSEIDAQLEEMWISCTFKAAKCAIQLGCYMQASCYYSEVLNYDVANVQAQQQQTLLQEFPDGSSRDPDAMQRGFEQFPPEYESELQLNATFTPAAFSPRRKGEHPYRGEIIGFPDVQANSSQPASTPSTAPSTPNPATPQTNALATGTSGTPSGSAAQSSGTINTNRGFLFRCFGPSPTS

SEQ ID NO: 9138 - protein, 328 aa, Oryza sativa (japonica cultivar-group)
MAVSSMQAGEKAVFTIPPELAGTKSRCPADIPANLPPNQALQFDVELISLITITDILDNEGILKKTMKRGVGNDKPCDLDEVLVNYNACLEDGMSVSMSEGVEFNLAEGFFCPAFARAVETMTEGEEVVLIVKLEYGFGERGRPSIGDEAAVPPDATLYVYLQLMSWKTVRHIGQNGTILKKTLRRGNLEGQHTENQAVVGVRLIGKLHDGAVFDQRGHQGDEPFEFVVDEEQVSDGLEEAVLTMWEGEVSLFTIPPQCLQDQHVVVPPGSSVTYEIELVSVVNDKHPWLMSQAESVEAAVEKEKEGDKLFGSSKYLRAYRRYYKVLN

SEQ ID NO: 9139 - protein, 283 aa, Oryza sativa (japonica cultivar-group)
MRPGERAIFTIPPKLAITKSGSPASIPSSIPPEQTLRFEIELISLFAITDILENGSILKKIIKRPLPDKSPSNHADTVIVNYNACLEDGNSVSKSERLELNLASRTALKYAVKTMREGEEAIFIVKPRYAFGAQGRDSTGDQAAVPPDATLYLYVQLAERKTAKQNEAEEKGPFIDGPNEAKTTARALPKRRPVKPGFSLPVVQNDRPTYPGHVLFVPHVVEEEEADAGQAASTTTSGLATPPTTAADVGTSAATNSSAAQGSGIVKTETGFLFKRFRPWPAN

SEQ ID NO: 9140 - protein, 233 aa, Legionella tucsonensis
MKMKLVTAAVMGLAMSTVIAATDATSLVTDKDKLSYSIGADLGKNFKNQGIDINPDALAKGMQDGMSGAQLILTEQQMKDVLNKFQKELMAKRSAEFNKKAEENKSKGETFLSTNKSKSGVVVLPSGLQYKIIEAGTGNKPGKSDTVTVEYTGTLIDGTVFDSTEKAGKPATFQVSQVIPGWTEALQLMPAGSTWEIYVPSDLAYGPRSVGGPIGPNETLIFKIHLISVKKSA

SEQ ID NO: 9141 - protein, 213 aa, Legionella pneumophila
ATDATSLATDKDKLSYSIGADLGKNFKNQGIDVNPEAMAKGMQDAMSGAQLALTEQQMKDVLNKFQKDLMAKRTAEFNKKADENKVKGEAFLTENKNKPGVVVLPSGLQYKVINSGNGVKPGKSDTVTVEYTGRLIDGTVFDSTEKTGKPATFQVSQVIPGWTEALQLMPAGSTWEIYVPSGLAYGPRSVGGPIGPNETLIFKIHLISVKKSS

SEQ ID NO: 9142 - protein, 233 aa, Legionella pneumophila
MKMKLVTAAVMGLAMSTAMAATDATSLATDKDKLSYSIGADLGKNFKNQGIDVNPEAMAKGMQDAMSGAQLALTEQQMKDVLNKFQKDLMAKRTAEFNKKADENKVKGEAFLTENKNKPGVVVLPSGLQYKVINSGNGVKPGKSDTVTVEYTGRLIDGTVFDSTEKTGKPATFQVSQVIPGWTEALQLMPAGSTWEIYVPSGLAYGPRSVGGPIGPNETLIFKIHLISVKKSS

SEQ ID NO: 9143 - protein, 233 aa, Legionella pneumophila
MKMKLVTAAVMGLAMSTAMAATDATSLATDKDKLSYSIGADLGKNFKNQGIDVSPEAMAKGMQDAMSGAQLALTEQQMKDVLNKFQKDLMAKRTAEFNKKADENKVKGEAFLTENKNKPGVVVLPSGLQYKVINAGNGVKPGKSDTVTVEYTGRLIDGTVFDSTEKTGKPATFQVSQVIPGWTEALQLMPAGSTWEIYVPSGLAYGPRSVGGPIGPNETLIFKIHLISVKKSS

SEQ ID NO: 9144 - protein, 233 aa, Legionella pneumophila
MKMKLVTAAVMGLAMSTAMAATDATSLATDKDKLSYSIGADLGKNFKNQGIDVSPEALAKGMQDAMSGAQLALTEQQMKDVLNKFQKDLMAKRTAEFNKKADENKVKGEAFLTENKNKPGVVVLPSGLQYKVINAGNGVKPGKSDTVTVEYTGRLIDGTVFDSTEKTGKPATFQVSQVIPGWTEALQLMPAGSTWEIYVPAGLAYGPRSVGGPIGPNETLIFKIHLISVKKSS

SEQ ID NO: 9145 - protein, 233 aa, Legionella pneumophila
MKMKLVTAAVMGLAMSTAMAATDATSLATDKDKLSYSIGADLGKNFKNQGIDVNPEAMAKGMQDAMSGAQLALTEQQMKDVLNKFQKDLMAKRTAEFNKKADENKVKGEAFLTENKNKPGVVVLPSGLQYKVINAGNGVKPGKSDTVTVEYTGRLIDGTVFDSTEKTGKPATFQVSQVIPGWTEALQLMPAGSTWEIYVPSGLAYGPRSVGGPIGPNETLIFKIHLISVKKSS

SEQ ID NO: 9146 - protein, 221 aa, Dictyostelium discoideum
MWNYIKSNMKYHIQSINQKSPPHVPKLGVQTLNVDEYIEICANNQFKCGNYNIPLALHGVDENLPFRYHRLTHSPDRINNRRSYTKYNVKILSIFSNVSNHRVYDLLPFSQISSTNSNPNGVEITIIKEGKGNIPPVGSNVTVHHAGTLTNGTVFDSSRKRGQPFNFKLGAGQVIKGWDEGVAKMKVGETSKLTISPDFGYGARGAGGVIPPNATLVNNEK

SEQ ID NO: 9147 - protein, 233 aa, Fluoribacter bozemanae
MKMKLVTAAVMGLAMSTVIAATDATSLVTDKDKLSYSIGADLGKNFKNQGIDINPDALAKGMQDGMSGAQLILTEQQMKDVLNKFQKELMAKRSAEFNKKAEENKSKGEAFLSTNKSKSGVVVLPSGLQYKVIEAGTGNKPGKSDTVTVEYTGTLIDGTVFDSTEKTGKPATFQVSQVIPGWTEALQLMPAGSTWEIYVPSDLAYGPRSVGGPIGPNETLIFKIHLISVKKSA

SEQ ID NO: 9148 - protein, 246 aa, Legionella erythra
MKIKLVAAAVVSLAMTTAFAETTTPAAGTTTPATAATPATLTTDIDKLSYSIGADLGKNFKKQGIEISPSAMAKGLQDGMSGSQLLLTEDQMKDVLSKFQKDLMAKRNAEFTKKAEENKSKGEAFLSQNKTKEGVVTLPSGLQYKIIEKGNGAKPTKEDTVTVEYTGRLIDGQVFDSTDKTGKPATFKVSQVIPGWTEALQLMPAGSVWEVYVPASLAYGPRSVGGPIGPNETLIFKIHLISVKKS

SEQ ID NO: 9149 - protein, 249 aa, Legionella hackeliae
MKMRLVAAAVIGLTMSTAIIAADASATATTAPATSATPATSLNSDMDKLSYSIGADLGKNFKKQGIDISPAAMAKGLQDGMSGGQLLLTEQQMKDVLNKFQKDLMAKRNADFNKKAEENKAKGDAFLNQNKAKDGVVSLPSGLQYKILQKGDGAKPSKDDTVTVEYTGTLIDGQVFDSTDRTGKPATFKVSQVIPGWTEALQLMPAGSTWEVYVPADLAYGPRSVGGPIGPNETLIFKIHLISVKKSDA

SEQ ID NO: 9150 - protein, 233 aa, Legionella longbeachae
MKMKLVTAAIMGLAMSTAMAATDATSLTTDKDKLSYSIGADLGKNFKNQGIDINPDVLAKGMQDGMSGAQLILTEEQMKDVLSKFQKDLMAKRSAEFNKKAEENKAKGDAFLSANKSKPGIVVLPSGLQYKIIDAGTGAKPGKSDTVTVEYTGTLIDGTVFDSTEKAGKPATFQVSQVIPGWTEALQLMPAGSTWEVFVPADLAYGPRSVGGPIGPNETLIFKIHLISVKKAA

SEQ ID NO: 9151 - protein, 234 aa, Legionella adelaidensis
MKMKLVAAAAMGLAMTTSIAATNNTQLTTEMDKLSYSIGTDLGKNFKRQGIDINPDMMAKGLKDGMNGGTLLLTDDQMKEVLNKFQKDLMAKRTAEFNKKAEQNKTKGESFLKENKQKQGVVTLPSGLQYKIITAGNGEKPNKEDTVTVEYTGRLIDGEVFDSTERTGKPATFNLSQVIPGWTEALQLMPAGSTWEIYVPADLAYGTRSVGGPIGPNETLIFNIHLISVKKNNA

SEQ ID NO: 9152 - protein, 241 aa, Legionella fairfieldensis
MKMRLVAAAVMSLAMSTTIAATDAATVAPSATSLNSDMDKLSYSIGADLGKNFKKQGIDISPAAMAKGLQDGMNGSQLLLTEDQMKDVLNKFQKDLMMKRTAEFNKKSEENKTKGEAFLNANKTKEGVVSLPSGLQYKIIEKGEGAKPAKEDTVTVEYTGRLIDGQVFDSTDKTGKPATFKVSQVIPGWTEALQLMPAGSTWEVYVPSALAYGPRSVGGPIGPNETLIFKIHLISVKKSDA

SEQ ID NO: 9153 - protein, 233 aa, Legionella gratiana
MKMKLVTAAIMGLAMSTAMAATDATSLATDKDKLSYSIGADLGKNFKNQGIEVNPEVLAKGMQDGMSGAQLILTEEQMKDVLSKFQKDLMAKRSAEFNKKAEENKAKGDAFLSANKAKPGVVALPSGLQYKIIDAGNGTKPGKSDTVTVEYTGTLIDGTVFDSTEKAGKPATFQVSQVIPGWTEALQLMPAGSTWEVYVPSDLAYGPRSVGGPIGPNETLIFKIHLISVKKEA

SEQ ID NO: 9154 - protein, 249 aa, Legionella lansingensis
MKMRLVAAAVMGLAMTTAIAASNTPNAATPTTPAAATSATSLNSDTDKLSYSIGADLGKNFKKQGIDINPSAMAKGLQDGMSGGQLLLTEQQMKEVLNKFQKDLMAKRNAEFTKKAEENKIKGEAFLTANKNKDGVISLPSGLQYKVLEKGNGAKPTKNDTVTVEYTGKLIDGQVFDSTERTGKPATFKVSQVIPGWTEALQLMPAGSTWEVYVPADLAYGPRSVGGPIGPNETLIFKIHLISVKKSEA

SEQ ID NO: 9155 - protein, 229 aa, Legionella londiniensis
VAAAAMSLAMTTTMAATTTPALDSDIDKLSYSIGIDLGKNFKRQGIDVNPEILVKGLQDGISGNKSLLTEDQMRDVLDKFQKDLMAKRTAEYKKQAEENKAKGEAFLKENKAKEGVVTLPSGLQYKIIKSGSGKKPGKEDTVTVEYTGRLINGEVFDSTEKTGKPATFKLSQVIPGWTEALQLMSEGAIWEIYVPSDLAYGPRSVGGPIGPNETLIFKIHLLEVNKSEA

SEQ ID NO: 9156 - protein, 202 aa, Legionella londiniensis
AAAAMSLAMTTTMAATTTPALDSDIDKLSYSIGIDLGKNFKRQGIDVNPEILVKGLQDGISGNKSLLTEDQMRDVLDKFQKDLMAKRTAEYKKQAEENKAKGEAFLKENKAKEGVVTLPSGLQYKIIKSGSGKKPGKEDTVTVEYTGRLINGEVFDSTEKTGKPATFKLSQVIPGWTEALQLMSEGAIWEIYVPSDLAYGPR

SEQ ID NO: 9157 - protein, 241 aa, Legionella nautarum
MKMRLVAAAAMSLAMSTTIAANATATSTPSAASLSTDTDKLSYSIGADLGKNFKKQGIDISPAAMAKGLQDGMSGGQLLLTEEQMKEVLNKFQKELMMKRSAEFNKKSEENKSKGEAFLKDNKSKDGVVSLPSGLQYKILEKGDGAKPAKDDTVTVEYTGRLINGQVFDSTEKTGKPATFKVSQVIPGWTEALQLMPSGSTWEVYIPSDLAYGPRSVGGPIGPNETLIFKIHLISVKKTDA

SEQ ID NO: 9158 - protein, 233 aa, Legionella parisiensis
MKMKLVTAAVMGLAMSTVMAATDATSLVTDKDKLSYSIGADLGKNFKNQGIDINPDALAKGMQDGMSGAQLILTEQQMKDVLNKFQKELMAKRSAEFNKKAEENKSKGDAFLSTNKSKSGVTVLPSGLQYKVIEAGTGNKPGKSDTVTVEYTGTLIDGTVFDSTEKTGKPATFQVSQVIPGWTEALQLMPAGSTWEIYVPSDLAYGPRSVGGPIGPNETLIFKIHLISVKKSA

SEQ ID NO: 9159 - protein, 233 aa, Legionella quinlivanii
MKMKLVAAATMSLAMSTAIAASDVTLSTDMDKLSYSIGADLGKNFKKQGIEVNPAAMAKGLQDGMAGSQLMLTDDQMKEVLNKFQKDLMSKRNAEFSKKSEENKSKGEAFLNQNKTKEGVVSLPSGLQYKVIETGSGAKPAKEDTVTVEYTGKTIDGQVFDSTDKSGKPATFKVSQVIPGWTEALQLMPAGSTWEIYIPSNLAYGPRSVGGPIGPNETLIFKIHLISVKKAAA

SEQ ID NO: 9160 - protein, 233 aa, Legionella santicrucis
MKMKLVTAAIMGLAMSTAMAATDATSLTTDKDKLSYSIGADLGKNFKNQGIDINPEALAKGMQDGMSGAQLILTEEQMKDVLSKFQKDLMAKRSAEFNKKAEENKAKGDAFLSANKSKPGIVVLPSGLQYKIIDAGTGSKPGKSDTVTVEYTGTLIDGTVFDSTEKAGKPATFQVSQVIPGWTEALQLMPSGSTWEVYVPADLAYGSRSVGGPIGPNETLIFKIHLISVKKAA

SEQ ID NO: 9161 - protein, 234 aa, Legionella shakespearei
MKMKLVTAAVMGLALSTAMAAPDATSLPTDKDKLSYSIGADLGKNFKTQGIDINPEALAKGMQDGMSGTQLILTEQQMKDVLNKFQKDLMAKRTSEFNKKADENKSKGEAFLVENKGKTGVVVLPSGLQYKIIDAGTGAKPGKSDTVTVEYTGRLIDGTVFDSTDKTGKPATFQVSQVIPGWTEALQLMPAGSTWEIYVPSALAYGSRSVGGPIGPNETLIFKIHLISVKKTEA

SEQ ID NO: 9162 - protein, 233 aa, Legionella worsleiensis
MKMKLVAAAVLGLAMSGAMAADATSLTTDKDKLSYSIGADLGKNFKNQGIDVNPEALAKGMQDGMSGTQLILTEQQMKDVLNKFQKDLMAKRTSEFNKKADENKLKGEAFLTANKTKAGVVVLPSGLQYKILDAGTGTKPGKSDTVTVEYTGRLIDGTIFDSSDKTGKPATFQVSQVIPGWTEALQLMPAGSTWEIYVPAALAYGSRSIGGPIGPNETLIFKIHLISVKKSDA

SEQ ID NO: 9163 - protein, 243 aa, Tatlockia micdadei
MKMRLVAAAAMGLAMSTTIAATATTDATTSAPGTSLTTDTEKLSYSIGADLGKNFKKQGIEISPAAMAKGLQDGMSGGQLLLTDDQMKDVLNKFQKDLMMKRSAEFNKKAEENKSKGEAFLNENKSKEGVVSLPSGLQYKILERGDGAKPTKDDVVTVEYTGKLIDGQVFDSTEKTGKPATFKVSQVIPGWTEALQLMPAGSTWEVYIPSNLAYGPRSVGGPIGPNETLIFKIHLISVKKSDA

SEQ ID NO: 9164 - protein, 243 aa, Tatlockia micdadei
MKMRLVAAAAMGLAMSTTIAATATTDATTSAPGTSLTTDTEKLSYSIGADLGKNFKKQGIEISPAAMAKGLQDGMSGGQLLLTDDQMKDVLNKFQKDLMMKRSAEFNKKAEENKSKGEAFLNENKSKEGVVSLPSGLQYNILERGDGAKPTKDDVVTVEYTGKLIDGQVFDSTEKTGKPATFKVSQVIPGWTEALQLMPAGSTWEVYIPSNLAYGPRSVGGPIGPNETLIFKIHLISVKKSDA

SEQ ID NO: 9165 - protein, 213 aa, Tatlockia micdadei
AAAAMGLAMSTTIAATATTDATTSAPGTSLTTDTEKLSYSIGADLGKNFKKQGIEISPAAMAKGLQDGMSGGQLLLTDDQMKDVLNKFQKDLMMKRSAEFNKKAEENKSKGEAFLNENKSKEGVVSLPSGLQYKILERGDGAKPTKDDVVTVEYTGKLIDGQVFDSTEKTGKPATFKVSQVIPGWTEALQLMPAGSTWEVYIPSNLAYGPRSV

SEQ ID NO: 9166 - protein, 235 aa, Legionella spiritensis
MKMKLVAAAALGLAMSTTHAVTDTTTNLNTDTDKLSYSIGADLGKNFKKQGIDISPAAMAKGIQDGMSGGELMMTDQQMKDVLNKFQKDLMARRSAEFAKKSEENKARGETFLSQNKTKDGVVTLPSGLQYKVIEKGNGAKPSKDDVVTVEYTGRLIDGQVFDSTEKTGKPATFKVSQVIPGWTEALQLMPAGSTWEVYIPASLAYGSRSVGGPIGPNETLIFKIHLISVKKTDA

SEQ ID NO: 9167 - protein, 205 aa, Legionella spiritensis
AAAALGLAMSTTHAVTDTTTNLNTDTDKLSYSIGADLGKNFKKQGIDISPAAMAKGIQDGMSGGELMMTDQQMKDVLNKFQKDLMARRSAEFAKKSEENKARGETFLSQNKTKDGVVTLPSGLQYKVIEKGNGAKPSKDDVVTVEYTGRLIDGQVFDSTEKTGKPATFKVSQVIPGWTEALQLMPAGSTWEVYIPASLAYGSRSV

SEQ ID NO: 9168 - protein, 237 aa, Legionella feeleii
MKMRLVAAAVISMAMSTTIAAADATATTSLNSDMDKLSYSIGADLGKNFKKQGIEISPAAMAKGLQDGMSGGQLLLTEQQMKDVLNKFQKDLMAKRNAEFTKKAEENKAKGEAFMSQNKAKEGVVSLPSGLQYKIIQAGTGAKPAKDDTVTVEYTGKLIDGQVFDSTEKTGKPATFKVSQVIPGWTEALQLMPAGSTWEVYVPAGLAYGPRSVGGPIGPNETLIFKIHLISVKKSDA

SEQ ID NO: 9169 - protein, 586 aa, Oryza sativa
MDDDFEMPPPGADDDLMMGEDGMGDFGGADGPPLKVGEEKEIGKQGLRKKLLKEGEGWETPEVGDEVEVHYTGTLLDGKKFDSSRDRGTPFKFKLGQGQVIKGWDLGIKTMKKGENAVFTIPPDLAYGESGSPPTIPASATLQFDVELLSWTSVKDICQDGGIFKKILKEGEKWENPKDLDEVFVKYEARLEDGTVISKSEGAEFTVKDGFFCPALAKAVKTMKKAEKVLLTVKPQYGFGENGRPAAGEEGAVPPNATLLVNLELVSWKTVTEIGDDKKILKKVLTEGTGYERPNEGAVVKVKITGKLQDGTIFTKKGHDEPEPFEFKTDEEEVIDGIDRAVLNMKNGEVALVTIPPEYAFGSTESKQDLAVVPPNSTVIYEVELVSFVKDKESWDLNNTEKIETAGAKKEEGNALFKLGKYVRASKRYEKAAKFIEYDSSFSEDEKKQSKQLKVTCNLNNAACKLKLKDYKQAEKLCTKVLELDSQNVKALYRRAQAYMQLADLELAEVDIKKALEIDPDNRDVKLTYKNLKEKVKEYNKKDAKFYSNMFAKMTKQPAEDGVSSSSHLNCETLKLYTFHNPQSLF

SEQ ID NO: 9170 - protein, 580 aa, Oryza sativa
MDDDFEMPPPGADDDLMMGEDGMGDFGGADGPPLKVGEEKEIGKQGLRKKLLKEGEGWETPEVGDEVEVHYTGTLLDGKKFDSSRDRGTPFKFKLGQGQVIKGWDLGIKTMKKGENAVFTIPPDLAYGESGSPPTIPASATLQFDVELLSWTSVKDICQDGGIFKKILKEGEKWENPKDLDEVFVKYEARLEDGTVISKSEGAEFTVKDGFFCPALAKAVKTMKKAEKVLLTVKPQYGFGENGRPAAGEEGAVPPNATLLVNLELVSWKTVTEIGDDKKILKKVLTEGTGYERPNEGAVVKVKITGKLQDGTIFTKKGHDEPEPFEFKTDEEEVIDGIDRAVLNMKNGEVALVTIPPEYAFGSTESKQDLAVVPPNSTVIYEVELVSFVKDKESWDLNNTEKIETAGAKKEEGNALFKLGKYVRASKRYEKAAKFIEYDSSFSEDEKKQSKQLKVTCNLNNAACKLKLKDYKQAEKLCTKVLELDSQNVKALYRRAQAYMQLADLELAEVDIKKALEIDPDNRDVKLTYKNLKEKVKEYNKKDAKFYSNMFAKMTKQPAEDGKAGSGAESKQGSEPVTAA

SEQ ID NO: 9171 - protein, 557 aa, Oryza sativa
  unsure (1)..(557): unsure at all Xaa locations
MDDDFEMPPPGADDDLMMGEDGMGDFGGADGPPLKVGEEKEIGKQGLRKKLLKEGEGWETPEVGDEVEVHYTGTLLDGKKFDSSRDRGTPFKFKLGQGQVIKGWDLGIKTMKKGENAVFTIPPDLAYGESGSPPTIPASATLQFDVELLSWTSVKDICQDGGIFKKILKEGEKWENPKDLDEVFVKYEARLEDGTVISKSEGAEFTVKDGFFCPALAKAVKTMKKAEKVLLTVKPQYGFGENGRPAAGEEGAVPPNATLLVNLELVSWKTVTEIGDDKKILKKVLTEGTGYERPNEGAVVKVKITGKLQDGTIFTKKGHDEPEPFEFKTDEEEVIDGIDRAVLNMKNGEVALVTIPPEYAFGSTESKQDLAVVPPNSTVIYEVELVSFVKDKESWDLNNTEKIETAGAKKEEGNALFKLGKYVRASKRYEKAAKFIEYDSSFSEDEKKQSKQLKVTCNLNNAACKLKLKDYKQAEKLCTKVXIQFFLQKTHLLCVLVNXRDVKLTYKNLKEKVKEYNKKDAKFYSNMFAKMTKQPAEDGKAGSGAESKQGSEPVTAA

SEQ ID NO: 9172 - protein, 242 aa, Legionella israelensis
MKLKLVAATVMSMAISTAIAATDASSLNTDVEKLSYSIGADLGKNFKKQGIEIDPQAMAAGMKDGMSGDKLKLTEQQMRDVLNKFQQELMAKRNAEFNKKAAENKAKGEAFLEQNKGKEGVVTLPSGLQYKILEKGTGTKPSKSDTVTVEYTGRLINGQVFDSSERVGKPATFKVSQVIPGWTEALQLMPAGSTWEIYVPSDLAYGPRSIGGPIGPNETLIFKIHLISVKKDKDTDTAQKDA

SEQ ID NO: 9173 - protein, 219 aa, Legionella jamestowniensis
AAAVIGLTMSTAIVAADASTPATTTTPATSAPATSLNSDMDKLSYSIGADLGKNFKKQGIDINPAAMAKGLQDGMTGGQLLLTEQQMKDVLNKFQKDLMAKRNAEFNKKADENKAKGEAFLNQNKAKDGVVTLPSGLQYKILQKGDGAKPAKEDTVTVEYTGKLVDGQVFDSTERTGKPATFKVSQVIPGWTEALQLMPAGSTWEVYVPADLAYGPRSV

SEQ ID NO: 9174 - protein, 225 aa, Legionella jamestowniensis
MKMRLVAAAVIGLTMSTAIVAADASTPATTTTPATSAPATSLNSDMDKLSYSIGADLGKNFKKQGIDINPAAMAKGLQDGMTGGQLLLTEQQMKDVLNKFQKDLMAKRNAEFNKKAEENKAKGEAFLNQNKAKDGVVTLPSGLQYKVLQKGDGAKPAKEDTVTVEYTGKLVDGQVFDSTERTGKPATFKVSQVIPGWTEALQLMPAGSTWEVYVPADLAYGPRSV

SEQ ID NO: 9175 - protein, 219 aa, Legionella jamestowniensis
AAAVIGLTMSTAIVAADASTPATTTTPATSAPATSLNSDMDKLSYSIGADLGKNFKKQGIDINPAAMAKGLQDGMTGGQLLLTEQQMKDVLNKFQKDLMAKRNAEFNKKAEENKAKGEAFLNQNKAKDGVVTLPSGLQYKVLQKGDGAKPAKEDTVTVEYTGKLVDGQVFDSTERTGKPATFKVSQVIPGWTEALQLMPAGSTWEVYVPADLAYGPRSV

SEQ ID NO: 9176 - protein, 251 aa, Legionella jordanis
MKMRLVAAAVMGLAMTSAIAANDATNTATSATPASNTATSATSLNSDMDKLSYSIGADLGKNFKKQGIDINPAAMAKGLQDGMSGVQLQLTEQQMKDVLNKFQKDLMAKRNAEFSKKADENKSKGEAFLNANKSKEGVVSLPSGLQYKILEKGNGVKPSKDDTVTVEYTGKLIDGQVFDSTERTGKPATFKVSQVIPGWTEALQLMPAGSTWEVYVPADLAYGPRSVGGPIGPNETLIFKIHLISVKKSDA

SEQ ID NO: 9177 - protein, 559 aa, Triticum aestivum
MDDDFDIPAGDDMMMGDGMGDFGGAEGPGMKVGEENEIGKQGLKKKLLKEGEGWDTPEVGDEVEVHYTGTLLDGKKFDSSRDRDDTFKFKLGQGQVIKGWDQGIKTMKKGENALFTIPPELAYGESGSPPTIPANATLQFDVELLSWTSVRDIAKDGGIFKKILKEGDKWENPKDPDEVFVKYEARLEDGTVVSKSEGVEFTVKDGHLCPALAKAVKTMKKGEKVLLAVKPQYGFGEMGRPAAGEGGAVPPNASLVIDLELVSWKTVTEIGDDKKILKKVLKEGEGYERPNEGAVVTVKITGKLQDGTVFLKKGHDEQEPFEFKTDEEAVIEGLDRAVLNMKKGEVALVTIPPEYAYGSTESKQDAIVPPNSTVIYEVELVSFVKDKESWDLNNSEKIEAAGTKKEEGNALFKSGKYARASKRYEKAAKFIEYDTSFSEDEKKQSKQLKITCNLNNAACKLKLKDYKQAEKLCTKVLELDSRNVKALYRRAQAYTQLADLELAEVDIKKALEIDPENRDVKLTYKTLKEKIKEINKKDAKFYSNMFSKMTKPSAEESKA

SEQ ID NO: 9178 - protein, 559 aa, Triticum aestivum
  unsure (1)..(559): unsure at all Xaa locations
MDDDFDIPAGDDMMMGDGMGDFGGAEGPGMKVGEENEIGKQGLKKKLLKEGEGWDTPEVGDEVEVHYTGTLLDGKKFDSSRDRDDTFKFKLGQGQVIKGWDQGIKTMKKGENALFTIPPELAYGESGSPPTIPANATLQFDVELLSWTSVRDIAKDGGIFKKILKEGDKWENPKDPDEVFVKYEARLEDGTVVSKSEGVEFTVKDGHLCPALAKAVKTMKKGEKVLLAVKPQYGFGEMGRPAAGEGGAVPPNASLVIDLELVSWKTVTEIGDDKKILKKVLKEXEGYERPNEGAVVTVKITGKLQDGTVFLKKGHDEQEPFEFKTDEEAVIEGLDRAVLNMKKGEVALVTIPPEYAYGSTESKQDAIVPPNSTVIYEVELVSFVKDKESWDLNNSEKIEAAGTKKEEGNALFKSGKYARASKRYEKAAKFIEYDTSFSEDEKKQSKQLKITCNLNNAACKLKLKDYKQAEKLCTKVLELDSRNVKALYRRAQAYTQLADLELAEVDIKKALEIDPENRDVKLTYKTLKEKIKEINKKDAKFYSNMFSKMTKPSAEESKA

SEQ ID NO: 9179 - protein, 248 aa, Legionella rubrilucens
MKIKLVAAAVVGLAMTTAFADTNTTAPSTTTPATAATPATLNTDIDKLSYSIGADLGKNFKKQGIEISPSAMAKGLQDGMSGSQLLLTEDQMKDVLSKFQKDLMAKRNAEFTKKAEENKSKGEAFLSQNKSKEGVVTLPSGLQYKIIEKGNGAKPTKDDTVTVEYTGRLIDGQVFDSTDKTGKPATFKVSQVIPGWTEALQLMPAGSVWEVYVPASLAYGPRSVGGPIGPNETLIFKIHLISVKKSDA

SEQ ID NO: 9180 - protein, 232 aa, Legionella steigerwaltii
MKMKLVTAAIMGLAMSTAMAATDATSLVTDKDKLSYSIGADLGKNFKNQGIDINPDALAKGMQDGMSGAQLILTEQQMKDVLNKFQKDLMAKRSAEFNKKAEENKAKGEAFLSSNKSKSGVVVLPSGLQYKIIEAGTGNKPGKSDTVTVEYTGTLIDGTVFDSTEKTGKPATFQVSQVIPGWTEALQLMPAGSTWEIFVPSDLAYGPRSVGGPIGPNETLIFKIHLISVKKA

SEQ ID NO: 9181 - protein, 234 aa, Fluoribacter dumoffii
MKMKLVTAAIMGLAMSTAMAATDATSLVTDKDKLSYSIGADLGKNFKNQGIDINPEALAKGMQDGMSGAQLILTEQQMKDVLNKFQKDLMAKRSAEFNKKAEENKAKGEAFLSSNKSKSGVVVLPSGLQYKVIEAGSGAKPGKSDTVTVEYTGTLIDGTVFDSTEKAGKPATFQVSQVIPGWTEALQLMPAGSTWEIYVPSNLAYGPRSVGGPIGPNETLIFKIHLISVKKASA

SEQ ID NO: 9182 - protein, 204 aa, Fluoribacter dumoffii
TAAIMGLAMSTAMAATDATSLVTDKDKLSYSIGADLGKNFKNQGIDINPEALAKGMQDGMSGAQLILTEQQMKDVLNKFQKDLMAKRSAEFNKKAEENKAKGEAFLSSNKSKSGVVVLPSGLQYKVIEAGSGAKPGKSDTVTVEYTGTLIDGTVFDSTEKAGKPATFQVSQVIPGWTEALQLMPAGSTWEIYVPSNLAYGPRSV

SEQ ID NO: 9183 - protein, 232 aa, Fluoribacter gormanii
MKMKLVTAAIMGLAMSTAMAATDATSLVTDKDKLSYSIGADLGKNFKNQGIDINPEALAKGMQDGMSGAQLILTEQQMKDVLNKFQKDLMAKRSAEFNKKAEENKSKGEAFLSTNKSKSGVVVLPSGLQYKVIEAGTGSKPGKSDTVTVEYTGTLIDGTVFDSTEKTGKPATFQVSQVIPGWTEALQLMPAGSTWEIYVPSDLAYGPRSVGGPIGPNETLIFKIHLISVKKA

SEQ ID NO: 9184 - protein, 204 aa, Fluoribacter gormanii
TAAIMGLAMSTAMAATDATSLVTDKDKLSYSIGADLGKNFKNQGIDINPEALAKGMQDGMSGAQLILTEQQMKDVLNKFQKDLMAKRSAEFNKKAEENKSKGDAFLSTNKSKSGVVVLPSGLQYKVIEAGTGNKPSKSDTVTVEYTGTLIDGTVFDSTEKSGKPATFQVSQVIPGWTEALQLMPAGSTWEIYVPSDLAYGPRSV

SEQ ID NO: 9185 - protein, 244 aa, Tatlockia maceachernii
MKMRLVAAAAMGLAMSTTIAASATTTDTATSAPATSLATDTEKLSYSIGADLGKNFKKQGIEISPAAMAKGLQDGMSGGQLLLTDEQMKEVLNKFQKDLMMKRSAEFNKKAEDNKAKGEAFLNDNKSKEGVVSLPSGLQYKIIERGDGAKPTKEDVVTVEYTGKLIDGQVFDSTDKTGKPATFKVSQVIPGWTEALQLMPAGSTWEVYIPANLAYGPRSVGGPIGPNETLIFKIHLISVKKSDA

SEQ ID NO: 9186 - protein, 79 aa, Neisseria lactamica
HYTGWLEDGTKFDSSLDRRQPLTITLGVGQVIKGWDEGFGGMKEGGKRKLTIPSEMAYGAHGAGGVIPPHATLIFEVEL

SEQ ID NO: 9187 - protein, 79 aa, Neisseria lactamica
HYTGWLEDGTKFDSSLDRRQPLTITLGVGQVIKGWDEGFGGMKEGGKRKLTIPSEMGYGAHGAGGVIPPHATLIFEVEL

SEQ ID NO: 9188 - protein, 109 aa, Neisseria meningitidis
MGSLIIEDLQESFGKEAVKGKEITVHYTGWLEDGTKFDSSLDRRQPLTITLGVGQVIKGWDEGFGGMKEGGKRKLTIPSEMGYGAHGAGGVIPPHATLIFEVELLKVYE

SEQ ID NO: 9189 - protein, 105 aa, Neisseria meningitidis
IIEDLQESFGKEAVKGKEITVHYTGWLEDGTKFDSSLDRRQPLTITLGVGQVIKGWDEGFGGMKEGGKRKLTIPSEMGYGAHGAGGVIPPHATLIFEVELLKVYE

SEQ ID NO: 9190 - protein, 79 aa, Neisseria meningitidis
HYTGWLEDGTKFDSSLDRRQPLTITLGVGQVIKGWDEGFGGMKESGKRKLTIPSEMAYGAHGAGGVIPPHATLIFEVEL

SEQ ID NO: 9191 - protein, 79 aa, Neisseria polysaccharea
HYTGWLEDGTKFDSSLDRRQPLTITLGVGQVIKGWDEGFGGMKEGGKRKLTIPSEMAYGVHGAGGVIPPHATLIFEVEL

SEQ ID NO: 9192 - protein, 79 aa, Neisseria sicca
HYTGWLEDGTKFDSSLDRRQPLTITLGVGQVIQGWDEGFGGMKEGGKRKLTIPSEMGYGARGAGGVIPPHATLIFEVEL

SEQ ID NO: 9193 - protein, 114 aa, Saccharomyces cerevisiae
MSEVIEGNVKIDRISPGDGATFPKTGDLVTIHYTGTLENGQKFDSSVDRGSPFQCNIGVGQVIKGWDVGIPKLSVGEKARLTIPGPYAYGPRGFPGLIPPNSTLVFDVELLKVN

SEQ ID NO: 9194 - protein, 113 aa, Saccharomyces cerevisiae
SEVIEGNVKIDRISPGDGATFPKTGDLVTIHYTGTLENGQKFDSSVDRGSPFQCNIGVGQVIKGWDVGIPKLSVGEKARLTIPGPYAYGPRGFPGLIPPNSTLVFDVELLKVN

SEQ ID NO: 9195 - protein, 142 aa, Desulfitobacterium hafniense
MQAKTKAEAAAAGEKNLKEGKAFLEENKKVKGVFATGSGLQYMILRQGSGERPKPTDKVSVNYKGTLLSGKTFDSSYDRGQPAEFPVNGVIQGWQEGLAMMPVGSKFKFWIPSELAYGPNGAPPSIGPNAVLTFEVELLDIL

SEQ ID NO: 9196 - protein, 185 aa, Podospora anserina
MQGLLLSLSLLASAAVGVLASDDLKIDVTLPVECDRVTKKGDKINVHYKGTLKSNGEKFDSSYDRQSPFSFKLGAGMVIKGWDEGLVDMCIGEKRTLTIGPSYGYGDRNVGPIPAGSTLVFETELVGIEGVPKPESIVTKSATDAPESTASAKVVEKVASVAKQAAEVVETIIADTDDTQEHNEL

SEQ ID NO: 9197 - protein, 124 aa, Candida albicans
MSEELPQIEIVQEGDNTTFAKPGDTVTIHYDGKLTNGKEFDSSRKRGKPFTCTVGVGQVIKGWDISLTNNYGKGGANLPKISKGTKAILTIPPNLAYGPRGIPPIIGPNETLVFEVELLGVNGQ

SEQ ID NO: 9198 - protein, 124 aa, Candida albicans
MSEELPQIEIVQEGDNTTFAKPGDTVTIHYDGKLTNGKEFDSSRKRGKPFTCTVGVGQVIKGWDISLTNNYGKGGANLPKISKGTKAILTIGPNLAYGPRGIPPIIGPNETLVFEVELLGVNGQ

SEQ ID NO: 9199 - protein, 244 aa, Guillardia theta
MIKAFVNSFLIFKYTTKNRKLNSIYSQKNSRVSNKNKLTYIQALNKESEIINLTNDKGVKKKIFKQGSGDLVNEGMIVKINYEGKLENGQIFDSSIIRDEPYMFILGEDKVIKGWNIGIQSMKVGEIAEITIDPEYGYKKKGIPPIIPPNSRLIFNIELTNAEIDSNSRKKINFSNSKNLQANMNSNQKISKYDNFKPFIISPFGDLAKDRKNFLLNPFITFSIITILMFCLFFIVVKSGGIHS

SEQ ID NO: 9200 - protein, 108 aa, Suberites domuncula
MGVDIEEITPGDGTTFPKTGQTVVVHYTGTLTNGKKFDSSRDRGKPFKFKIGKGQVIRGWDEGVAKMSVGQRAKLTCSSDYAYGEKGHPGVIPPNATLIFDVELLGLE

SEQ ID NO: 9201 - protein, 206 aa, Escherichia coli
MTTPTFDTIEAQASYGIGLQVGQQLSESGLEGLLPEALVAGIADALEGKHPAVPVDVVHRALREIHERADAVRRQRFQAMAAEGVKYLEENAKKEGVNSTESGLQFRVINQGEGAIPARTDRVRVHYTGKLIDGTVFDSSVARGEPAEFPVNGVIPGWIEALTLMPVGSKWELTIPQELAYGERGAGASIPPFSTLVFEVELLEIL

SEQ ID NO: 9202 - protein, 432 aa, Leishmania major
MSDQPISSSASAVSEASQPPMEVAYPLNEEVEVPGTDGGLYKTVLVEGAGSQPVKGAKVTVHYVGTLLDGTTFDSSRDRGDCFEFTLGRGQVIKGWDKGVSTMRTGEKALLKCSPEYAYGAAGSPPTIPANATLLFEVELFHWTREVDISAAKDKSLMMSVLKDGVDYENPDFESSVTMDLLIYVGEFDPENKDKYTPVKTMSDWKAVVGVTSLPPHLEAFLYKMRKRESAACRVRSDLICDAVPEFAIPSSAERGHCDVTYVVEISELSHVKTYDFTGAAKVAEGEKRKNSGNDAFKAGKLDLAERFYRRAMEFIGQDYGFDDTVKPECHRVRIGVMGNLAQVLLMRNKYTESADFSRKVLSLDSNNTKALFRLAKALDGLQDWDEASKCVAHILAIDPGNADAANLKVRLMQEQRTFDQKQKSMFKKMFA

SEQ ID NO: 9203 - protein, 196 aa, Trypanosoma cruzi
MHRENYFSKIAFCLLGVLFLSCITSVQTVSGDAASHEERMNNYRKRVGRLFMEQKAAQPDAVKLPSGLVFQRIARGSGKRAPAIDDKCEVHYTGRLRDGTVFDSSRERGKPTTFRPNEVIKGWTEALQLMREGDRWRLFIPYDLAYGVTGGGGMIPPYSPLEFDVELISIKDGGKGRTAEEVDEILRKAEEDREDM

SEQ ID NO: 9204 - protein, 167 aa, Trypanosoma cruzi
SGDAASHEERMNNYRKRVGRLFMEQKAAQPDAVKLPSGLVFQRIARGSGKRAPAIDDKCEVHYTGRLRDGTVFDSSRERGKPTTFRPNEVIKGWTEALQLMREGDRWRLFIPYDLAYGVTGGGGMIPPYSPLEFDVELISIKDGGKGRTAEEVDEILRKAEEDREDM

SEQ ID NO: 9205 - protein, 109 aa, Tetrahymena thermophila
MSELQVVTKKPGDGKTYPKKGQTVTVHYVGTFTDGRKFDSSRDRKEPFQFNIGSGQVIKGWDEGVARMSLGEVAVITCPYQYAYGEKGYPGVIPPKATLVFEVELLGMQ

SEQ ID NO: 9206 - protein, 108 aa, Schistosoma mansoni
MGVTVDTYKPGDGKRIPKKGQRVVVHYTGTLMDGKKFDSSRDRNKPFEFVIGTGKVIRGWDEGVIQMSVGERAYLTCTPDYAYGSKGVDKVIPPNATLKFDVELIDIL

SEQ ID NO: 9207 - protein, 430 aa, Schistosoma mansoni
MADNDGQESGAQQRVEDEYLKDFMDLSPSGDRGILKKVLREGYSDVKPCDGDTVIVHYVGTNYGGEKHGEVFDSSRARNEKFEFTIGNGSVIKAWDVGVATMKLGEICELIASPDYAYKDGKTLKFEVELFETLGSDVSRNKDGSIRKSIIRKGKDIYHPVAGAEATIVFRNLTDSTEDVEVTYCVGDPPLTVPEELDQCLRHMSTDEFCRVVVCKDKNSAAEVADKSRVVYELTLKSFEKTKHLSGISPFSEQMAYRNVLKEKANNFLKDSKFDSAIELYKRLDDELQYIVANGPAEQKELSAVIVAVRLNLGLTYLKLCKPDKCIEFCRKVLDVFGNNEKALFRMGQAHLLRNDHDEALVYFKKIVAKNPNNASAVKLLHMCEEEIQKAKDMAKKRFRSIFERCKDSGLDGVEEHKDGVALNGEKSAL

SEQ ID NO: 9208 - protein, 430 aa, Schistosoma mansoni
MADNDGQESGAQQRVEDEYLKDFMDLSPSGDRGILKKVLREGYSDVKPCDGDTVIVHYVGTNYGGEKHGEVFDSSRARNEKFEFTIGNGSVIKAWDVGVATMKLGEICELIASPDYAYKDGKTLKFEVELFETLGSDVSRNKDGSIRKSIIRKGKDIYNPVAGAEATIVFRNLTDSTEDVEVTYCVGDPPLTVPEELDQCLRHMSTDEFCRVVVCKDKNSAAEVADKSRVVYELTLKSFEKTKHLSGISPFSEQMAYRNVLKEKANNFLKDSKFDSAIELYKRLDDELQYIVANGPAEQKELSAVIVAVRLNLGLTYLKLCKPDKCIEFCRKVLDVFGNNEKALFRMGQAHLLRNDHDEALVYFKKIVAKNPNNASAVKLLHMCEEEIQKAKDMAKKRFRSIFERCKDSGLDGVEEHKDGVALNGEKSAL

SEQ ID NO: 9209 - protein, 431 aa, Caenorhabditis elegans
MSGEKIDITPKKDGGVLKLIKKEGQGVVKPTTGTTVKVHYVGTLENGTKFDSSRDRGDQFSFNLGRGNVIKGWDLGVATMTKGEVAEFTIRSDYGYGDAGSPPKIPGGATLIFEVELFEWSAEDISPDRDGTILRTIIVEGSKNSFPNDTSKVLAHCVGTYQGTEFYNREVNFHIGEGSEEGLPEGVERALRRFQLGEKSKIEIRGHKYTYGNSPPAGSNIPVNATLEFTIFLKEFEKVPATWEMTAEEKLDAAKQAKDRGTMYLQKGNLKLAYNKYKRAEEVLEYEKSTDPEKMAERETILNGAYLNLSLVCSKQNEQLECIKWCDKVLETKPGNVKALYRKATALLTMNEVRDAMKLFEKIVEVEPENKAAAQQIIVCRNTIREQNERDKKRFKNLFAKISTEEDKPTNTVEDEDEIVASTSGSSTSNA

SEQ ID NO: 9210 - protein, 426 aa, Brugia malayi
MAAVDGTDITPEKNGGVLKKILVEGKGEHRPSKGDSVYVHYVGILENGQQFDSSRDRNESFNFTLGNGQVIKGWDLGVATMKKGEKCDLICRADYAYGQNGSPPKIPGGATLKFEIELLSWQGEDISPDRDGTITRSIIVEGEKYSSPTEGSTVKVCAVGSYNGQVFYDKEVSFILAEGSEVGLPEGVDRALRRFNKGEKSIIHLKGNRFTFGATPPPEYGLPPHAEIDFTLFLKDYDKVKASWELTGEEKLDAAEAAKERGTMFFKQGKMRLPAAKYMRVIELLEYEKSLENETKSRRDALLLAGYLNSALVYAKQDETVECIKNCDKALEVDPKCVKALYRKALALQEQIDADEAIIKYKKVLEYEPDNKAAIAQIAACKKMLAEIREKEKKRYKGMFERFAAKEKVETNEDLETASPKSEVVN

SEQ ID NO: 9211 - protein, 137 aa, Onchocerca volvulus
MIKFSVSSLLLVLVVVDCDDRELARLQIGVKKREDNCEIRSRKGDIVNVHYVGMLEDGTEFDNIRFRNKPFIFTLGMGQVIKGWDQGLLNMCEGEQRRLALPSDLAYGSFGSSPKIPSDASLKFDIELLKIERGGDL

SEQ ID NO: 9212 - protein, 166 aa, Nostoc punctiforme
MAFMLVCVVLLAVGQVGSKQNTAIAAQLTQTPPAATTVTENNILIASNTMSDANAVTTPSGLKYVELKEGTGATPQPGQTVEVHYVGTLEDGTKFDSSRDRGQPFSFKIGVGQVIKGWDEGVSTIKVGGRRKLIIPSELGYGARGAGGVIPPNATLIFDVELLGVK

SEQ ID NO: 9213 - protein, 268 aa, Aeromonas hydrophila
MNNFLKVSLLAAAVAVSLTACQKDEKTAANTAEVKAEASKPAEAPKAEAKSFEEQSGYAIGLSMGRYIANTLERQQELGIKLDNSVILKGVTDGLGKEAKMTDEEIQKVLQQYDAKINELTKAKADKDAVENQKKGEEYLAANAKKEGVKSTESGLQYQVEKMGTGAKPKATDIVKVHYTGTLTDGTKFDSSVDRGEPATFPLNQVIPGWTEGVQLMPVGSKFKFFLPSKLAYGEHGAGSIPANAVLVFDVELLAIEKPAADGDNAKK

SEQ ID NO: 9214 - protein, 157 aa, Vibrio cholerae
MSKIIIPLVVFLLAGFMIYRTWTNHKSADANFSAGQQFLAENGQRENVITTDSGLQYEVLQAGTGTEHPGPKSRVKVHYHGELLDGTVFDSSVERGEPISFGLNQVIKGWQEGVQLMVVGEKTRFYIPSNLGYGKNGAGPIPPSAVLIFDVELLAIE

SEQ ID NO: 9215 - protein, 259 aa, Vibrio cholerae
MKSLFKVSLLAATVMLAVGCQKEEAPKTETTPAAQTAAAKTVEFKSEDDKAAYAIGVSFANYLKTSIEKPSEIGIDLNKDLVLKGIEHVFAGNPEMSEEETRAALEALDKRVAETMQAKAAEKAAENKKKGDEFRAQFEKESGVVKTQSGLLYQVMTPAEGDKPKDTDTVQVHYKGTLIDGSQFDSSYERGEPATFPLNRVIPGWTEGVQLMSVGSKFKLVIPPELAYGEQDTPTIPANSTLVFEVELLKIENGKDAAQ

SEQ ID NO: 9216 - protein, 209 aa, Vibrio cholerae
MTFMSEVKFETVEQKASYGIGLQMGQQLAGSGLEGLNVAAIAAGIATALVGEQPAISIDEINQALHAIHMRAEEARQEAAKVAASEGEAFLKDNALRPEVTVLESGLQYEVLVEGNGAIPTSDKSVRVHYHGQLVDGTVFDSSVSRGQPAEFPVTGVIRGWVEALQLMPVGSKWKLYIPHNLAYGERGAGAAIPPFAALVFEVELLDIL

SEQ ID NO: 9217 - protein, 204 aa, Legionella sainthelensi serogroup 2
TAAIMGLAMSTAMAATDATSLTTDKDKLSYSIGADLGKNFKNQGIDINPDVLAKGMQDGMSGAQLILTEEQMKDVLSKFQKDLMAKRSAEFNKKAEENKAKGEAFLSANKSKPGIVVLPSGLQYKIIDAGTGAKPGKSDTVTVEYTGTLIDGTVFDSTEKAGKPATFQVSQVIPGWTEALQLMPSGSTWEVYVPADLAYGPRSV

SEQ ID NO: 9218 - protein, 219 aa, Legionella sp. E
AAAVIGLTMSTAIVAADASATATPAPATSATPTTSLNSDMDKLSYSIGADLGKNFKKQGIDINPSAMAKGLQDGMSGGQLLLTEQQMKDVLNKFQKDLMAKRTAEFSKKADENKAKGEAFLNQNKAKEGVVSLPSGLQYKIIQKGDGAKPSKEDTVTVEYTGTLIDGQVFDSTDKAGKPATFKVSQVIPGWTEALQLMPAGSTWEVYVPADLAYGPRSV

SEQ ID NO: 9219 - protein, 200 aa, Legionella sp. H
MGLAMSTTMAATTAPSLNSDVDKLSYSIGIDLGKNFKRQGIDINPEALTKGLQDGINDAPSLLTEQQMREVLSKFQHDLMAKRTAEFNKKAEENKAKGEAFLKENKAKEGVVTLPSGLQYKIIKAGTGDKPGKDDTVTVEYTGRLINGEVFDSTDKAGKPATFKLSQVIPGWTEALQLMPSGSTWEIYVPADLAYGPRTV

SEQ ID NO: 9220 - protein, 204 aa, Legionella sp. I
AAALMSVAMTTTMAANDVQTLQTEKDKLSYSIGIDLGKNFQRQGIDVNPEVLAKGMQDGLTGGKQLLTDQQMKEVLTKFQKDLMEKRTAEFNKNAEENKQKGETFLKENKAKDGIVTLPSGLQYKILEAGKGKKPTKDDTVTVEYTGRLINGEVFDSTEKTGKPATFKLSQVIPGWTEALQLMPEGSTWEIYVPADLAYGPRSV

SEQ ID NO: 9221 - protein, 204 aa, Legionella sp. A
AAAMGLAMSTTILAATTAPSLNSDVDKLSYSIGIDLGKNFKRQGIEVNPEALTKGLQDGINGAPSLLTEQQMRDVLSKFQRDLMAKRTAEFNKKAEENKARGEAFLKENKGKEGVVSLPSGLQYKIIKAGTGEKPGKEDTVTVEYTGRLINGEVFDSTDKAGKPATFKLSQVIPGWTEALQLMPAGSTWEIYVPADLAYGPRAV

SEQ ID NO: 9222 - protein, 204 aa, Legionella sp. B
AAAVMGLAMSTTMAATDASSLNTEVDKLSYSIGIDLGKNFKRQGIDISPEAMVQGLQDGMSGNKQLLTEQQMKDVLTKFQRDLMAKRTAEYNKKAEDNKKKGEEFLEQNKSKEGVVSLPSGLQYKIIKSGDGQKPGKEDTVTVEYTGRLINGEVFDSTEKTGKPASFKLSQVIPGWTEALQLMPAGSVWEVYVPADLAYGSRSV

SEQ ID NO: 9223 - protein, 204 aa, Legionella bozemanii serogroup 2
TAAVMGLAMSTVIAATDATSLVTDKDKLSYSIGADLGKNFKNQGIDINPDALAKGMQDGMSGAQLILTEQQMKDVLNKFQKELMAKRSAEFNKKAEENKSKGEAFLSTNKSKSGVVVLPSGLQYKIIEAGTGNKPGKSDTVTVEYTGTLIDGTVFDSTEKTGKPATFQVSQVIPGWTEALQLMPAGSTWEIYVPSDLAYGPRSV

SEQ ID NO: 9224 - protein, 233 aa, Legionella pneumophila serogroup 1
MKMKTVTAAVMGLAMSTAMAATDATSLATDKDKLSYSIGADLGKNFKNQGIDVNPEAMAKGMQDAMSGAQLALTEQQMKDVLNKFQKDLMAKRTAEFNKKADENKVKGEAFLTENKNKPGVVVLPSGLQYKVINSGNGVKPGKSDTVTVEYTGRLIDGTVFDSTEKTGKPATFQVSQVIPGWTEALQLMPAGSTWEIYVPSGLAYGPRSVGGPIGPNETLIFKIHLISVKKSS

SEQ ID NO: 9225 - protein, 236 aa, Legionella pneumophila serogroup 8
MKMKLVTAAVMGLAMSTAMAATDATSLATDKDKLSYSIGADLGKNFKNQGIDVNPEAMAKGMQDAMSGAQLALTEQQMKDVLNKFQKDLMAKRTAEFNKKADENKVKGEAFLTENKNKPGVVVLPSGLQYKVINSGNGVKPGKSDTVTVEYTGRLIDGTVFDSTEKTGKPATFQVSQVIPGWTEALQLMPAGSTWEIYVPSGLAYGPRSVGGPIGPNETLIFKIHLISVKKSSKFF

SEQ ID NO: 9226 - protein, 152 aa, Bombyx mori
YDRDQPFTFQIGVGQVIKGWDQGLLDMCVGEKRKLTIPASLGYGERGAGNVIPPHATLHFEVELINIGDSPPATNVFKEIDADKDNMLSREEVSDYLKKQMVPADGGEVSEDIKQMLESHDKLVEEIFQHEDKDKNGFISHEEFSGPKHDEL

SEQ ID NO: 9227 - protein, 108 aa, Manduca sexta
MGVTVDTITPGDESTYPKNGQTVVVHYTGTLTSGKKFDSSRDRGKPFKFRIGKGEVIRGWDEGVAKMSVGERAKLTCTPDYAYGQQGHPGVIPPNSTLIFDVELLRLE

SEQ ID NO: 9228 - protein, 241 aa, Actinobacillus actinomycetemcomitans
MLKMKKISVPVLILSAVVSSGVLAESKTDAKFTDDSSYAVGVLFGSDLQGLINAQKGMIDYNNAKVIAGISDVLNGKVKLEGNKEIASTLQGINAKLKAENEKRVAVMVKKAEEEGKKFTAEFAKKDGVKKTASGLLYRVEKEGSGDAIKAADVVKVHYTGKLPDGTVFDSSRERGTPAEFPLNQVIKGWTEGLQLVKKGGQIELVIPADLGYGEDGAGDKIPPHSTLYFDIEVLDVTPAK

SEQ ID NO: 9229 - protein, 241 aa, Haemophilus influenzae Rd
MLKIQKLSIAALMVSAVISGQVFAEDNTFDEKAASYAVGTLMGSQMKDLVDSHKEVIKYDNARILDGLKDALEGKVDVRKDEKIQKTLESIEAKLVAASKAKAESIAKQAKEEGDKFRAEFAKGKDVKTTQSGLMYKIESAGKGDTIKSTDTVKVHYTGKLPNGKVFDSSVERGQPVEFQLDQVIKGWTEGLQLVKKGGKIQFVIAPELGYGEQGAGASIPPNSTLIFDVEVLDVNPKSEK

SEQ ID NO: 9230 - protein, 439 aa, Drosophila melanogaster
MPEGNKIDLSGDGGVLKEILKEGTGTETPHSGCTVSLHYTGRLVDGTEFDSSLSRNEPFEFSLGKGNVIKAFDMGVATMKLGERCFLTCAPNYAYGAAGSPPAIPPDATLIFELEMLGWKGEDLSPNQDGSIDRTILEASDKKRTPSDGAFVKAHISGSFEGRVFEDRDVEFDYGEGKAIGIIDGVEIALEKMNVGETSRIKIQAKYAFGAKGNEEFKIPPNATVEYTVKLVDCGKGLEEWKLSDEERLAEAKVYKEKGTNYFKKENWALAIKMYTKCKNILPTTVHTNEEVKKIKVATHSNIALCHQKSNDHFEAKQECNEVLALDKNNVKALYRRGQCNLTINELEDALEDFQKVIQLEPGNKAAANQVIICKQKLKESKNKEKKLYANMFTKLAANDKETEPPRETDVLSKCGEWSEEDAKREAELTLERDNIIMI

SEQ ID NO: 9231 - protein, 439 aa, Drosophila melanogaster
MPEGNKIDLSGDGGVLKEILKEGTGTETPHSGCTVSLHYTGRLVDGTEFDSSLSRNEPFEFSLGKGEVIKAFDMGVATMKLGERCFLTCAPNYAYGAAGSPPAIPPDATLIFELEMLGWKGEDLSPNQDGSIDRTILEASDKKRTPSDGAFVKAHISGSFEGRVFEDRDVEFDYGEGKAIGVIDGVEIALEKMNVGETSRIKIQAKYAFGAKGNEEFKIPPNATVEYTVKLVDCGKGLEEWKLSDEERLAEAKVYKEKGTNYFKKENWALAIKMYTKCKNILPTTVHTNEEVKKIKVATHSNIALCPQKSNDHFEAKQECNEVLAWDKNNVKALYRRGQCNLTINELEDALEDFQKFIQLEPGNKAAANQVIICKQKLKESKNKEKKLYANMFTKLAANDKETEPPRETDVLSKCGEWSEEDAKREAELTLERDNIIMI

SEQ ID NO: 9232 - protein, 108 aa, Drosophila melanogaster
MGVQVVPIAPGDGSTYPKNGQKVTVHYTGTLDDGTKFDSSRDRNKPFKFTIGKGEVIRGWDEGVAQLSVGQSAKLICSPDYAYGSRGHPGVIPPNSTLTFDVELLKVE

SEQ ID NO: 9233 - protein, 166 aa, Drosophila melanogaster
MGVQVVPIAPGDGSTYPKNGQKVTVHYTGTLDDGTKFDSSRDRNKPFKFTIGKGEVIRGWDEGVAQLSVGQRAKLICSPDYAYGSRGHPGVIPPNSTLTFDVELLKVDRRTGCPMCIPQTKSQGVADRRTGDEPKNIIIGTRTIQQHLPTQNNNDNFIHSSKLELI

SEQ ID NO: 9234 - protein, 108 aa, Drosophila melanogaster
MGVQVVPIAPGDGSTYPKNGQKVTVHYTGTLDDGTKFDSSRDRNKPFKFTIGKGEVIRGWDEGVAQLSVGQRAKLICSPDYAYGSRGHPGVIPPNSTLTFDVELLKVE

SEQ ID NO: 9235 - protein, 306 aa, Plasmodium yoelii yoelii
MENIENIENLEKIHLTDDGGVIKTILRKGDEGEENVPKKGNEVTVHYVGKLESDGSIFDSSRQRDVPFKFHLGNGEVIKGWDICVASMKKNEKCSVRLDSKYGYGKEGCGETIPGNSVLIFEIELLSFKEAKKNIYDYTDEEKIQAAFELKDEGNEFFKKNEINEAIAKYKEALDYFMHTDEWEDELLEKKQNIQIICNLNLSTCYNKNKDYPNAIEHASKVLKLDKNNVKGLYKLGVANMNFGFLEEAKINLYKAASLNPKNLDIRNSYELCIAKLKEARKKDQITFGGMFNKGSLYEEKKTNPI

SEQ ID NO: 9236 - protein, 509 aa, Plasmodium yoelii yoelii
MVCTEEDKKKREENEKELEEKIKNMSFDERIKNALDAKLDGNNDFKNKDYENGINKYKTGLRYIKDMEDKNDKIKELEIALYLNLSICYYNMENYNDAHEYVTKVLNIDKTNKKGMFRLCQIEFNRCSFDVAKEKIQEFLKIYPENLDAKKLLKNVIIKQNEDNKKQKEAFSKIFEKASGLYDDREKEIIQKKKEKYEQDMKKKKENNEEIIDFEEWEIQENEKRKKEDEEQKKKQREKEMEREKEREKNNKKKQYNKKNESISSNTTHNSSDLEIDEEDQKIINETKKMGYCYFKKDIKEDDKKLFEKNIPRKIEEANDIDLNSQQTSNKAISSWNSGGTTYEEKDMTKWVKNKLDYYLKNISFKNTEESDYLNLNNQNEFNLTNISYPEILPVQYLNKIKINEVKDLSAEAQIVVIRGTKRHIFEFSCNLHVSLYINLPEFHVHKIIVQIKELSSELEAGKTWKNYIFIKKNDKLKIPDKLFDNIYTFVINDIETQIKKFTEEYSTM

SEQ ID NO: 9237 - protein, 201 aa, Legionella sp. K
TAAVLGLAMSTAMAADALVTDKDKLSYSIGADLGKNFKSQGIDINPEVLAKGMQDGMSGAQLILTEQQMKDVLNKFQKDLMAKRSAEFNKKAEENKSKGEAFLSSNKAKAGVVVLPSGLQYKILEAGTGAKPGKEDTVTVDYTGTLIDGTVFDSTQKTGKPATFQVSQVIPGWTEALQLMPAGSTWEIFVPADLAYGPRSV

SEQ ID NO: 9238 - protein, 204 aa, Legionella sp. L
AAAAMGLAMTTTIAATDVQSLKNDKDKLSYSIGIDLGKNFRKQGIEVNPEVLAKGMQDGLSGSKQLLTDEQMKEVLSNFQKSLMAKRTAEFNKKAEENKQKGEAFLKENKSKEGVVALPSGLQYKILQEGKGKKPTKEDVVTVEYTGRLINGDVFDSTEKSGKPATFKLSQVIPGWTEALQLMPEGSTWEIYVPSDLAYGPRSV

SEQ ID NO: 9239 - protein, 210 aa, Pasteurella multocida
MSQQFFDQVSLESLSAKGSYGIGLQIGQQLLESQLEVSAEAVAKGIFDVLNQNPPALELNEVSHALQTLQQQATEAQQAKFKEIEAVGAQFLAENAQKAGVNTTESGLQYEVLVAGEGQIPAREDKVRVHYTGTLIDGTVFDSSVKRGQPAEFPVNGVIAGWIEALSMMPVGSKWRLTIPHNLAYGERGAGASIPPFSTLVFEVELLAIL

SEQ ID NO: 9240 - protein, 94 aa, Ciona intestinalis
  unsure (1)..(94): unsure at all Xaa locations
MGIDKKVIKEGNGTSFPKANQTVKXHYTGTLESGKKFDSSRDRNKPFTFKIGCGQVIRGWDEGVIQMSVGERATLTCSPDYAYGSKGIGGVIPT

SEQ ID NO: 9241 - protein, 230 aa, Coxiella burnetii
MKRLILPFLSVGLLLGTTAHAATPLKTEQDKLSYSMGVMTGKAFRKHDIKIDPQTFSMGLSDAYLGKETQMTEAEMRQTLQQFEKQSLQKMQHKMKQTAQQNAEKSRAFLTANKNKPGVKTLANGLQYKVLQAGQGQSPTLNDEVTVNYEGRLINGTVFDSSYKRGNPATFPLKSVIKGWQEALTRMKPGAIWEIYVPPQLAYGEQGAPGVIGPNEALIFKVNLISVKKK

SEQ ID NO: 9242 - protein, 449 aa, Danio rerio
MTAEEVVNEGCSIPIEGEDITPKKDGGVLKLVKKEGTGTELPMIGDKVFVHYVGTLLDGSQFDSSRDRGEKFSFELGKGQVIKAWDIGVATMKIGEICQLTCKPEYAYGAAGSPPKIPPNATLLFQVELFDFRGEDITDDEDGGITRRIITKGEGYTKPNEGATVEVWLEGSHEDRVFDERELKFEVGDGENLGLPLGVEKALQAMEQGEEALFTIKPKYGFGTAGSEKYNIPPNATLQYKIKMKAFEKAKESWEMNTIEKLEQSVIVKEKGTQYFKEGKYKQAIVQYKRIVSWLEHESSMQPDDEEKAKALRLAAYLNLAMCYLKLQDANPALENCDKALELDANNEKALFRRGEALVVMKEFDMAKVDFQRVIELYPANKAAKSQISICQKHMREQHEKDKRLYANMFQKFAERDAKEADQEKEQDKKQNGSAMEIDENAAQEQTAA

SEQ ID NO: 9243 - protein, 453 aa, Danio rerio
MSSLEDIFSTNQCPTAVFTSRGTAVTPNGDSGVCKIVKQHGVEGERPMIGDRVFVHYTGRLLSGKKFDSSLDRKEPFVFNVGKGQVIKAWDICVCSMQKGEVCLMLCKPEYAYGSAGSPPKVPPNSTLVFEIELLNFRGEELTEDGGIVRRIKVKGEGYSNPNEGATVHVHLEGWCGGRLFDSRDVTFAVGESEDVGVPLGVDRAMEKLQKGECCLLYLKPKYAFGKEGRKEHDIGSNAELLYEVTLKDFEKAKETWEMDLKEKLERAVLVKQKGTQYFKAGRYNYAVIQYQRIVNWLEMECGNGKEQLQAIQALLLVAHLNLALCYLRLREYSQTVENCNKVMELDPENEKALYRRGEARLLRNEFSLALMDFKQVLQVNSFNRAARSQILICQHKIREHHERDKKIYANMFQRFAEHDAKVCRLKRKKEESVISDQNKQGLKRARLSQDGS

SEQ ID NO: 9244 - protein, 614 aa, Danio rerio
MQRRKKVPEATSQLKIFHVYTFELLLQESTNHCRVRSACKLDSHSTLLTMLQKIILSLLLATWFSVDCNPGPIDDILIDRYFVPKRCVREVKSGDFVRYHYNGTFTDGKRFDSSYERGTAFFGQVGQRWQIAGVDKGILGMCINERRKITVPPHLAHGSKGAGDTVPPDTTLVFDLVLLDIFNRADQVQTKVISTPKDCRRSVMRTDFVRFHFNGTLLDGTVFDSSYKRSQTQDSVVGKGLLIKGLDEGLLGMCVGEIRHFIIPPFLAFGEQGYGTGIPPHASVEYHILLEDLHNPKDDIIVETLKLPEPCARKSVAGDFIRYHYNASFLNGIMFDSSYQQNQTYNTYIGMGYMIAGIDKGLQGVCAGEWRRIILPPHLAYGQQGAGKDIPGSAVLVFDIHVIDFHNIKDPVQVDVLHRSEACNESSEVNDFIQYHYNCSLLDGTLLFSSHDYETPQNVLLGGDKIIDGLDEALRNMCVGERRTVIVPPHLGHGEKGAGIVPGSAVLRFELELLSLQKGVPEGYLFIWLQDSPVQPFEALDINKDHQVPLDEFSQFIKQQVSEGKGRLKPVRDPDSVIRDMFKNQDRNADGLITADELKLKVDEDSEKTRHEEL

SEQ ID NO: 9245 - protein, 187 aa, Danio rerio
MAAAPERQWSDEQLKSEEVPKKELIKFIQDSAAHSFLAEHKLLGNIKNVSKTAKKEQLIEAYNQLFQSQGPPKFTKSILKKGDKTNFPKKGETVSCWYTGTLEDGTVFDTNIPATAKKKKQSKPLSFKVGMGKVIRGWDEGLLTMSKGETARLEIESEWAYGKKGLPDAKIPPNAKLIFEVELVAVD

SEQ ID NO: 9246 - protein, 243 aa, Chlamydia trachomatis
MKNILSWMLMFAVALPIVGCDNGGGSQTSATEKSMVEDSALTDNQKLSRTFGHLLARQLSRTEDFSLDLVEVIKGMQSEIDGQSAPLTDTEYEKQMAEVQKASFEAKCSENLASAEEFLKENKEKAGVIELEPNKLQYRVVKEGTGRVLSGKPTALLHYTGSFIDGKVFDSSEKNKEPILLPLTKVIPGFSQGMQGMKEGEVRVLYIHPDLAYGTAGQLPPNSLLIFEVKLIEANDDNVSVTE

SEQ ID NO: 9247 - protein, 243 aa, Chlamydia trachomatis
MKNILSWMLMFAVALPIVGCDNGGGSQTSATEKSMVEDSALTDNQKLSRTFGHLLSRQLSRTEDFSLDLVEVIKGMQSEIDGQSAPLTDTEYEKQMAEVQKASFEAKCSENLASAEKFLKENKEKAGVIELEPNKLQYRVVKEGTGRVLSGKPTALLHYTGSFIDGKVFDSSEKNKEPILLPLTKVIPGFSQGMQGMKEGEVRVLYIHPDLAYGTAGQLPPNSLLIFEVKLIEANDDNVSVTE

SEQ ID NO: 9248 - protein, 119 aa, Gillichthys mirabilis
CGNNPEDTAEELQVDTLVKPETCDVLSVMGDTLQIHYTGKLMDGKVIDTSLSRDPLVVELGKRTVIAGLEQSLVGVCAGQKIKATIPAHLAYGKKGYPPTIPGDAVLEFEVEVISVTQQ

SEQ ID NO: 9249 - protein, 270 aa, Escherichia coli K12
MKSLFKVTLLATTMAVALHAPITFAAEAAKPATAADSKAAFKNDDQKSAYALGASLGRYMENSLKEQEKLGIKLDKDQLIAGVQDAFADKSKLSDQEIEQTLQAFEARVKSSAQAKMEKDAADNEAKGKEYREKFAKEKGVKTSSTGLVYQVVEAGKGEAPKDSDTVVVNYKGTLIDGKEFDNSYTRGEPLSFRLDGVIPGWTEGLKNIKKGGKIKLVIPPELAYGKAGVPGIPPNSTLVFDVELLDVKPAPKADAKPEADAKAADSAKK

SEQ ID NO: 9250 - protein, 270 aa, Escherichia coli O157:H7
MKSLFKVTLLATTMAVALHAPITFAAEAAKPATTADSKAAFKNDDQKSAYALGASLGRYMENSLKEQEKLGIKLDKDQLIAGVQDAFADKSKLSDQEIEQTLQAFEARVKSSAQAKMEKDAADNEAKGKEYREKFAKEKGVKTSSTGLVYQVVEAGKGEAPKDSDTVVVNYKGTLIDGKEFDNSYTRGEPLSFRLDGVIPGWTEGLKNIKKGGKIKLVIPPELAYGKAGVPGIPPNSTLVFDVELLDVKPAPKADAKPEADAKAADSAKK

SEQ ID NO: 9251 - protein, 259 aa, Escherichia coli O157:H7
MMSVVNPPLLYSYGILLLFLFPWDLSSFPRQSFTQRSVADMLPATLYPKKGNTMTTPTFDTIEAQASYGIGLQVGQQLSESGLEGLLPEALVAGIADALEGKHPAVPVDVVHRALREIHERADAVRRQRFQAMAAEGVKYLEENAKKEGVNSTESGLQFRVINQGEGAIPARTDRVRVHYTGKLIDGTVFDSSVARGEPAEFPVNGVIPGWIEALTLMPVGSKWELTIPQELAYGERGAGASIPPFSTLVFEVELLEIL

SEQ ID NO: 9252 - protein, 585 aa, Xenopus laevis
MAFRQRTSPAAFPSSVVLGNRWPVLALQAAFLVSFVTCNDAPPVPDDQLHIEKRWVPDTCQRHVTEGDFVRYHYHGTFPDGTKFDSSYDRGSTYNVFVGKGQIIAGMDKALLGMCVNERRFVKIPPTLAYGSKGVADVIPPDAILHFDVLLLDIWNPTDTVQVETYYKPENCTRQVEVSDFIRYHYNGSLMDGTLFDSSHNRMRTYDTYVGIGWLIPGMDKGLLGMCVGEKRMITVPPFLGYGEDGDGKDIPSQASLVFDVVLLDLHNPKDGITVESHYVPEDCERKTQVGDFIRYHYNGSLLDGTFFDSSYSRKRTYDTYIGKGYVIAGMDEGLLGLCTGEKKRVIIPPHLGYGEEGKGKIPGSAVLVFDIHVIDFHNPQDSVGIVSLFKPSNCSVLSKKGDYVKYHYNATLMDGTVLDSTHQYGKTYNIVLGSGQVVMGMDIGLQDMCIGEKRSIVIPPHLGYGEAGVEGEVPGSAVLAFDIELLDLIPGLPDGYMFVWNGEVSPNLFEDIDKDKNGEVVLDEFSEYIDTQVKVGKGKLAPGFDANKIIENMFTNQDRNQDGKITEEEFKLKDQEDKEIHDEL

SEQ ID NO: 9253 - protein, 564 aa, Xenopus laevis
MLFNSLVVSLHFLVLYVACDSGPLEDVVIDRYDIPKICPREVQMGDFVRYHYNGTFKDGQKFDASYDRGVAVAGFVGVGRLITGLDRGILGMCVNEKRKLIVPPHLGYGSIGVPGMIPADATLYFDILLQDIWNKNDEVQITTIHKASPCNRSVQDSDFVRYHYNGTLLDGTYFDSSYSRSTTYDTYVGSGWLIKGMDMGLLGMCAGEKRRITIPPFLAYGEKGYGTIIPAQASLVFHVLLIDFHNPKDGITVQNQVVPQVCKRKAVTGDYVRYHYNGTLMDGALFDSSYSRNTTYNTYIGMGYVISGMDAGLQGVCVGEWRRIIIPPHLGYGESGSGNSIPGSAVLVFDVHIVDFHNPKDSVDIEVMHKPDSCNTTSKKGDFIKYHYNCSMLDGTLLFSSHEYETPQQVTLGSSKVIEGLDTGLLGMCVGERRTVLVPPHLAHGESGARGVPPSAVLKFDLELLHIEEGIPDGYLFIWLQDTPENLFEIMDLDKNGEVPEEEFSDFLKAQVSEGKGRFLPGVDREKSIADMFVNQDRNKDGKITADELKLKTEEETELVHEEL

SEQ ID NO: 9254 - protein, 133 aa, Xenopus laevis
RRAEKQEAKNSSDRQTDRQTDRQTDMGVDLETISPGDGRTFPKKGQTCVVHYTGMLQNGKKFDSSRDRNKPFKFKIGRQEVIKGWEEGVAQMSLGQRAKLTCSPDVAYGATGHPGVIPPNATLIFDVELIRIE

SEQ ID NO: 9255 - protein, 108 aa, Xenopus laevis
MGVQVETITEGDGRTFPKKGQTVVVHYVGSLENGKKFDSSRDRNKPFKFIIGRCEVIRGWEEGVAQMSVGQRARLTCSPDFAYGATGHPGIIPPNATLTFDVELLRLE

SEQ ID NO: 9256 - protein, 255 aa, Chlamydophila caviae
MKKRWHLMIITMVVSFSIASCDSSSQRGNQIAQVEEKSAANDSQLSVNQQISRTFGHLLARQLRKSEDIMMDIAEVAKGLQGELECKSAPLTESEYEEKMAEIQKLVFEKKAKENLYLAERFLQENKKNSGVVEVQADKLQYRIVKEGTGRAISGKPSALLHYKGTFIDGQVFSSSEANKEPILLPLAQTIPGFALGMQGMKEGETRILYIHPDLAYGTSGQLPPNSLLIFEINLIETTDDSVAAQNTENENTAS

SEQ ID NO: 9257 - protein, 261 aa, Chlamydia muridarum
MVLKKARLRNRVQLRKKRMKNILSWMLMFAVALPILGCDNNGGSQTSAMGKDMVEDSVLTDNQKLSRTFGHLLARQLSSTEDFTLDLTEVIKGMQSEIEGKSAPLTDSEYETQMALVQKASFEKKCSENLASAEKFLKENKDKEGVIELEPNKLQYRIVKEGTGRVLTGKPNALLHYTGSFINGKVFDTSEKNKDPILLPLTKVISGFSQGMQGMREGEVRVLYIHPDLAYGTSGQLPPNSLLIFEVKLIEANDDNVSVAE

SEQ ID NO: 9258 - protein, 243 aa, Chlamydia muridarum
MKNILSWMLMFAVALPILGCDNNGGSQTSAMGKDMVEDSVLTDNQKLSRTFGHLLARQLSSTEDFTLDLTEVIKGMQSEIEGKSAPLTDSEYETQMALVQKASFEKKCSENLASAEKFLKENKDKEGVIELEPNKLQYRIVKEGTGRVLTGKPNALLHYTGSFINGKVFDTSEKNKDPILLPLTKVISGFSQGMQGMREGEVRVLYIHPDLAYGTSGQLPPNSLLIFEVKLIEANDDNVSVAE

SEQ ID NO: 9259 - protein, 195 aa, Porphyromonas gingivalis
MDKVSYALGLSIGNNFKSSGIDSVVMDDFMQGLSDVLEEKAPQLSYDEAKREIEAYFMDLQQKAVKLNKEAGEEFLKINAHKEGVTTLPSGLQYEVIKMGEGPKPTLSDTVTCHYHGTLINGIVFDSSMDRGEPASFPLRGVIAGWTEILQLMPVGSKWKVTIPSDLAYGDRGAGEHIKPGSTLIFIIELLSINK

SEQ ID NO: 9260 - protein, 276 aa, Porphyromonas gingivalis
MKKTIAIIASALLALGAVGCKKNADTTAVSEKDSIALSMGILYGQDFANQFEMSRLQGQPIDSVAFLDGFKYGIDTTRFSYNLGAIYASNIARQLAHDSIDIDKFYAAMRAALLKDTVSIAMKPADAQAFMQRIQARKQRENNMKQFGQNIEKGNEYIDTFKKEDGVTVTTSGLAYKTLQEGTGATPSLADTVRVKYVGTLVDGKEFDKNEEGIEFAVTGVIKGWTEMLQLMKVGQKVRVVIPQELAYGETGNYTIEPFSTLTFEMELIGIKPGKK

SEQ ID NO: 9261 - protein, 577 aa, Gallus gallus
MPRRGVGCGALLLLPALLVSWAACQAPPVPAAEPPWDGADVHVERRFVPERLPRAVRRGDFVRYHYLGSFPDGTRFDSSYDRGSTFNVFVGKGQLIAGMDKALVGMCVNERRFVKIPPKLAYGSEGVSGVIPPNAVLHFDVLLIDLWNSEDEVQVETYFKPEKCTRRVQVSDFVRYHYNGTFLDGTLFDSSHNRMRTYDTYVGIGWLIPGMDQGLLGMCIGEKRIITIPPFLAYGEEGDGKEIPGQASLVFDVVLLDLHNPKDGITIENQLVPESCERRTQTGDFIRYHYNGTLLDGTLFDSSYSRNRTYDTYVGKGYVIAGMDEGLLGVCTGERRRIIIPPHLGYGEEGRGKIPGSAVLVFDIHVADFHNPSDSVSITVNYKPSNCSLLSKKGDYLKYHYNASLLGWHSASLDTQSWQDLQHSSGSGQVVIGMDMGLQDMCVGERRTVVIPPHLGYGEDGVEGEVPGSAVLVFDIELLELVSGLPEGYMFVWNGEVSPNLFEEIDQNHDGEVLLEEFSEYIQAQVDSGKGKLAPGFDFEKIVKNMFTNQDRDGNGKVTAEEFKLKDQEAKEGHDEL

SEQ ID NO: 9262 - protein, 108 aa, Gallus gallus
MGVEIETISPGDGRTFPKKGQTCVVHYTGMLQNGKKFDSSRDRNKPFRFKIGRQEVIKGFEEGVTQMSLGQRAKLTCTPEMAYGATGHPGVIPPNATLLFDVELLRLE

SEQ ID NO: 9263 - protein, 108 aa, Gallus gallus
MGVHVETIAPGDGRTFPKRGQTCVVHYTGMLEDGKKFDSSRDRNKPFKFVMGKQEVIRGWEEGVAQMSVGQRAKMTISPDYAYGSTGHPGIIPPNATLIFDVELMKLE

SEQ ID NO: 9264 - protein, 272 aa, Salmonella enterica subsp. enterica serovar Typhi
MKSLFKATLLATTMAVAMHVPITFAADAAKPAATADSKAAFKNDDQKAAYALGASLGRYMENSLKEQEKLGIKLDKDQLIAGVQDAFADKSKLSDQEIEQTLQTFEARVKSAAQAKMEKDAADNEAKGKTFRDAFAKEKGVKTSSTGLLYKVEKEGTGEAPKDSDTVVVNYKGTLIDGKEFDNSYTRGEPLSFRLDGVIPGWTEGLKNIKKSGKIKLVIPPALAYGKTGVPGIPANSTLVFDVELLDIKPAPKADAKPADAADAKAADAAKK

SEQ ID NO: 9265 - protein, 220 aa, Salmonella enterica subsp. enterica serovar Typhi
MLPATFLISDEGKIMATPTFDTIEAQASYGIGLQVGQQLSESGLEGLLPEALVAGIADALEGKHPAVPVDVVHRALREIHERADAVRRERFKAMAAEGVKYLEENREKDGVNSTESGLQFRVLTQGEGAIPARTDRVRVHYTGKLIDGTVFDSSVARGEPAEFPVNGVIAGWIEALTLMPVGSKWELTIPQELAYGERGAGASIPPFSTLVFEVELLEIL

SEQ ID NO: 9266 - protein, 228 aa, Legionella gresilensis
AAAISLVVSTAFAAPDSTNATNSTNSSANSTNASATTTSNTSTNLSSDMDKLSYSIGADLGRNFKKQGIDISPSAMAKGLQDGMSGGQLQLTDDQMKDVLNKFQKDLMTKRNAEFTKKAEENKAKGDAFLNQNKSKDGVVALPSGLQYKPLETGKGAKPGKDDTVTVEYTGKLIDGQVFDSTEKSGKPAEFKVSQVIPGWTEVLQLMPAGSTWEVYLPPSLAYGPRGI

SEQ ID NO: 9267 - protein, 457 aa, Saguinus oedipus
MTTDEGAKSSRENPAATVAEQGEDVTSKKDRGVLKIVKRVGHGEETPMIGDKVYVHYNGKLSNGKKFDSSHDRNEPFVFSIGKGQVIKAWDIGVSTMKKGEICHLLCKPEYAYGATGSLPKIPSNATLFFEVELLNFKGEDLLEDGGIIRRTKRRGEGYSNPNEGARVQIHLEGRCGGRVFDCRDVAFTVGEGEDHDIPIGIDKALEKMQREEQCILHLGPRYGFGEAGKPKFGIEPNAELIYEVTLKSFEKAKESWEMDTKEKLEQAAIVKEEGTVYFKGGKYVQAVIQYGKIVSWLEMEYGLSEKESKASESFLLAAFLNLAMCYLKLREYAKAVECCDKALGLDSANEKGLYRRGEAQLLMNEFESAKGDFEKVLEVNPQNKAARLQIVVCQKKAKEHNERDRRIYANMFKKFAEQDAKEEANKAVSKKTSEGVTNEKLTVSHAVEEEKPEGHV

SEQ ID NO: 9268 - protein, 457 aa, Cercopithecus aethiops
MTTDEGAKNSGESPTATVAEQGEDITSKKDRGVLKIVKRVGNGEETPMIGDKVYVHYKGKLSNGKKFNSSHDRNEPFVFSLGKSQVIKAWDIGVATMKKGEICHLLCKPEYAYGSAGSVPKIPSNATLFFEIELLDFKGEDLLEDGGIIRRTKRKGEGYSNPNEGATVEIHLEGRCGERMFDCRDVAFTVGEGEDHDIPIGIDKALEKMQREEQCILYLGPRYGFGEAGKPKFGIEPNAELIYEVTLKSFEKAKESWEMDTKEKLEQAAIVKEKGTVYFKGGKYMRAVIQYGKIVSWLEMEYGLSEKESKASESFLLAAFLNLAMCYLKLREYTKAVECCDKALGLDSANEKGLYRRGEAQLLMNEFESAKGDFEKVLEVNPQNKAARLQISMCQKKAKEHNERDRRIYANMFKKFAEQDAKEEANKAMGKKTSEGVTNEKGTDSSAVEEEKAEGHV

SEQ ID NO: 9269 - protein, 330 aa, Cercopithecus aethiops
MADIIARLREDGIQKRVIQEGRGELPDFQDGTKATFHYRTLHSDNEGTVLDDSRVRGKPMELIIGKKFKLPVWETIVCTMREGEIAQFLCDIKHVVLYPLVAKSLGNIAVGKDPLEGQRHCCGVAQMHEHSSLGHADLDALQQNPQPLVFHMEMLKVESPGTYQQDPWAMTDEEKAKAVPLIHQEGNRLYREGHVKEAAAKYYDAIACLKNLQMKEQPGSPEWIQLDQQITPLLLNYCQCKLVAEEYYEVLDHCSSILNKYDDNVKAYFKRGKAHAAVWNAQEAQADFAKVLELDPALAPVVSRELRALEARIRQKDEEDKARFRGIFSH

SEQ ID NO: 9270 - protein, 233 aa, Macaca fascicularis
MELGLLSMRRGELARFLFKPNYAYGTLGCPPLIPPNTTVLFEIELLDFLDSAESDKFCALSAEQQDQYPLQKVLKVAATEREFGNYLFRQNRFCDAEVRYKRALLLLRRRSAPSEAQHLVEAAKLPVLLNLSFTYLKLDRPTIALRYGEQALIIDQKNAKALFRCGQACLLLTEYQKARDFLVRAQREQPFNHDINNELKKLASDYRDYVDKEKEMWHRMFARCGDGSTAGES

SEQ ID NO: 9271 - protein, 392 aa, Macaca mulatta
MDAALLLNVEGVKKTILHGGTGELPNFITGSRVIFHFRTMKCDEERTVIDDSRQVDQPMHIIIGNMFKLEVWEILLTSMRVHEVAEFWCDTIHTGVYPILSRSLRQMAQGKDPTEWHVHTCGLANMFAYHTLGYEDLDELQKEPQPLIFVIELLQVDAPSDYQRETWNLSNHEKMKVVPVLHGEGNRLFKLGRYEEASSKYQEAIICLRNLQTKEKPWEVQWLKLEKMINTLTLNYCQCLLKKEEYYEVLEHTSDILRHHPGIVKAYYVRARAHAEVWNEAEAKADLQKVLELEPSMQKAVRRELRLLENRMAEKQEEERLRCRNMLSQGATQPPAEPPAQPPTAPPAELSTGPPADPPAEPPTAPPAELSTGPPAEPPAELPLSPGHSLQH

SEQ ID NO: 9272 - protein, 372 aa, Papio cynocephalus
MDAALLLNVEGVKKTILHGGTGELPNFITGSRVIFHFRTMKCDEERTVIDDSRQVDQPMHIIIGNMFKLEVWEILLTSMRVHEVAEFWCDTIHTGVYPILSRSLRQMAQGKDPTEWHVHTCGLANMFAYHTLGYEDLDELQKEPQPLIFVIELLQVDAPSDYQRETWNLSNHEKMKVVPVLHGEGNRLFKLGRYEEASSKYQEAIICLRNLQTKEKPWEVQWLKLEKMINTLTLNYCQCLLKKEEYYEVLEHTSDILRHHPGIVKAYYVRARAHAEVWNEAEAKADLQKVLELEPSMQKAVRRELRLLENRMAEKQEEERLRCRNMLSQGATQPPTEPPAEPHTAPPAELSTGPPAEPPAELPLSPGHSLQH

SEQ ID NO: 9273 - protein, 384 aa, Pan paniscus
MDAALLLNVEGVKKTILHGGTGELPNFITGSRVIFHFRTMKCDEERTVIDDSRQVGQPMHIIIGNMFKLEVWEILLTSMRVHEVAEFWCDTIHTGVYPILSRSLRQMAQGKDPTEWHVHTCGLANMFAYHTLGYEDLDELQKEPQPLVFVIELLQVDAPSDYQRETWNLSNHEKMKAVPVLHGEGNRLFKLGRYEEASSKYQEAIICLRNLQTKEKPWEVQWLKLEKMINTLILNYCQCLLKKEEYYEVLEHTSDILRHHPGIVKAYYVRARAHAEVWNEAEAKADLRKVLELEPSMQKAVRRELRLLENRMAEKQEEERLRCRNMLSQGATQPPAEPPTEPPAQSSTEPPAEPPPAPSAELSAGPPAETATEPPPSPGHSLQH

SEQ ID NO: 9274 - protein, 459 aa, Homo sapiens
MTAEEMKATESGAQSAPLPMEGVDISPKQDEGVLKVIKREGTGTEMPMIGDRVFVHYTGWLLDGTKFDSSLDRKDKFSFDLGKGEVIKAWDIAIATMKVGEVCHITCKPEYAYGSAGSPPKIPPNATLVFEVELFEFKGEDLTEEEDGGIIRRIQTRGEGYAKPNEGAIVEVALEGYYKDKLFDQRELRFEIGEGENLDLPYGLERAIQRMEKGEHSIVYLKPSYAFGSVGKEKFQIPPNAELKYELHLKSFEKAKESWEMNSEEKLEQSTIVKERGTVYFKEGKYKQALLQYKKIVSWLEYESSFSNEEAQKAQALRLASHLNLAMCHLKLQAFSAAIESCNKALELDSNNEKGLFRRGEAHLAVNDFELARADFQKVLQLYPNNKAAKTQLAVCQQRIRRQLAREKKLYANMFERLAEEENKAKAEASSGDHPTDTEMKEEQKSNTAGSQSQVETEA

SEQ ID NO: 9275 - protein, 457 aa, Homo sapiens
MTTDEGAKNNEESPTATVAEQGEDITSKKDRGVLKIVKRVGNGEETPMIGDKVYVHYKGKLSNGKKFDSSHDRNEPFVFSLGKGQVIKAWDIGVATMKKGEICHLLCKPEYAYGSAGSLPKIPSNATLFFEIELLDFKGEDLFEDGGIIRRTKRKGEGYSNPNEGATVEIHLEGRCGGRMFDCRDVAFTVGEGEDHDIPIGIDKALEKMQREEQCILYLGPRYGFGEAGKPKFGIEPNAELIYEVTLKSFEKAKESWEMDTKEKLEQAAIVKEKGTVYFKGGKYMQAVIQYGKIVSWLEMEYGLSEKESKASESFLLAAFLNLAMCYLKLREYTKAVECCDKALGLDSANEKGLYRRGEAQLLMNEFESAKGDFEKVLEVNPQNKAARLQISMCQKKAKEHNERDRRIYANMFKKFAEQDAKEEANKAMGKKTSEGVTNEKGTDSQAMEEEKPEGHV

SEQ ID NO: 9276 - protein, 449 aa, Homo sapiens
NNEESPTATVAEQGEDITSKKDRGVLKIVKRVGNGEETPMIGDKVYVHYKGKLSNGKKFDSSHDRNEPFVFSLGKGQVIKAWDIGVATMKKGEICHLLCKPEYAYGSAGSLPKIPSNATLFFEIELLDFKGEDLFEDGGIIRRTKRKGEGYSNPNEGATVEIHLEGRCGGRMFDCRDVAFTVGEGEDHDIPIGIDKALEKMQREEQCILYLGPRYGFGEAGKPKFGIEPNAELIYEVTLKSFEKAKESWEMDTKEKLEQAAIVKEKGTVYFKGGKYMQAVIQYGKIVSWLEMEYGLSEKESKASESFLLAAFLNLAMCYLKLREYTKAVECCDKALGLDSANEKGLYRRGEAQLLMNEFESAKGDFEKVLEVNPQNKAARLQISMCQKKAKEHNERDRRIYANMFKKFAEQDAKEEANKAMGKKTSEGVTNEKGTDSQAMEEEKPEGHV

SEQ ID NO: 9277 - protein, 457 aa, Homo sapiens
MTTDEGAKNNEESPTATVAEQGEDITSKKDRGVLKIVKRVGNGEETPMIGDKVYVHYKGKLSNGKKFDSSHDRNEPFVFSLGKGQVIKAWDIGVATMKRGEICHLLCKPEYAYGSAGSLPKIPSNATLFFEIELLDFKGEDLFEDGGIIRRTKRKGEGYSNPNEGATVEIHLEGRCGGRMFDCRDVAFTVGEGEDHDIPIGIDKALEKMQREEQCILYLGPRYGFGEAGKPKFGIEPNAELIYEVTLKSFEKAKESWEMDTKEKLEQAAIVKEKGTVYFKGGKYMQAVIQYGKIVSWLEMEYGLSEKESKASESFLLAAFLNLAMCYLKLREYTKAVECCDKALGLDSANEKGLYRRGEAQLLMNEFESAKGDFEKVLEVNPQNKAARLQISMCQKKAKEHNERDRRIYANMFKKFAEQDAKEEANKAMGKKTSEGVTNEKGTDSQAMEEEKPEGHV

SEQ ID NO: 9278 - protein, 314 aa, Homo sapiens
ARGGIIRRIQTRGEGYAKPNEGAIVEVALEGYYKDKLFDQRELRFEIGEGENLDLPYGLERAIQRMEKGEHSIVYLKPSYAFGSVGKEKFQIPPNAELKYELHLKSFEKAKESWEMNSEEKLEQSTIVKERGTVYFKEGKYKQALLQYKKIVSWLEYESSFSNEEAQKAQALRLASHLNLAMCHLKLQAFSAAIESCNKALELDSNNEKGLFRRGEAHLAVNDFELARADFQKVLQLYPNNKAAKTQLAVCQQRIRRQLAREKKLYANMFERLAEEENKAKAEASSGDHPTDTEMKEEQKSNTAGSQSQVETEA

SEQ ID NO: 9279 - protein, 140 aa, Homo sapiens [sequence omitted]

SEQ ID NO: 9280 - protein, 517 aa, Homo sapiens
GDFVRYHYVGTFPDGQKFDSSYDRDSTFNVFVGKGQLITGMDQALVGMCVNERRFVKIPPKLAYGNEGVSGVIPPNSVLHFDVLLMDIWNSEDQVQIHTYFKPPSCPRTIQVSDFVRYHYNGTFLDGTLFDSSHNRMKTYDTYVGIGWLIPGMDKGLLGMCVGEKRIITIPPFLAYGEDGDGKDIPGQASLVFDVALLDLHNPKDSISIENKVVPENCERISQSGDFLRYHYNGTLLDGTLFDSSYSRNRTFDTYIGQGYVIPGMDEGLLGVCIGEKRRIVVPPHLGYGEEGRGNIPGSAVLVFDIHVIDFHNPSDSISITSHYKPPDCSVLSKKGDYLKYHYNASLLDGTLLDSTWNLGKTYNIVLGSGQVVLGMDMGLREMCVGEKRTVIIPPHLGYGEAGVDGEVPGSAVLVFDIELLELVAGLPEGYMFIWNGEVSPNLFEEIDKDGNGEVLLEEFSEYIHAQVASGKGKLAPGFDAELIVKNMFTNQDRNGDGKVTAEEFKLKDQEAKHDEL

SEQ ID NO: 9281 - protein, 582 aa, Homo sapiens
MFPAGPPSHSLLRLPLLQLLLLVVQAVGRGLGRASPAGGPLEDVVIERYHIPRACPREVQMGDFVRYHYNGTFEDGKKFDSSYDRNTLVAIVVGVGRLITGMDRGLMGMCVNERRRLIVPPHLGYGSIGLAGLIPPDATLYFDVVLLDVWNKEDTVQVSTLLRPPHCPRMVQDGDFVRYHYNGTLLDGTFFDTSYSKGGTYDTYVGSGWLIKGMDQGLLGMCPGERRKIIIPPFLAYGEKGYGTVIPPQASLVFHVLLIDVHNPKDAVQLETLELPPGCVRRAGAGDFMRYHYNGSLMDGTLFDSSYSRNHTYNTYIGQGYIIPGMDQGLQGACMGERRRITIPPHLAYGENGTGDKIPGSAVLIFNVHVIDFHNPADVVEIRTLSRPSETCNETTKLGDFVRYHYNCSLLDGTQLFTSHDYGAPQEATLGANKVIEGLDTGLQGMCVGERRQLIVPPHLAHGESGARGVPGSAVLLFEVELVSREDGLPTGYLFVWHKDPPANLFEDMDLNKDGEVPPEEFSTFIKAQVSEGKGRLMPGQDPEKTIGDMFQNQDRNQDGKITVDELKLKSDEDEERVHEEL

SEQ ID NO: 9282 - protein, 582 aa, Homo sapiens
MFPAGPPSHSLLRLPLLQLLLLVVQAVGRGLGRASPAGGPLEDVVIERYHIPRACPREVQMGDFVRYHYNGTFEDGKKFDSSYDRNTLVAIVVGVGRLITGMDRGLMGMCVNERRRLIVPPHLGYGSIGLAGLIPPDATLYFDVVLLDVWNKEDTVQVSTLLRPPHCPRMVQDGDFVRYHYNGTLLDGTSFDTSYSKGGTYDTYVGSGWLIKGMDQGLLGMCPGERRKIIIPPFLAYGEKGYGTVIPPQASLVFHVLLIDVHNPKDAVQLETLELPPGCVRRAGAGDFMRYHYNGSLMDGTLFDSSYSRNHTYNTYIGQGYIIPGMDQGLQGACMGERRRITIPPHLAYGENGTGDKIPGSAVLIFNVHVIDFHNPADVVEIRTLSRPSETCNETTKLGDFVRYHYNCSLLDGTQLFTSHDYGAPQEATLGANKVIEGLDTGLQGMCVGERRQLIVPPHLAHGESGARGVPGSAVLLFEVELVSREDGLPTGYLFVWHKDPPANLFEDMDLNKDGEVPPEEFSTFIKAQVSEGKGRLMPGQDPEKTIGDMFQNQDRNQDGKITVDELKLKSDEDEERVHEEL

SEQ ID NO: 9283 - protein, 470 aa, Homo sapiens
MFPAGPPSHSLLRLPLLQLLLLVVQAVGRGLGRASPAGGPLEDVVIERYHIPRACPREVQMGDFVRYHYNGTFEDGKKFDSSYDRNTLVAIVVGVGRLITGMDRGLMGMCVNERRRLIVPPHLGYGSIGLAGLIPPDATLYFDVVLLDVWNKEDTVQVSTLLRPPHCPRMVQDGDFMRYHYNGSLMDGTLFDSSYSRNHTYNTYIGQGYIIPGMDQGLQGACMGERRRITIPPHLAYGENGTGDKIPGSAVLIFNVHVIDFHNPADVVEIRTLSRPSETCNETTKLGDFVRYHYNCSLLDGTQLFTSHDYGAPQEATLGANKVIEGLDTGLQGMCVGERRQLIVPPHLAHGESGARGVPGSAVLLFEVELVSREDGLPTGYLFVWHKDPPANLFEDMDLNKDGEVPPEEFSTFIKAQVSEGKGRLMPGQDPEKTIGDMFQNQDRNQDGKITVDELKLKSDEDEERVHEEL

SEQ ID NO: 9284 - protein, 107 aa, Homo sapiens
GVQVETISPGDGRTFPKAGQTCVVHYTGMLEDGKKFDSSRDRNKPFKFMLGKQEVIRGWEEGVAQMSVGQRAKLTISPDYAYGATGHPGIIPPHATLVFDVELLKLE

SEQ ID NO: 9285 - protein, 481 aa, Homo sapiens
MDRGLMGMCVNERRRLIVPPHLGYGSIGLAGLIPPDATLYFDVVLLDVWNKEDTVQVSTLLRPPHCPRMVQDGDFVRYHYNGTLLDGTSFDTSYSKGGTYDTYVGSGWLIKGMDQGLLGMCPGERRKIIIPPFLAYGEKGYGTVIPPQASLVFHVLLIDVHNPKDAVQLETLELPPGCVRRAGAGDFMRYHYNGSLMDGTLFDSSYSRNHTYNTYIGQGYIIPGMDQGLQGACMGERRRITIPPHLAYGENGTGDKIPGSAVLIFNVHVIDFHNPADVVEIRTLSRPSETCNETTKLGDFVRYHYNCSLLDGTQLFTSHDYGAPQEATLGANKVIEGLDTGLQGMCVGERRQLIVPPHLAHGESGARGVPGSAVLLFEVELVSREDGLPTGYLFVWHKDPPANLFEDMDLNKDGEVPPEEFSTFIKAQVSEGKGRLMPGQDPEKTIGDMFQNQDRNQDGKITVDELKLKSDEDEERVHEEL

SEQ ID NO: 9286 - protein, 356 aa, Homo sapiens
MGQPPAEEAEQPGALAREFLAAMEPEPAPAPAPEEWLDILGNGLLRKKTLVPGPPGSSRPVKGQVVTVHLQTSLENGTRVQEEPELVFTLGDCDVIQALDLSVPLMDVGETAMVTADSKYCYGPQGSRSPYIPPHAALCLEVTLKTAVDGPDLEMLTGQERVALANRKRECGNAHYQRADFVLAANSYDLAIKAITSSAKVDMTFEEEAQLLQLKVKCLNNLAASQLKLDHYRAALRSCSLVLEHQPDNIKALFRKGKVLAQQGEYSEAIPILRAALKLEPSNKTIHAELSKLVKKHAAQRSTETALYRKMLGNPSRLPAKCPGKGAWSIPWKWLFGATAVALGGVALSVVIAARN

SEQ ID NO: 9287 - protein, 108 aa, Homo sapiens
MGVQVETISPGDGRTFPKRGQTCVVHYTGMLEDGKKFDSSRDRNKPFKFMLGKQEVIRGWEEGVAQMSVGQRAKLTISPDYAYGATGHPGIIPPHATLVFDVELLKLE

SEQ ID NO: 9288 - protein, 107 aa, Homo sapiens
GVQVETISPGDGRTFPKRGQTCVVHYTGMLEDGKKFDSSRDRNKPFKFMLGKQEVIRGWEEGVAQMSVGQRAKLTISPDYAYGATGHPGIIPPHATLVFDVELLKLE

SEQ ID NO: 9289 - protein, 107 aa, Homo sapiens
GVQVETISPGDGRTFPKRGQTCVVHYTGMLEDGKKFDSSRDKNKPFKFMLGKQEVIRGWEEGVAQMSVGQRAKLTISPDYAYGATGVPGIIPPHATLVFDVELLKLE

SEQ ID NO: 9290 - protein, 107 aa, Homo sapiens
GVQVETISPGDGRTFPKRGQTCVVHYTGMLEDGKKMDSSRDRNKPFKFMLGKQEVIRGWEEGVAQMSVGQRAKLTISPDYAYGATGHPGIIPPHATLVFDVELLKLE

SEQ ID NO: 9291 - protein, 107 aa, Homo sapiens
GVQVETISPGDGRTFPKRGQTCVVHYTGMLEDGKKVDSSRDRNKPFKFMLGKQEVIRGWEEGVAQMSVGQRAKLTISPDYAYGATGHPGIIPPHATLVFDVELLKLE

SEQ ID NO: 9292 - protein, 355 aa, Homo sapiens
MGQPPAEEAEQPGALAREFLAAMEPEPAPAPAPEEWLDILGNGLLRKKTLVPGPPGSSRPVKGQVVTVHLQTSLENGTRVQEEPELVFTLGDCDVIQALDLSVPLMDVGETAMVTADSKYCYGPQGRSPYIPPHAALCLEVTLKTAVDGPDLEMLTGQERVALANRKRECGNAHYQRADFVLAANSYDLAIKAITSSAKVDMTFEEEAQLLQLKVKCLNNLAASQLKLDHYRAALRSCSLVLEHQPDNIKALFRKGKVLAQQGEYSEAIPILRAALKLEPSNKTIHAELSKLVKKHAAQRSTETALYRKMLGNPSRLPAKCPGKGAWSIPWKWLFGATAVALGGVALSVVIAARN

SEQ ID NO: 9293 - protein, 412 aa, Homo sapiens
MASCAEPSEPSAPLPAGVPPLEDFEVLDGVEDAEGEEEEEEEEEEEDDLSELPPLEDMGQPPAEEAEQPGALAREFLAAMEPEPAPAPAPEEWLDILGNGLLRKKTLVPGPPGSSRPVKGQVVTVHLQTSLENGTRVQEEPELVFTLGDCDVIQALDLSVPLMDVGETAMVTADSKYCYGPQGRSPYIPPHAALCLEVTLKTAVDGPDLEMLTGQERVALANRKRECGNAHYQRADFVLAANSYDLAIKAITSSAKVDMTFEEEAQLLQLKVKCLNNLAASQLKLDHYRAALRSCSLVLEHQPDNIKALFRKGKVLAQQGEYSEAIPILRAALKLEPSNKTIHAELSKLVKKHAAQRSTETALYRKMLGNPSRLPAKCPGKGAWSIPWKWLFGATAVALGGVALSVVIAARN

SEQ ID NO: 9294 - protein, 108 aa, Homo sapiens
MGVEIETISPGDGRTFPKKGQTCVVHYTGMLQNGKKFDSSRDRNKPFKFRIGKQEVIKGFEEGAAQMSLGQRAKLTCTPDVAYGATGHPGVIPPNATLIFDVELLNLE

SEQ ID NO: 9295 - protein, 108 aa, Homo sapiens
MGVHVETISPGDWRTFPKRSQTCVMHYTGMLEDGKKFDSSRDRNKPFKFMLGKQEVIRGWEEGVVQMSVGQRAKLTISPDYAYGATGHPGIIPPHATLVFDVELLKLE

SEQ ID NO: 9296 - protein, 209 aa, Legionella drozanskii
AMSLAMSTTIAATADTATSAPSATSLSTDTDKLSYSIGADLGKNFKKQGIDISPAAMAKGLQDGMSGGQLLLTEDQMKEVLNKFQKELMMKRSAEFNKKSEENKSRGEAFLKDNKSKDGVVSLPSGLQYKILEKGDGAKPAKEDTVTVEYTGRLINGQVFDSTEKTGKPATFKVSQVIPGWTEALQLMPSGSTWEVYIPSDLAYGPRSV

SEQ ID NO: 9297 - protein, 197 aa, Legionella rowbothamii
VLGLAMSTAMAADALVTDKDKLSYSIGADLGKNFKSQGIDINPEALAKGMQDGMSGGQLILTEQQMKDVLNKFQKDLMAKRSAEFNKKAEENKSKGEAFLSTNKAKTGVVVLPSGLQYKILEAGTGAKPGKSDTVTVEYTGTLIDGTVFDSTQKTGKPATFQVSQVIPGWTEALQLMPAGSTWEIFVPADLAYGHVV

SEQ ID NO: 9298 - protein, 194 aa, Legionella rowbothamii
LAMSTAMAADALVTDKDKLSYSIGADLGKNFKSQGIDINPEALAKGMQDGMSGGQLILTEQQMKDVLNKFQKDLMAKRSAEFNKKAEENKSKGEAFLSTNKAKTGVVVLPSGLQYKILEAGTGAKPGKSDTVTVEYTGTLIDGTVFDSTQKTGKPATFQVSQVIPGWTEALQLMPAGSTWEIFVPADLAYGHVV

SEQ ID NO: 9299 - protein, 198 aa, Legionella lytica
VLGLAMSTAMAADALVTDKDKLSYSIGADLGKNFKGQGIDINTEALAKGMQDGMSGAQLILTEQQMKDVLNKFQKDLMAKRSAEFNKKAEENKSKGEAFLSSNKAKTGVVVLPSGLQYKILEAGTGAKPGKADTVTVDYTGTLIDGTVFDSTQKTGKPATFQVSQVIPGWTEALQLMPAGSTWEVFVPADLAYGPRSV

SEQ ID NO: 9300 - protein, 199 aa, Legionella lytica
AVLGLAMSTAMAADALVTDKDKLSYSIGADLGKNFKGQGIDINPEALAKGMQDGMSGAQLILTEQQMKDVLNKFQKDLMAKRSAEFNKKAEENKSKGEAFLSSNKAKTGVVVLPSGLQYKILEAGTGAKPGKADTVTVDYTGTLIDGTVFDSTQKTGKPATFQVSQVIPGWTEALQLMPAGSTWEVFVPADLAYGPRSV

SEQ ID NO: 9301 - protein, 297 aa, Cytophaga hutchinsonii
MNKVYIILGFCFLSISVFAQKKQKTPSKASLFHEKDVAYTPSGLAYKYRLDVPGKTGAVGDVVKLHFVLRNSKDSILRSTIEEDRMVITTIQKPRYAASFEEGLGMLSKGDSCAFWISADSLFKKGIGAEMPPFIEKGSFLRFEVKMYDVLTMAEYVEEQEIMAKKVKADEDAALASYIKTNNIPAVLDTATGVYYQVVQAGTGAKPKKGNKVIVHYTGHLLNGEIFDSSLDRGDPFDFIIGQGRVIEGWDEGIPLMRKGEKGILYIPSYRGYGEQRAGSIPPNSTLIFEVELLDIK

SEQ ID NO: 9302 - protein, 295 aa, Cytophaga hutchinsonii
MLKKSLSLLAGAVMLASITSCNKFEKTESGLEYKILKDSSGEDYPEKGGFITFWFEIQNDKDSTLDTQFKDPNPVGIPTPDVAHKPSIEEGFMLLTEGDSAVFLLNADSLYANTFHQKLPAHIKSGSNVKMVVRMGKVYSKSFVDSVMAVQEQQMANQMLAETEVYKKDSLAIQNYLTKNKLKGQPTIGGVYVVKLKQNNATDLFIAPGDSIETSYVGKLLIEGTEFDKSRDGQPFKFTVGMGQVIKGWDEGFQKLKRGEKALLLIPSRLAYGSRGAQGAIPPNSPLLFEVEVKK

SEQ ID NO: 9303 - protein, 305 aa, Cytophaga hutchinsonii
MNRISIFLFLFCACILNVYAQNKKTPATGKAEPSYLKTASGLEYKIIKEGPGNQRPEQGGYISFWFQLQTLQDSIIDSQFGDPNPVGIPTQEALHKPGIEEGFLLLTEGDSAVFLLNADSLYINSFHQKRPDYLKPQSKVKMIVKMGTVYSKQFVDSVMAQQKIAMAEQSKGETDVYTKDSIAIQNYLKQNHLSGVATPGGAYVVILEKSTFSKADLKAGEDVQTTYIGSLLSNGSVFDKSAPGDYFKFRLGSGQVIQGWDQGFLKLKHGDKALILIPSRLAYGTRGAGGSIPPNAPLVFEVQVK

SEQ ID NO: 9304 - protein, 219 aa, Cytophaga hutchinsonii
MFCFLKSELTDSKLILFKTMAFTTEKDTVSYSLGVNIATSLKNQGFDDLNLDALTTALSDVFGNKTLQIDEAKGGQILNAYFQGMQERKQKKNIEEGVAFLKANGAKADVITLPSGLQYKVLVEGNGPKPTATDKVTTHYHGTLINGTVFDSSVERGQPATFPVNGVIAGWIEALQLMPTGSKWQLYVPSDLAYGARGASELIGPHTTLIFDVELISIN

SEQ ID NO: 9305 - protein, 136 aa, Cytophaga hutchinsonii
MIKKILTGMLCALCCIISLCASAADTLTTNSGIKYVRIKEGDGIHPKAGQTVKVIYSRKSSTGRVVETNEGGKPFKFQVDNHEVIPGWDEAVKLMSKGEKWYCIIPSELGYGKKGIEGVVAPNSTLYFLIEIVDIK

SEQ ID NO: 9306 - protein, 108 aa, Bos taurus
MGVQVETISPGDGRTFPKRGQTCVVHYTGMLEDGKKFDSSRDRNKPFKFVLGKQEVIRGWEEGVAQMSVGQRAKLTISPDYAYGATGHPGIIPPNATLIFDVELLKLE

SEQ ID NO: 9307 - protein, 107 aa, Bos taurus
GVQVETISPGDGRTFPKRGQTCVVHYTGMLEDGKKFDSSRDRNKPFKFVLGKQEVIRGWEEGVAQMSVGQRAKLTISPDYAYGATGHPGIIPPNATLIFDVELLKLE

SEQ ID NO: 9308 - protein, 107 aa, Bos taurus
GVEIETISPGDGRTFPKKGQTCVVHYTGMLQNGKKFDSSRDRNKPFKFRIGKQEVIKGFEEGAAQMSLGQRAKLTCTPDVAYGATGHPGVIPPNATLIFDVELLNLE

SEQ ID NO: 9309 - protein, 272 aa, Salmonella typhimurium LT2
MKSLFKATLLATTMAVAMHAPITFAADAAKPAATADSKAAFKNDDQKAAYALGASLGRYMENSLKEQEKLGIKLDKDQLIAGVQDAFADKSKLSDQEIEQTLQTFEARVKSAAQAKMEKDAADNEAKGKTFRDAFAKEKGVKTSSTGLLYKVEKEGTGEAPKDSDTVVVNYKGTLIDGKEFDNSYTRGEPLSFRLDGVIPGWTEGLKNIKKGGKIKLVIPPELAYGKTGVPGIPANSTLVFDVELLDIKPAPKADAKPADAADAKAADAAKK

SEQ ID NO: 9310 - protein, 458 aa, Oryctolagus cuniculus
MTAEEMKAAESGAQSAPLPLEGVDISPKQDEGVLKVIKREGTGTETPMIGDRVFVHYTGWLLDGTKFDSSLDRKDKFSFDLGKGEVIKAWDIAVATMKVGELCRITCKPEYAYGSAGSPPKIPPNATLVFEVELFEFKGEDLTDDEDGGIIRRIRTRGEGYARPNDGAIVEVALEGYYKDRLFDQRELRFEVGEGESLDLPCGLEKAIQRMEKGEHSILYLKPSYAFGNAGKEKFQIPPYAELKYEVHLKSFEKAKESWEMSSEEKLEQSAIVKERGTVYFKEGKYKQALLQYKKIVSWLEYESSFSSEEVQKAQALRLASHLNLAMCHLKLQAFSAAVESCNKALELDSNNEKGLFRRGEAHLAVNDFDLARADFQKVLQLYPSNKAAKAQLAVCQQRIRKQIAREKKLYANMFERLAEEENKAKAEVAAGDHPMDTEMKDERNDVAGSQSQVETEA

SEQ ID NO: 9311 - protein, 149 aa, Oryctolagus cuniculus
EEMDIKAAESGAQSAPLPLEGVDISPKQDEGVLKVIKREGTGTETPMIGDRVFVHYTGWLLDGTKFDSSLDRKDKFSFDLGKGEVIKAWDIAVATMKVGELCRITCKPEYAYGSAGSPPKIPPNATLVFEVELFEFKGEDLTDDEDGVP

SEQ ID NO: 9312 - protein, 108 aa, Oryctolagus cuniculus
MGVEIETISPGDGRTFPKKGQTCVVHYTGMLQNGKKFDSSRDRNKPFKFRIGKQEVIKGFEEGAAQMSLGQRAKLTCTPDVAYGATGHPGVIPPNATLIFGVELLNLE

SEQ ID NO: 9313 - protein, 543 aa, Cricetulus griseus
MEQVNELKEKGNKALSAGNIDDALQCYSEAIKLDPQNHVLYSNRSAAYAKKGDYQKAYEDGCKTVDLKPDWGKGYSRKAAALEFLNRFEEAKRTYEEGLKHEANNLQLKEGLQNMEARLAERKFMNPFNLPNLYQKLENDPRTRTLLSDPTYRELIEQLRNKPSDLGTKIQDPRIMTTLSVLLGVDLGSMDEEEEAATPPPPPPSKKEAKPEPMEEDLPENKKQALKEKEMGNEAYKKKDFDMALKHYDRAKELDPTNMTYITNQAAVHFEKGDYNKCRELCEKAIEVGRENREDYRQIAKAYARIGNSYFKEERYKDAIHFYNKSLAEHRTPDVLKKCQQAEKILKEQERLAYINPDLALEEKNKGNECFQKGDYPQAMKHYTEAIKRNPKDAKLYSNRAACYTKLLEFQLALKDCEECIQLEPTFIKGYTRKAAALEAMKDYTKAMDVYQKALELDSSCKEAADGYQRCMMAQYNRHDSPEDVKRRAMADPEVQQIMSDPAMRLILEQMQKDPQALSEHLKNPVIAQKIQKLMDVGLIAIR

SEQ ID NO: 9314 - protein, 543 aa, Mus musculus
MEQVNELKEKGNKALSAGNIDDALQCYSEAIKLDPQNHVLYSNRSAAYAKKGDYQKAYEDGCKTVDLKPDWGKGYSRKAAALEFLNRFEEAKRTYEEGLKHEANNLQLKEGLQNMEARLAERKFMNPFNLPNLYQKLENDPRTRSLLSDPTYRELIEQLQNKPSDLGTKLQDPRVMTTLSVLLGVDLGSMDEEEEAATPPPPPPPKKEPKPEPMEEDLPENKKQALKEKELGNDAYKKKDFDKALKHYDRAKELDPTNMTYITNQAAVHFEKGDYNKCRELCEKAIEVGRENREDYRQIAKAYARIGNSYFKEEKYKDAIHFYNKSLAEHRTPDVLKKCQQAEKILKEQERLAYINPDLALEEKNKGNECFQKGDYPQAMKHYTEAIKRNPRDAKLYSNRAACYTKLLEFQLALKDCEECIQLEPTFIKGYTRKAAALEAMKDYTKAMDVYQKALDLDSSCKEAADGYQRCMMAQYNRHDSPEDVKRRAMADPEVQQIMSDPAMRLILEQMQKDPQALSEHLKNPVIAQKIQKLMDVGLIAIR

SEQ ID NO: 9315 - protein, 543 aa, Mus musculus
MEQVNELKEKGNKALSAGNIDDALQCYSEAIKLDPQNHVLYSNRSAAYAKKGDYQKAYEDGCKTVDLKPDWGKGYSRKAAALEFLNRFEEAKRTYEEGLKHEANNVQLKEGLQNMEARLAERKFMNPFNLPNLYQKLENDPRTRSLLSDPTYRELIEQLQNKPSDLGTKLQDPRVMTTLSVLLGVDLGSMDEEEEAATPPPPPPPKKEPKPEPMEEDLPENKKQALKEKELGNDAYKKKDFDKALKHYDRAKELDPTNMTYITNQAAVHFEKGDYNKCRELCEKAIEVGRENREDYRQIAKAYARIGNSYFKEEKYKDAIHFYNKSLAEHRTPDVLKKCQQAEKILKEQERLAYINPDLALEEKNKGNECFQKGDYPQAMKHYTEAIKRNPRDAKLYSNRAACYTKLLEFQLALKDCEECIQLEPTFIKGYTRKAAALEAMKDYTKAMDVYQKALDLDSSCKEAADGYQRCMMAQYNRHDSPEDVKRRAMADPEVQQIMSDPAMRLILEQMQKDPQALSEHLKNPVIAQKIQKLMDVGLIAIR

SEQ ID NO: 9316 - protein, 542 aa, Mus musculus
  unsure (1)..(542): unsure at all Xaa locations
MEQVNELKEKGNKAPSAGNIDDALQCYSEAIKLDPQNHVLYSNRSAAYAKKGDYQKAYEDGCKTVDLKPDWGKGYSRKAAALEFLNRFEEAKRTYEEGLKHEANNLQLKEGLQNMEARLAERKFMNPFNLPNLYQKLENDPRTRSLLSDPTYRELIEQLQNKPSDLGTKLQDPRVMTTLSVLLGVDLGSMDEEEEAATPPPPPPPKKEPKPEPMEEDLPENKKQALKEKELGNDAYKKKDFDKALKHYDRAKELDPTNMTYITNQAAVHFEKGRLYKCTELCEKAIESGRENREDYRQIAKAYAPNWQFLFKEEXVQDAIHFYNKSLAEHRTQMCSRSASSQRNSEEQERLAYINPDLALEEKNKGNECFQKGDYPQAMKHYTEAIKRNPRDAKLYSNRAACYTKLLEFQLALKDCEECIQLEPTFIKGYTRKAAALEAMKDYTKAMDVYQKALDLDSSCKEAADGYQRCMMAQYNRHDSPEDVKRRAMADPEVQQIMSDPAMRLILEQMQKDPQALSEHLKNPVIAQKIQKLMDVGLIAIR

SEQ ID NO: 9317 - protein, 543 aa, Rattus norvegicus
MEQVNELKEKGNKALSAGNIDDALQCYSEAIKLDPQNHVLYSNRSAAYAKKGDYQKAYEDGCKTVDLKPDWGKGYSRKAAALEFLNRFEEAKRTYEEGLKHEANNLQLKEGLQNMEARLAERKFMNPFNLPNLYQKLENDPRTRTLLSDPTYRELIEQLQNKPSDLGTKLQDPRVMTTLSVLLGVDLGSMDEEEEAATPPPPPPPKKEAKPEPMEEDLPENKKQALKEKELGNDAYKKKDFDKALKHYDKAKELDPTNMTYITNQAAVHFEKGDYNKCRELCEKAIEVGRENREDYRQIAKAYARIGNSYFKEERYKDAIHFYNKSLAEHRTPDVLKKCQQAEKILKEQERLAYINPDLALEEKNKGNECFQKGDYPQAMKHYTEAIKRNPRDAKLYSNRAACYTKLLEFQLALKDCEECIQLEPTFIKGYTRKAAALEAMKDYTKAMDVYQKALDLDSSCKEAADGYQRCMMAQYNRHDSPEDVKRRAMADPEVQQIMSDPAMRLILEQMQKDPQALSEHLKNPVIAQKIQKLMDVGLIAIR

SEQ ID NO: 9318 - protein, 354 aa, Rattus norvegicus
MEQVNELKKKGNKALSAGNIEDALQCYSESIKLDPQNHVLYSNRSAAYAKKGDYQKAAALEFLNRFEEAKRTYGGFKHEANNIQLKEDLQNMEARLAERKFMNPFNLPNLYHKLENDPRIRALLSDPTYRELIEQLQSKPSDLGTKLQDPRVMTTLTVLLGVDLGSVDEKEEAETPPPPSPSKKEAKSEPMEEDLPENKKQALKEKELGNDAYKKKDFNKAQKHYDRAKELNLPSNQATSYTKLLEFHLALKDCEECIQLEPNFIKGYTWKSAALEVMKDYTKAMDVYQKALDLDSSCKEAADGSNYMMAQYNRHGSPEHVKQRAMADPEVQQLLRDPAMRLILEQIQKDPSRL

SEQ ID NO: 9319 - protein, 327 aa, Anopheles gambiae str. PEST
AKMATPESKQLALQEKDLGNAAYKKKDFETALQHYRTALTHDPTDITFHNNIAAVYFEQKEFKKCIEECEKAVEVGRENRADYKLIAKAFTRTGNAYRKLEDYKSAKTYFEKSLSEHRTPEVKSLLSDTEKKIKEMERLAYIDPSKAEEEKEKGNEYFKQGDYSTAVKHYSEAIKRNPDDAKLYSNRAACYTKLAAFDLGLKDCETCCRLDETFIKGWIRKGKILQVMQKSSEALTAYQKALEIDPNNAEALEGYRACTMAVHADPKEVWKKAMNDPEVQQILKDPAMRVILEQMQNDPKAVQEHLKNPQVASKIQKLLESGIIQIY

SEQ ID NO: 9320 - protein, 587 aa, Giardia lamblia ATCC 50803
MSAEEFKAQGNQAAKEGRLADAIDCYTKAINIDGSNHVYYSNRANIYHQLEDYDAAVADAEKCIELKPSFGKGFLRKADALAAMGKREEAVEVLRDGIESCGNTEPLLSQRLSSLEASAGGFGGAPGAGDPGAFMRNMFNAEGMAKIRANPKTAKYLADDPSLEQKLTLVASNPQMMMQVAGADPRLMECMLVAMGIDPDMMKDMPQAPGAPSFDAKPANPEPPAPKEPEKVLTPEEIEANKLKDEGNDLFKEKKYAEAIEKYEAAFAKHKSILFLNNISTALLKMEKITEAEEKAMEAYNYGRDNPGTATFEELGKALTKAASAQYARKDYEKAIKTLKSAMLEHRSKQTLALLTKVEDEWELIKKQNAYSPEKAERAKNEGNELFKAGKYQEAVDKYTEGLKALPLDPEREYRDDNEKFTANKTLLTSLLNNRANAYFKLGQMNLSYDDADHIVSLIKDTTNTKALLRKGQIERLRRQYYKAVETYKKVLEHEKYNNQEALEGYRKTTEKIQELQRNPDSKEAKEVTEIAMADEEIQKIASDPGLAEVIKQISTNPQAAQQYLSDPNISSRIEKLINAGIIRTGQ

SEQ ID NO: 9321 - protein, 293 aa, Giardia lamblia ATCC 50803
MTTRLAAKRLVVEYLLYLRAAQAVEDTDNLDVAIDCLRDCFGLKDVRHGNGDLEQILSGAKAPAVSSTSSSELKAQGNAAFKAEDFQEAIRLFTQAIEVSAANNEPPDQRAVYFANRAAARLGLKAEEETALAAKDCEESVRLCPSYHKAWFRLGNIRESAGNKPEAYRAYSQALTADPSNPKYREARDRVSEGRPEQATPDLSALANNPLFSQLRDDPEIIALMQNPKVADLLSKVNSNPMAIMGAMSDPELAPIFQRLVQKLGPQLSSMLGGLGGLFGGGGANSPPSGMYS

SEQ ID NO: 9322 - protein, 558 aa, Fusobacterium nucleatum subsp. vincentii ATCC 49256
MDEKEKEELLKKIEEYSKKIEEYSKKIEKNPNDASNYYNRGNAYYNRGNTFISLEKFQEAVDDDFEKAIEDYNRAIELNPNNTSYYYNRGKVFYNLKKYKKAITDFNKAIKLNPNDKEYFYIRGSSYYNLNIFNKAIIDFDKAIMITSDNEDYYNSRGSAYANLGNFNKAIADFNKAIELNPNFSDAYNNRGITYAYLKNYKEAIVNFNKAIDLNPSDEGYYYNRGLAYNNFNNYKMAIINFDKAIELNPNFSVAYNNRGITYAYLKNYKEAIVNFDKAIDLNPSDSLAFNLKEITIEIFEKEKSNKTEEFKKLLSEGNFNKLKEFISKEQDLKDSNNDAIKEFDLIENIIKDKSSKLKGYLIFADILGWKGIWKKQDKLDELVTILFVIKSILEKETKTLKDSHNINLISDTFIIYSKTFKTTNKLSKKLIELCLENNLVIRGAISYGECYNKDTVYVGPAVDEAASWHDEGEEIGIFYTPSGKQEIINNPKIKNSNLLEDIIKIKSGEIKTFFIDWYNDKTKKKFYELFNTIDKTSIKVYLKYLNTEKKFASYANS

SEQ ID NO: 9323 - protein, 564 aa, Plasmodium falciparum 3D7
MVNKEEAQRLKELGNKCFQEGKYEEAVKYFSDAITNDPLDHVLYSNLSGAFASLGRFYEALESANKCISIKKDWPKGYIRKGCAEHGLRQLSNAEKTYLEGLKIDPNNKSLQDALSKVRNENMLENAQLIAHLNNIIENDPQLKSYKEENSNYPHELLNTIKSINSNPMNIRIILSTCHPKISEGVEKFFGFKFTGEGNDAEERQRQQREEEERRKKKEEEERKKKEEEEMKKQNRTPEQIQGDEHKLKGNEFYKQKKFDEALKEYEEAIQINPNDIMYHYNKAAVHIEMKNYDKAVETCLYAIENRYNFKAEFIQVAKLYNRLAISYINMKKYDLAIEAYRKSLVEDNNRATRNALKELERRKEKEEKEAYIDPDKAEEHKNKGNEYFKNNDFPNAKKEYDEAIRRNPNDAKLYSNRAAALTKLIEYPSALEDVMKAIELDPTFVKAYSRKGNLHFFMKDYYKALQAYNKGLELDPNNKECLEGYQRCAFKIDEMSKSEKVDEEQFKKSMADPEIQQIISDPQFQIILQKLNENPNSISEYIKDPKIFNGLQKLIAAGILKVR

SEQ ID NO: 9324 - protein, 558 aa, Arabidopsis thaliana
MAEEAKSKGNAAFSSGDYATAITHFTEAINLSPTNHILYSNRSASYASLHRYEEALSDAKKTIELKPDWSKGYSRLGAAFIGLSKFDEAVDSYKKGLEIDPSNEMLKSGLADASRSRVSSKSNPFVDAFQGKEMWEKLTADPGTRVYLEQDDFVKTMKEIQRNPNNLNLYMKDKRVMKALGVLLNVKFGGSSGEDTEMKEADERKEPEPEMEPMELTEEERQKKERKEKALKEKGEGNVAYKKKDFGRAVEHYTKAMELDDEDISYLTNRAAVYLEMGKYEECIEDCDKAVERGRELRSDFKMIARALTRKGSALVKMARCSKDFEPAIETFQKALTEHRNPDTLKKLNDAEKVKKELEQQEYFDPTIAEEEREKGNGFFKEQKYPEAVKHYSEAIKRNPNDVRAYSNRAACYTKLGALPEGLKDAEKCIELDPSFTKGYSRKGAIQFFMKEYDKAMETYQEGLKHDPKNQEFLDGVRRCVEQINKASRGDLTPEELKERQAKAMQDPEVQNILSDPVMRQVLVDFQENPKAAQEHMKNPMVMNKIQKLVSAGIVQVR

SEQ ID NO: 9325 - protein, 571 aa, Arabidopsis thaliana
MADEAKAKGNAAFSSGDFNSAVNHFTDAINLTPTNHVLFSNRSAAHASLNHYDEALSDAKKTVELKPDWGKGYSRLGAAHLGLNQFDEAVEAYSKGLEIDPSNEGLKSGLADAKASASRSRASAPNPFGDAFQGPEMWSKLTADPSTRGLLKQPDFVNMMKEIQRNPSNLNLYLQDQRVMQALGVLLNIQIRTQQAGDDMEIGEEEMAVPSRKEPEVEKKRKPEPEPEPEPEFGEEKQKKLKAQKEKELGNAAYKKKDFETAIQHYSTAMEIDDEDISYITNRAAVHLEMGKYDECIKDCDKAVERGRELRSDYKMVAKALTRKGTALGKMAKVSKDYEPVIQTYQKALTEHRNPETLKRLNEAERAKKELEQQEYYDPNIGDEEREKGNDFFKEQKYPDAVRHYTEAIKRNPKDPRAYSNRAACYTKLGAMPEGLKDAEKCIELDPTFLKGYSRKGAVQFFMKEYDNAMETYQKGLEHDPNNQELLDGVKRCVQQINKANRGDLTPEELKERQAKGMQDPEIQNILTDPVMRQVLSDLQENPAAAQKHMQNPMIMNKIQKLISSGIVQMK

SEQ ID NO: 9326 - protein, 571 aa, Arabidopsis thaliana
MADEAKAKGNAAFSSGDFNSAVNHFTDAINLTPTNHVLFSNRSAAHASLNHYDEALSDAKKTVELKPDWGKGYSRLGAAHLGLNQFDEAVEAYSKGLEIDPSNEGLKSGLADAKASASRSRASAPNPFGDAFQGPEMWSKLTADPSTRGLLKQPDFVNMMKEIQRNPSNLNLYLQDQRVMQALGVLLNIQIRTQQAGDDMEIGEEEMAVPSRKEPEVEKKRKPEPEPEPEPEFGEEKQKKLKAQKEKELGNAAYKKKDFETAIQHYSTAMEIDDEDISYITNRAAVHLEMGKYDECIKDCDKAVERGRELRSDYKMVAKALTRKGTALGKMAKVSKDYEPVIQTYQKAITEHRNPETLKRLNEAERAKKELEQQEYYDPNIGDEEREKGNDFFKEQKYPDAVRHYTEAIKRNPKDPRAYSNRAACYTKLGAMPEGLKDAEKCIELDPTFLKGYSRKGAVQFFMKEYDNAMETYQKGLEHDPNNQELLDGVKRCVQQINKANRGDLTPEELKERQAKGMQDPEIQNILTDPVMRQVLSDLQENPAAAQKHMQNPMIMNKIQKLISSGIVQMK

SEQ ID NO: 9327 - protein, 572 aa, Arabidopsis thaliana
MAEEAKAKGNAAFSSGDFTTAINHFTEAIALAPTNHVLFSNRSAAHASLHQYAEALSDAKETIKLKPYWPKGYSRLGAAHLGLNQFELAVTAYKKGLDVDPTNEALKSGLADAEASVARSRAAPNPFGDAFQGPEMWTKLTSDPSTRGFLQQPDFVNMMQEIQKNPSSLNLYLKDQRVMQSLGVLLNVKFRPPPPQGDEAEVPESDMGQSSSNEPEVEKKREPEPEPEPEVTEEKEKKERKEKAKKEKELGNAAYKKKDFETAIQHYSTAIEIDDEDISYLTNRAAVYLEMGKYNECIEDCNKAVERGRELRSDYKMVARALTRKGTALTKMAKCSKDYEPAIEAFQKALTEHRNPDTLKRLNDAERAKKEWEQKQYFDPKLGDEEREKGNDFFKEQKYPEAIKHYTEAIKRNPNDHKAYSNRAASYTKLGAMPEGLKDAEKCIELDPTFSKGYSRKAAVQFFLKEYDNAMETYQAGLEHDPSNQELLDGVKRCVQQINKANRGDLTPEELKERQAKGMQDPEIQNILTDPVMRQVLSDLQENPSAAQKHMQNPMVMNKIQKLISAGIVQMK

SEQ ID NO: 9328 - protein, 594 aa, Arabidopsis thaliana
MADEAKAKGNAAFSSGDFNSAVNHFTDAINLTPTNHVLFSNRSAAHASLNHYDEALSDAKKTVELKPDWGKGYSRLGAAHLGLNQFDEAVEAYSKGLEIDPSNEGLKSGLADAKASASRSRASAPNPFGDAFQGPEMWSKLTADPSTRGLLKQPDFVNMMKEIQRNPSNLNLYLQDQRVMQALGVLLNIQIRTQQAGDDMEIGEEEMAVPSRKEPEVEKKRKPEPEPEPEPEFGEEKQKKLKAQKEKELGNAAYKKKDFETAIQHYSTAMEIDDEDISYITNRAAVHLEMGKYDECIKDCDKAVERGRELRSDYKMVAKALTRKGTALGKMAKVSKDYEPVIQTYQKALTEHRNPETLKRLNEAERAKKELEQQEYYDPNIGDEEREKGNDFFKEQKYPDAVRHYTEAIKRNPKDPRVRRIHHHISFNVVLKKSSVFDCFNNFNRAACYTKLGAMPEGLKDAEKCIELDPTFLKGYSRKGAVQFFMKEYDNAMETYQKGLEHDPNNQELLDGVKRCVQQINKANRGDLTPEELKERQAKGMQDPEIQNILTDPVMRQVLSDLQENPAAAQKHMQNPMIMNKIQKLISSGIVQMK

SEQ ID NO: 9329 - protein, 530 aa, Arabidopsis thaliana
MAEEAKSKGNAAFSSGDYATAITHFTEAINLSPTNHILYSNRSASYASLHRYEEALSDAKKTIELKPDWSKGYSRLGAAFIGLSKFDEAVDSYKKGLEIDPSNEMLKSGLADASRSRVSSKSNPFVDAFQGKEMWEKLTADPGTRVYLEQDDFVKTMKEIQRNPNNLNLYMKDKRVMKALGVLLNVKFGGSSGEDTEMKEADERKEPEPEMEPMELTEEERQKKERKEKALKEKGEGNVAYKKKDFGRAVEHYTKAMELDDEDISYLTNRAAVYLEMGKYEECIEDCDKAVERGRELRSDFKMIARALTRKGSALVKMARCSKDFEPAIETFQKALTEHRNPDTLKKLNDAEKVKKELEQQEYFDPTIAEEERKKGNGFFKEQKYPEAVKHYSEAIKRNPNDVRAYSNRAACYTKLGALPEGLKDAEKCIELDPSFTKGYSRKGAIQFFMKEYDKAMETYQEGLKHDPKNQEFLDGVRRCVEQINKASRGDLTPEELKERQAKAMQDPEVQNILSDPVMRQVKAVASIVF

SEQ ID NO: 9330 - protein, 584 aa, Glycine max
  unsure (1)..(584): unsure at all Xaa locations
MADEAKAKGNAAFSSGDYPAAIHHFSDAIALAPSNHVLYSNRXSAAYASLKNYADALADAKKTVELKPDWSKGYSRLGAAHLGLSQYDDAISAYKRGLEIDPHNEPLKSGLADAQKALAAASRPPNPFGDAFSGPEMWARLTADPTTRAYLXQQPDFVKMMQDIQRDPNNLNLHLKDQRIMQALGVLLNVKIQXXPPTGADTDMPDSPSPSAAASERKRAAEAEPAKQPEPEPEPEPVPMELTGEEKDAKQKKAEALKEKEAGNAAYKKKDFDTAIQHYTKALELDDEDISYLTNRAAVYLEMGKYEECIKDCDKAVERGRELRSDFKMIARALTRKGNALVKMAKCSKDYESAIETYQKALTEHRNPDTLKKLNEAEKAKKELEQQEYFDPKLADDEREKGNEFFKQQKYPDAVKHYTESIRRNPKDPRAYSNRAACYTKLGAMPEGLKDAEKCIELDPTFVKGYTRKGAVQYFMKEYDKALETYREGLKYDSNNQELLEGIRTCIQQINKASRGDLSPDELKERQAKAMQDPEIQNILQDPVMRQVLIDFQENPKAAQEHTKNPMVMNKIQKLVSAGIVQMK

SEQ ID NO: 9331 - protein, 566 aa, Glycine max
  unsure (1)..(566): unsure at all Xaa locations
MADEAKAKGNAAFSSGDYPAAIHHFSDAIALAPTNHVLYSNRSAAYASLQNYTDALADAKKTVELKPDWSKGYSRLGAAHLGLSQYGDAVSAYEKGLKIDPNNEPLKSGLADAQKALAAASRPRSSAANPFGDAFSGPEMWARLTADPTTRAYLQQPDFVKMMQDIQRDPNNLNLHLKDQRIMQALGVLLNVKIQTPPTGADTDMPDSQPESEPEPEPESMELTGEEKGAKQRKAEALKEKDAGNAAYKKKDFDTAIQHYTKALELDDEDISYLTNRAAVYLEMGKYEECIKDCDKAVERGRELRSDFKMIARALTRKGNALVKXAKXCSKDYEPAIETYQKALTEHRNPDTLKKLNEAEKAKKELEQQEYFDPKLADEEREKGNEFFKQQKYPEAVKHYTESIRRNPKDPRAYSNRAACYTKLGAMPEGLKDAEKCIELDPTFVKGYTRKGAVQYFMKEYEKSLETYREGLKYDSNNQELLEGIRTCIQQINKASRGDLSPEELKERQAKAMQDPEIQNILQDPVMRQVLIDFQENPKAAQEHTKNPMVMNKIQKLVSAGIVQMK

SEQ ID NO: 9332 - protein, 570 aa, Glycine max
  unsure (1)..(570): unsure at all Xaa locations
MAEEAKAKGNAAFSAGDFAAAVRHFSDAIALSPSNHVLYSNRSAATLPPELRGGPSRRQKTVDLKPDWPKAYSRLGAAHLGLRRHRDASPPTKPASNSNPDNAALKSGLADAQAAASRPPPTSPFATAFSGPDMWARSPPTPPHVQPPGPRVRQDHAGHPEGPQQVQPAFEYQRVMHAIGVLLNVKIQTPNHDENDHDADDDVSEDEVVSQPEPEHEPEAAVEVAEEEEEEEKETRDRKGQAQKEKEAGNAAYKKKDFETAIGHYSKALELDDEDISYLTNRAAVYLEMGKFEDCIKDCEKAVERGKELRSDYKMIARALTRKGTALAKMAKCSKDFEPAIEIFQKALTENRNPDTLKKLNEAEKAKKELEQQEYFDPKLADEAREKGNELFKQQKYPEATKHYTEAIKRNPKDAKAYSNRAACYTKLGAMPEGLKDAEKCIELDPTFSKGYTRKGAVQFSMKEYDKALETYREGLKHDPNNQELLDGIRRCVEQINKASRGDFTPEELKERQAKAMQDPEIQSILQDPVMTQVLTDFQENPRAAEEHVKNPMVMNKTQNVTVPGLXQMR

SEQ ID NO: 9333 - protein, 569 aa, Glycine max
MAEEAKAKGNAAFSAGDFAAAVRHFSDAIALSPSNHVLYSNRSAATLPPELRGGPSRRQKTVDLKPDWPKAYSRLGAAHLGLRRHRDASPPTKPASNSNPDNAALKSGLADAQAAASRPPPTSPFATAFSGPDMWARSPPTPPHVQPPGPRVRQDHAGHPEGPQQVQPAFEYQRVMHAIGVLLNVKIQTPNHDENDHDADDDVSEDEVVSQPEPEHEPEAAVEVAEEEEEEEKETRDRKGQAQKEKEAGNAAYKKKDFETAIGHYSKALELDDEDISYLTNRAAVYLEMGKFEDCIKDCEKAVERGKELRSDYKMIARALTRKGTALAKMAKCSKDFEPAIEIFQKALTENRNPDTLKKLNEAEKAKKELEQQEYFDPKLADEAREKGNELFKQQKYPEATKHYTEAIKRNPKDAKAYSNRAACYTKLGAMPEGLKDAEKCIELDPTFSKGYTRKGAVQFSMKEYDKALETYREGLKHDPNNQELLDGIRRCVEQINKASRGDFTPEELKERQAKAMQDPEIQSILQDPVMTQVLTDFQENPRAAEEHVKNPMVMNKTQNVTVPGCQMR

SEQ ID NO: 9334 - protein, 569 aa, Glycine max
MAEEAKAKGNAAFSAGDFAAAVRHLSDAIALSPSNHVLYSNRSAATLPPELRGGPSRRQKTVDLKPDWPKAYSRLGAAHLGLRRHRDASPPTKPASNSNPDNAALKSGLADAQAAASRPPPTSPFATAFSGPDMWARSPPTPPHVQPPGPRVRQDHAGHPEGPQQVQPAFEYQRVMHAIGVLLNVKIQTPNHDENDHDADDDVSEDEVVSQPEPEHEPEAAVEVAEEEEEEEKETRDRKGQAQKEKEAGNAAYKKKDFETAIGHYSKALELDDEDISYLTNRAAVYLEMGKFEDCIKDCEKAVERGKELRSDYKMIARALTRKGTALAKMAKCSKDFEPAIEIFQKALTENRNPDTLKKLNEAEKAKKELEQQEYFDPKLADEAREKGNELFKQQKYPEATKHYTEAIKRNPKDAKAYSNRAACYTKLGAMPEGLKDAEKCIELDPTFSKGYTRKGAVQFSMKEYDKALETYREGLKHDPNNQELLDGIRRCVEQINKASRGDFTPEELKERQAKAMQDPEIQSILQDPVMTQVLTDFQENPRAAEEHVKNPMVMNKTQNVTVPGCQMR

SEQ ID NO: 9335 - protein, 178 aa, Glycine max
  unsure (1)..(178): unsure at all Xaa locations
MEQVNALKDKGNAALQQGNYTEAIKFYSDAIALDPTNHVLFSNRSAAYAKYEQFELTYADSEKTVTLKPDWGKGYSRKGSALAYLGRTDEAIEAYEDRLIIDPTNAQLAEGLKEVNAKNPPLPDAGFADLXRSPDLFAKLQSNPQTRALLYDPEYLKICTKLHTDPAAQLDMYDDPRX

SEQ ID NO: 9336 - protein, 582 aa, Oryza sativa (japonica cultivar-group)
MEAEDDERAEAEAEARREKEAGNAAYRKLYLETAVRHYTRGALLDPRDISFLTNRAAAYLLMSKYKECVRDCDEAVEKGRELRADNKLVARALARKASALLKLAACAADYDPAIRALQQSLAEHYSEETLAKLGEAEEARKEIEERERLDQEAADHHRDRGNDFFKQKRYQEAAMHYTEAMKKNPKDPRVFSNRAQCHIYLGALPEGLEDADKCIALDPTFLKGYLRKAKVQLLMGNYEIALATYVEGLKCDPNNLEVLDGLRRCAACIKRANGGDSRAEDLREILIGEGGFGCVYKGILRNMTVAIKVLRPDSLQGQSQFEQEVSILSRVRHPHLVTLLGACSESSTLVYEFLPNGSLEDFLMCSDKRQTLTWQARIRIIAEICSALIFLHKNKPHPVVHGDLKPANILLGVNLVSKLSDFGISRLLIQSSTNNTTLYRTMHPVGTPLYMDPEFLSTGELTPQSDVYSFGIVVLRLLTGKPPVGIKNIVEDAMEKGDLNSVIDTSVGEWPHLHIEQLAYLALRCTELSRRCRPDLSGEVWAIVEAIRDAALSSPSSSRSAQDQNSPPSYFICPISQGYKIF

SEQ ID NO: 9337 - protein, 428 aa, Oryza sativa (japonica cultivar-group)
MAPAHSHRRGATEANEQMRRKKEKALREKEAGDDDFDEGRYKRAVEHYARAAALDPGDISFPIKCAKSYFHMDQYEECVRRCDEAVERGRELRAKKSLVALALLLKGTALLNLADCASDCKAAIRALKQSLDEHYHKGTEAILDEAESAMEEMEELEKEAAKHHREKKELLSKKKYKEAAIQFTKAIKRNPLNPRNFSDRAKCRIELNALAEGLEDADKCIEVDPTFWKGYFCKGEVQFLMHNYEDAMTTYLDGLKYGPQKTTIYDGIKCLEQIKMAKDRDVRDKDLWEAFKKSSSSQVEKLTMQRDVVTVELKSAKERNANLELQLSEQIGRIERLLSIQNSEPPHFICPISQEVMNDPHFAADGHTYEAEHIRKWLNDGHDTSPMTNERLQHKKLTPNHALRSAIREWHQHRNMRHTSPRRQQLFL

SEQ ID NO: 9338 - protein, 258 aa, Oryza sativa (japonica cultivar-group)
MTVQAGADVNYAYPNTPLVVSTTAGLTDCIKYLLEVHADPNIPDKQSGLTPIEIAASVGRRDHVEILFPFTSPVRAVTNWTVEGIIAHGKSRRLIPKFQILKIKRSLDSSGHDHLNPHYFLQGESCSKVSDRKAELKSQGEKAVKRKDYLAASKIYTKALELDYFDATLYSNRSLCYLQIGKAQKALLDAKKCVKLRPKWMKGHYREGAALMLLKEHKKAFEAFLNALKLDPANAEIEKVMWEAVEAMKKDDAAEDKT

SEQ ID NO: 9339 - protein, 389 aa, Oryza sativa
MLNIKIQRPEASESSQPSSSPPSQPQEQPEAKAREVEPEPEPEPMEVTDEEKERKERKSSAQKEKEAGNAAYKKKDFETAIQHYTKAMELDDEDISYLTNRAAVYIEMGKYDECIKDCDKAVERGRELRADFKMISRALTRKGTALAKLAKTSKDYDIAIETFQKALTEHRNPDTLKKLNEAERAKKELEQQEYYDPKLADEEREKGNQLFKEQKYPDAVKHYTEAIRRNPKDPKVYSNRAACYTKLGAMPEGLKDAEKCIELDPTFSKGYTRKGAIQFFMKEYDKAMETYQAGLKHDPNNPELLDGVKRCIEQINKANRGDLTQEEIQERQNKAMQDPEIQNILTDPIMRQVLVDLQENPRASQEHLKNPGVMQKIQKLVSAGIVQMR

SEQ ID NO: 9340 - protein, 304 aa, Oryza sativa
  unsure (1)..(304): unsure at all Xaa locations
XLQYDECIKDCDKAVERGRELRADFKMISRALTRKGTALAKLAKTSKDYDIAIETFQKALTEHRNPDTLKKLNEAERAKKELEQQEYYDPKLADEEREKGNQLFKEQKYPDAVKHYTEAIRRNPKDPKVISFGPHASLNIXLLGVSIIYRCXSNRAACYTKLGAMPEGLKDAEKCIELDPTFSKGYTRKGAIQFFMKEYDKAMETYQAGLKHDPNNPELLDGVKRCIEQINRANRGDLTQEEIQERQNKAMQDPEIQNILTDPIMRQVLVDLQENPRASQEHLKNPGVMQKIQKLVSAGIVQMR

SEQ ID NO: 9341 - protein, 231 aa, Oryza sativa
MADEAKAKGNAAFSAGRYEEAARHFTDAIALAPGNHVLYSNRSAALASVHRYSEALADAEKTVELKPDWAKGYSRLGAAHLGLGDAASAVAAYEKGLALDPTNEGLKAGLADAKKAAAAPPRRPPPSGVDGIGQMFQGPELWTKIASDPTTRAYLEQPDFMQMLRDVQRNPSSLNMYLSDPRMMQVLGLMLNIKIQRPEASESSQPSSSPPSQPQEQPEAKAREVEPEPEP

SEQ ID NO: 9342 - protein, 582 aa, Oryza sativa; identical to SEQ ID NO: 9336

SEQ ID NO: 9343 - protein, 477 aa, Oryza sativa
  unsure (1)..(477): unsure at all Xaa locations
MLQVNYMGMGTRWIPVTRTAIDIFREAVRCPHSGESSATSVGGFIVVIHVFSEVTALSRECVINRQQERELIAFRLLDRGRKASPLTHLASDDASHEGPYKKPTFRPIVVYGPRFQNGWTGNWAFQTRPDHDAAQSRPLLWAPPLTAGPRRRRRRRLPAGVQHIYSTMAPAHSHRRGATEANEQMRRKKEXXALREKEAGDDDFDEGRYKRAVEHYARAAALDPGDISFPIKCAKSYFHMDQHLPCSLQYEECVRRCDEAVERGRELRAKKSLVALALLLKGTALLNLADCASDCKAAIRALKQSLDEHYHKGTEAILDEAESAMEEMEELEKEAAKHHREKGKELLSKKKYKEAAIQFTKAIKRNPLNPRNFSDRAKCRIELNALAEGLEDADKCIEVDPTFWKGYFCKGEVQFLMHNYEDAMTTYLDGLKYGPQKTTIYDGIKRCLEQIKMAKDRDVRDKDLWEVLRGANSFFCX

SEQ ID NO: 9344 - protein, 106 aa, Oryza sativa
  unsure (1)..(106): unsure at all Xaa locations
MADEAKAKGNAAFSAGRYEEAARHFTDAIALAPGNHVLYSNRSAALALVHRYSEALADAXKTVELKPDWAKGYSRLGAAHLAFRGSQSAVFXAYEKGFRPQPPPTE

SEQ ID NO: 9345 - protein, 271 aa, Oryza sativa
  unsure (1)..(271): unsure at all Xaa locations
XELAPGADPEALEVARECLESIFTGMRKSGRKRASLGDLAEFFKSKGNESMRSKQHLKAVELYTCAIALSRNNAIYYCNRAAAYTLLNMFNEAVEDCLKSIEIDPNYSKAYSRLGSAYFALGKYHDALYKGYLKASELDPSNENVWQNIENTYAPQSQASHGQFPGQSSSGVPFTFFPPGNSPTPEFFANIINXXPPPFSFTGSTEGNRPQQTSSGHEGEHGQPGMHRDAGIQINLAGPEQAADAMRAVMEMLAPHMSQREGAPGSARGPG

SEQ ID NO: 9346 - protein, 428 aa, Sorghum bicolor
MAPPLVGCKLHRHRLLQAAAHGDLRRFKRIASALDGGKGRIREAVEVVVDGNGAGALHVAAAHGRTRVCAYLVEELQMDVNDTAVLSGDTPLTYAVRSKKNVDAVRYLLDHDADPNKRVHHGCTPLSIAVGKGICVMVELLLSKGADVNSLSCGGTPLHVAAMENHGAVMKILLDYNADCNKEFFILFTPLFTALRARSLNCVKHLIKAGADVMKGIHKFTPLILAAYEGLTDFYECLLEAGADPNVPDDSGLLPIEIAAFQNRRKDVEILFRVTSRIPSVHDWSVDGVLTFFKYVKSFLTDQDDPMYKMDLADLKLEGSKAYNEKDYSTAVKLYSVAIMKADSGDATLLSNRSLCFIRMGEGDKALVDAEACRALQPYWPKACFRQGAAHMLLKDYEKACDAFLDGLKLDPANDEMENALRWSIHDD

SEQ ID NO: 9347 - protein, 438 aa, Sorghum bicolor
MNRRPAYIGTCKGNDRCNAAADGNLRVFKRIASALDGGKGRIREAVEAVRDELGDGVLHVAAALGRTRVCAYLVEELHMDINAAAVSGQTPLSYAVCSDDNVEVVRYLLDHDADPDKPVYHGCNSLHIAVAKGLCVMVELLLSKGADVNSMSYCGTPLNVAAMENQGAVMKILLDYNADCNKEYSTIFTPLSTALCARSLSCVKLLIKAGADVTTKGTHKFSPLIFAANEGLTDFYECLLEAGADPNVPDDSGLLPIEIAALENRRKDVEILLRVTARIPSVPDWSVDGVLAYVKSIPTDEDDPVYKMNLADLKLEGNKAFKKKDYYTAVKFYSVAIMKNANSVDATLFSNRSLCWIKMGEGNKALIDAEACRLFQPYWAKACYRQGAAHMFLKDYEKACGAFLDGLKLDPANAELENELRESLNSLTISRGTTKVSE

SEQ ID NO: 9348 - protein, 261 aa, Triticum aestivum
RADFKMVSRALTRKGTALAKLAKSSKDYDVAIETFQKALTEHRNPDTLKRLNDAERAKKELEQQEYYDPKLADEEREKGNEFFKQQKYPEAVKHYTEALRRNPKDPKVYSNRAACYTKLGAMPEGLKDAEKCIELDPTFSKGYTRKGAIQFFMKEYDKAMETYQEGLKHDPSNQELLDGVKRCIQQINKANRGDLTPEELKERQGKAMQDPEIQNILTDPVMRQVLIDFQENPRAAQEHLKNPGVKQKIQKLVSAGIVQMK

SEQ ID NO: 9349 - protein, 195 aa, Triticum aestivum
  unsure (1)..(195): unsure at all Xaa locations
MAADEAKAKGNAAFSAGRFEEAAGHFGDAIALAPDNHVLFSNRSAAYASLHRYKEALADAERTVALKPDWAKGYSRLGAARLGSGDAAGAVEAYEKGLALDPSNAALKDGLAQARSALPRRPASGADAIGKIFQGPDLWSKIAADPTTRAYLDQPDFMQMLRDLQRNPGNLNNYLSDPRMMQVLNLMLNVKVHNX

SEQ ID NO: 9350 - protein, 171 aa, Triticum aestivum
MADEAKAKGNAAFSAGRFEEAAGHFSDAIALAPANHVLYSNRSAALASIHRYSDALADAEKTVELKPDWAKGYSRLGAAHLGLGDAASAAAAYEKGLALDPSNEGLKAGLADAKKAAGAPPRRAPSGGADAIGQMFQGPELWTKIASDPATRAYLDQPDFMQMLREVQRNP

SEQ ID NO: 9351 - protein, 332 aa, Triticum aestivum
  unsure (1)..(332): unsure at all Xaa locations
PSAAAAAAMADGGGGRAAELKDQGNEQFKSGNYLKAAALYTQAIKLDSDNPTLYSNRAAAFLQLVKLNKALADAETTIKLKPEWEKGYFRKGCVLEAMEQYEEAISAFQIALQHNPQNTEVARKIKRLTQLAREQKRAVDVENLRSNIDIRKNLQSLKKELATKYGDAEMGQNIFSFVISVIETAIKAWHDTGKXVDAKVNFLLDDQKTDTEKYAPVVNIEKAFESPHTHGSCFAYLRQYSEESFSKAACMVAPKSIISYPQVWKGQGSRKWKLDQSDGFFVQFESXPILRKIWFVASTAEKGRALCRSPEPLDITIHEILPRIFKENETSA

SEQ ID NO: 9352 - protein, 580 aa, Zea mays
MTEEAEAKAKGNAAFAAGRFEEAVQHFSDAIALAPDNHVLYSNRSAAYASLWRYAEALDDAKRTVALKPDWAKGYSRLGAAHLGLGDAPKAVEAYEKGLALEPSNEALKSGLAQARQSASAPRRPVGSGADAVGKMFQGPELWSKVAADPTTRGYLDQPDFVQMLREVQRNPGRLNSYLSDQRMVQVLTLMLNIKFQNQSSGAPDPAAAQSNPPPPKQQPEAKAREPEPDPEPEPMEVTEEDKEQKERKASAQKEKEAGNAAYKRKDFDTAIQHYTEAMELDDEDISYITNRAAVYLEMGKYDECIKDCDKAVERGRELHADFKMISRALTRKGTALAKLAKSSQDYDAAIEIFQKALTEHRNPDTLKKLNDAERAKKELEQQEYYDPRIADEEREKGNEFFKQQKYPEAVKHYTEALRRNPKDPRVYSNRAACYTKLGALPEGLKDAEKCIELDPTFSKGYTRKGAIQFFMKEYDKALETYQAGLKHDPKNQELLDGVRRCVEQINKASRGELSEEELKERQNKAMQDPEIQNILTDPIMQQVLTDLQENPRAAQAHLKNPGVMQKIQKLVSAGIVQMK

SEQ ID NO: 9353 - protein, 581 aa, Zea mays
  unsure (1)..(581): unsure at all Xaa locations
MADEAKAKGNAAFSAGRFEEAXARHFTDAIALAPDNHVLYSNRSAALASLHRYSDALADAQKTVDLKPDWAKGYSRLGAAHLGLGDAASAVAAYEKGLELDPSNEGLKAGLQDAKKAAAAPRSSGPDAIGQMFQGPELWSKIASDPSTRAYLNEPDFMHMMREVXQRNPSSISMYLSDPRMMQVLSLMLNVKIQRPEASDSLPRRRRSSSSSSRRPPSETKARDVEPXEPEAEPDGFDXXEEKDRKQTKAAAQKEKELGNAAYKKKDFEVAIQHYTKALELDDEDISYLTNRAAVYIEMGKYDECIKDCDKAVERGRELRADFKMISRALTRKGTALVKLAKTSKDFDIAIETFQKALTEHRNPDTLKKLNEAEKAKKELEQQEYYDPKLADEEREKGNEFFKEQKYPEAIKHYTEALKRNPKDPRVYSNRAACYTKLGAMPEGLKDXAEKCLELDPTFTKGYTRKGAIQFFMKEYDKAVETYQAGLKHDPNNQELLDGVKRCVEQINKANRGEISQDELQERQNKAMQDPEIQNILTDPIMRQVLIDFQENPSAAQEHLKNPGVMQKIQKLVSAGIVQMR

SEQ ID NO: 9354 - protein, 654 aa, Zea mays
  unsure (1)..(654): unsure at all Xaa locations
MVIGYSVDYTFENWDATMQARSWAPLGFIKTSKLFALIPIKPPDISGRTLLRPSQPLSPLEPSRARSDRSPWPWADEXAKAKGNAAFSAGRFEEAARHFTDAIALAPGNHVLYSNRSAALASLHRYSDALADAQKTVELKPDWAKGYSRLGAAHLGPRRXAASAVAAYEKGLALDPSNEGLKAGLEDAKKARRRPARAAPTPSAQMFQGPELWSKIASDPTTRAYLNEPDFMQMLREVQRNPSSISMYLSDPRMMQVLSLMLNVKIQRPEASEPSQSTXTAAAAAAAAEQTSPLQTKAREVEPEPEPEPMDFTDEEKERKERKAAAQKEKELGNTAYKKKDFEAAIQHYTKALEHDDEDISYLTNRAAVYIEMGKYDECIKDCDKAVERGRELRADFKMISRALTRKGTALVKLAKTSKDFDIAIETYQKALTEHRNPDTLKKLNEAERAKKELEQQEYYDPKLADEEREKGNEFFKEQKYPEAIKHYTEALKRNPKDPRVYSNRAACYTKLGAMPEGLKDAEKCLELDPTFTKGYTRKGAIQFFMKEYDKAMETYQAGLKHDPKNQELLDGVRRCIEQINKANRGEISQDELQERQNKAMQDPEIQNILTDPIMRQVLNDFQENPRAAQEHLKNPGVMQKIQKLVSAGIVQMR

SEQ ID NO: 9355 - protein, 471 aa, Zea mays
  unsure (1)..(471): unsure at all Xaa locations
MADEAKAKGNAAFSAGRFEEAARHFTDAIALAPDNHVLYSNRSAALASLHRYSDALADAQKTVELKPDWAKGYSRLGAAHLGLGDAASAVAAYEKGLELDPSNEGLKAGLQDAKKAAAAPRSSGPDAIGQMFQGPELWSKIASDPXXRAYLNEPDFMHMMREVQRNPSSISMYLSDPRMMQVLSLMLNVKIQRPEASEPSQSTPPPPKQQQQQQTPPSETKARDVEPEPEAEPMDLTDEEKDRKQTKAAAQKEKELGNAAYKKKDFEVAIQHYTKALELDDEDISYLTNRAAVYIEMGKYDECIKDCDKAVERGRELRADFKMISRALTRKGTALVKLAKTSKDFDIAIETFQKALTEHRNPDTLKKLNEAEKAKKELEQQEYYDPKLADEEREKGNEFFKEQKYPEAIKHYTEALKRNPKDPRVVILPLFYTVCLCYSITYEIFGKLGYXYCMTLLFVXYKFHQKRKKRX

SEQ ID NO: 9356 - protein, 440 aa, Zea mays
  unsure (1)..(440): unsure at all Xaa locations
XVAADPTTRGYLDQPDFVQMLREVQRNPGRLNSYLSDQRMVQVLTLMLNIKFQNQSSGAPDPAAAQSNPPPPKQQPEAKAREPEPDPEPEPMEVTEEDKEQKERKASAQKEKEAGNAAYKRKDFDTAIQHYTEAMELDDEDISYITNRAAVYLEMGKYDECIKDCDKAVERGRELHADFKMISRALTRKGTALAKLAKSSQDYDAAIEIFQKALTEHRNPDTLKKLNDAERAKKELEQQEYYDPRIADEEREKGNEFFKQQKYPEAVKHYTEALRRNPKDPRVYSNRAACYTKLGALPEGLKDADKCIELDPTFSKGYTRKGAIQFFMKEYDKALETYQAGLKHDPKNQELLDGVRRCVEQINKASRGELSGEELKERQNKAMQDPEIQNILTDPIMQQLAMQVLTDLQENPRAAQAHLKNPGVMQKIQKLVSAGIVQMK

SEQ ID NO: 9357 - protein, 313 aa, Zea mays
  unsure (1)..(313): unsure at all Xaa locations
MTEEAEAKAKGNAAFAAGRFEEAVQHFSDAIALAPDNHVLYSNRSAAYASLWRYAEALDDAKRTVALKPDWAKGYSRLGAAHLGLGDAPKAVEAYEKGLALEPSNEALKSGLAQARQSASAPRRPVGSGADAVGKMFQGPELWSKVAADPTTRGYLDQPDFVQMLREVQRNPGRLNSYLSDQRMVQVLTLMLNIKFQNQSSGAPDPAAAQSNPPPPKQQPEAKAREPEPDPEPEPMEVTEEDKEQKERKASAQKEKEAGNAAYKRKDFDTAIQHYTEAMELDDEDISYITNRAAVYLEMGKHPICSNSCLSPX

SEQ ID NO: 9358 - protein, 209 aa, Zea mays
  unsure (1)..(209): unsure at all Xaa locations
MADEAKAKGNAAFSAGRFEEAARHFTDAIALAPGNHVLYSXRYSDALADAQKTVELKPDWAKGYSRLGAAHLGLGDAASAVAAYEKGLALDPSNEGLKAGLEDAKKAAAAPRPSGPDAIGQMFQGPELWSKIASDPTTRAYLNEPDFMQMLREVQRNPSSISMYLSDPRMMQVLSLMLNVKIQRPEASEPSQSTPPPPPPQQQQTSPLQ

SEQ ID NO: 9359 - protein, 215 aa, Zea mays
  unsure (1)..(215): unsure at all Xaa locations
MEQVNELKEKGNKALSAGNIDDALQCYSEAIKLDPQNHVLYSNRSAAYAKKGDYQKAYEDGCKTVDLKPDWGKGYSRKAAALEFLNRFEEAKRTYEEGLKHEANNLQLKEGLQNMEARLAERKFINPFNLPNLYQKLENDPRTRSLLSDPTYRELIEQLQNKPSDLGTKLQDPRVMTTLSVLLXVDXGSMDEEEEAXTPPPPPPPXKEPKPEPMX

SEQ ID NO: 9360 - protein, 90 aa, Zea mays
MADEAKAKGNAAFSAGRFEEAARHFTDAIALAPGNHVLYSNRSAALASLHRYSDALADAQKTVELKPDWAKGYSRLGAAHLGVKRLGDDG

SEQ ID NO: 9361 - protein, 184 aa, Zea mays
  unsure (1)..(184): unsure at all Xaa locations
RHRVVHPLGSHAMEEDKRAEEARRAKEAGNDAYRKSFLETAVEHYTRGALLDPRDISFLTNRAAAYFHMGEYKECVRDCEGAVERGRDLSAANKLIAKALLRKASALLELATCSGDYAPAIRALQQSLTEHYSEETHEKLNKAVVVKKEFEEQERLDQETVYXHRERGLDVARLKRXRTAGMQX

SEQ ID NO: 9362 - protein, 126 aa, Zea mays
  unsure (1)..(126): unsure at all Xaa locations
MAKAGNATTNAENATVRFXDVERHFTDTIEIATDNHHIYSCRLEELVSLHHYSDDLADAQKTAEVKPDWAKGYSRLGAVYXGLGDADSAVAAYEKVLALEPSNEGLKAGLEDAKKAXRRPAASRPX

SEQ ID NO: 9363 - protein, 187 aa, Zea mays
  unsure (1)..(187): unsure at all Xaa locations
RAMQADEQAEAXXRRAKEAGNDAYRKSLLEEAVEHYTLGALLDPSDIAFLTNRAAAYLRMGKYEECVRDCDEAVKRGRELSSGSELIAKALSRKASALLELACCAADYAPAIGALKLSLAENYSEETLEKLNDAQSVRKEVEEQERLDQEAANQCREEGLDFFKHHVSNSXVLVACHTMIQLPKCCX

SEQ ID NO: 9364 - protein, 591 aa, Schizosaccharomyces pombe
MAEELKAKGNAAFSKKDYKTAIDYFTQAIGLDERNHILYSNRSACYASEKDYADALKDATKCTELKPDWAKGWSRKGAALHGLGDLDAARSAYEEGLKHDANNAQLLNGLKSVEAAQTQAASGAGGFNPFAKLGSQLSDPKFMEKLASNPETASLLADSAFMAKLQKIQQNPGSIMAELNDPRMMKVIGMLMGIDINMNAGEGAAEEQEKKEEFAPSSSTPSADSAKPETTNPPPQPQASEPMEEDKTAEELEEAATKEALKKKADQEKQIGNENYKKRNFPVAIEQYKKAWDTYKDITYLNNLAAAYFEADQLDDCIKTCEDAIEQGRELRADFKLIAKALGRLGTTYQKRGDLVKAIDYYQRSLTEHRTPDILSRLKDAEKSKELQDREAYIDPDKAEESRVKGNELFKSGDFANAIKEYTEMTKRAPSDPRGFGNRAAAYLKVMAPAECIRDCNKAIELDPNFAKAYVRKAQALFMLKDYNKCIDACNEASEVDRREPNTGKNLREIESQLSKCMSAMASQRQNETEEETMARIQKDPEVLGILQDPAMQAILGQARENPAALMEHMKNPTVKSKIEKLIASGVIRLG

SEQ ID NO: 9365 - protein, 591 aa, Schizosaccharomyces pombe
MAEELKAKGNAAFSKKDYKTAIDYFTQTIGLDERNHILYSNRSACYASEKDYADALKDATKCTELKPDWAKGWSRKGAALHGLGDLDAARSAYEEGLKHDANNAQLLNGLKSVEAAQTQAASGAGGFNPFAKLGSQLSDPKFMEKLASNPETASLLADSAFMAKLQKIQQNPGSIMAELNDPRMMKVIGMLMGIDINMNAGEGAAEEQEKKEEFAPSSSTPSADSAKPETTNPPPQPQASEPMEEDKTAEELEEAATKEALKKKADQEKQIGNENYKKRNFPVAIEQYKKAWDTYKDITYLNNLAAAYFEADQLDDCIKTCEDAIEQGRELRADFKLIAKALGRLGTTYQKRGDLVKAIDYYQRSLTEHRTPDILSRLKDAEKSKELQDREAYIDPDKAEESRVKGNELFKSGDFANAIKEYTEMTKRAPSDPRGFGNRAAAYLKVMAPAECIRDCNKAIELDPNFAKAYVRKAQALFMLKDYNKCIDACNEASEVDRREPNTGKNLREIESQLSKCMSAMASQRQNETEEETMARIQKDPEVLGILQDPAMQAILGQARENPAALMEHMKNPTVKSKIEKLIASGVIRLG

SEQ ID NO: 9366 - protein, 240 aa, Thermoplasma volcanium
MKKGIFMVDEFKLNNKEQLADDYNERGISYFNIGKYDKAVEEFTKAISIINDDADLYHNRGMAYYSMKAYDQAIEDFERSISLDPNSSDYHNALGSVYEDMGNYEKALEEFNSAIRLEDDLPDYYYNRGNVYWKLGEIEKAIQDYSKAADLDYTDQIYVYKKYEALTSLGRYDEALETVDKAIKVVPANYNYLAMKAELLIKMKRYEEARPVIEEVEKLNPGNPDAARLMAQINMKRQNK

SEQ ID NO: 9367 - protein, 242 aa, Thermoplasma volcanium
MYLKKGIFMVDEFKLNNKEQLADDYNERGISYFNIGKYDKAVEEFTKAISIINDDADLYHNRGMAYYSMKAYDQAIEDFERSISLDPNSSDYHNALGSVYEDMGNYEKALEEFNSAIRLEDDLPDYYYNRGNVYWKLGEIEKAIQDYSKAADLDYTDQIYVYKKYEALTSLGRYDEALETVDKAIKVVPANYNYLAMKAELLIKMKRYEEARPVIEEVEKLNPGNPDAARLMAQINMKRQNK

SEQ ID NO: 9368 - protein, 578 aa, Neurospora crassa
MSTADELKALGNKAIAEKNFDEAIDKFTQAIALDPSNHILYSNRSAAYASKKDWDNALKDAEKTTEIKPDWPKGWGRKGTALFGKGDLLGANDAYEQGLKIDPNNAGMKKDFEAVQRAMQQEAGGGDLSGGIGQMFADPNLIQKLAGNPKTAAFLSDPAFMAKLQAVKQNPSNAQDLFSDPRMIQVLGVLMGVDMELRDSDVPPGAPQEDVNMTDAPAPKQETPPKPKTPEPEPEPELDEEELEKKKAKEAADKEKALGTECYKKRNFDEAIKHYQAAWDLYKDIVYLNNLGAAYFEKGDYQACIDTCKKAAEEGRARYADFKVIAKSLARIGSAYEKLGDLTNAIEYYNQSLREHRTPEVISKVRAAERNKIEAARKAYIDPVKAEEAREEGNKKFKEMDWPGAVAAYSEMIKRAPDDPRGYSNRAAAFMKLLEFPSALEDCETAIKKDPKFIRAYIRKAQIYFGMREYSKCVDACTEARKIDAEYHNGANAREIEQLEQKAFNAMYAARENETEEQTRERLARDPEIMGIMSDPVMQAILQQAQSDPAALAEHMRNPNVRTKIQKLIAAGVIRVGR

SEQ ID NO: 9369 - protein, 545 aa, Leishmania major
DATELKNKGNEEFSAGRYVEAVNYFSKAIQLDEQNSVLYSNRSACFAAMQKYKDALDDADKCISIKPNWAKGYVRRGAALHGMRRYDDAIAAYEKGLKVDPSNSGCAQGVKDVQVAKAREARDPIARVFTPEAFRKIQENPKLSLLMLQPDYVKMVDTVIRDPSQGRLYMEDQRFALTLMYLSGMKIPNDGDGEEEERPSAKAAETAKPKEEKPLTDNEKEALALKEEGNKLYLSKKFEEALTKYQEAQVKDPNNTLYILNVSAVYFEQGDYDKCIAECEHGIEHGRENHCDYTIIAKLMTRNALCLQRQRKYEAAIDLYKRALVEWRNPDTLKKLTECEKEHQKAVEEAYIDPEIAKQKKDEGNQYFKEDKFPEAVAAYTEAIKRNPAEHTSYSNRAAAYIKLGAFNDALKDAEKCIELKPDFVKGYARKGHAYFWTKQYNRALQAYDEGLKVDPSNADCKDGRYRTIMKIQEMASGQSADGDEAARRAMDDPEIAAIMQDSYMQLVLKEMQNDPTRIQEYMKDSGISSKINKLISAGIIRFGQ

SEQ ID NO: 9370 - protein, 565 aa, Trypanosoma cruzi
MDATELKNRGNQEFSSGRYKEAAEFFSQAINLDPSNHVLYSNRSACHAALHQYPNALQDAEKCVSIKPDWVKGYVRKGAALHGLRRYETAAAYNKGLSLDPSSAACTEGIAAVEKDKVASRMQNPFANVFGPDAIGKIQAHPKLSLFLLQPDYVRMIDEVMKDPSSVQKYLKDQRFMATFMVLSGLELPEDEDEEEEKVRRQQQKQKEKEMKEEQEKKKAAATELSPEAKEALRKKEEGNALYKQRKFDEALQKYQEALSKDSTNTVYLLNITAVIFEKGEYAACVEKCEEALEHGRENRCDYTVLAKLMTREALCLQRLKRFDEAIALFKKALVEHRNPDTLAKLTACEKEKEKFEIEAYLDPEIALQKKEEGNTFFKSDKFPEAVEAYTEAIKRNPDEHTTYSNRAAAYLKLGAYSQALADAEKCISLKPEFVKAHARRGHAFFWTKQYNKALQAYDEGLKHDKENAECKEGRMRTLMKIQEWLLATLPTEMKWQNAPWQIQRLLLSCRTAICSWYWVRCSGTPHASKNTCGIRRLPQRSTPLFLLESFALESKREAKQAMIR

SEQ ID NO: 9371 - protein, 564 aa, Acanthamoeba castellanii
MADIALEEKNKGNAAMSAGDFKAAVEHYTNAIQHDPQNHVLYSNRSAAYASLKDYDQALADGEKTVELKPDWSKGYSRKGAALCYLGRYADAKAAYAAGLEVEPTNEQLKQALQEAEEQEQASGGGPDIGNVFGQMLQGDIWTKLRQSDLTRAYLDDPAFVSLLSRLQKNPNELPMYIQSDPRIANVFAVILGISQKPPGAETQEPAQQPKKEEPKKEEKPKAEEKPKEPEPELPTEKKQALEEKELGNQAYKKKDFDTAIVHYKKAFELDPDNMTYLTNLAAVYMEQKNYEECVNTCTEAIEVGRRVFADYKLISRAFHRKGNAYMKMEKYAEAIDSYNRALTEHRNPDSLNALRKAEQLKKESEEKNYVNPEISQQEKEKGNDCFRNAQYPDAIKHYTEAIRRNPTDHVLYSNRAACYMKLGRVPMAVKDCDKAIELSPTFVKAYTRKGHCQFFMKQYHKCLETYEQGLKVEPNNEELNEGLRRTMEAINKRQEGSSKAEDKEAMAAAASDPEIQKILGDPMMKKVLSELGTNPAAVQSYMKDPVIMNNIQKLIAAGIIKVK

SEQ ID NO: 9372 - protein, 253 aa, Plasmodium falciparum
MVNKEEAQRLKELGNKCFQEGKYEEAVKYFSDAITNDPLDHVLYSNLSGAFASLGRFYEALESANKCISIKKDWPKGYIRKGCAEHGLRQLSNAEKTYLEGLKIDPNNKSLQDALSKVRNENMLENAQLIAHLNNIIENDPQLKSYKEENSNYPHELLNTIKSINSNPMNIRIILSTCHPKISEGVEKFFGFKFTGEGNDAEERQRQQREEEERRKKKEEEERKKKEEEEMKKQNRTPEQIQGDEHKLKVMNS

SEQ ID NO: 9373 - protein, 252 aa, Plasmodium falciparum
MVNKEEAQRLKELGNKCFQEGKYEEAVKYFSDAITNDPLDHVLYSNLSGAFASLGRFYEALESANKCISIKKDWPKGYIRKGCAEHGLRQLSNAEKTYLEGLKIDPNNKSLQDALSKVRNENMLENAQLIAHLNNIIENDPQLKSYKEENSNYPHELLNTIKSINSNPMNIRIILSTCHPKISEGVEKFFGFKFTGEGNDAEERQRQQREEEERRKKKEEEERKKKEEEEMKKQNRTPEQIQGDEHKLKVMN

SEQ ID NO: 9374 - protein, 233 aa, Encephalitozoon cuniculi
MDLKEIERYFSKRRQYLSREEYRTVVGVLRKLERAEKTSNRCLAEEMKNKGNEEYNNGDFQSAVDSYTQAILYDPTNAVYLSNRAAAYSKLGMTESAIEDCESGLKIDDRFVKLYIRLGTLYLDRDRNKAQEIFRRGLEVDPENKTMKKHLDLLSKEAPEGIPEAAQSSSLEDMVKSIGMGGFKDSKIDFNSLFNNKSIKDVLDTVIKDKSPDDLMDMVKNMIGAMGPQDTGK

SEQ ID NO: 9375 - protein, 320 aa, Caenorhabditis elegans
MTDAAIAEKDLGNAAYKQKDFEKAHVHYDKAIELDPSNITFYNNKAAVYFEEKKFAECVQFCEKAVEVGRETRADYKLIAKAMSRAGNAFQKQNDLSLAVQWFHRSLSEFRDPELVKKVKELEKQLKAAERLAYINPELAQEEKNKGNEYFKKGDYPTAMRHYNEAVKRDPENAILYSNRAACLTKLMEFQRALDDCDTCIRLDSKFIKGYIRKAACLVAMREWSKAQRAYEDALQVDPSNEEAREGVRNCLRSNDEDPEKAKERSLADPEVQEILRDPGMRMILEQMSNDPGAVREHLKNPEIFQKLMKLRDAGVIQMR

SEQ ID NO: 9376 - protein, 490 aa, Drosophila melanogaster
MDKVNELKEKGNQALSAEKFDEAVAAYTEAIALDDQNHVLYSNRSAAFAKAGKFQEALEDAEKTIQLNPTWPKGYSRKGAAAAGLNDFMKAFEAYNEGLKYDPTNAILLQGRMETTASALSFMQSQGDIPMDVDPQQARSRRAPSPPPAKPAEPPKPAEPRVEDMTEEQKNKYFARKEKELGNAAYKKKDFETALKHYHAAIEHDPTDITFYNNIAAVHFERKEYEECIKQCEKGIEVGRESRADFKLIAKSFARIGNTYRKLENYKQAKVYYEKAMSEHRTPEIKTSLSEVEAKIKEEERMAYINPEKAEEEKEQGNLFFKKGDYSTAVKHYTEAIKRNPDDPKLYSNRAACYTKLAAFDLGLKDCDTCIKLDEKFIKGYIRKGKILQGMQQQSKAQAAYQKALELDPNNAEAIEGYRQCSMNFQRNPQEVLKNAMSDPEIQQILKDPAMRMILEQMQSDPNAVKEHLQNPAIADKIMKLLESGIIQIH

SEQ ID NO: 9377 - protein, 489 aa, Drosophila melanogaster
MDKVNELKEKGNQALSAEKFDEAVAAYTEAIALDDQNHVLYSNRSAAFAKAGKFQEALEDAEKTIQLNPTWPKGYSRKGAAAAGLNDFMKAFEAYNEGLKYDPTNAILLQGRMETTASALSFMQSQGDIPMDVDPQQARSRRAPSPPPKPAEPPKPAEPRVEDMTEEQKNKYFARKEKELGNAAYKKKDFETALKHYHAAIEHDPTDITFYNNIAAVHFERKEYEECIKQCEKGIEVGRESRADFKLIAKSFARIGNTYRKLENYKQAKVYYEKAMSEHRTPEIKTSLSEVEAKIKEEERMAYINPEKAEEEKEQGNLFFKNGDYSTAVKHYTEAIKRNPDDPKLYSNRAACYTKLAAFDLGLKDCDTCIKLDEKFIKGYIRKGKILQGMQQQSKAQAAYQKALELDPNNAEAIEGYRQCSMNFQRNPQEVLKNAMSDPEIQQILKDPAMRMILEQMQSDPNAVKEHLQNPAIADKIMKLLESGIIQIH

SEQ ID NO: 9378 - protein, 559 aa, Plasmodium yoelii yoelii
MINKEEAQRLKELGNKCFQEGKFEDSVKYFSDAIKNDPSDHVLYSNLSGAYSSLGRFYEALESANKCINIKNDWPKGYIRKACAEHGLRQLDNSEKTYLEGLKLDPNNKSLKDGLEKVRKDKEMENMEYINHINNIINNDAKLKSYKEENSNYPIELLNTIKAINANPMNIRFILSSCNPKISEGVEKFFGIKFNDEASYEAERERQRKKEEEEKKEKERKMKEEEKKKNRTPEEILGEEHKLKGNDFYKQKKFEEALKEYDEAIKVNPNDIMYYYNKAAVYLEMKSYEKCIETCIYAIENRYNFKAEFSQVAKVYNRLAIGYINIKNYDKAIEAYRKSLVEDNNRATRNALKELERKKEKEEREAYIDPVKAEEHKNKGNEFFKNNDFPNAKKEYDEAIRRNPNDAKLYSNRAAALTKLIEYPSALEDVMKAIELDPKFVKAYSRKGNLHFFMKDYYKAIQAYNKGLELDPNNKECIEGYQRCVYKIDEMSKSEKVDEEQIKKSMADPEIQQIISDPQFQIILQKINENPNSISEYIKDPKIFNGLQKLIAAGILTVR

SEQ ID NO: 9379 - protein, 320 aa, Danio rerio
MADTKHIAFSIIQFLRDELSSGGLSSDAQESLEVAIQCLETTFGISVDDQNLAVSQSLPELFAFATKQTGTTQENTFETTGSPYEHQLAEAERLKTDGNDQMKVENFSAAVEFYSKAIQLNPQNAVYFCNRAAAYSKLGNYAGAVQDCERAIGIDANYSKAYGRMGLALASLNKYSEAVSYYKKALELDPDNDTYKVNLQVAEQKVKETQPSTAGGLGGVDLAGLLSNPGFMNMASNLMNNPQVQQLVSGMMSGSYSPVSSATSPTAAGAGGGGANDLSSLIQAGQQFAQQMQQQNPELIEQLRSQMRSRPPSSAGNDEP

SEQ ID NO: 9380 - protein, 543 aa, Xenopus laevis
MEAANALKEKGNKALSAGNLDEAVKCYTEAIKLDPKNHVLYSNRSAAYAKKKEFTKALEDGSKTVELKADWGKGYSRKAAALEFLNRFEEAKKTYEEGLRHEPTNAQLKEGLQNMEARLAEKKFMNPFNSPNLFQKLESDPRTRALLSDPSYKELIEQLRNKPSDLGTKLQDPRVMTTLSVLLGVELGNVDEEEEDTPPPPPPQPKKETKPEPMEEDLPENKKQAQKEKELGNEAYKKKDFETALKHYGQARELDPANMTYITNQAAVYFEMGDYSKCRELCEKAIEVGRENREDYRLIAKAYARIGNSYFKEEKNKEAIQFFNKSLAEHRTPEVLKKCQQAEKILKEQERVAYINPDLALEAKNKGNESFQKGDYPQAMKHYSEAIKRNPNDAKLYSNRAACYTKLLEFLLAVKDCEECIRLEPSFIKGYTRKAAALEAMKDFTKAMDAYQKAMELDSTSKEATDGYQRCMMSQYNRNDNPEDVKRRAMADPEVQQIMSDPAMRLILEQMQKDPQALSDHLKNPVIAQKIQKLMDVGLIAIR

SEQ ID NO: 9381 - protein, 543 aa, Xenopus laevis
MEAANALKEKGNKALSAGNLDEAVKCYTEAIKLDPKNHVLYSNRSAAYAKKKEFTKALEDGSKTVELKADWGKGYSRKAAALEFLNRFEEAKKTYEEGLRHEPTNAQLKEGLQNMEARLAEKKFMNPFNSPNLFQKLESDPRTRALLSDPSYKELIEQLRNKPSDLGTKLQDPRVMTTLSVLLGVELGNVDEEEEDTPSPAPSQPKKETKPEPMEEDLPENKKRAQKEKELGNEAYKKKDFETALKHYGQARELDPANMTYITNQAAVYFEMGDYSKCRELCEKAIEVGRENREDYRLIAKAYARIGNSYFKEEKNKEAIQFFNKSLAEHRTPEVLKKCQQAEKILKEQERVAYINPDLALEAKNKGNESFQKGDYPQAMKHYSEAIKRNPNDAKLYSNRAACYTKLLEFLLAVKDCEECIRLEPSFIKGYTRKAAALEAMKDFTKAMDAYQKAMELDSTSKEATDGYQRCMMSQYNRNDNPEDVKRRAMADPEVQQIMSDPAMRLILEQMQKDPQALSDHLKNPVIAQKIQKLMDVGLIAIR

SEQ ID NO: 9382 - protein, 577 aa, Macaca fascicularis
MDADQEKDLQKFLKNVDEITNLIQEMNSDDPVVQQNAVLETEKRLLLMEEDQEEDECRTTLNKTVISPPQTAVKSAEEVNSEAFLASVEKDAKERAKRRRENKVLADALKDKGNEAFAEGNYETAILHYSEGLEKLKDVKVLYTNRAQAYMKLKNYEKALVDCEWALKCDEKCTKAYFHMGRANLALKNYSVSRECYKKILEINPKLQTQVKDYLNQVDLQEKADLQEKEAHELLDSGKNTAVNTKNLLETLSKPDQIPLFYAGGIEILTEMIKECTEQTLFRMHDGFSIISDNEVVRRCFSTAGKDAIEETVCVSVLKLWQAVCCGNEENQRVLVMHPDRARLLATLLSSKVLAIRQQSLALLLQLAQTESGRSLIISHLDLTRLLEALVSFLDFSDKEANTAMGLFTDLALEERFQVWFQANLPGVLPAVTSVLKTDPKVSSSSALCQCIAIMGNLSAEPATRGHMAACEEFGDGCLSLLARCEENVALFREVIYTLLGLMMNLCLQAPFVSEVWAVEVSRRCLSLLNSQDGGILTRAAGVLSRTLSSSLKIVEEALQAGVVKKKKKKKKKKKKK

SEQ ID NO: 9383 - protein, 543 aa, Homo sapiens
MEQVNELKEKGNKALSVGNIDDALQCYSEAIKLDPHNHVLYSNRSAAYAKKGDYQKAYEDGCKTVDLKPDWGKGYSRKAAALEFLNRFEEAKRTYEEGLKHEANNPQLKEGLQNMEARLAERKFMNPFNMPNLYQKLESDPRTRTLLSDPTYRELIEQLRNKPSDLGTKLQDPRIMTTLSVLLGVDLGSMDEEEEIATPPPPPPPKKETKPEPMEEDLPENKKQALKEKELGNDAYKKKDFDTALKHYDKAKELDPTNMTYITNQAAVYFEKGDYNKCRELCEKAIEVGRENREDYRQIAKAYARIGNSYFKEEKYKDAIHFYNKSLAEHRTPDVLKKCQQAEKILKEQERLAYINPDLALEEKNKGNECFQKGDYPQAMKHYTEAIKRNPKDAKLYSNRAACYTKLLEFQLALKDCEECIQLEPTFIKGYTRKAAALEAMKDYTKAMDVYQKALDLDSSCKEAADGYQRCMMAQYNRHDSPEDVKRRAMADPEVQQIMSDPAMRLILEQMQKDPQALSEHLKNPVIAQKIQKLMDVGLIAIR

SEQ ID NO: 9384 - protein, 429 aa, Homo sapiens
MTYITNQAAVYFEKGDYNKCWELCEKSIEVGRENREDYLQIAKVCARIGNSYFKEEKYKDAIHFYNKSLAEHRTPDVLKKCQQAEKILKEQERLAYINPDLALEEKNKGNECFQKGDYPHAMKHYTEAIKRNPKDAKLYSNRAACYTKLLDSSWHSRTVKNGYTRKAVALEAMKDYTKVMDVYRKALDPDSSCKEAADGYQRCMMAQYNRHHSPEDVKRRAMADPEVQQIMSDIAMHLILEQMQKDPPGTQRTLKESCNRKEDPEADGCGSDCNSTMTCPSPLPFALMRKEERGPRQAARSGRESRGREGLTSLYLYPSRLENVASLQMLETLFSVFRNATAAPFSTIPISLGFSDPLELVPGAQGLLSVPCYGSYSIIEITIKELLAVCESSQERLRILYTKIFDVPEKMPKNATYRRPIFDDFRVAK

SEQ ID NO: 9385 - protein, 131 aa, Homo sapiens
GKQALKEKELGNDAYKKKDFDTALKHYDKAKELDPTNMTYITNQAAVYFEKGDYNKCRELCEKAIEVGRENREDYRQIAKAYARIGNSYFKEEKYKDAIHFYNKSLAEHRTPDVLKKCQQAEKILKEQERL

SEQ ID NO: 9386 - protein, 386 aa, Mus musculus
MESSEPEPTEDASMDAFLEKFQSQPYRGGFREDQWEEEFDKIPLFMKKAPSEIDPEEFPDLACLQSMIFDDDRYPEEQAKTYKDEGNDYFKEKDYKKAVLSYSEGLKKKCADPDLNAVLYTNRAAAQYYLGNVRSSLNDVLAAKKLKPGHLKAIIRGALCHLELKHFAEAVNWCDEGLQIDAKEKKLLEIRAKADKLKRMEERDLRKAKLKEKKEQHQNEALLQAIKARNIRLVSESASEDEDSASNGPAEILLDGLSSENPYGARLSIDDQGRLSWPVLFLYPEYAQSDFISAFHEDTRFIDHLMAMFSEAPSWDSEHKYHPENLEVYFEDEDRAELYQVSPDSTLLQVLQHPRCSMKALTPAFLVCVGSSPFCRNYLQGKKVHR

SEQ ID NO: 9387 - protein, 386 aa, Mus musculus
MESSEPEPTEDASMDAFLEKFQSQPYRGGFREDQWEEEFDKIPLFMKKAPSEIDPEEFPDLACLQSMIFDDDRYPEEQAKTYKDEGNDYFKEKDYKKAVLSYSEGLKKKCADPDLNAVLYTNRAAAQYYLGNVRSSLNDVLAAKKLKPGHLKAIIRGALCHLELKHFAEAVNWCDEGLQIDAKEKKLLEIRAKADKLKRMEERDLRKAKLKEKKEQHQNEALLQAIKARNIRLVSESAGEDEDSASNGPAEILLDGLSSENPYGARLSIDDQGRLSWPVLFLYPEYAQSDFISAFHEDTRFIDHLMAMFSEAPSWDSEHKYHPENLEVYFEDEDRAELYQVSPDSTLLQVLQHPRCCVKALTPAFLVCVGSSPFCRNYLQGKKVHR

SEQ ID NO: 9388 - protein, 210 aa, Mus musculus
MESSEPEPTEDASMDAFLEKFQSQPYRGGFHEDQWEEEFDKIPLFMKKAPSEIDPEEFPDLACLQSMIFDDDRYPEEQAKTYKDEGNDYFKEKDYKKAVLSYSEGLKKKCADPDLNAVLYTNRAAAQYYLGNVRSSLNDVLAAKKLKPGHLKAIIRGALCHLELKHFAEAVNWCDEGLQIDAKEKKLLEIRAKADKLKRMEERDLRKAKL

SEQ ID NO: 9389 - protein, 382 aa, Anopheles gambiae str. PEST
KKVLSEQERLELAAQLDKDLDAFISSLEKKRYTEGWPEDRWEEEMAKHPFFMQKSPEPGEELSPLMEGLQQLKYDPQENTEQELADTYKEDGKFYMQHRKFRMAVLSYTEALRYKVGDAAYKAILYNNRSAANYMLKNYRTSLQDAQKALELNPDYDKARWRAAQCASALDRFELCVELCDTILQRDPTNTAAVEMRKACLAKKATQQRDSRKEARQEREKQERWDRLVTELKKRMVKFEERKALDDERFLRPRLAPLEDFMVSCDENGVLSWPVVFCYPEFQTTDFQQQLLETTTMQDVLEQLFEEPLECDKAGLYRAKKVNVYYENRILGLAYLVDKSKTIREIVAERTFVAFQGTLTFYILVKGSKQEESFITQTRIPL

SEQ ID NO: 9390 - protein, 497 aa, Anopheles gambiae str. PEST
IPAKLTLQHRAAECFTMEEVVAIERLAEEKKNSGNDEYKLKRYEAALHLYSEAIHLSPGTAAYYGNRSACYMMLGDYRSALNDVKTAITIDEKYEKGYVRMAKCSLMLGDVIGTEQAIRKFLTLDPSNTALREEIASLKQLRDLNEKAAACYDKKDYRTCLYHCDNAIKIAPGSIQNKLLKAECLAMLERFEEACNIAISIMQTHSTNADAIYVRGLTLYYSDNLEKGLLHFERALMLDPDHKKAKAMRQKAKQLKEKKESGNELWKSGKYRDALATYTEALELDPQNKDINSKLYYNRALVNSKLGNLREAIADCSSALALNEKYMKALLQRAKLYYNMENYEEAVKDYEKALKSDRSPEVKNLLRDAKFQLKKSKRKDYYKILGVTKQASEDEIKKAYRKRALVHHPDRHANATDEEKKEQERKFKELGEAYTILSDPVKKSRYDSGQDLEEMNHSADIDPQQIYRQFFFPSDYGFGGFQGGGGGNSSNFSFHFG

SEQ ID NO: 9391 - protein, 360 aa, Arabidopsis thaliana
MALWMDAGATPTTEKEKADLEAISALKESTAIEFKEEGNECVRKGKKHYSEAIDCYTKAISQGVLSDSETSILFSNRSHVNLLLGNYRRALTDAEESMRLSPHNVKAVYRAAKASMSLDLLNEAKSYCEKGIENDPSNEDMKKLLKLVNSKKQEKEQHEAQASQAVVEAKACLSAIENRGVKIGKAMYRELTGLKKPMLDKNNILHWPVLLLYAEAMTSDFVEDFCETDMFATHLDMMFSEDSPPLPWDKNNEYSRDVIELYYEASSGTPLPRSRVLQYLLEGTKGSQAETTGEEDTSATKTPSYLKGSSGMVKVNERRTLHDVLKEPKFVIPEIPVFYIVSKRSKFYKDFTAGKWTPPN

SEQ ID NO: 9392 - protein, 427 aa, Arabidopsis thaliana
MALWMDAGATPTTEKEKADLEAISALKESTAIEFKEEGNECVRKGKKHYSEAIDCYTKAISQGVLSDSETSILFSNRSHVNLLLGNYRRALTDAEESMRLSPHNVKVAVYRAAKASMSLDLLNEAKSYCEKGIENDPSNEDMKKLLKLVNSKKQEKEQHEAQASQAVVEAKACLSAIENRGVKIGKAMYRELTGLKKPMLDKNNILHWPVLLLYAEAMTSDFVEDFCETDIPPLPWDKNNEYSRDVIELYYEASSGTPLPRSRVLQYLLEGTKGSQAETTGEEDTSATKTPSYRSSGMVKVNERRTLHDVLKEPKFVIPEIPVATDFVCVINASLLVFWLVTVFYIVSKSFFLLLVVVIYYCYRSKTQTCSELWLGLRHVQTFLGNESKKPRGKKRSYRGKNVVTILVTNYNINLSNKKTSFFFTFF

SEQ ID NO: 9393 - protein, 164 aa, Arabidopsis thaliana
MNNGEKIEAANRKKEEGNLLYKTQKYERAAKKYNKAAECIENGKFEGGDEKQVKALRVSCFLNGAACSLKLKNFLETIVLCSEVLDIEFQNVKALYRRAQSYIEVGDLISAEMDINRALEADPENREVKSLYKAMKLSKAESDRRDAKLYANMFALSKVRTHFP

SEQ ID NO: 9394 - protein, 372 aa, Oryza sativa
  unsure (1)..(372): unsure at all Xaa locations
MALLMDPGAGGPLTESEKADLDAIAAIKESAAAEYKEKGNRLVKMGRSHYADAVDCYTKAIAQMELPSPDASVLFANRAHVNLLLGNHRRALDDAARAVQLSPSNVKAYYRAAKAAIALGLLPEAAAFCRRGIEQDPANEELKKLLAQVDAQQSEQDRHRAKVAQAVSAAKDIVAAIEKRGLKLGKAAYQELTGVKKPKLDEQGVLHWPVLLLYPEVMSSDFIEDFPETDTFVPHLDVMFSESSPPLPWDDKHAYTRDAVELYYQAGVGTVLSKSEILKILLEGTMDSKSLPESLLDEEDGENDDGKSSTITSSDKGSVKWINVKEGKTLQEVLQHKDFIIPAIPVFFVVSRKSTFYRKFKAGNWSLPXCLA

SEQ ID NO: 9395 - protein, 267 aa, Oryza sativa
  unsure (1)..(267): unsure at all Xaa locations
MALLMDPGAGGPLTESEKADLDAIAAIKESAAAEYKEKGNRLVKMGRSHYADAVDCYTKAIAQMELPSPDASVLFANRAHVNLLLGNHRRALDDAARAVQLSPSNVKAYYRAAKAAIALGLLPEAAAFCRRGIEQDPANEELKKLLAQVDAQQSEQDRHRAKVAQAVSAAKDIVAAIEKRGLKLGKAAYQELTGVKKPKLDEQGVLHWPVLLLYPEVMSSTVLSXXSEILKILLEGTMDSKSLPESLLDEEDGENDDGKSSTITSSX

SEQ ID NO: 9396 - protein, 398 aa, Oryza sativa
  unsure (1)..(398): unsure at all Xaa locations
MALLMDPGAGGPLTESEKADLDAIAAIKESAAAEYKEKGNRLVKMGRSHYADAVDCYTKAIAQMELPSPDASVLFANRAHVNLLLGNHRRALDDAARAVQLSPSNVKVAYYRAAKAAIALGLLPEAAAFCRRGIEQDPANEELKKLLAQVDAQQSEQDRHRAKVAQAVSAAKDIVAAIEKRGLKLGKAAYQELTGVKKPKLDEQGVLHWPVLLLYPEVMSSDFIEDFPETDSPPLPWDDKHAYTRDAVELYYQAGVGTVLSKSEILKILLEGTMDSKSLPESLLDEEDGENDDGKSSTMINVKEGKTLQEVLQHKDFIIPAIPVFAVMLSVIQFGTFGRXLVRYAYDQRRKAGHLVILVWFYMLLYRMMRCVLSWEKARNVSPQVANKNGRPRAWRWV

SEQ ID NO: 9397 - protein, 215 aa, Oryza sativa
  unsure (1)..(215): unsure at all Xaa locations
MDPGAGGPLTESEKADLDAIAAIKESAAAEYKEKGNRLVKMGRSHYADAVDCYTKAIAQMELPSPDASVLFANRAHVNLLLGNHRRALDDAARAVQLSPSNVKAYYRAAKAAIALGLLPEAAAFCRRGIEQDPANEELKKLLAQVDAQQSEQDRHRAKVAQAVSAAKDIVAAIEKRGLKLGKAAYQELTGVKKPKLDEQGTMDSKSLLVFAVMLX

SEQ ID NO: 9398 - protein, 456 aa, Triticum aestivum
  unsure (1)..(456): unsure at all Xaa locations
MALLMEPGSEPLTEGEKADLDAIAAIKESAAREYREEGNQFVKKGRKHYPDAVDCYTKAIAQMGALSDPDASVLFANRAHVNLLLGNHRRALDDAEQAVRLSPSNLKAHYRAAKAALALDQLPQAASFCRRGLEQDPANEELKKFLAQVEAQQRERDLKRAKVAQAISAAKDLAAAIEKRGLRLGKAAYQELTGXLKKPKLDEQGVLHWPVLLLYPEVMSSDFIEDFPETDMFSDHLDLMFSESSPPLPWDENHAYTRDAIELYCQAGDGTPFSKSEMLKYLLEGTVDSGSLTESLDGEDDDTVKGSTAISPSQGKWIKVREGKTLQEALQHKDYIIPAVPVFFVVSRKSAFHSKFKAGNWSLPXSCRVVVQFTISGRGQGCYGYMIRKEEAGNCQLPYGPRRLYYLREDELCLISTCVSYKFFQPLLGWLMAQDCVSRGRSNRICNFSCVCSGHD

SEQ ID NO: 9399 - protein, 365 aa, Zea mays
  unsure (1)..(365): unsure at all Xaa locations
MALLMEPGAEPLTESEQADLAGIAAIKESAAREYKEQGNQFVRMGRRHYAAAVSCYTKAIAQNASAAADASVLFANRAHVNILLGNHRRALDDAEQAIRLSPSSVKAYYRAVKAALALDLLTDAASFCRKGLEQDPPNEEFKKLLSEVDSKLREQDRQRAKVAQAIAKAKDLAAAMGKRGVKLGKAAYQELTGVKKPVLDEQGVLHWPVLLLYPEVMSSDFIEDFPDTDTFSPHLDVMFSETSPPLPWDDNHVYTRDSIELYYQGGFGKPLSRSEVLRYLLEGNVDSKAREDEEHDSTKCTTVTSTDSSSKWIKVKEGKTLQEVLQDKGYIVPAIPVFFVVSRKSTFYKDFKAGNWSLPXNRTGH

SEQ ID NO: 9400 - protein, 400 aa, Zea mays
  unsure (1)..(400): unsure at all Xaa locations
RNMNPRPETSRPSGTSSKSFRDLYNMXXYSSYLNDEPMPDATSEKEQGNEYFKQKKFTDAIECYSRSIGLSPTAVTFANRAMAYLKLRRFKEAEDDCTEALNLDDRYIKAYSRRITARKELGKLKEAMDDAEFAISLDPNNSELRKQYSEIKALHMEKMAKKVPVPAKRAVSGIDKTADVTSHPPTISQKDTIMEVDLPVRDAMKIKESASVKSNGGSGVIINGNNVQQLQGRDANQKTGPEVSVQDLAARAASRYMAGTVKSIKTPKTAYDFEVSWRALSDDTAQQIQLLKSIPPASLPEIFKNALSAPFLIDIVKCAASIFRDAEALAVSILDNLARVPRFDLIIMCLSSMHKFELRKIWDQVFLAEKALADDQMEALRQLRGRYIPGGWQDSMLTSS

SEQ ID NO: 9401 - protein, 320 aa, Zea mays
  unsure (1)..(320): unsure at all Xaa locations
RNMNPQPETSRPSGTSSKSFRDLYNMXXYSSYLNDEPMPDATSEKEQGNEYFKQKKFTDAIECYSRSIGLSPTAVTFANRAMAYLKLRRFKEAEDDCTEALNLDDRYIKAYSRRITARKELGKLKEAMDDAEFAISLDPNNSELRKQYSEIKALHMEKMAKKVPVPAKRAVSGIDKTADVTSHPPTISQKDTIMEVDLPVRDAMKIKESASVKSNGGSGVIINGNNVQQLQGRDANQKTGPEVSVQDLAARAASRYMAGTVKSIKTPKTAYDFEVSWRALSDDTAQQIQLLKSIPPAYRHREVCSLNFPGCGGISCQYFG

SEQ ID NO: 9402 - protein, 358 aa, Schizosaccharomyces pombe
MAGFQSSEVDPNTKNKNAEEMFNELNKVPFFMQSLEDVGDESENNVQLDALKALAYEGEPHEVAQNFREHGNECFASKRYKDAEEFYTKALAQKCGDKDIEIACYSNRAACNLLFENYRQVLNDCAQVLQRDSTHAKAYYRSAKALVALKRYDEAKECIRLCSLVHPNDPAILALSKELQKKSDDFEKRESEKKRVAQEKVIAAKTVLLALQERHIKTKTTEHPPDLGDAMISLSTFDDPKSELFFPTILLYPLVYQSDFVPSVSENCTPLELLKTVFQSPAPWDVHQLYNPDSLDVFATTDTLGLIKVGKNVPILKALTHPKVTLIDGLVQLHVVPHHLASDWISSWKKNKQENAKN

SEQ ID NO: 9403 - protein, 471 aa, Neurospora crassa
MEDVTKSAESLNISNDNDASESSAPAVIGPAPPPPGADLSALFGNLPPGALAANAKPMTVQETFEEMNKHPLFMTSLPSDEDNEELAALQALAYEGTPLENAQNFKEQGNECFKAKQWKDAKEFYGKGIAVLVKADRERRDPAFKAKVEEEKRKREEEARKAREEGDAKAKMEADLENVKAEMPIAEAKEDKEEKKEDELSEEETIKQEASLLETLYCNRAACHLSLANYRSCTLDCAAALRLNPSNLKALYRSGRALLSVSKIAEADDACARGLEIDPSNAALKQLARDLIAKNEEITRKQRAEEARLEKERRKKTLKKAALEARGIKTRSTDDPPSMEDACIQLVPDPLDPQSELSFPVMLLYPLKLESDFIKEFRETESVGQHLEYILPDMPWDEEGDYDRPDKVECYMESVSGGLIRVPQKASLLRVLSSGKTEVVDELVRIFVVPKGEKAEGWIKEWKEKKAGEKK

SEQ ID NO: 9404 - protein, 300 aa, Schistosoma japonicum
MGNQLFNSCQYSEAVQCYTSAINQQPSISSYYSNRALCYIQMQEYSKVLSDCRKAIDLDRNNLKAHFFAGQAYLGLNQYEEALAKLVHAHNLALEQHRNFGDDITSVIRLARRKRFEAMDEDRKKEEISLQAYLNKLIVEDAARQKQAIFHKTSNRTSDSLSNVKSTEGVSLDSLSDEDIKNVENISPQHQEIISKIDSTAQKYIAELNELFCKVDERREKREIPDYLCGRISFDLMRDPVITPCGITYDRPSIISHLRQVGHFDPVSRQPLVEDQLVPNLSMREVVQAFLNENPWAETF

SEQ ID NO: 9405 - protein, 419 aa, Caenorhabditis elegans
MDLPQKKKFTESERAALAKKLDDDLDQFMEEMAARKSDKKEERKPFDFDDWCKEIDQHPAFMTEMPTDGKYQDTIEALQSMKYDKEDDEDKQMNAEHHKEEGNKHFKFKKYRWATDCYSNGIKENSPDRKLNAVLYFNRAAAQKHLGNLRSAIKDCSMGRKFDPTHLKGVIRGAECLLELEYAKDALNWIESSKKIFAFTKETSDTPDLTDDEKKFIDQLETLRVKSVELSLKEERDKRKSRAEERKETESKKQLLDALKERNLNLCPRVPFDRPELMDMARLTVSLPLMHSHECVKFDDDLNLVWPILLQYPEAGQTDVLTETNELTTVGELLKEVLNSPAQWDPEHKFNFENVRFFVSDEYDEYLMEVYEWNDFKSVLSMPGYQIKQGLPVIMIMTKEKAASSLEALAEDENRYVAK

SEQ ID NO: 9406 - protein, 379 aa, Caenorhabditis elegans
MDLPQKKKFTESERAALAKKLDDDLDQFMEEMAARKSDKKEERKPFDFDDWCKEIDQHPAFMTEMPTDGKYQDTIEALQASIKENSPDRKLNAVLYFNRAAAQKHLGNLRSAIKDCSMGRKFDPTHLKGVIRGAECLLELEYAKDALNWIESSKKIFAFTKETSDTPDLTDDEKKFIDQLETLRVKSVELSLKEERDKRKSRAEERKETESKKQLLDALKERNLNLCPRVPFDRPELMDMARLTVSLPLMHSHECVKFDDDLNLVWPILLQYPEAGQTDVLTETNELTTVGELLKEVLNSPAQWDPEHKFNFENVRFFVSDEYDEYLMEVYEWNDFKSVLSMPGYQIKQGLPVIMIMTKEKAASSLEALAEDENRYVAK

SEQ ID NO: 9407 - protein, 393 aa, Drosophila melanogaster
MAAQKAWTDEERLELAAQLDAELDAFIDGLEKKRYEEGWPEDRWQEEMDKHPFFMKRAPQPGDDVHPMFEGLQKLKYDPEENTRDELALNYKEDGNFYMKHKKFRMAIYSFTEGIKTKTDNPDVLAVLYNNRSAAHFFIKNYRSSLSDAQRALFYKPDYTKARWRSAQCAYELERFDLCTQMCEELLEVDVDNEVAIALLHKNKMKKLEIERNQRKEAAEAKRRLTRFHRLRDAIEQRAIKFDDQKVGKKDVLSEELLYPKFLPLEDHPVHLDEDGSTLIWPAAFSYPEFLYSDFYQQLPETTTMRDCLATLLTEKLPYDKAHNYRLGNVHVYYENRKVGCVHKVDEEKQLAEIIAEKGFFVSGGALLFYVVHKDSRVEQEFINERRRPMVYS

SEQ ID NO: 9408 - protein, 947 aa, Drosophila melanogaster
MTNTINSEEVSDAGSYKDKGNEAFKASRWEEAVEHYGKAIKAGSKHKELAVFYKNRAAAYLKLGKYENAVEDCTESLKAAPGDPKALFRRAQAYEALEKFEEAYKDATALFKADPGNKTVQPMLQRLHVVVEERSARNAKTSTKVKQMMDLTFDLATPIDKRRAAANNLVVLAKEQTGAELLYKDHCIAKVASLTKVEKDQDIYVNMVHLVAALCENSVERTKGVLTELGVPWFMRVLDQKHENCVSTAQFCLQTILNALSGLKNKPDSKPEKELCTRNNREIDTLLTCLVYSITDRTISGAARDGVIELITRNVHYTALEWAERLVEIRGLCRLLDVCSELEDYKYESAMDITGSSSTIASVCLARIYENMYYDEAKARFTDQIDEYIKDKLLAPDMESKVRVTVAITALLNGPLDVGNQVVAREGILQMILAMATTDDELQQRVSCECLIAASSKKDKAKALCEQGVDILKRLYHSKNDGIRVRALVGLCKLGSYGGQDAAIRPFGDGAALKLAEACRRFLIKPGKDKDIRRWAADGLAYLTLDAECKEKLIEDKASIHALMDLARGGNQSCLYGVVTTFVNLCNAYEKQEMLPEMIELAKFAKQHIPEEHELDDVDFINKRITVLANEGITTALCALAKTESHNSQELIARVLNAVCGLKELRGKVVQEGGVKALLRMALEGTEKGKRHATQALARIGITINPEVSFSGQRSLDVIRPLLNLLQQDCTALENFESLMALTNLASMNESVRQRIIKEQGVSKIEYYLMEDHLYLTRAAAQCLCNLVMSEDVIKMFEGNNDRVKFLALLCEDEDEETATACAGALAIITSVSVKCCEKILAIASWLDILHTLIANPSPAVQHRGIVIILNMINAGEEIAKKLFETDIMELLSGLGQLPDDTRAKAREVATQCLAAAERYRIIERSDNAEIPDVFAENSKISEIIDD

SEQ ID NO: 9409 - protein, 947 aa, Drosophila melanogaster
MTNTINSEEVSDAGSYKDKGNEAFKASRWEEAVEHYGKAIKAGSKHKELAVFYKNRAAAYLKLGKYENAVEDCTESLKAAPGDPKALFRRAQAYEALEKFEEAYKDATALFKADPGNKTVQPMLQRLHVVVEERSARNAKTSTKVKQMMDLTFDLATPIDKRRAAANNLVVLAKEQTGAELLYKDHCIAKVASLTKVEKDQDIYVNMVHLVAALCENSVERTKGVLTELGVPWFMRVLDQKHENCVSTAQFCLQTILNALSGLKNKPDSKPDKELCTRNNREIDTLLTCLVYSITDRTISGAARDGVIELITRNVHYTALEWAERLVEIRGLCRLLDVCSELEDYKYESAMDITGSSSTIASVCLARIYENMYYDEAKARFTDQIDEYIKDKLLAPDMESKVRVTVAITALLNGPLDVGNQVVAREGILQMILAMATTDDELQQRVACECLIAASSKKDKAKALCEQGVDILKRLYHSKNDGIRVRALVGLCKLGSYGGQDAAIRPFGDGAALKLAEACRRFLIKPGKDKDIRRWAADGLAYLTLDAECKEKLIEDKASIHALMDLARGGNQSCLYGVVTTFVNLCNAYEKQEMLPEMIELAKFAKQHIPEEHELDDVDFINKRITVLANEGITTALCALAKTESHNSQELIARVLNAVCGLKELRGKVVQEGGVKALLRMALEGTEKGKRHATQALARIGITINPEVSFSGQRSLDVIRPLLNLLQQDCTALENFESLMALTNLASMNESVRQRIIKEQGVSKIEYYLMEDHLYLTRAAAQCLCNLVMSEDVIKMFEGNNDRVKFLALLCEDEDEETATACAGALAIITSVSVKCCEKILAIASWLDILHTLIANPSPAVQHRGIVIILNMINAGEEIAKKLFETDIMELLSGLGQLPDDTRAKAREVATQCLAAAERYRIIERSDNAEIPDVFAENSKISEIIDD

SEQ ID NO: 9410 - protein, 408 aa, Plasmodium yoelii yoelii
MDVDENSYNAQENDKLTNKQKESLERENDEVDKLNNERIEKREFDDESTSNGHEKINFKNEDYNEDIKMSENFNRNTIETISDLDNINSNDDKNKKNEFYENVNLVEEKKSVITEEIHENDTTKKDNKIVSDKEDNVNNANRENEDYNSNDATNNTRNYYSDNYINNDEKNSSESEDTSEDEYYSGEESLNEDSSEEYSDSDNEKSSYIPSDEEEFEEDEEESEKTTDHELSNKNVEEIKEIGNGYFKKCDYKNAIYYYSKALKQCKDKNIKSILYSNRAACNVLLQNWNLVIDDCTKSINCDENYVKSYIRRSNAYEHLEKYNDASNDLNKAISIDSSLLNTYEAKQKKLKILAEQQLSKEKEEMVGKLKDFGNMLLGKVGLSLDNFEVQKNPNNDGSFNIQFKQNK

SEQ ID NO: 9411 - protein, 399 aa, Danio rerio
MAAPTQGEDSDDGMDEFMEKFKTQKYHNAFNESNWEEEFDKVPMFMKTAPENIDPEKHPDLACIQHIIHDDDRTPEEKARSLKDEGNEYFKEKKYKKAVVSYTEGLKTSCVNPELNAVLYTNRAAAHFHLGNMRSALNDATAAKKLKPDHNKAIIRGAQCLLELRNYAGALQWCDEGLKLFPTDKKLQELRATADKQKREADRDARKAKVKAKKQQNEKEALLAAIKERGIKLLKTEKPPHRASDSEDEDGDEDTSRALADLQLDGISSQEATGARVYMDEQGVLHWPVLFLYPEHSQTDFISAFSENASFIDQLAVMFGEELPPWDIDRKYQPQNLQLFFEDPEKGNLYQVDLQEPLLRVLQHQRCSVKAGTPSFIVLVSESPFSRQFLSGKKVQRLK

SEQ ID NO: 9412 - protein, 387 aa, Homo sapiens
MEQPGQDPTSDDVMDSFLEKFQSQPYRGGFHEDQWEKEFEKVPLFMTRAPSEIDPRENPDLACLQSIIFDEERSPEEQAKTYKDEGNDYFKEKDYKKAVISYTEGLKKKCADPDLNAVLYTNRAAAQYYLGNFRSALNDVTAARKLKPCHLKAIIRGALCHLELKHFAEAVNWCDEGLQIDAKEKKLLEMRAKADKLKRIEQRDVRKANLKEKKERNQNEALLQAIKARNIRLSEAACEDEDSASEGLGELFLDGLSTENPHGARLSLDGQGRLSWPVLFLYPEYAQSDFISAFHEDSRFIDHLMVMFGETPSWDLEQKYCPDNLEVYFEDEDRAELYRVPAKSTLLQVLQHQRYFVKALTPAFLVCVGSSPFCKNFLRGRKVYQIR

SEQ ID NO: 9413 - protein, 356 aa, Homo sapiens
MEQPGQDPTSDDVMDSFLEKFQSQPYRGGFHEDQWEKEFEKVPLFMSRAPSEIDPRENPDLACLQSIIFDEERSPEEQAKTYKDEGNDYFKEKDYKKAVISYTEGLKKKCADPDLNAVLYTNRAAAQYYLGNFRSALNDVTAARKLKPCHLKAIIRGALCHLELIHFAEAVNWCDEGLQIDAKEKKLLEMRAKADKLKRIEQRDVRKANLKEKKERNQNEALLQAIKARNIRLSEAACEDEDSASEGLGELFLDGLSTENPHGARLSLDGQGRLSWPVLFLYPEYAQSDFISAFHEDSRFIDHLMVMFGETPSWDLEQKYCLIIWRSTLRMRTGQNYTGCLPRAPCYRFYSTRGTL

SEQ ID NO: 9414 - protein, 418 aa, Homo sapiens
METGQAPVGATAQAFVEAHGINSEKGVMEFTLRYFLKELQDWLPGWAALERPQMPRALSVEPASPDDATDLFLEKFQSQPYRGGFHEDQWEEEFEKVPLFMKKAPSEIDPRENPDLACLQSIIFDGEHSPEQAKTYKDEGNDYFKEKDYKKAVISYTEGLKKKCANPDLSAVLYTNRAAAQYYLGNFHSALRDVTAAKKLKPCYLKAIIRDAKEKKLLEMRAKVDKLKLIEQRDVRKANLKEKERNQNEVLLQDTKARNIRLSEAACEDEVSASEGLGELFLDGLSSENPHGARLSLDDQGRLSWPVLFLYPEYAQSDFISAFHEDSRFIDHLMVMFGETPSWDLEQKYCPDNLEVYIEDEDRAELYWVPAKSTLLQDLQHHRHFVKALTPAFLAAQAGWPGGWAGEYLFERLTFKYN

SEQ ID NO: 9415 - protein, 931 aa, Homo sapiens
MAEVEAVQLKEEGNRHFQLQDYKAATNSYSQALKLTKDKALLATLYRNRAACGLKTESYVQAASDASRAIDINSSDIKALYRRCQALEHLGKLDQAFKDVQRCATLEPRNQNFQEMLRRLNTSIQEKLRVQFSTDSRVQKMFEILLDENSEADKREKAANNLIVLGREEAGAEKIFQNNGVALLLQLLDTKKPELVLAAVRTLSGMCSGHQARATVILHAVRIDRICSLMAVENEEMSLAVCNLLQAIIDSLSGEDKREHRGKEEALVLDTKKDLKQITSHLLDMLVSKKVSGQGRDQALNLLNKNVPRKDLAIHDNSRTIYVVDNGLRKILKVVGQVPDLPSCLPLTDNTRMLASILINKLYDDLRCDPERDHFRKICEEYITGKFDPQDMDKNLNAIQTVSGILQGPFDLGNQLLGLKGVMEMMVALCGSERETDQLVAVEALIHASTKLSRATFIITNGVSLLKQIYKTTKNEKIKIRTLVGLCKLGSAGGTDYGLRQFAEGSTEKLAKQCRKWLCNMSIDTRTRRWAVEGLAYLTLDADVKDDFVQDVPALQAMFELAKAGTSDKTILYSVATTLVNCTNSYDVKEVIPELVQLAKFSKQHVPEEHPKDKKDFIDMRVKRLLKAGVISALACMVKADSAILTDQTKELLARVFLALCDNPKDRGTIVAQGGGKALIPLALEGTDVGKVKAAHALAKIAAVSNPDIAFPGERVYEVVRPLVRLLDTQRDGLQNYEALLGLTNLSGRSDKLRQKIFKERALPDIENYMFENHDQLRQAATECMCNMVLHKEVQERFLADGNDRLKLVVLLCGEDDDKVQNAAAGALAMLTAAHKKLCLKMTQVTTQWLEILQRLCLHDQLSVQHRGLVIAYNLLAADAELAKKLVESELLEILTVVGKQEPDEKKAEVVQTARECLIKCMDYGFIKPVS

SEQ ID NO: 9416 - protein, 191 aa, Anopheles gambiae str. PEST
LAVCSCVSIGVQNLTYSTEVFMTKDMTSEAAVPPPAVWAQRSDVLFLTLNVECSDPVYKFTEDSMSFTGVGKPEGKKYELNVEFFSKINPDKVASKNIKRCIEFVIAKAEPQETYWPRLLKDKTKPHWLKVDFNRWEDEGSNDEEGGADQMDLMQMLNASQNSNKLSFDDLSDEPEGEDSDDESIPGLTDS

SEQ ID NO: 9417 - protein, 241 aa, Arabidopsis thaliana
MSRHPEVKWAETTEKIFLTVVLADTKDTKVNLDPEGVFDFSAKVGPENHVYELKLELADKVNVEESKINIGERSIFCIIEKAEPERWNKLLRVKKPPHYVKVDWDKWVDEDDEGSAGAADMDMAGMEGMGGMGGMGGMGGMGGMGGMGGMGGMEGMDFSKLMGGMGGMGGMGGLEGLGGMGGMGGMGGMGGMGGMEEFEDSDDEEETAKSGDKKDDAVKEEGLATEKAPAAEETTSVKEDK

SEQ ID NO: 9418 - protein, 241 aa, Arabidopsis thaliana
MSRHPEVKWAETTEKIFLTVVLADTKDTKVNLDPEGVFDFSAKVGPENHVYELKLELADKVNVEESKINIGERSIFCIIEKAEPERWNKLLRVKKPPHYVKVDWDKWVDEDDEGSAGAADMDMAGMEGMGGMGGMGGMGGMGGMGGMGGMGGMGGMEGMDFSKLMGGMGGMGGLEGLGGMGGMGGMGGMGGMGGMEEFEDSDDEEETAKSGDKKDDAVKEEGPATEKAPAAEETTSVKEDK

SEQ ID NO: 9419 - protein, 262 aa, Arabidopsis thaliana
MFVIVIRHPEVKWAETTEKIFLTVVLADTKDTKVNLDPEGVFDFSAKVGPENHVYELKLELADKVNVEESKINIGERSIFCIIEKAEPERWNKLLRVKKPPHYVKVDWDKWVDEDDEGSAGAADMDMAGMEGMGGMGGMGGMGGMGGMGGMGGMGGMEGMDFSIYLALRNDLILDPCFVQKLMGGMGGMGGMGGLEGLGGMGGMGGMGGMGGMGGMEEFEDSDDEEETAKSGDKKDDAVKEEGLATEKAPAAEETTSVKEDK

SEQ ID NO: 9420 - protein, 236 aa, Triticum aestivum
  unsure (1)..(236): unsure at all Xaa locations
MSRHPEVRWAQRIDKVYITVQLPDAKDAKVNLEPDGVFSFFATAGTDGNSYESKLDLNDKVNVEASKVSVGVRSIFCILEKADAKWWNKLVRDDQKAPHFVKVDWDKWVDEDDDGADVNVDGMDFSNMGGMGGMPGMEGLGGMGGMGGMPGMXXVLGGMGGLAGMMGGMGGMGGMGMPPGMEGLGGMGMDDFEDESDDEGEVSKPQDAGKSDAAEISEVEGKAGTAAQSNXRLSTQ

SEQ ID NO: 9421 - protein, 267 aa, Triticum aestivum
  unsure (1)..(267): unsure at all Xaa locations
MPSRGAPCHSKTSQNPRSPHSPPPPPPPPVPSKMSRHPEVRWAQRIDKVYITVQLPDAKDAKVKLEPDGVFSFFATAGTDGNSYESKLDLNDKVNVEASKVSVGVRSIFCILEKADAKWWNKLVHDQKAPHFVKVDWDKWVDEDDDGADVNVDGMDFSNMGGMGGMPGMEGLGGMGGMPGMEGLGGMGGMGGLAGMMGGMGGMGGMGMPPGMEGLGGMGMDDFEDESDDEGEVSKPQDAGKSDAAEISEVEGKAGTAAQSNXRLSTQ

SEQ ID NO: 9422 - protein, 205 aa, Triticum aestivum
  unsure (1)..(205): unsure at all Xaa locations
MSRHPEVRWAQRIDKVYITVQLPDAKDAKVNLEPDGVFSFFATAGTDGNSYESKLDLNDKVNVEASKVSVGVRSIFCILEKADAKWWNKLVRDDQKAPHFVKVDWDKWVDEDDDGADVNVDGMDFSNMGGMGGMPGMEGLGGMGGMGGMPGMEGLGGMGGSXGGLAGMMXXEWPEGLGAXHGEECINALSDIFSILQLASLMWHF

SEQ ID NO: 9423 - protein, 106 aa, Triticum aestivum
  unsure (1)..(106): unsure at all Xaa locations
MSRHPEVRWAQRIDKVYITVQLPDAKDAKVNLEPDGVFSFFATAGTDGNSYESKLDLNDKVNVEASKKAPHFVKVDWXKWVDEDDDGADVNVDGMDFSNMGGMGGX

SEQ ID NO: 9424 - protein, 152 aa, Triticum aestivum
  unsure (1)..(152): unsure at all Xaa locations
MSENPEGRRAKRINKVYITLAMDXDAKDANVNLKPDGAFFFFGTDVTDGNYYESKLDVNDKRDVVAKQVRVDVRSIFSILEKTNAKWWNKLVREDQKAPHYENVHWDKWKDHDGADVNGDGMDFTNMSGTVTDAWHDTFTTACDGNGWYALD

SEQ ID NO: 9425 - protein, 239 aa, Zea mays
  unsure (1)..(239): unsure at all Xaa locations
MSRHPEVKWAQRIDKVYITVQLPDAKDAKVNLDPDGVFTFSGSAGTNLYELKLDLNDKVNVEASKISVGVRSIFCIVEKAEAKWWKKLVRDDQRAPHFVKVDWDKWVDEDDDGADINMDGMDFSNFGGMGGMGGMGGMGDMAGMGGLGGMGGMGGLGGMGGMGMDDFEDESDDEEVSKPQAADKAVEAEETESAETKIEAAQSSXRCLXSKLDCILMLILLNRRTNLTFMVLASPSGVP

SEQ ID NO: 9426 - protein, 219 aa, Zea mays
  unsure (1)..(219): unsure at all Xaa locations
MSGIVFCSRHPEVKWAQRIDKVYITVQLPDAKDAKVNLDPDGVFTFSGSAGTNLYELKLDLNDKVNVEASKISVGVRSIFCIVEKAEAKWWKKLVRDDQRAPHFVKVDWDKWVDEDDDGADINMDGMDFSNFGGMGGMGGMGGMGDMAGMGGLGGMGGMGGLGGMGGMGMDDFEDESDDEEEVSKPQAADKAVEAEETXSQRKPRLRRLRAVEDAYDLS

SEQ ID NO: 9427 - protein, 213 aa, Zea mays
  unsure (1)..(213): unsure at all Xaa locations
MSRHPEVKWAQRIDKVYITVQLPDAKDAKVNLDPDGVFTFSGSAGTNLYELKLDLNDKVNVEASKISVGVRSIFCIVEKAEAKWWKKLVRDDQRAPHFVKVDWDKWVDEDDDGADINMDGMDFSNFGGMGGMGGMGGMGDMAGMGGLGGMGGMGDLGGMGGMGMDDFEDESDDEEELSKPQAADKAVEAEETXSQRKPRLRRLRAVEDAYDLS

SEQ ID NO: 9428 - protein, 212 aa, Zea mays
  unsure (1)..(212): unsure at all Xaa locations
MSRHPEVKWAQMIDKVYITVQLPDAKDAKVNLDPDGVFTFSGSAGTNLYELKLDLNDKVNVEASKISVGVRSIFCIVEKAEAKWWKKLVRDDQRAPHFVKVDWDKWVDEDDDGADINMDGMDFSNFGGMGGXMGGMGDMAGMGGLGGMGGMGGLGGMGGMGMDDFEDESDDEEEVSKPQAAGHAAEAEKTESAEAKTESAQSSXRCFRHDLN

SEQ ID NO: 9429 - protein, 200 aa, Zea mays
MSRHPEVKWAQRIDKVYITVQLPDAKDAKVNLEPDGVFTFSGSVGTNLYELKLDLNDKVNVEASKISVGVRSIFCIVEKAEAKWWKKLVRDDQRAPHFVKVDWDKWVDEDDDGADVNLDGMDFSNFGGMGGMGGMGDMAGLGGLGGMGGMGGMGGMGFSMDDFEDDSDEEEVSKPQAAGHAAEAEKTESAEAKTESAQSS

SEQ ID NO: 9430 - protein, 197 aa, Zea mays
MSRHPEVKWAQRIDKVYITVQLPDAKDAKVNLDPDGVFTFSGSAGTNLYELKLDLNDKVNVEASKISVGVRSIFCIVEKAEAKWWKKLVRDDQRAPHFVKVDWDKWVDEDDDGADINMDGMDFSNFGGMGGMGDMGGLGGMGGMGGLGGMGGMGMDDFEKDESDDEEEVSKPQAADKAVEAEETESAETKTEAAQSS

SEQ ID NO: 9431 - protein, 259 aa, Zea mays
  unsure (1)..(259): unsure at all Xaa locations
MSRHPEVKWAQRIDKVYITVQLPDAKDAKVNLDPDGVFTFSGSAGTNLYELKLDLNDKVNVEASKISVGVRSIFCIVEKXAEAKWWKKLVRDDQRAPHFVKVDWDKWVDEDDDGADINMDGMDFSNFGGMGGXGMGGMGGMGGMGGMGDMAGMGGLGGMVGMGGXLGGMGGMGMDDFEDESDDXKKKCRNLKLRTRPVEAEETESAETKIEAGSEQLKMLMIXARLYPHVNSAESEDNPYIYGAGQVPVACHENLRSVF

SEQ ID NO: 9432 - protein, 198 aa, Zea mays
  unsure (1)..(198): unsure at all Xaa locations
MSRHPEVKWAQRIDKVYITVQLPDAKDAKVNLEPDGVFTFSGSAGTNLYELKLDLNDKVNVEASKISVGVRSIFCIVEKAEAKWWKKLVRDDQRAPHFVKVDWDKWVDEDDDGADVNLDGMDFSNFGGMGGMGGMGDMAGLGGLGGMGGMGMDDFEDYSKFXADSDEEEVSKPQAAGHAAEAEKTESAEAKTESAQSS

SEQ ID NO: 9433 - protein, 163 aa, Zea mays
  unsure (1)..(163): unsure at all Xaa locations
MSRHPEVKWAQRIDKVYITVQLPDAKDAKVNLEPDGVFTFSGSAGTNLYELKLDLNDKVNVEASKISVGVRSIFCIVEKAEAKWWKKLVRDDQRAPHFVKVDWDKWVDEDDDGADINMDGMDFSNFGGMGGMGGMGGMGDMAGLGGLGGMGGMGGMDNNKLLX

SEQ ID NO: 9434 - protein, 160 aa, Xenopus laevis
MQPASAKWYDRRDYVFLEFCVEDSKNVKTDFDKNKLTFSCLGGADSVKYLNEVELFQSIDPNASKHKRTDRSVLCCLRKGEPGKSWPRLTKEKAKLNWLSVDFNNWKDWEDDSDEDMSNFDHFSEMMNNMGGDEDVDLPEVDGADDDSPDSDDEKMPDLE

SEQ ID NO: 9435 - protein, 160 aa, Gallus gallus
MQPASAKWYDRRDYVFIEFCVEDSKDVNVNFEKSKLTFSCLGGSDNFKHLNEIDLFNNIDPNESKHKRTDRSILCCLRKGESGQAWPRLTKERAKLNWLSVDFNNWKDWEDDSDEDMSNFDRFSEMMNNMGGDDDVDLPEVDGADDDSPDSDDEKMPDLE

SEQ ID NO: 9436 - protein, 203 aa, Arabidopsis thaliana
MSRNPEVLWAQRSDKVYLTVALPDAKDISVKCEPQGLFSFSALGAQGERFEFSLELYGKIMTEYRKNVGLRNIIFSIQKEERSWWTRLLKSEEKPAPYIKVDWNKWCDEDEEVNSETASDDESAFVNQDSESSDDDGLLFLVSAKYKSELVCTDLTNNIIFGQIFLIWKRQETSSLTATTTNQPTLEDEEKVKDYELKHSALG

SEQ ID NO: 9437 - protein, 186 aa, Glycine max
  unsure (1)..(186): unsure at all Xaa locations
MSRYPEVLWAQRSDKVYLTVALPDAKNVSVKCEPQGLFTFSASGVQEEAYSFSLELYGCIEPEGCKTTGLRNILCSIQKGEKGWWKRLLKSEEKPAPYLKVDWNKWCDEDDEESTSDLVSNDDAQFVGEDDRSSDDEGMLYLPDLEKARAXSSSYCTERFRKHGXHGIIFIWNYLHRGRDRLLDKX

SEQ ID NO: 9438 - protein, 169 aa, Glycine max
MSRYPEVLWAQRSDKVYLTVALPDAKNVSVKCEPQGLFTFSASGVQEEAYSFSLELYGCIEPEGCKTTGLRNILCSIQKGEKGWWKRLLKSEEKPAPYLKVDWNRWCDEDDEESTSDLVSDDDARFVGEDDGSSDDEGMLYLPDLEKARDLICHFKVATFIRNSIFLLF

SEQ ID NO: 9439 - protein, 189 aa, Glycine max
PGNERPKWPRTKLDVVLKSLQFHTHIPLSLEHSRFRLLPSHSANENVSVKCEPQGLFTFSASGVQEEAYSFSLELYGCIEPEGCTTKSGLRNILCSIQKGEKGWWKRLLKSEEKPAPYLKVDWNRWCDEDDEESTSDLVSDDDARFVGEDDGSSDDEGMLYLPDLEKARDLICHFRVATFIRNSIFLLF

SEQ ID NO: 9440 - protein, 99 aa, Glycine max
  unsure (1)..(99): unsure at all Xaa locations
MSRHPEVLWAQRSDKVYLTVALPDAKDVFVKCEPQGLFAFSASGVQDKAYSFSLELYGSIEPEKGEKGWWKRLLKSEEKPAPYLKVDWNKWCDEDDEEX

SEQ ID NO: 9441 - protein, 133 aa, Oryza sativa
  unsure (1)..(133): unsure at all Xaa locations
MSRQPEVLWAQRSEKIYLTISLPDAKDVVLKTEPQGLFSFLAVANGXXPFSFTLELFDSVLXEGSKTKTKSGNIMLLIQKEKKGWWKRLLKSEEKHPYIKVDWNKWCDEDEESDAPLDSDDAFDEGFEKKKKX

SEQ ID NO: 9442 - protein, 155 aa, Triticum aestivum
  unsure (1)..(155): unsure at all Xaa locations
MSRQPEVLWAQRSEKVYLTISVPDAEDVVIKTEPQGIFSFSAVAHGESFSLNLELFDSVLPEGSKTKTKVGSRNIICSIQKDKKCWWKRLLKSEAKXXPYIKVDWNKWCDEDEESENSGSDDDFDGGEENDESDADDGMLYLPDCQYXLEKLRGK

SEQ ID NO: 9443 - protein, 160 aa, Mus musculus
MQPASAKWYDRRDYVFIEFCVEDSKDVNVNFEKSKLTFSCLGGSDNFKHLNEIDLFHCIDPNDSKHKRTDRSILCCLRKGESGQSWPRLTKERAKLNWLSVDFNNWKDWEDDSDEDMSNFDRFSEMMDHMGGDEDVDLPEVDGADDDSQDSDDEKMPDLE

SEQ ID NO: 9444 - protein, 160 aa, Mus musculus
MQPASAKWYDRRDYVFIEFCVEDSKDVNVNFEKSKLTFSCLGGSDNFKHLNEIDLFHCIDPNDSKHKRTDRSILCCLRKGESGQSWPRLTKERAKLNWLSVDFNNWKNWEDDSDEDMSNFDRFSEMMDHMGGDEDVDLPEVDGADDDSQDSDDEKMPDLE

SEQ ID NO: 9445 - protein, 160 aa, Mus musculus
MQPASAKWYDRRDYVFIEFCVEDSKDVNVNFEKSKLTFSCLGGSDNFKHLNEIDLFHCIDPNDSKHKRTDRSILCCLRKGESGQSWLGLTKERAKLNWLSVDFNNWKDWEDDSDEDMSNFDRFSEMMDHMGGDEDVDLPEVDGADDDSQDSDDEKMPDLE

SEQ ID NO: 9446 - protein, 140 aa, Mus musculus
MQPASAKWYDRRDYVFIEFCVEDSKDVNVNFEKSKLTFSCLGGSDNFKHLNEIDLFHCIDPNDSKHKRTDRSILCCLRKGESGQSWPRLTKERAKLNWLSVDFTNWRDWEDDSDEDMSNFERFSEMMDHMGGDEDVDLPK

SEQ ID NO: 9447 - protein, 181 aa, Rattus norvegicus
MERFSAPHLVEAVDSRQSPRLQVSVTGQHARTLWYDRPKYVFMEFCVEDSTDVSVLIEDHRIVFSCRNGDGVELYNEIEFYAKVNSKDSQDKRSGRSITCFVRKWKEKVPWPRLTKKDIKPVWLSVDFDNWRDWEGDDEMELAQVEHYAELLNKVSTKRPPPAMDDLDNRSAYTLQSSNTI

SEQ ID NO: 9448 - protein, 190 aa, Glycine max
  unsure (1)..(190): unsure at all Xaa locations
MSRHPSVKWAQTSDVLYLTVELPDAQDVKLKLEPEGKFYFSATAGAEKIPYEVDIDLFDKIDVNNSKASVGSRNICYLVKKAENKWWDRLLKQGGKSPVFLKVDWDKWVDEDEEQDNKPAASDMDFGDIDFSKLGMGGGEGLDSDXXAGNDDADESDTEEEFVAEASASKEQDTKDAVSSDAKDAPDTKA

SEQ ID NO: 9449 - protein, 175 aa, Triticum aestivum
  unsure (1)..(175): unsure at all Xaa locations
MSRHPSTKWAQRLDKVYLTIELPDAKDVKLNLRPDGHFNFSAKAPADDMQYELDLELFDAVSVEESQAAVAPRTICYLVKKAEGKWWPRLLKKEGRPPVFLKVDWDKWQDEDDEDXPDLXDFGDMDFSKLDMGGGDDDDDDEIEEEDEENVVDSANKADVDAETEPGSKGGVALL

SEQ ID NO: 9450 - protein, 185 aa, Triticum aestivum
  unsure (1)..(185): unsure at all Xaa locations
MSRHPSTKWAQRLDKVYLTIELPDAKDVKLNLRPDGHFNFSAKAPADGMQYELDLELFDAVSVEESQAAVAPRAICYLVKKAEAKWWPRLLKKEGRPPVFLKVDWDKWQDEDDEDAGFXXDFGDMDFSKLDMGGGDDDDDDEIEEDDDEDNVVXXSANKGDVDAETEPGSKGGEAPSAAGEEAKP

SEQ ID NO: 9451 - protein, 184 aa, Triticum aestivum
  unsure (1)..(184): unsure at all Xaa locations
MSRHPSTKWAQRLDKVYLTIELPDAKDVKLNLRPDGHFNFSAKAPADDMQYELDLELFDAVSVEESQAAVXPRAICYLVKKAEGKWWPRLLKKEGRPPVFLKVDWDKWQDEDDEDXPDLXDFGDMDFSKLDMGGGDDDDDEIEEEEDEDNVVXXSANKGDVDAETEPGSKGGEAPSAAGEEAKP

SEQ ID NO: 9452 - protein, 178 aa, Triticum aestivum
  unsure (1)..(178): unsure at all Xaa locations
MSRHPSTKWAQRLDKVYLTIELPDAKDVKLNLRPDGHFNFSAKAPADXDMQYELDLELFDAVSVEESQAAVAPRAICYLVKKAEGKWWPRLLKKEGRPPVFLKVDWDKWQDEDDEDXPDLXDFGDMDFSKLDMGGGDDDDDDEIEEXGDEDNVVXXSANKGDVDAETEPGSKGGVALL

SEQ ID NO: 9453 - protein, 180 aa, Zea mays
  unsure (1)..(180): unsure at all Xaa locations
MSRHPITKWAQRSDRVFLTIELPDAKDVKLNLKPEGHFNFSAXXGSDDLPYEFDLELFDAVNVEESKAAVAPRTICYLIKKAESKWWPRLLKKEGKAPVFLKVDWDKWQDEDDEDVGFNDFSDMDFSKLDMGGADDDDFEDDEDDVVESANKDEEGGKTEKSNGEEEAAAAAAAAEEVKP

SEQ ID NO: 9454 - protein, 177 aa, Zea mays
  unsure (1)..(177): unsure at all Xaa locations
MSRHPITKWAQRSDRVFLTIELPDAKDVKLNLKSEGHFNFSAXXGSDDLPYEFDIELFDAVNVEESKAAVAPRTICYLIKKAKSGWWPRLLKQEGKPPVFLKVDWDKWQDEDDEDAGFNDFGGMDFSKLDIGGADDDDIGDDEDDVVESANKDEEGGKTEESKEEEAAPAAAEEVKP

SEQ ID NO: 9455 - protein, 177 aa, Zea mays
  unsure (1)..(177): unsure at all Xaa locations
MSRHPITKWAQRSDRVFLTIELPDAQDVKLNLKPEGHFNFSAXXGSDDLRYEFDIELFDAVNVEESKAAIAPRTICYLIKKAKSGWWPRLLKQEGKPPVFLKVDWDKWQDEDDEDAGFNDFGGMDFSKLDIGGADDDDIGDDEDDVVESANKDEEGGKTEESKEEEAAPAAAEEVKP

SEQ ID NO: 9456 - protein, 177 aa, Zea mays
  unsure (1)..(177): unsure at all Xaa locations
MSRHPITKWAQRSDRVFLTIELPDAKDVKLNLKSEGHFNFSAXXGSDDLPYEFDIELFDAVNVEESKAAVAPRTICYLIKKAKSGWWPRLLKQEGKPPVFLKVDWDKWQDEDDEDAGFNDFGGMDFSKLDIGGADDDDIGDDEDDVVESANKDEQGGKTEESKEEEAAPAAAEEVKP

SEQ ID NO: 9457 - protein, 155 aa, Zea mays
  unsure (1)..(155): unsure at all Xaa locations
MSRHPSTKWAQRLDKVYLTIELPDAKDVKLNLRPDGHFNFSAKAPADDMQYELDLELFDAVSVEESQAAVAPRAICYLVKKAEGKWWPRLLKKEGRPPVFLKVDWDKWQDEDDEDXPDLXDFGDMDFSKLDMGGGDDDDDEIEEEDEDNVVDSAX

SEQ ID NO: 9458 - protein, 184 aa, Drosophila melanogaster [sequence omitted]

SEQ ID NO: 9459 - protein, 146 aa, Gallus gallus
VFIEFCVEDSKDVNVNFEKSKLTFSCLGGSDNFKHLNEIDLFNNIDPNESKHKRTDRSILCCLRKGESGQAWPRLTKERAKLNWLSVDFNNWKDWEDDSDEDMSNFDRFSEMMNNMGGDDDVDLPEVDGADDDSPDSDDEKMPDLE

SEQ ID NO: 9460 - protein, 160 aa, Homo sapiens
MQPASAKWYDRRDYVFIEFCVEDSKDVNVNFEKSKLTFSCLGGSDNFKHLNEIDLFHCIDPNDSKHKRTDRSILCCLRKGESGQSWPRLTKERAKLNWLSVDFNNWKDWEDDSDEDMSNFDRFSEMMNNMGGDEDVDLPEVDGADDDSQDSDDEKMPDLE

SEQ ID NO: 9461 - protein, 160 aa, Homo sapiens [sequence omitted]

SEQ ID NO: 9462 - protein, 273 aa, Oryza sativa
  unsure (1)..(273): unsure at all Xaa locations
MTNQTNQSKIAENNRFRPHRNGKLAIGSPYLQYSSRRKFQKVREACVRLGVEWKRSGKRREEEEAKEGGGGGGGGGREERTTSHRARPNRRSCFPEEKNMSRHPSTKWAQRSDKVFLTIELPDARDVKLNLKPEGQFIFSAKGPADDTPYELDLELFDAVNVEESKAAVAARSICYLIKKAESKWWPRLLKKEGKPPVFLKVDWDKWQDEDDEDIGLXXDFGDMDFSKLGMGGPDDDLEDDDEDDTADSANKDDEDIKAEGSGEQEAAGEAKP

SEQ ID NO: 9463 - protein, 172 aa, Oryza sativa
  unsure (1)..(172): unsure at all Xaa locations
MSRHPSTKWAQRSDKVFLTIELPDARDVKLNLKPEGQFIFSAKGPADDTPYELDLELFDAVNVEESKAAVAARSICYLIKKAESKWWPRLLKKEGKPPVFLKVDWDKWQDEDDEDIGLXXDFGDMDFSKLGMGGPDDDLEDDDEDDTADSANKDDEDIKAEGSGEAAGEAKP

SEQ ID NO: 9464 - protein, 129 aa, Oryza sativa
  unsure (1)..(129): unsure at all Xaa locations
VLCACSRHPSTKWAQRSDKVFLTIELPDARDVKLNLKPEGQFIFSAKGPADDTPYELDLELFDAVNVEESKAAVAARSICYLIKKAESKWWPRLLKKEGKPPVFLKVDWDKWQDEDDEDMVGNSKYDXD

SEQ ID NO: 9465 - protein, 263 aa, Arabidopsis thaliana
MRLSPHNVKAVYRAAKASMSLDLLNEAKSYCEKGIENDPSNEDMKKLLKLVNSKKQEKEQHEAQASQAVVEAKACLSAIENRGVKIGKAMYRELTGLKKPMLDKNNILHWPVLLLYAEAMTSDFVEDFCETDMFATHLDMMFSEDSPPLPWDKNNEYSRDVIELYYEASSGTPLPRSRVLQYLLEGTKGSQAETTGEEDTSATKTPSYLKGSSGMVKVNERRTLHDVLKEPKFVIPEIPVFYIVSKRSKFYKDFTAGKWTPPN

SEQ ID NO: 9466 - protein, 360 aa, Glycine max
MALWMEKGSEPLTETEKADLEAIAALKESAAFEFKEKGNQYVKMGKKHYSDAIDYYTRAIDQKALSDSETSILFANRAHVNLLLGNLRRALTDSNEALKLCPSNIKAIYRAAKASLSLNMLAEAREYCLKGLQFDPNNEDLKKLDRQIGLKISEKEKHEAEASKAVAETKKLVSAIENRGLKIGKAMYLELTGLRKPVLDKSNILHWPVLLLYAEVMSSDFIEDFCETDMFSVHLDMIFSEDQPLSWDVENNYKREFIELYYETGSGLCLSKEKLLHCLLEGTAAAHREGVGDEEKDTVEDYKQHMGSPKWIKVNERRTLHDVLKEPNFIIPGIPVFYVVSKRSSFYGKFKAGKWVPPSI

SEQ ID NO: 9467 - protein, 111 aa, Glycine max
  unsure (1)..(111): unsure at all Xaa locations
MALWMEKGPEPLTECEKADLEAIAALKESAAFEFKEKGNQYVKMGKKHYSDAIDCYTRAIDQKALSDSETSILFANRAHVNLLLGNLRRALTDSSEALKLCPSNIKAIYRX

SEQ ID NO: 9468 - protein, 78 aa, Glycine max
  unsure (1)..(78): unsure at all Xaa locations
CHFTLQIQEKGNQYVKMGKKHYSDAIDYYTRAIDQKALSDSETSILFANRAHVNLLLGNLRRALTDSNEALKLCPSNX

SEQ ID NO: 9469 - protein, 131 aa, Triticum aestivum
  unsure (1)..(131): unsure at all Xaa locations
XVRDENHAYTRDAIELYCQAGDGTPFSRSELLKYLLEGTVGSQKALMGKMENSSTAISSSQGSSGNWIKVREGKTLQEALQHKDYIIPAVPVFFVASRKSAFYSKFKAGNWSLPXSCSLVVLQFTIFVGRG

SEQ ID NO: 9470 - protein, 149 aa, Zea mays
  unsure (1)..(149): unsure at all Xaa locations
XCRKGLEQDPPNEEFKKLLSEVDSKLREQDRQRAKVAQAIAKAKDLAAAMGKRGVKLGKAAYQELTGVKKPVLDEQGVLHWPVLLLYPEVMSSDFIEDFPDTDTPPLPWDDNHVYTRDSIELYYQVCLGKPLLSAKHYDYRFFFQKAKX

SEQ ID NO: 9471 - protein, 102 aa, Zea mays
  unsure (1)..(102): unsure at all Xaa locations
XGGFGKPLSRSEVLRYLLEGNVDSKAREDEEHDSTKCTTVTSTDSSSKWIKVKEGKTLQEVLQDKGCIVPAIPVFFVVSRKSTFYKDFKAGNWSLPXNRTGH

SEQ ID NO: 9472 - protein, 385 aa, Saccharomyces cerevisiae; identical to SEQ ID NO: 472

SEQ ID NO: 9473 - protein, 386 aa, Saccharomyces cerevisiae
MSSVNRQMEDIPNQQKYVPGPGDPELPPQLSEFKDKTSDEILKEMNRMPFFMTKLDETDGAGGENVELEALKALAYEGEPHEIAENFKKQGNELYKAKRFKDARELYSKGLAVECEDKSINESLYANRAACELELKNYRRCIEDCSKALTINPKNVKCYYRTSKAFFQLNKLEEAKSAATFANQRIDPENKSILNMLSVIDRKEQELKAKEEKQQREAQERENKKIMLESAMTLRNITNIKTHSPVELLNEGKIRLEDPMDFESQLIYPALIMYPTQDEFDFVGEVSELTTVQELVDLVLEGPQERFKKEGKENFTPKKVLVFMETKAGGLIKAGKKLTFHDILKKESPDVPLFDNALKIYIVPKVESEGWISKWDKQKALERRSV

SEQ ID NO: 9474 - protein, 338 aa, Mus musculus
MAKWGEGDPRWIVEERADATNVNNWHWTERDASNWSTEKLKTLFLAVRVENEEGKCEVTEVNKLDGEASINNRKGKLIFFYEWTIKLNWTGTSKSGVQYKGHVEIPNLSDENSVDEVEISVSLAKDEPDTNLVALMKEDGVKLLREAVGIYISTLKTEFTQGMILPTVNGESVDPVGQPALKTETCKAKSALSKSQAKPVGVKIPTCKITLKETFLTSPEELYRVFTTQELVQAFTHAPAALEADRGGKFHMVDGNVTGEFTDLVPEKHIAMKWRFKSWPEGHFATITLTFIDKNGETELCMEGRGIPAPEEERTRQGWQRYYFEGIKQTFGYGARLF

SEQ ID NO: 9475 - protein, 338 aa, Mus musculus
MAKWGEGDPRWIVEERADATNVNNWHWTERDASNWSTEKLKTLFLAVRVENEEGKCEVTEVNKLDGEASINNRKGKLIFFYEWTIKLNWTGTSKSGVQYKGHVEIPNLSDENSVDEVEISVSLAKDEPDTNLVALMKEDGVKLLREAVGIYISTLKTEFTQGMILPTVNGESVDPVGQPALKTETCKAKSAPSKSQAKPVGVKIPTCKITLKETFLTSPEELYRVFTTQELVQAFTHAPAALEADRGGKFHMVDGNVTGEFTDLVPEKHIAMKWRFKSWPEGHFATITLTFIDKNGETELCMEGRGIPAPEEERTRQGWQRYYFEGIKQTFGYGARLF

SEQ ID NO: 9476 - protein, 331 aa, Mus musculus
MAKWGQGDPRWIVEEREDGTNVNNWHWTERDATIWSKGKLRGLLVGIAMENEAGRCEISELKQVEGEASCNSRKGKLIFFYEWNIKLAWKGTVKESGAKHKGLIEIPSLSEENEINDTEVNVSKKKGDGEILKDLMRTTGTAKVREALGEYLKALKTEFTTGMILPTKAVATQELTLQRKLNENKLQASPVALGVRIPTVALHLTELFDTTVEQLYSIFTVKELVQKFSKSPAVLEAERGGKFQMFDGNISGEYVELVTNRKIIMKWRCRNWPEEHYATVELNFVPAPGQTELQLDCKGVPVCKEENMKFCWQKQHFEEIKGLLELTAQNA

SEQ ID NO: 9477 - protein, 283 aa, Mus musculus
MENEAGRCEISELKQVEGEASCNSRKGKLIFFYEWNIKLAWKGTVKESGAKHKGLIEIPSLSEENEINDTEVNVSKKKGDGEILKDLMRTTGTAKVREALGEYLKALKTEFTTGMILPTKAVATQELTLQRKLNENKLQASPVALGVRIPTVALHLTELFDTTVEQLYSIFTVKELVQKFSKSPAVLEAERGGKFQMFDGNISGEYVELVTNRKIIMKWRCRNWPEEHYATVELNFVPAPGQTELQLDCKGVPVCKEENMKFCWQKQHFEEIKGLLELTAQNA

SEQ ID NO: 9478 - protein, 359 aa, Rattus norvegicus
MAKWGQGDPRWIVEEREDGTNVNNWHWTERDATVWSKGKLRELLVGLAMENEAGRCEISELKQVEGEASCNSRKGKLIFFYEWNIKLAWKGTVKESGAKHKGLIEIPSLSEENEVNDTEVNVSKKKGDGEILKDLMRTTGTAKVREALGEYLKALKTEFTTGMILPTKAGATQALTLERKLTENALQVRACGCTGRGWGGDTTRRHTGRTTTTPLASPVALGVRIPTVALHLTELFDTTVEQLYSIFTVKELVQGFSKSPAVLEAEKGGKFQMFDGNITGEYVELVTNRKIIMKWRCRNWPEEHYATVELNFVPAPGQTELQLDCKGVPVCKEEHMKFCWQKQHFEEIKGLLQLTTQNA

SEQ ID NO: 9479 - protein, 312 aa, Anopheles gambiae str. PEST
TAKRTVHCWFAATLNNHSNAFTVGPIDCKRRLRSSCTTRKQIDKMAKWGEGDPRWIVEERPDATNVNNWHWTEKNATPWSKDKLKVLLDGFVIAESGLECTVTKIDKLDGEATANNRKGKLIFFYEWNIVLLWKGRFNDEEVTGKVSIPNLSEENDVDEVELTVSVDSSNPASEKLKLFMYNIGRDKLRKQLDTYIRELKADFAKGLILPKKDEMNGTETAPQKKDKETVYASGFNKKKIDLETVTSSPDASKQKSVGCKLDLKTLQTTEKFQCRANELFDALTREDMVTAFTRGHVKHELFKGGDFVYFGA

SEQ ID NO: 9480 - protein, 140 aa, Plasmodium falciparum 3D7
MSFEITEEYYVPPEVLFNAFTDAYTLTRLSRGSLAEVDLKVGGKFSLFSGSILGEFTEITKPHKIVEKWKFRDWNECDYSTVTVEFISVKENHTKLKLTHNNIPASNKYNEGGVLERCKNGWTQNFLHNIEVILGYPKKK

SEQ ID NO: 9481 - protein, 360 aa, Arabidopsis thaliana
MAKFGEGDKRWIVEDRPDGTNVHNWHWSETNCLEWSRNFFTKQFSGVDILSGEGNLFIKVSKIEKVEGEAYVNVRKGKIIPGYELNVSLSWEGEAKDSDGKTLLKADGLVDMPYISDENADEDPEIRFSVKDEGPIGRTLKEAMVKKGKEIILEKVRVYVEAMARGGPCRDELESKKVAPKSVAAGSATVAVEKSGAAPVVSAAAVESKVVKEKKKAKTKEGFKTITMTEKFNCRARDLYEILMDENRWKGFTQSNAKISKDVNGPISVFDGSVTGINLELEEGKLIVQKWRFGSWPDGLDSTVKIVFEEPQPGVTIVNLTHTDVPEEDRYGNATVVENTERGWRDLIFHRIRAVFGFGI

SEQ ID NO: 9482 - protein, 360 aa, Arabidopsis thaliana
MAKFGEGDKRWIVEDRPDGTNVHNWHWSETNCLEWSRNFFTKQFSGVDILSGEGNLFIKVSKIEKVEGEAYVNVRKGKIIPGYELNVSLSWEGEAKDSDGKTLLKADGLVDMPYISDENADEDPEIRFSVKDEGPIGRTLKEAMVKKGKEIILEKVRVYVEAMARGGPCRDELESKKVAPKSVAAGSATVAVEKSGAAPVVSAAAVESKVVKEKKKAKTKEGFKTITMTEKFNCRARDLYEILMDENRWKGFTQSNAKISKDVNGPISVFDGSVTGMNLELEEGKLIVQKWRFGSWPDGLDSTVKIVFEEPQPGVTIVNLTHTDVPEEDRYGNATVVENTERGWRDLIFHRIRAVFGFGI

SEQ ID NO: 9483 - protein, 358 aa, Glycine max
  unsure (1)..(358): unsure at all Xaa locations
MARYGEGDKRWIVEDRPDGTNVHNWHWSETNCLDWSKTFFTSLLTNLPILDGEGNLFLKTTSLRSLDGEAYINVRKGKIIPGYEISLTLNWQGEAKDSLGTSLLKVDGTVEIPYISDENADEDPEVRVTVNDEGPVGMRIKDAMLSKGKPLILEKVRVWVQSMAKGGPVKDELEPKKVAPSSFSPSPAAXXQRQTTTPTTMKTTAAAPKKEEKKEKVKKGRKSISMTERFNCRAKDLFEILMDENRWKGFTQSNARISKEVGGEFSIFDGSVTGTNLELQEGKLIVQRWRFGSWNDGVQSTVRLEFEEPESGVTVVKLTHTDVPEEDRYGNATVVENTERGWRDLIFQRIRAVFGFGI

SEQ ID NO: 9484 - protein, 360 aa, Glycine max
  unsure (1)..(360): unsure at all Xaa locations
MARYGEGDKRWIVEDRPDGTNVHNWHWSETNCLDWSKTFFTSLLTNLPILDGEGNLFLKTTSLRSLDGEAYINVRKGKIIPGYEISLTLNWQGEAKDTLGTSLLKVDGTVEIPYISDENADEDPEVRVTVNDEGPVGMRIKDAMLSKGKPLILEKVRVWVQSMAKGGPVKDELEPKKVAPPPAAAVSXRXTTQPPQRQPTTTTTATKKEEKKEKEKEKEKKGRKSIGMTERFNCRAKDLYEILMDENRWKGFTQRAAGISKEVGGEFSIFDGSVTGTNLELQEGKLIVQRWRFGSWNDGVQSTVRLEFEEPESGVTVVKLTHTDVPEEDRYGNATVVENTERGWRDLIFQRIRAVFGFGI

SEQ ID NO: 9485 - protein, 147 aa, Glycine max
VKKNEGKKGFKVISLIEKFNCRARDLFEILMDENRWRGFTQSNARISKEVGGEFSIFDGSVTGKNLELDEGKLIVQGWRFGSWPDGIESMVRIVFEEPEDGVPVVKLPHSDVPEEDRYGNATVVENPERGWRDLIFQRIRTAFGFGI

SEQ ID NO: 9486 - protein, 357 aa, Oryza sativa
  unsure (1)..(357): unsure at all Xaa locations
MAKYGEGDARWIVQERADGTNVHNWHWAERDCLEWSRSRLTSLLAGLPVLSGEGGLALRTTALDKLDGEAYVNIRKGKVIPGYELSLTLAWEAEATTESGVVKVSGAAEVPYLADENADEDPELRVTVRGDDGPVARRAKDAFLTKGKPLVLEKIREYVAAMAKGGPAKDELDSKKTPTKAAAVEAGGAAXXAPAPAAEKKEEAPAVKEKKAKAKDKEGFKTIEMTEKFYCRAKDMYEILMDENRWKGFTQSNARISREVGGQFSLFDGSISGVNEELQEGKLIVQKWRFGSWPDGVHSTVRLVFDEPESGVTVISLKQTDVPEEDRYGNSTVVENTERGWRELIFQRIRGVFGFGI

SEQ ID NO: 9487 - protein, 178 aa, Oryza sativa
  unsure (1)..(178): unsure at all Xaa locations
XSVSLNVENVAIFFCKLIQTISLAXDKPKXXSYKMKRREYYSTCCRTQVFQTRAKAGSEMWMAEGKWEGFTQSNARISREVGGQFSLFDGSISGVNEELQEGKLIVQKWRFGSWPDGVHSTVRLVFDEPESGVTVISLKQTDVPEEDRYGNSTVVENTERGWRELIFQRIRGVFGFGI

SEQ ID NO: 9488 - protein, 357 aa, Triticum aestivum
MAKFGEGDARWIVQERADGANVHNWHWAERDCLDWSRALLSKLLAGLPVLSGEGGLTLRTTTLDKLDGEAYVNIRKGKVIPGYELSLTLAWEADATTESGVVKVTGTAEVPYLADENADEDPELRITVRGDDGPLARRAKDAFIAHGKPLVIAKIRDYVAAMANGGPAKDEIDSKKISTKAAPAAGGAAVAPAPSVKVTAAPVQAPAAKEKKASKDKEGFKTIEMTEKFNCRSKDIYEILMDENRWKGFTQSNARISKDVGGQFSLFDGSITGVNEELQEGKLIVQKWRFGSWADGVHSTVRLVFDEPESGVTIIKLKQTDVPEEDRYGNSTVVENTERGWKELIFQRIRAVFGFGV

SEQ ID NO: 9489 - protein, 336 aa, Schizosaccharomyces pombe
MSATSINPNNWHWTSKDCRVWSHEYFNKELPKIQASEGPTSARITQVNSCEGDVDVSMRKRKVITIFDLKIQMEFKGETKDGVEATGSITCPELSYDLGYSDYVFDIDIYSASKEKEPIKELVREKIIPQIRQLFSGFSQVLLQTHGDDVYLSTEEHNGNAARGLPVHSSFKQNNSSQTSSNKGTTTVAAGSGSDGSRVSAVVNTADISENYTFDAPANELYATFLDPARVAAWSRAPPQLDVRPQGAFSLFHGNVVGKFLVLEENKKIVQTWRLSSWPTGHYAEITFTFDQADSYTTLRMIMKGVPIGEEEVVQGNIQDYYIRPIKTVFGFGAVL

SEQ ID NO: 9490 - protein, 350 aa, Saccharomyces cerevisiae
MVVNNPNNWHWVDKNCIGWAKEYFKQKLVGVEAGSVKDKKYAKIKSVSSIEGDCEVNQRKGKVISLFDLKITVLIEGHVDSKDGSALPFEGSINVPEVAFDSEASSYQFDISIFKETSELSEAKPLIRSELLPKLRQIFQQFGKDLLATHGNDIQVPESQVKSNYTRGNQKSSFTEIKDSASKPKKNALPSSTSTSAPVSSTNKVPQNGSGNSTSIYLEPTFNVPSSELYETFLDKQRILAWTRSAQFFNSGPKLETKEKFELFGGNVISELVSCEKDKKLVFHWKLKDWSAPFNSTIEMTFHESQEFHETKLQVKWTGIPVGEEDRVRANFEEYYVRSIKLTFGFGAVL

SEQ ID NO: 9491 - protein, 326 aa, Neurospora crassa
MVLHNPNNWHWVNKDATSWAKQWFEDNLTKLEAKEGDVTAKISKVISMDGDVDVAQRKGKVITIFDVKLTLEYTGSTATDDNVSGTITVPEVSHELDEDEFVFDIDIYSDANEKRPVKDLVRNKLVPQLRKEFLKLSPALIAEHGKDIQHAPGSNPSSGFSTPKFVPQPASSSARAVTTTSSSSSSSAINTTTVVDSAEFRTSADELYATFTDPGRLAAFTRAPPKVFEGAKPGGKFVLFDGNVSGEYVELQEPTKIVQKWRLEQWPQGHYSTLKIEFDQNDVDKVTVMRVEWTGVPVGQEEIVKNNWNEYYVRSIKRTFGFGTIL

SEQ ID NO: 9492 - protein, 342 aa, Caenorhabditis elegans
MAKWGEGDPRWIVEERADATNVNNWHWSEKNATPWSLNRLRELLTGFSSEDGPIVVTIDEIKKIDGEATANNRKAKLIFLFEWVIEGTFIARVSGSEDEYKGTFDIPNLSDENDASEVDVNSSLSGNGPMAHQIRQVLNKSFIAKIQDVMGIYIRELKEEFSKGLILPTDKVKPQVVTTGKTSVVDKRQFQNTVVAEKDASTSGNEVFSTKEVSTSDTYKATPDRVFEALTETQFVRGWTNNSIGEWNFKEGGSFALFGENVTGTFEKIEPNKEIVKKWRLKKYPNNHHATIHFQLKDTGSGTDIKIIAKDVPTHLAEETQQGLDRYYLSSIGRTFGFSQRM

SEQ ID NO: 9493 - protein, 354 aa, Drosophila melanogaster
MAKWGEGDPRWIVEERPDATNVNNWHWTEKNATPWSKDRLHQLFQDFKIGQSDIECAVDSVDKCSGEATVNNRKGKLIFFYEWELVLKWSGKLLKNSKLIHKGKLTIPNLSEENELADVEITVTIDESNDESETLKQFMYNVGRDRVRQQLASYIRELKEEYSKNLILPKKGDEAGAGNTVANFKDANNTRNAAQNIALNSSVAAPRLKNSGIGCKLDVRTLSMTEEFHCSANDLYNALTKPEMVTAFTRAPAKVDAVRGGEFILYGGNVLGKFEELVPEKKIQQSWRLKNWTSGHYSNVVIELEETSSSTMMSLKQTGIPASEFDAMKTNWYRYYWHSIKQTFGFGTSISDAL

SEQ ID NO: 9494 - protein, 336 aa, Xenopus laevis
MAKWGEGDPRWIVEMRADATNVNNWHWTERDATSWSLAKIKELMMGIRVESEEGTCDITEVSKLEGEASINNRKGKLIFFYEWDIKLNWTGVSKSGVKYKGYVEIPNLSDENDPSEVEIRVSMAKDEPETNLIGVMRKQGSKQIREAVAQYISMLKSEFTQGMILPTANGVSHNISEIKQKTETNMPQTGKTQTCQNAGVKIPTCKVTIKDTFLTSPEELYRVLTRQELVQGFTHAPASLTADKGGKFQLLGGNVSGEFKELEPEKHIVMSWRFKSWPQGHHASITLTFTDKGGETELWMEARGVPQGEEERTKEGWKRYYFDGIKQTFGYGALLL

SEQ ID NO: 9495 - protein, 338 aa, Homo sapiens
MAKWGEGDPRWIVEERADATNVNNWHWTERDASNWSTDKLKTLFLAVQVQNEEGKCEVTEVSKLDGEASINNRKGKLIFFYEWSVKLNWTGTSKSGVQYKGHVEIPNLSDENSVDEVEISVSLAKDEPDTNLVALMKEEGVKLLREAMGIYISTLKTEFTQGMILPTMNGESVDPVGQPALKTEERKAKPAPSKTQARPVGVKIPTCKITLKETFLTSPEELYRVFTTQELVQAFTHAPATLEADRGGKFHMVDGNVSGEFTDLVPEKHIVMKWRFKSWPEGHFATITLTFIDKNGETELCMEGRGIPAPEEERTRQGWQRYYFEGIKQTFGYGARLF

SEQ ID NO: 9496 - protein, 284 aa, Leptospira interrogans serovar lai str. 56601
MINRVLGLFLIIGILIFVLNFFSTSGQSEDQYQAEGPSRIQSVVILIREFLWGKASHSNAAASVTTAENPQEIFKRAYRANEKKAYLNAVEEYSKYLKLVPNDASAYYNRGLVHYTLKRYNDAVRDFEKAVEIDPSKTYAFLYKGYAYEMISDCKQAIEDFEKAISLGENKNAELYGHKARCENRSKNYDEGFQDALKALNIDKKNAYAFFELAYAQYGLKKYSDSVESYTKVLQFSPNDGVAFHNRGLALVFLNKIPSACKDFQRSSEIGYFDSKKKLDEYCK

SEQ ID NO: 9497 - protein, 178 aa, Glycine max
  unsure (1)..(178): unsure at all Xaa locations
ILYQFDDCIKDCERAVERGKILRSDYKMIARALTRKGTALAKMAKCITQXFXPAIENFQKALTENRNTDTLKKLNEAEKAKKELEQQXKHYTKAIKRNPKDAKXEGLKHDPNNEDLLDGIRRXKAMQDPEIQSILQDPVMRQVLIDFQENPRAAEEHAKNPMVMNKIQKLISAEIVQM

SEQ ID NO: 9498 - protein, 134 aa, Glycine max
  unsure (1)..(134): unsure at all Xaa locations
XVEPNRLEPTDSERVPRGTGADQYFMQETDKALETSRAGLQYDSNNQELLDGIRTCIQQINKARRGDLSPDELTARQAKAMQDPEIQNILQDPVMRQVLIDFQENPKAAQEPTKNPMVMNKIQKLVSAGIVQMK

SEQ ID NO: 9499 - protein, 148 aa, Glycine max
  unsure (1)..(148): unsure at all Xaa locations
XARAETGKHVXFCKKDRDKAEERGREPRTDKKTTARARTRKGNATVKSEKRRKEKEPANETNQKAHTEHRNPDTTKKPNEAEKAKKELEQQEQLDPKQADEEREKGNEPIKQQKQPEADKHHTKAIPTKPKDPRAQSSKATSPHKTGG

SEQ ID NO: 9500 - protein, 593 aa, Pisum sativum
MKSMASPSSQIWVILGLGLAGIYVLTRKLTQAVKEDFGAFLLKLKLLPPPPPAPPKAPHPLSSLNFAISDIFDIEGHVSTFGHPEWARTHEPASSTASAVSALVESGATCIGTTVVDELAYGISGENKHFGTPTNPAVPNRVPGGSSSGAAVAVAANFVDFSLGVDTSGGVRVPAGFCGILGFRPSHGAVSHVGIIPVSTSLDTVGWFAKDPDVLRRVGHILLQAPFVMQRNPRQIIIADDCFQHLNVPLDRTSQVVIKATEKLFGKQVLKHINFEDYISSKVSSLKACSIQKSNGVLKSSSLKLLANVMQSLQRHEFEHTHSEWMSIVKPDLHPAVSAQLHEKFEVSELEIENSKSVRSELRVAVNSLLKDEGVLVIPTVADPPPKLGGKEFLSHDYQSRALSLLSIASISGCCQVTVPLGFFDKNPVSVSLIARHGGDRFLLDTLKTMYTVLQEQADIAAPSKSSKSVVSKEQSAEISKEKGNQAYKDKQWQKAIGFYTEAIKLCGNNATYYSNRAQAYLELGSYLQAEEDCTTAISFDKKNVKAYFRRGTAREMLGYYKEAIDDFKYALVLEPTNKRAASSAERLRKLFQ

SEQ ID NO: 9501 - protein, 189 aa, Triticum aestivum
  unsure (1)..(189): unsure at all Xaa locations
XYRADIYLAILHADDSIKDXDTRLARXGKASSGLLTMASSALTKNGPALAKLAETYRDYDDTIETIHNALTEHRNPDTLNRLNDAERATNELEQQEDYDPKLADDXERETGTELLXASQYPLAEQLYTEPLRRHPQDPNVYTLRAACYSKLPAMPVGLKDAHKRIELDPTVLQRIHRXKGAIXQFFMTX

SEQ ID NO: 9502 - protein, 317 aa, Schizosaccharomyces pombe
MSSNKVTAAIIDYLKQAITTGSISEEEKESLEVAAQCIQDSFKIKPEEIKPKSGDRLVAAFEEYEKLHPVEEDSTAHVNKEEAEKLKLEGNNAIAAKDYQKALDLYTKAIEIDPTSPVYYSNRAAAYNQLGQFENAVEDALTCLSLDPHHARAFGRLGRAKLSLGDAAAAADAYKKGLDFDPNNEVLKRGLEAANKQLNQPSDSSATSGADQARTSAGAAPDLGSIFGGGMPDLGSLMNNPAVMNMARNLMQSGALNNIMNDPNIANMARNFQSGGGMPDLSSLANNPQLQNLARNFMNNNNNGNTDNNNQGNPPPQ

SEQ ID NO: 9503 - protein, 589 aa, Saccharomyces cerevisiae; identical to SEQ ID NO: 471

SEQ ID NO: 9504 - protein, 346 aa, Saccharomyces cerevisiae
MSASKEEIAALIVNYFSSIVEKKEISEDGADSLNVAMDCISEAFGFEREAVSGILGKSEFKGQHLADILNSASRVPESNKKDDAENVEINIPEDDAETKAKAEDLKMQGNKAMANKDYELAINKYTEAIKVLPTNAIYYANRAAAHSSLKEYDQAVKDAESAISIDPSYFRGYSRLGFAKYAQGKPEEALEAYKKVLDIEGDNATEAMKRDYESAKKKVEQSLNLEKTVPEQSRDADVDASQGASAGGLPDLGSLLGGGLGGLMNNPQLMQAAQKMMSNPGAMQNIQKMMQDPSIRQMAEGFASGGGTPNLSDLMNNPALRNMAGNLFGGAGAQSTDETPDNENKQ

SEQ ID NO: 9505 - protein, 2444 aa, Drosophila melanogaster
MQLKPTNEPECTPELPAANRALFLEKVRQSNAACQSGDFATAVLLYTDALQLDPGNHILYSNRSAALLKQGQFTAALQDATQARDLCPQWPKAYFRQGVALQCLGRYGEALAAFASGLAQEPSNKQLMAGLVEASLKSPLRAALEPTLQQLRTMQLQESPFVVSSVVGQELLQATQYSAAVTVLEAALRIGSCSLKLRGSVFSALSSAHWALNHQGAHKEALTAHRYQLVLAMKCKDTQAAAAALTSLGHVYTASGDYPNALASHKQCVQLFKQLGDRLQEAREIGNVGAVYLALGECEAALDCHSQHLRLARKLHDQVEEARAYSNLGSAHHQRRQFTQAAACHEQVLRIAQALGDRSMEAAAYAGLGHAARCAGDASASKRFHERQLAMALAARDKLGEGRACSNLGIVYQMLGSHDAALKLHQAHLGIARSLGDRTGMGKAYGNMARMAHMAGSYEAAVKYHKQELAINQAMNDRSAEAATHGNLAVAYQALGAHDAALTHYRAHLATARSLKDTAGEACALLNLGNCLSGRQEYEEAVPHYESYLMLAQELGDVAAEGKACHLLGYAHFSLGNYRAAVRYYDQDLALAKDAQHRPNMGRAYCNLGLAHLALGHTAAALECQQLFLAVAHATNQLPAKFRALGNIGDILIRTGSHEEAIKLYQRQLALARAAGDRSMEAAACGALGLAHRLMRRWDKALGHHTQELTLRQELGDLSGECRAHGHLGAVHMALCSWTNAVKCYQEQLERAQEQRDAAVEAQAHGNLGIARLNMAHYEAAIGCLEAQLGTLERVSLPSTQADRARALGHLGDCYAALGDYEEALKCHDRQLQLALGLTSHRDQERAYRGLGQARRALGQLPAALVCLEKRLVVAHELHSPEIKALAYGDLGHVHAALGNHAQALNCLEHQRELAQGLQDRALESDAMCALGQVQQRMGQHAQALELHRQDLEICTELSAPALQARALSNLGSVHESLGQQAEALKCYERQLELSTDRLAKAMACLALGRVHHQLEQHNQAVDYLRQGLASAQTTGKSEEEAKIRHQLGLALRSSGDAEGAHIQLETAAQLLESVRHEQRSPETRQALYDLQTTCYQLLQVLLVALNRNEDALVAAERCKARGGADAVSGEGSKVPLADSESIQETVDRGRTTVLYYSLAGDQLFTWLLEPHVGIVRFHAAKIDAHSLQLPLSLSEEEEEEEDLEMERELKLNRDQNQDQSEDQGTSNKANRLLERYMSLVRDNLGVNSQSLLHEGDGSGWRASTEQLLEDLPGAGGSGGGGFLRMVSRNQLLNSSNYSLSSLFSVGSVGGSVASLQGSTRSVGSRSSRRAPGLPVWRGPSCLHILYNLLLAPFDDLLPAGEADTNRQGRRELVLVLDSSLYLVPFAILRAAQEDGEYLCERCAILTAPSLQSMRSRPRIRRDRARPPKALVVGGPRIPSNLAELWGWAGAESPAALQEAAMVADMLQATALAGSNATKESVLAELPSAECVHFAANISWQLGAVVLSPGDVVTAEQQEQKEPHEPQMTDFTLAAGELRQLRLSARLVVLSSYHSVEPITGDGVAQLAGGWLLAGAGVVLISLWPVPETAAKILLRAFYSALLQGARAARALAEAMQTVQHTKHFAHPANWAGFLLVGSNIRLSNKVAMGHALCELLRTPERCRDALRVCLHLVEKSLQRIHRGQKNAMYTTQQSIENKAGPVAGWKDLLMAVGFRVEPAANGIPASVFFPQADPEERLAQCSASLQALLALTPATLQALGKLVHVNSAEYAGDIIAVVRNILAQFPGSNPATGSSSTKSDAIAETCFIEMPLSVRLWRVAGCHELLASVGFDLTEVGADQVILRTGKQANRRQCQFVLQALLALFDTREAPKNLGLDRDSDHSSSCESLAEPEMDVASIPPAASSTPSVNGGNKAPLPLHPRSAFISYVRRRGEPDGGRTDAIGGVGSGALDSSLANTTDSEHSLSDGYVTQPGFGLSNPRLGYASMRAPVRVSRPGGGGESDAAFTPSPPVTDPSLSLALAHQTRIRSLYSQTSSAAIVPPVATTLNRRPDSSSSASSTTDWEGSGHATVLRRGVSTAIPQQQPPLPPPRPPTFHNLSVGAGGRSKPKIKLGSAQSSLAARVNKEHALFMDRLSVRTELSAPGSGNAMTSGSAARKPLALPEEEDVSNVVFNPSSLYFSQTDSDLLNEPKQEETPPPTKSSTKSLQDSMMRHMNRELTPSISEMYHDRNVGLGLAPPLSKLLLSPNYEEQEVVSITEACPQSGANLKTLVDAVSELELSGSSSGATMPTVVGGGANEVEGTSGTSAEATCPICGEPADVICRCKAVTIQKKSILKPWLSNVPDSSLVQASELTTADILERRLEIHTATSSELRSGAPYSVDLSRRDEGDGRSVADSQCSSNYKRVLASASGGALSLAGIGKGSEAEAQSASSGATCSSARLV

SEQ ID NO: 9506 - protein, 305 aa, Danio rerio
MPQKRRTQSWTDLKQAGNECFKAGQYGEAVTLYSQAIQQLEKSGQKKTEDLGILYSNRAASYLKDGNCNECIKDCTASLDLVPFGFKALLRRAAAFEALERYRQAYVDYKTVLQIDWNIPAAHDGVNRMTKAFTEMDGPSWREKLPPIPTVPMSVKEKLGQAASPASSSQQNNVIDDKKKAPGPDAVKKGRTLKEEGNALVKKGEHKKAMEKYTQSLAQDPTEVTTYTNRALCYLALKMYKDAISDCEEALRLDSANIKALYRRAQAYKELKNKKSCIEDLNSVLKIDPNNTAVQKLLQEVQKMK

SEQ ID NO: 9507 - protein, 420 aa, Gorilla gorilla
MPLQVSDYSWQQTKTVVFLSLPLKGVCVRDTDVFCTENYLKVNFPPFLFEAFLYAPIDDESSKAKIGNDTIVFTLYKKEAAMWETLSVTGVDKEMMQRIREKSILQAQERAKEATEAKAAAKREDQKYALSVMMKIEEEERKKIEDMKENERIKATKELEAWKEYQRKAEEQKEIQREEKLCQKEKQIKEERKKLKYKSLTRNLASRNLAPKGRNSENIFTEKLKEDSIPAPRSVGSIKINFTPRVFPTALRESQVAEEEEWLHKQAEARRAMNTDIAELCDLKEEEKNPEWLKDKGNKLFATENYLAAINAYNLAIRLNNKMPLLYLNRAACHLKLKNLHKAIEDSSKALELLMPPVTDNANARMKAHVRRGTAFCQLELYVEGLQDYEAALKIDPSNKIVQIDAEKIRNVIQGTELKS

SEQ ID NO: 9508 - protein, 420 aa, Pan paniscus
MPLQVSDYSWQQTKTAVFLSLPLKGVCVRDTDVFCTENYLKVNFPPFLFEAFLYAPIDDESSKAKIGNDTIVFTLYKKEAAMWETLSVTGVDKEMMQRIREKSILQAQERAKEATEAKAAAKREDQKYALSVMMKIEEEERKKIEDMKENERIKATKELEAWKEYQRKAEEQKKIQREEKLCQKEKQIKEERKKIKYKSLTRNLASRNLAPKGRNSENIFTEKLKEDSIPAPRSVGSIKINFTPRVFPTALRESQVAEEEEWLHKQAEARRAMNTDIAELCDLKEEEKNPEWLKDKGNKLFATENYLAAINAYNLAIRLNNKMPLLYLNRAACHLKLKNLHKAIEDSSKALELLMPPVTDNANARMKAHVRRGTAFCQLELYVEGLQDYEAALKIDPSNKIVQIDAEKIRNVIQGTELKS

SEQ ID NO: 9509 - protein, 420 aa, Pan troglodytes
MPLQVSDYSWQQTKTAVFLSLPLKGVCVRDTDVFCMENYLKVNFPPFLFEAFLYAPIDDESSKAKIGNDTIVFTLYKKEAAMWETLSVTGVDKEMMQRIREKSILQAQERAKEATEAKAAAKREDQKYALSVMMKIEEEERKKIEDMKENERIKATKELEAWKEYQRKAEEQKKIQREEKLCQKEKQIKEERKKIKYKSLTRNLASRNLAPKGRNSENIFTEKLKEDSIPAPRSVGSIKINFTPRVFPTALRESQVAEEEEWLHKQAEARRAMNTDIAELCDLKEEEKNPEWLKDKGNKLFATENYLAAINAYNLAIRLNNKMPLLYLNRAACHLKLKNLHKAIEDSSKALELLMPPVTDNANARMKAHVRRGTAFCQLELYVEGLQDYEAALKIDPSNKIVQIDAEKIRNVIQGTELKS

SEQ ID NO: 9510 - protein, 420 aa, Pongo pygmaeus
MPLQVSDYSWQQTKTAVFLSLPLKGVCVRDTDVFCTENYLKVNFPPFLFEAFLYAPIDDESSKAKIGNDTIVFTLYKKEAAMWETLSVTGVDKETMQRIREKSILQAQERAKEATEAKAAAKREDQKYALSVMMKIEEEERKKIEDMKENERIKATKELEAWKEYQRKAEEHKKIQREEKLCQKEKQIKEERKKLKYKSLTRNSASRNLAPKGRNSENIFTEKLKEDSIPAPRSVGSIKINFTPRVFPTALRESQVAEEEEWLHKQAEARRAMNTDIAELCDLKEEEKNPEWLKDKGNKLFATENYLAAINAYNLAIRLNNKMPLLYLNRAACHLKLKNLHKAIEDSSKALELLMPPVTDNANARMKAHVRRGTAFCQLELYVEGLQDYEAALKIDPSNKIVQIDAEKIRNVIQGTELKS

SEQ ID NO: 9511 - protein, 228 aa, Ferroplasma acidarmanus
MAGNYVYNKDDEADDYNERGISYFNVTQYPDAVKEFTKAINLIKTDPDYYINRALAYYSMHMYNEAIKDCKSAIALSADRGDYHNTLGSIYDDMNRFDDALGEFDAAIKIEDDVPDYYYNRGNVYWRKGDKDLALEDYNKAVYLNSADPVFLYKRSQIYTEMEKYEDALGDLEDCIKLARNPEYYKDEANIYIKMGDKAKALQAVDNALKNSPENLSLKELKSRIEKM

SEQ ID NO: 9512 - protein, 371 aa, Mus musculus
MDPRKVSELRAFVKMCRQDPSVLHTEEMRFLREWVESMGGKVPPATHKAKSEENTKEEKRDKTTEENIKTEELSSEESDLEIDNEGVIEPDTDAPQEMGDENAEITEEMMDEANEKKGAAIEALNDGELQKAIDLFTDAIKLNPRLAILYAKRASVFVKLQKPNAAIRDCDRAIEINPDSAQPYKWRGKAHRLLGHWEEAAHDLALACKLDYDEDASAMLREVQPRAQKIAEHRRKYERKREEREIKERIERVKKAREEHERAQREEEARRQSGSQYGSFPGGFPGGMPGNFPGGMPGMGGAMPGMAGMAGMPGLNEILSDPEVLAAMQDPEVMVAFQDVAQNPSNMSKYQSNPKVMNLISKLSAKFGGQS

SEQ ID NO: 9513 - protein, 271 aa, Mus musculus
MDPHKVSELRAFVKMCRQDLSILHTEEMCFLREWETGDENVEITDEMMDEANEKKGAAIEALNDAELQKAIDLFTDAIKLNPHLAILGKAHRLLGHWEEAAHDLALVCKLDYDKDASAILKDVQPRAQTIAKHWRKYEQKREEQERKEQIERVKMAREEHERAKREEKKPEDNRISVWLFSSGFPVGMARMGRAMPGMAGMAGMAGMPGLSEILSNPEVLASMQNPEVMVAFQDVAQNPSNLSKYQSNPKVVNLISKLSAKFGGQSCQSPC

SEQ ID NO: 9514 - protein, 901 aa, Mus musculus
MTAKAKDCPSLWGFGTTKTFKIPIEHLDFKYIENCSDVKHLEKILYVLRSGEEGYYPELTEFCEKCLTNLAPKSRALRKDKPAETASSFSAEEWEKIDSDLKSWVSEIKREENTCHFHDPENHPGVEDPLPPVRGSTCCPHSGKETYSKSKTAKKRIPRDYAEWDKFDVEKECSKIDEDYKEKTVINNKAHLSKIETKIETAGLTEKEKSFLANREKGKGNEAFYSGDYEEAVMYYTRSLSALPTAIAYNNRAQAEIKLQRWSSALEDCEKALELDPGNVKALLRRATTYKHQNKLQEAVDDLRKVLQVEPDNDLAKKTLSEVERDLKNSEPVSELQTKGKRMVIEEVENSGDEGGKGSADEREDGGSDEAAMGNIQKKLMVRRSEGGRRSRRGRTPGPRAEQQGGLRETATASTGDSHYPEEPRAADNPSGLKRRGNELFRGGQFAEAAAQYSVAIAQLEPTGSANADELSILYSNRAACYLKEGNCRDCIQDCNRALELHPFSVKPLLRRAMAYETLEQYRNAYVDYKTVLQIDCGIQLASDSANRIARILTELDGSKWRERLPPIPAVPTSEPLRVWLPAAETPDQDPCPNNCMPSITDEKMFQALKEEGNQLVKDKNYKDAISKYNECLKINSKACAIYTNRALCYLKLGQFEEAKLDCEQALQIDGENVKASHRLALAQKGLENCRESGVDPSQVLLSPDSSEAARHLDTKNDTAPPSKGRERRRIQVQEVDGSSDEEPERPAEASATSAPARDGVEDGGSAEPAEKLDVSKPTNAYEFGQVLSTISARKDEEACAHLLAITAPKDLPLLLSNKLEGDTFLLLIQSLKSHLVAKDPSLVYEHLLYLSKAERFKTMLTLINKGQKEQMAQLFDGLSDTQSDGLTAEDVQALRRQYEL

SEQ ID NO: 9515 - protein, 901 aa, Mus musculus
MTAKAKDCPSLWGFGTTKTFKIPIEHLDFKYIENCSDVKHLEKILYVLRSGEEGYYPELTEFCEKCLTNLAPKSRALRKDKPAETASSFSAEEWEKIDSDLKSWVSEIKREENTRHFHDPENHPGVEDPLPPVRGSTCCPHSGKETYSKSKTAKKRIPRDYAEWDKFDVEKECSKIDEDYKEKTVINNKAHLSKIETKIETAGLTEKEKSFLANREKGKGNEAFYSGDYEEAVMYYTRSLSALPTAIAYNNRAQAEIKLQRWSSALEDCEKALELDPGNVKALLRRATTYKHQNKLQEAVDDLRKVLQVEPDNDLAKKTLSEVERDLKNSEPVSELQTKGKRMVIEEVENSGDEGGKGSADERADGGSDEAAMGNIQKKLMVRRSEGGRRSRRGRTPGPRAEQQGGLRETATASTGDSYYPEEPRAADNPSGLKRRGNELFRGGQFAEAAAQYSVAIAQLEPTGSANADELSILYSNRAACYLKEGNCRDCIQDCNRALELHPFSVKPLLRRAMAYETLEQYRNAYVDYKTVLQIDCGIQLASDSANRIARILTELDGSKWRERLPPIPAVPTSEPLRVWLPAAETPDQDPCPNNCMPSITDEKMFQALKEEGNQLVKDKNYKDAISKYNECLKINSKACAIYTNRALCYLKLGQFEEAKLDCDQALQIDGENVKASHRLALAQKGLENCRESGVDPSQVLLSPDSSEAARHLDTKNDTAPPSKGRERRRIQVQEVDGSSDEEPERPAEASATSAPARDGVEDGGSAEPAEKLDVSKPTNAYEFGQVLSTISARKDEEACAHLLAITAPKDLPLLLSNKLEGDTFLLLIQSLKSHLVAKDPSLVYEHLLYLSKAERFKTMLTLINKGQKEQMAQLFDGLSDTQSDGLTAEDVQALRRQYEL

SEQ ID NO: 9516 - protein, 368 aa, Rattus norvegicus
MDPRKVSELRAFVKMCRQDPSVLHTEEMRFLREWVESMGGKVPPATHKAKSEENTKEEKRDKTTEDNIKTEEPSSEESDLEIDNEGVIEADTDAPQEMGDENAEITEAMMDEANEKKGAAIDALNDGELQKAIDLFTDAIKLNPRLAILYAKRASVFVKLQKPNAAIRDCDRAIEINPDSAQPYKWRGKAHRLLGHWEEAARDLALACKLDYDEDASAMLREVQPRAQKIAEHRRKYERKREEREIKERIERVKKAREEHEKAQREEEARRQSGSQFGSFPGGFPGGMPGNFPGGMPGMGGAMPGMAGMPGLNEILSDPEVLAAMQDPEVMVAFQDVAQNPSNMSKYQNNPKVMNLISKLSAKFGGHS

SEQ ID NO: 9517 - protein, 379 aa, Rattus norvegicus
MKKRAPLLLGHIGLLLGLASVLRSHPPPEASSLSTVDPRKGSELQALVKMYRQDPSVLHTEEMCFLREWVESMGVKYHLELSQKKILRKKKRDEMTEDNIKTEEPSSEESDLEIDNEGVIEPDTAAPQEMGDENAEITEEMMDEANENKGAAIDALIDGELQEAIDLFTDTIKLNPRLAILYAKRASVFVKLQKPNAAIRDCDRAIEINPDSAQPYKWRGKAHRLLGCQCNAEREVQPRAQKIAEHQRKYEQKRGEREIKERIERVKKAREEHEKAQREEEARRQSGSQYGSFPGGFPGGMPGNFPGGIPGMGGAMPGMAGMPGLNEILSDPVVLAVMQDPEVLVAFQDVAQNPSNMSKHQNNPKVMNLITKLSAKFGG

SEQ ID NO: 9518 - protein, 150 aa, Rattus norvegicus
MLREVQPRAQKIAEHRRKYERKREEREIKERIERVKKAREEHEKAQREEEARRQSGSQFGSFPGGFPGGMPGNFSGGMPGMGGAMPGMAGMPGLNEILSDPEVLAAMQDPEVMVAFQDVAQNPSNMSNYQNNPKVMNLISKLSAKFGGHS

SEQ ID NO: 9519 - protein, 236 aa, Rattus norvegicus
MDPHKVCELLAFLKMCRQGPRVLHTEGVGGERGGDGWVKYHLLLIELSQKKILKKKKKQSDRGKHKTEESSSEESDLEVDKEVVTEQDTDAPQEMGDKNAEITEEMMNEANEKKGAAIDTLNDGELQKAIDLFTDAIKLNPRLATLCAKRASVFVKLQKPNAAIRDSDRAIEINPDSVQSYEWRGKAQSPRFSEDPEVMVAFQDVAQNPSNMSKYQSNPKVMKLISKLPDKFGGQL

SEQ ID NO: 9520 - protein, 175 aa, Rattus norvegicus
MDPRKVSELRAFVKMCRQDPSVLHTEEMRFLREWVESMGGKVPPATHKAKSEENTKEEKRDKMTEDNIKTEEPSSEESDLEIDNEGVIEADTDAPQEMGDENAQITEAMMDEANEKKGAAIDSLNDGELQKAIDLFTDAIKLNPRLAILYAREPVFSSNYRSQMLPSETVTELLK

SEQ ID NO: 9521 - protein, 325 aa, Rattus norvegicus
MSDQKAAIESSGKEEQGKAAAPSKAASDPKDDHLPREREQCKTKHQHKREGIVDSRKRTQLPPHCVEHGYSEVRQPGSRGRKDFLRSPDKKSRRTHSRPPPEASTMDPLKVSELRAFVKMHRQDPSVLHTKEMHFLREWVESMGEMGDENAEITEEMMDEANEKKGAAIDALNDGELQKANDLFTDTIRLNPRLAILYAKGASVFVKLQKPNAAIRDCDRAIEINPDSAQPYKRRGEAHRLLVMQDPEVLVAFQDVAQNPSNMSKHQNNPKVMNLISKSSAKFGDFFLPRRVHFTKRSEHPVPSTTPGITDTASTLIAKAKSKTD

SEQ ID NO: 9522 - protein, 209 aa, Rattus norvegicus
MKQNKTSEKAMNGTVGAPLEEKRDNRTEENKDRVAISEENNLEIDNEVVIELDTDDPQEMGDENAQITEGMINEANEKTVLSSMLLMMKAREEHERTQREEEEARRQFELQYGSFPVDFPWVMPGNFPGGMPTMGMAMPGMAGMPGLNEILNDPEVLTARKDPENMVNFQDVAQNPPNMSKYQSNPKVMNLISKLSAKFSGQSKCQSPC

SEQ ID NO: 9523 - protein, 844 aa, Rattus norvegicus
MTAKVKDHPPLWGFGTTKTFKIPIEHLDFKYIENCSDVKQLEKILCVLRSGEEGYYPELTEFCEKRLTGLAPRSRALRKDKPAATASSFSAEEWEKIDSDLKVWSVTFFSTAVPFCSILLRVGCQKSKERKTHDTSMTLKNIQEWKILCLLFVAPTAVLAAARFDVEKECSKIDEDYKEKTVINNKAHLSKIETKIDTAGLTEKEKNFLANREKGKGNEAFYSGDYEEAVMYYTRSLSALPTATAYNNRAQAEIKLQRWSSALEDCEKALELEPGNIKALLRRATTYKHQNKFLEAVDDLRKVLQAEPDNDLAKKTLSEVERELKNSEPASELQTKGKRMVIEEVENSGDEGGKGDEDDHEDDAAMGNIQKKLMVRSQGGRRSRRARTPMPGAEQQEGQPETGTASTSDNHDLEERRAADSPGDLKSRGNELFRGGQFAEAAVQYSGAIAQLEPTGSENADELSILYSNRAACYLKEGNCRGCIQDCDRALELQPFAVKPLLRRAMAYETLEQYRSAYVDYITVLKIDCRIQLASDSVNRITRILTELDGPKWRERLPPIPAVPASEPLRVWHPAAETPDQDPCPNSCTPTITDEKMFQALKEEGNQLVKDKNYKDAISKYNECLKINSKACAIYTNRQVLSDMALCYLKLGQFEEAKLDCDKALQIDSKNVKASYRLELAQKGLEVDDSSDEEPERPAEASAVEEGWSAERAGKIEVCKPRNAYEFGQVLSTISARKDEEACAQLLVFTAPQDLPVLLSNKLEGDMLLLIMQSLKSHLVAKDPSLVCKHLLYLSKAERFEMMLALTSKDQKEQMAQLFDDLSDAQADCLTAEDIQALRRQYVL

SEQ ID NO: 9524 - protein, 385 aa, Vitis labrusca
MDDAKISELKQFVNSVKSDPSILHNPSLSFFKSYLQSLGARIPAKPDKCGCGTSDHGEHVDAKKTNLCSEDDKFEDDIVESDIELDDTDVVEPDNDPPQKMGDLSIDVTEENQDAAQMLKSKAMEAISEGKLDEARDNLTEAIMLNPSSAILYATRASVYVKLKKPNAAIRDADAALKINPDSAKGYKIRGMARAMLGLWEEAATDLHVASRLDYDEEIALVLKKVEPNARKIEEHRRKYARLCKERELRKYGHQKQQQQAQPHDPEAAAALKDGQVMAIHSSSELETKLKAASKTSRLAILYFTATWCGPCRYISPVFTSLSGKYPKVVFLKVDIDGAQDVAVSWNVSSVPTFFFIKNGKEIDKVVGVDKSALETKIAQYAGQS

SEQ ID NO: 9525 - protein, 382 aa, Anopheles gambiae str. PEST
GKLKKGVFPYSNNMECPINPAELQKLKVFINLCQMTPQLLNLPQLEFLKSFIESLGGKVPEGQPDLAGMMGGQKAPTGDGGAAPGKPASAEPEPKPSTAAAPESDPESDLELDNEGCVEPDTEPDQPMGVADKEPTEEEFDQANDLRAQAAAAYSEQKYDEAVKLFTEAIQLNPKSALYYAKRGQAYLKLQKPNACIRDCNRALEINPDSATAYKFRGRANRLLGRWEEAAKDLRQACKLDFDEEADEWLKEVTPNAKKIEQHKQKQERRRQEREFRERQERVRMAQEANRKAAEEGAGADGAPNAGGMPFGGGGGFGTEELLNAFRDPEMSAAMSDIFSNPANISKYQNNPKIMSVLMKLYSQGQGGGFPGFPGFPGGAAN

SEQ ID NO: 9526 - protein, 293 aa, Giardia lamblia ATCC 50803
MAEDPSSCSSCSELPDLEEMDLGTNETEQLLIDYRALSLGDPLKSYDDDAFEEAMQLRARALNAYPEKLNTAILLLTDAINLCPCSALMLMSRAQVLFDIGELAAAIRDLKAATERSPTHVGSFRLLGKAYTYLCHYGEALAAYQKAQSLDYSEDVAELIKGLNPKVEAEKREEAEAKRLFEEQQNKASAKAQEKKEQSFADRVYAEVETAKSKGGPLPEAFRVLDNLKSEAQSLSASTAQKLLSNNTTAQAMEDPEFTRKLDEVAKDPAAAAVHMRDPKFAKAFMEIINCFK

SEQ ID NO: 9527 - protein, 246 aa, Oceanobacillus iheyensis HTE831
MDYYNNYPYHQQPQQDQRQNNNLPGDMLNQYFNNQHDDYNQQQFTGAHPESSEGYYEVDESEANNPHGYFNDPGRIFPGGPGGGFPGGFPGGGPDGGPGGGFPGGFPGGGPGGGPGGGFPGGFPGGGPDGGPGGGFPGGIFDGFPGGGFPGGGFPGGGGQGGQQAPTSAPPNFTPEKPAFQTFAVDPGGIRRCLFRFTYIWPERGRGFWYFPTFVGRNSIAGFRWSGFRWVYFGMDLDRIESFQCY

SEQ ID NO: 9528 - protein, 458 aa, Plasmodium falciparum 3D7
MIDEKKVEDLKQFVTLCQENPSILLKPELGFFKKFIESFGGKVSKDKEFFEKSASDESTEEKSDEEEVEEDENDKDDVEEEEEDDVQEDEDEEEDDDERCKDFMVEETIECPPLAPIVDEDLSDEVLEEISNLKIEAAELVQDNKFEEALEKYNKIIAFGKPSAMIYTKRASVLLSLKRPKACIRDCTEALNLNIDSANAYKVRAKAYRHLGKWECAHADIEQGQKIDYDEDLWEMQKLIEEKYKKIYEKRRFKINREEEKKRKKREKELKKRLAARKAAEKAYKANNKRENYDSDSSDSSYSEPDFSGDFPGGMPGGMPGGMPGGMPGGFPGGFPGGMPGGMPGGFPGGMPGGMPGGMPGGMPGGMPGGMPSGMPGGMPSGMPGGMPGGMPGGMPDLNSPEMKELFNNPQFFQMMQNMMSNPQLISKYANDPKYKNLFENLKNSDFGNMMGKENGKN

SEQ ID NO: 9529 - protein, 441 aa, Arabidopsis thaliana
MDSTKLSELKVFIDQCKSDPSLLTTPSLSFFRDYLESLGAKIPTGVHEEDKDTKPRSFVVEESDDDMDETEEVKPKVEEEEEEDEIVESDVELEGDTVEPDNDPPQKMGDSSVEVTDENREAAQEAKGKAMEALSEGNFDEAIEHLTRAITLNPTSAIMYGNRASVYIKLKKPNAAIRDANAALEINPDSAKGYKSRGMARAMLGEWAEAAKDLHLASTIDYDEEISAVLKKVEPNAHKLEEHRRKYDRLRKEREDKKAERDRLRRRAEAQAAYDKAKKEEQSSSSRPSGGGFPGGMPGGFPGGMPGGFPGGMGGMPGGFPGGMGGMGGMPGGFPGGMGGGMPAGMGGGMPGMGGGMPAGMGGGGMPGAGGGMPGGGGMPGGMDFSKILNDPELMTAFSDPEVMAALQDVMKNPANLAKHQANPKVAPVIAKMMGKFAGPQ

SEQ ID NO: 9530 - protein, 627 aa, Arabidopsis thaliana
MRRTWVLAEESSVAIAPLLAEPQSTMFPEMTPECATVMPDLLEKCFATGSVTPTEDCCTDLKSATSTQVTCLCDNYIANPAVSNITGPYSKAITTKCGVFDKYSCDGTSKVISNKNGAFMVINGFWFCVVKEEKKRKEEAAVAMGVLTLLGLINGLIVAHGKTRQQNKPVCKLILFQFQHFGFCSIRFSANKKARSRSKTGDAYPFRNEKVLEQKPYSLPFVPQILEIETRLKTKKTRLLTLRPKPTLFLFLSLSRRSEADFSQKDGFNEAYLGAKIPTGVHEEDKDTKPRSFVVEESDDDMDETEEVKPKVEEEEEEDEIVESDVELEGDTVEPDNDPPQKMGDSSVEVTDENREAAQEAKGKAMEALSEGNFDEAIEHLTRAITLNPTSAIMYGNRASVYIKLKKPNAAIRDANAALEINPDSAKGYKSRGMARAMLGEWAEAAKDLHLASTIDYDEEISAVLKKVEPNAHKLEEHRRKYDRLRKEREDKKAERDRLRRRAEAQAAYDKAKKEEQSSSSRPSGGGFPGGMGGGMPGMGGGMPAGMGGGGMPGAGGGMPGGGGMPGGMDFSKILNDPELMTAFSDPEVMAALQDVMKNPANLAKHQANPKVAPVIAKMMGKFAGPQ

SEQ ID NO: 9531 - protein, 380 aa, Arabidopsis thaliana
MVDAIQVAELRRFVEQLKLNPSILHDPSLVFFKEYLRSLGAQVPKIEKTERDYEDKAETKPSFSPKHDDDDDDIMESDVELDNSDVVEPDNEPPQPMGDPTAEVTDENRDDAQSEKSKAMEAISDGRFDEAIEHLTKAVMLNPTSAILYATRASVFLKVKKPNAAIRDANVALQFNSDSAKGYKSRGMAKAMLGQWEEAAADLHVASKLDYDEEIGTMLKKVEPNAKRIEEHRRKYQRLRKEKELQRAERERRKQQEAQEREAQAALNDGEVISIHSTSELEAKTKAAKKASRLLILYFTATWCGPCRYMSPLYSNLATQHSRFVFLKVDIDKANDVAASWNISSVPTFCFIRDGKEVDKVVGADKGSLEQKIAQHSSSK

SEQ ID NO: 9532 - protein, 380 aa, Arabidopsis thaliana
MVDAIQVAELRRFVEQLKLNPSILHDPSLVFFKEYLRSLGAQVPKIEKTERDYEDKAETKPSFSPKHDDDDDDIMESDVELDNSDVVEPDNEPPQPMGDPTAEVTDENRDDAQSEKSKAMEAISDGRFDEAIEHLTKAVMLNPTSAILYATRASVFLKVKKPNAAIRDANVALQFNSDSAKGYKSRGMAKAMLGQWEEAAADLHVASKLDYDEEIGTMLKKVEPNAKRIEEHRRKYQRLRKEKELQRAERERRKQQEAQEREAQAALNDGEVISIHSTSELEAKTKAAKKASRLLILYFTATWCGPCRYMSPLYSNLATQHSRVVFLKVDIDKANDVAASWNISSVPTFCFIRDGKEVDKVVGADKGSLEQKIAQHSSSK

SEQ ID NO: 9533 - protein, 281 aa, Arabidopsis thaliana
MVDAIQVAELRRFVEQLKLNPSILHDPSLVFFKEYLRSFFVIDARSRLIVYSLGAQVPKIEKTERDYEDKAETKPSFSPKHDDDDDDIMESDVELDNSDVVEPDNEPPQPMGDPTAEVTDENRDDAQSEKSKAMEAISDGRFDEAIEHLTKAVMLNPTSAILYATRASVFLKVKKPNAAIRDANVALQFNSDSAKGYKSRGMAKAMLGQWEEAAADLHVASKLDYDEEIGTMLKKVEPNAKRIEEHRRKYQRLRKEKELQRAERERRKQQEAQVRPTHTHN

SEQ ID NO: 9534 - protein, 219 aa, Arabidopsis thaliana
MESDVELDNSDVVEPDNEPPQPMGDPTAEVTDENRDDAQSEKSKAMEAISDGRFDEAIEHLTKAVMLNPTSAILYATRASVFLKVKKPNAAIRDANVALQFNSDSAKGYKSRGMAKAMLGQWEEAAADLHVASKLDYDEEIGTMLKKVEPNAKRIEEHRRKYQRLRKEKELQRAERERRKQQEAQKSHRPDYLLPEREAQAALNDGKHFIHFFQRFSTS

SEQ ID NO: 9535 - protein, 402 aa, Glycine max
  unsure (1)..(402): unsure at all Xaa locations
MDASKLNQLKHFIEQCKSNPSLLSDPSLSFFRDYLESLGAKLPESAYSESTGVESDEDIEDVTEEQEKVEEEEEDDEIIESDVELEGETCQSDDDPPQKMGDPSVEVTEENRDASQMAKIKAMDAISEGKLEEAIENLTEAILLNPTSAIMYGTRASVYIKMKKPNAAIRDANAALEINPDSAKGYKSRGVARAMLGQWEEAAKDLHVASKLDYDEEINAVLKKVEPNAHKIEEHRRKYERLHKEREDKKKERERQRRRAEAQAAYEKAKKQEQSSSSRNPGGMPGGFPGGMPGGFPGAGGMPGGFPGAGGMPGGFPGXXGGMPGGGFPGAGGMPGGXXPGNIDFSKILSDPELMAAFSDPEVMAALQDVMKNPANFAKHQSNPKVGPVIAKMMTKLGGGPK

SEQ ID NO: 9536 - protein, 408 aa, Glycine max
  unsure (1)..(408): unsure at all Xaa locations
MDASKLNQLKHFIEQCKSNPSLLADPSLSFFRDYLQSLGAKLPESAYSESTGVERDEDIEDLTEEHEKVEEEEEEEEEDDVIIESDVELEGETCEPDDDPPQKMGDPSVEVTEENRDASQMAKIKAMDAISEGKLEEAIENLTEAISLNPTSAIMYGTRASVYIKMKKPNAAIRDANAALEINPDSAKGYKSRGIARAMLGQWEEAAKDLHVASKLDYDEEINAVLKKVEPNAHKIEEHRRKYERLHKEREDKKKERERQRRRAEAQAAYEKAKKQEQSSSSRNPGGMPGGFPGGFPGAGGMPGGFPRXPGGMPGGLPQGLXGMPGGFPRGXGGMPGGFPGAGGMPGNIDFSKILSDPELMASFGDPEIMAALQDVMKNPANFAKHQSNPKVAPVIAKMMTKLGGGPK

SEQ ID NO: 9537 - protein, 375 aa, Glycine max
  unsure (1)..(375): unsure at all Xaa locations
MEEGKLRELKQFIEICKSNPSLLHNPSLSFFKTYLLSLGARIPPQPXXTEPGDFDDKSDPPLSAQNDIVESDIELDNADVVEPDNDPPQKMGDPSAEITEEQRDAAQLAKSKAVDAMSQGNLDEALAQLTEAILLNPQSAILYATRASIYMKLKKPNAAIRDADTALKINPDSAKGYKIRGMSRAMLGLWEEAASDLHVASKLDYDEEISMALKKVEPNALKIEEHRRKYERLRKQKQLKTEAPIKKEQETEAQVQAALSALKDGQVMGIHSSGELEKKLSAASKTSRLAILYFTATWCGPCRFISPIYTSLAEKYPKVVFLKVDIDEARDVAAGWNISSVPTFFFVKNGKEVDSVVGADKSTLESKIAQHAGSL

SEQ ID NO: 9538 - protein, 375 aa, Glycine max; identical to SEQ ID NO: 9537
  unsure (1)..(375): unsure at all Xaa locations

SEQ ID NO: 9539 - protein, 187 aa, Glycine max
  unsure (1)..(187): unsure at all Xaa locations
XGACGSSCSERRSXTLNSVEGGVQRGEAKLLTENWEGAVEDLRSAAQKSQDMNIREAVMRAEKALKISKRKDYYKILGIKKALQWHPDKNVDKREEAEAKFREIAAAYEVLSDEDKRVRYDRGEDLEEMGTGGGGGGGGFNPFGGGGYTYTFEGGFPGGGFGGGFPGGGFGGGFPGGGGGGGFEFHF

SEQ ID NO: 9540 - protein, 272 aa, Glycine max
  unsure (1)..(272): unsure at all Xaa locations
LCYWSEFPHPIQLVLTNMETEKSNVSKAEEFKLLANEAFNARKFSQAIDLYTQAIELNSQNAVYFSNRAFAHLRLEEYGSAIQDATKAIEIDPKYSKGYYRRGAAHLGLGKFKEALKDFQQVKKMCPNDPDATKKLKECEKAVMKLKFEEAIAAPESERRSIAESIDFRTIDVEPQYSGARIEGDAVTLDFVKKMIEDFKNQKFLHKRYAFQIVLQTREMLQALPSLVDIHVPDGKHFTVCGDVHGQYYDLLNIFELNGLPSEENPYLFNGX

SEQ ID NO: 9541 - protein, 201 aa, Glycine max
GKDALDSCRRPLKIDEELVEALVQRGEAKLLTEDWEGAVEDLRSAAQKSQDMNIREAVMRAEKALKISKRKDYYKILGISKTASAADIKRAYKKLALQWHPDKNVDKREEAEAKFREIAAAYEVLSDEDKRVRYDRGEDLEEMGTGGGGGGGGFNPFGGGGYTYTFEGGFPGGGFGGGFPGGGFGGGFPGGGGGGGFEFHF

SEQ ID NO: 9542 - protein, 386 aa, Nicotiana tabacum
MDNEKIQDLKQFVELCKTNPSILQNPSLSFFKNVLESLGARVPPSVKSEKGGGEHSDELDEDIIESDVELDNTDTVEPDNDPPQKMGDYSGEVTEENRDAAQASKAKALDAISEGKLNEAINHLTEAILLNPNSAILYATRGSVFNKLKKPNAAIRDADAALKINSDSAKAYKVRGMARAMLGLWKEAASDLHVASTIDFDEEIAEILKKVEPNARKIEEHCRKYERLRQEKKQRKIERERQRRQAEAKAAYEKDEKKEQQSQHKASDPDSASVLNGGKIIGIHSVSELETKLNVASRASRLAILYFTATWCGPCRFISPVFTSLAEKYPKAAFLKADIDEARDAASRWNVSSVPAFFFIKNGKEVDRVVGADKNLLEKKIVQYAG

SEQ ID NO: 9543 - protein, 261 aa, Oryza sativa
  unsure (1)..(261): unsure at all Xaa locations
MDASRVGELRTFVEACKKDPSLLADPNLAFFRDYLESLGAHLPAGLHQEPKPSSMDDIDDEYDDDDDDDLNMRDATPEPDELDQDIVESDLELEGDIVESDHQDPPQKMGDPSIDVTEENRDASQEAKSKAMEAMSEGKLEEAIDHLTKAILLNPLSAIMYGTRASVFIKMKKPVAAIRDANAALEINPDSAKGYKTRGMAYAMLGKWEEAAHDLHTASNMDYDDEINAVLKKXVEPNAHKIMEHRRKYERLRKEREEKRX

SEQ ID NO: 9544 - protein, 157 aa, Oryza sativa
  unsure (1)..(157): unsure at all Xaa locations
XRLRKEREEKRAERDRFHRRAEAQAAYDKAKRKEQXXSSRSSGGASPRGGFPGGMPGGGFPGGMPGGGFPGGMPGGGFPGGMPGGFPGGAMPGGVPGNVDMSKILNDPDLMAAFGDPEVMAALQDVMNNPASFARHQANPKVGPIIAKMMAKFNGSQ

SEQ ID NO: 9545 - protein, 145 aa, Oryza sativa
  unsure (1)..(145): unsure at all Xaa locations
XRRRQEDRSAVDMATAGASSWEDEIMESDIELEGEAVEPDNDPPQKMGDGAVEVSYEKRDQAQLCKNKGVDAFSEGKLDEAIEHLTEAIVLNPTSAIAYATRAVIFVKSKKPNAAIRDADAALKINPDSAKGYKSRGMAKAMLGX

SEQ ID NO: 9546 - protein, 170 aa, Oryza sativa
  unsure (1)..(170): unsure at all Xaa locations
WTRGAATPASPRLRPSPRRPLIVALQLAGEGKAEQRRRQEDRSKASFEDEIMESDIELEGEAVEPDNDPPQKMGDPSVEVSDEKRDQAQLCKNKGVDAFSEXXAALKINPDSAKGYKSRGMAKAMLGKWEEAAQDLRMAAKLDYDEEIGAELKRGEPMYSKXEEHKEKYX

SEQ ID NO: 9547 - protein, 296 aa, Triticum aestivum
  unsure (1)..(296): unsure at all Xaa locations
XSAKLEINPTKGNKSWSSTAVAAEDEGEGEDDQDMRDPTPEPDELDEEIVESDLELDNDGVVHPDHDDAPQKMGDSSVEVTEESRDASQEAKGQAMEAMSEGKLEEAVVHLTKAILLNPTSAIMYGTRASVFIKMKKPAAAIRDANAALEINPDSAKGYKTRGMANAMLGKWEEAARDLHAASNIDYDDEINAVLKKVEPNAHKIVEHRRKYDRLRKERAEKKAERDRLRRRAEAQAAYEKAKRKEQSSSRSSGGMPGGMPGGFPGMGGGFPGGMGGGGPPGGGGGMPAGMGGGLX

SEQ ID NO: 9548 - protein, 342 aa, Triticum aestivum
  unsure (1)..(342): unsure at all Xaa locations
PFPQPFATDEEEEGEDDQDMRDPTPEPDELDEDIVESDLELDNDGVVHPDHDDAPQKMGDSSVDVTEQSREATQEAKGEAMAPKPEGELEESVVHLSKAILLSPTWAMMYGTSATVFIKMKKPAAPRRYGRPLLEVEYVMPEFLFTCWIVSSVREPGGGAALYRYAASILDXDDEFHAVLIRVEPNAHKIVEHRRKYDRLRKERAEKKAERDRLRRRAEAQAAYEKAKRKEQSSSRSXMGGGMPAGMGGGMPAGMGGGMPAGMGGGMPGMGGGMPGAGGAPGNVDMGDILNDPDLMAAFGDPEVMAALQDVMSNPANLAKHQANPKVGPIIAKMMAKMNGNR

SEQ ID NO: 9549 - protein, 193 aa, Triticum aestivum
  unsure (1)..(193): unsure at all Xaa locations
MDPSKLGELRSFVEACNKDPALLADPALAFFRDYLASLGATLPAAAAGSSAKPAPKARSMDDIDDDDEGDEEGEEDDQDMRDPTPEPGELDEEIVESDLELDDDGVDPDHDDAPQKMGDSSVEVTEESRDASQEAKGQAMEAMSEGKLEEAVEHLTKAILLNPTSAIMYGTRASVFIKMKKPAAAIRDANAAX

SEQ ID NO: 9550 - protein, 345 aa, Triticum aestivum
ILALARLLPGTASTSEDLLRAAAQEGMAKAGENSFEDEIMESDIELGGEVVEPDNDPLQKMGDPSVEVSEEMRDKAQLYKKKGVDALSEGKLDEAVEHLTEAILLNPTSAILYAARAGVFVKMKKPNAAILDAEAALQINPDSAKGYKSRGMAKAMLGKWEDAAHDLHLAAKLDFDEEISSELKKVEPNVHKIEEHKKKYERLRKERDMKKADLERQRRHAEEVSAASAVLKPGDVITIHSSNQLEEIFTAASKLSKLVILYFTATWCGPCRFMGPVYKSLSEQHRNVVFLKLDIDQQGNIAHRWNVSSVPTFSCVINGKEIDKVVGADKTGLERKIAEHGSLKH

SEQ ID NO: 9551 - protein, 329 aa, Triticum aestivum
  unsure (1)..(329): unsure at all Xaa locations
XRDWFFMLDAVSPSKNSFEDEIMESDIELXXGEVVEPDNDPLQKMGDPSVEVSEEMRDKAQLYKKKGVDALSEGKLDEAVEHLTEAILLNPTSAILYAARAGVFVKMKKPNAAILDAEAALQINPDSAKGYKSRGMAKAMLGKWEDAAHDLHLAAKLDFDEEISSELKKVEPNVHKIEEHKKKYERLRKERDMKKADLERQRRHAEEVSAASAVLKPGDVITIHSSNQLEEIFTAASKLSKLVILYFTATWCGPCRFMGPVYKSLSEQHRNVVFLKLDIDQQGNIAHRWNVSSVPTFSCVINGKEIDKVVGADKTGLERKIAQHGSRKH

SEQ ID NO: 9552 - protein, 214 aa, Triticum aestivum
  unsure (1)..(214): unsure at all Xaa locations
XAALKKVEPNAHKIVERPRKYDRLRKERAEKKAERDRLRRRAEAQAAYEKAKRKEQSSSRSSRGMPGGMPGGFPSGGMGGMPGGFPGGMPGGFPGGMGGMPGGMGGAFPGGMGGRLPAXGMGGGMPAGMGGGMPGMGGGRGMGGGMPGAGGAPGNVDMGDILNDPDLMAAFGDPEVMAALQDVMSNPANLAKHQANPKVGPIIAKMMAKMNGNR

SEQ ID NO: 9553 - protein, 253 aa, Triticum aestivum
  unsure (1)..(253): unsure at all Xaa locations
RKAVTARTYPAAPKKRPAALSAARASLLSVVLPSXGTAAVRGSNEQHRPSRPRTCSVQRXQEGMAKAAENSFEDEIMESDIELEGEVVEPDNDPLQKMGDPSVEVSEEMRDKAQLYKKKGVDALSEGKLDEAVEHLTEAILLNPTSAILYAARAGVFVKMKKPNAAILDAEAALQINPDSAKGYKSRGMAKAMLGKWEDAAHDLHLAAKLDFDEEISSELKKVEPNGCELSTHLINWKKYLQPRQNYKWQRDX

SEQ ID NO: 9554 - protein, 152 aa, Triticum aestivum
MDPSKLGELRSFVEACNKDPALLADPALAFFRDYLASLGATLPAAAAKPAPKARSMDDIDDDDDGEEDDQDMRDPTPEPGELDEEIVESDLELDDDGVDPDHDDAPQKMGDSSVEVTEESRDASQEAKGQAMEAMSEGKLEEAIEHLTKAIL

SEQ ID NO: 9555 - protein, 246 aa, Triticum aestivum
  unsure (1)..(246): unsure at all Xaa locations
AGDRETDPTAPTKNGRRLGRVYLGRSTKSKLGHGGRQGSNEEHRPSRPRGPXLRAAASAPRQDKTSEGMAKVGENSFEDEIMESDIELEGEVVEPDNDPLQKMGDPSVEVSEEMRDKAQLYKKKGVDALSEGKLDEAVEHLTEAILLNPTSAILYAARAGVFVKMKKPNAAILDAEAALQINPDSAKGYKSRGMAKAMLGKWEDAAHDLHLAAKLDFDEEISSELKKVGPYPLTSEKFENKYXGSI

SEQ ID NO: 9556 - protein, 318 aa, Triticum aestivum
  unsure (1)..(318): unsure at all Xaa locations
PRDRPDSSDXERPAALRAARASPAVLPRPSXRARRPSGLQRATPALSTSEDLLRAAAPAPRQDKKASEGMAKAGENSFEDEIMESDPXLEGEVVEPDNDPLQKMGDPSVEVSEEMRDKAQLYKKKGVDALSEGKLDEAVDTXTEAILLNPTSAILYAARAGVFVKMKKPNAAILDAEAALQINPDSAKGYKSRGMAKAMLGKWEDAAHDLHLAAKLDFDEEISSELKKVXVITIHSSNQLEEIFTAASKLSKLVILYFTATWCGPCRFMGPVYKSLSEQHRNVVFLKLDIDQQGNIAHRWNVSSVPTFXCVINGKEIX

SEQ ID NO: 9557 - protein, 98 aa, Triticum aestivum
  unsure (1)..(98): unsure at all Xaa locations
PXXGPIACGAPGMGAGMPGMAGARAMGAGMPGAGGAPGNVDMGDILNDPDLMAAFGDPEVMAALQDVMSNPANLAKHQANPKVGPIIAKMMAKMNGNR

SEQ ID NO: 9558 - protein, 86 aa, Triticum aestivum
  unsure (1)..(86): unsure at all Xaa locations
XSVFVNXITALRIVEPNAHLGGGHPRRDDTLSIERSAKKADRDRLRPRAEAQAVDEKANTNEQSSSRSLRGMPAGMPGGLPFPRGX

SEQ ID NO: 9559 - protein, 399 aa, Zea mays
MDASKLRELRDFVEACKKNPSLLADPNLSFFRDYLQSLGAKIPAAAPSFESPKRSSMDDIDDDGDDDDDLDMRDPTPERDELDEEIVESDLELEGEIVQSDHDDPPQKMGNPSVEVTEENRDASQEAKGKAMEAISEGKLEDAIEHLTNAIVLNPLSAIMYGTRASVFIKMKKPAAAIRDANAALEINPDSAKGYKTRGMAYAMLGKWEEAAHDLHTASNMDYDEEINAVLKKVEPNAHKIVEHRRKYERLRKEREEKRAQRDRLRQRAEAQAAYDKAKRKEQSSSRSSGGASPRGFPGGMPGGGFPRGMPGGCFPGGGMPGGFPGGGMPGGFPGGVPGNVDMSKILNDPDLMAAFSDPEVMAALQDVMNNPANFAKHQANPKVGPIIAKMMAKFNGSQ

SEQ ID NO: 9560 - protein, 370 aa, Zea mays
PTRPRDFPSPSPLSTPSLGAKIPAAAPSFESPKRSSMDDIDDDGDDDDDLDMRDPTPERDELDEEIVESDLELEGEIVQSDHDDPPQKMGNPSVEVTEENRDASQEAKGKAMEAISEGKLEDAIEHLTNAIVLNPLSAIMYGTRASVFIKMKKPAAAIRDANAALEINPDSAKGYKTRGMAYAMLGKWEEAAHDLHTASNMDYDEEINAVLKKVEPNAHKIVEHRRKYERLRKEREEKRAQRDRLRQRAEAQAAYDKAKRKEQSSSRSSGGASPRGFPGGMPGGGFPRGMPGGGFPGGGMPGGFPGGVPGNVDMSKILNDPDLMAAFSDPEVMAALQDVMNNPANFAKHQANPKVGPIIAKMMAKFNGSQ

SEQ ID NO: 9561 - protein, 258 aa, Zea mays
  unsure (1)..(258): unsure at all Xaa locations
MDPSKLGELRSFVEACKKDPALLADPALAFFRDYLTSLGATLPASAAAAGKPAPKARSMDDIDDDDDEEEEEDDQDMRDPTPEPDELDEEIVESDLELDNDGVDPDHDDAPQKMGDSSVEVTEESRDASQEAKGQAMEAMSEGKLEEAVEHLTKAILLNPTSAIMYGTRASVFIKMKKPAAAIRDANAALEINPDSAKGYKTRGMANAMLGKXEEAARDLHAASNIDYDDEINAVXQKVEPNAXQIVEHRRKYDRAEX

SEQ ID NO: 9562 - protein, 192 aa, Zea mays
  unsure (1)..(192): unsure at all Xaa locations
XPRVRPRVRPRVRASNMDYDQEINAVLKKVEPNAHKIVEHPRKYERLRKEREEKRAQRDRLRQRAEAQAAYDKAKRKEPSSSRSSGGGGFPXGGMPGGWFPLEGCPVEVSPGGGMPGAGGGMPGGFPGGVPGNVDMSKILNDPDLMAAFSDPEVMAAFQDVMNNPANFAKPQANPKVGPIIAKMMAKFNGSQ

SEQ ID NO: 9563 - protein, 175 aa, Zea mays
  unsure (1)..(175): unsure at all Xaa locations
XRCYVTHSXTMPRGILRHVSFCPQINPDSAKGYKTRGMAYAMLGKWEEAAHDLHTASNMDYDEEINAVLKKVEPNAHKIVEHRRKYERLRKEREEKRAQFDRLRQRAEAQAAYDKGQEEGAMVNWLIRSXDFPKGFLEGMPGGGFPRGMPGGGFPGGGMPGGFPGGGMPGGFPGX

SEQ ID NO: 9564 - protein, 113 aa, Zea mays
  unsure (1)..(113): unsure at all Xaa locations
MDASKLRELRDFVEACKKNPSLLADPNLSFFRDYLQSLGAKIPAXAPSFESPKPPRRSSMDDIDDDGDDDDDLDMRDPTPERDELDEEIVESDLELEGDVQSDHDDPPQKMGN

SEQ ID NO: 9565 - protein, 111 aa, Zea mays
  unsure (1)..(111): unsure at all Xaa locations
INAVLKKVXEPNAHKIMEHRMKYYRLRKEMDENISHRDPLRQRSHAQAAYDKANTNEQSSSRSSGGGFPGRMPPGGFPRRIPSXGFPWGXXMPXGFPGGVPGNVHMSKMLX

SEQ ID NO: 9566 - protein, 96 aa, Zea mays
  unsure (1)..(96): unsure at all Xaa locations
DVKHPTPERDELDDLRFEFDEHHARKIVQSDHDDPPQRIGKATFVVTEENRDASQEAKGKAMEAISEGKLEDAIEHLTNAIVLNPLSAIMYGTRGX

SEQ ID NO: 9567 - protein, 151 aa, Zea mays
  unsure (1)..(151): unsure at all Xaa locations
NGKKRKHREREREAYATVMDAXEVADLKLLVDQCKSNPSIIHTPSLSFFKSYLLSLGAQIPTDPRTDRGGVKMEEPEQHSDDKKPYFSNEEDDDIIESDVELDNNGVVEPDNNPPQKMGDSSVEVTEEKRDAAQSEKLKAMDAISGGKLDX

SEQ ID NO: 9568 - protein, 116 aa, Zea mays
MGLKNMDASKIRELSNLYESGYKSPSFLADHNLSLSAGSPPELGEPKFSTSTPYLKRTSRSIQDDMDDFSDDYDNLDMKNPTPERDKLDEYIAESDLEPQREIDQSDHGNPSQKMG

SEQ ID NO: 9569 - protein, 80 aa, Zea mays
  unsure (1)..(80): unsure at all Xaa locations
XGGMLVGSGGXLPGNVYISKILNDPGLMAAFSDPEVMWALQNVMNHPGVIGKPRTNHKGAPIIGKMMAKFSGXTVRVMSQ

SEQ ID NO: 9570 - protein, 71 aa, Zea mays
  unsure (1)..(71): unsure at all Xaa locations
XYGTRASVFIKMKKPAAAIRAFXEWIQHYCIGKVFNPLSAIMYGTRASVFIQMKKPAAAIRDANAALEINP

SEQ ID NO: 9571 - protein, 253 aa, Zea mays
  unsure (1)..(253): unsure at all Xaa locations
RTITIMDATANSDVQRAEEFKLKANDAFKANKFSQAIELYSQAIELNSSNAVYWANRAFAHTKLEEYGSAVQDATKAIEIDSRYSKGYYRRGAAYLAMGKFKEALKDFQQVKKICPNDPDATRKLKECEKAVQKIRFEEAISAGDDERRSVADSIDYHIIEVEPHYAGPRIDGEEITIEFVKAMLDEFKKQKCIHKRYAYQIVLKTLDLLRSMPSLVDVGXVPNGGHFTVCGDVHGQYFDLLNIFDPHXLPSX

SEQ ID NO: 9572 - protein, 476 aa, Schizosaccharomyces pombe
MTEVETTHMNAGTESQQEPAELAEKQKAIGNAFYKEKKYAEAIKAYTEAIDLGSDSALAIYYSNRAATYMQIGEFELALCDAKQSDRIKPDVPKTQSRIRQAYEGLSILNEAEVYLKNKQAGLALNALDRLQRRIDSTTQPPMSWMYLKAQVYIFQNDMDRAQKIAHDVLRLNPKNVEALVLRGKVMYYSGENAKAITHFQEALKLDPDCTTAKTLFKQVRKLENTKNQGNDLFRQGNYQDAYEKYSEALQIDPDNKETVAKLYMNRATVLLRLKRPEEALSDSDNALAIDSSYLKGLKVRAKAHEALEKWEEAVRDVQSAIELDASDANLRQELRRLQLELKKSKRKDHYKILGVSKEATDIEIKKAYRKLALVYHPDKNAGNLEAEARFKEVGEAYTILSDPESRRRFDSGVDLEPGMEGGAGMDPFDILRAYQAGGSFPGGGFPGGGFPGGSYNSQGFGMGGGFPGFTSFQFS

SEQ ID NO: 9573 - protein, 784 aa, Neurospora crassa
MRFFSKKSSRSSTSTDRVDADTRAGRYESTQPSGTSGPRSPYSHAKRSHSQSPPPPPPPPKSLRPPTQTQQHRLSPTKPVFSSPSGTRSPSAKKTHRSDSQPRRDHSPPTPPPHYNLPPTPPSGSTSRSASARDPTKHSSSSSSHQPRSSTSSRSSFGRHPVDPAAASDSRSRSTSFRRKKVDTDIHPLNLPPEQRKRFSDLSGFSVRNSMEFDNKENGAASAASPPPPPHKQQPQDQQAQQKPTPPAHGSTFTVPMSNGADAAQTNDGEVPTPPPHRSQPTTPVQSPAEQAEGFKNEGNKFFKAKDYNQAIVHYTKAIVLQPESATYLGNRAAAYMSAGKYKDALEDCTRAAELDPNNPKILLRLARIYTSLGRPEEAIATFGRIQPPPSAKDMAPARDMLNYIQAAQKALQEGTAASMVLHPLDMAERLLGIGASRPRKWVLMRGEALLRLGDINSLGEAQNIAMSLLRSNSQDPEALVIRGRALYASGENDKAIQHFRKALSCDPDFKDAIKWLRVVQKLDRMKGEGNDEYKAGRWQKALEKYTAALEIDPSNKGTNSKILQNRALCYTKLKQFDEAIADCERAISLDPSYLKARKTKANALGLAERWEDCVREWKALQELEPEDRTIAQEVKRAELELKKSQRKDYYKILGIDKNADETQIKKAYRKLAIVHHPDKNPGDASAEARFKDISEAYETLSDSQKRARYDSGDDLVDPSDMFGGGMGGGMGGIDPEIIIQMMGGQGGHGFGGGGFGGFGGGGFPGGGRSRGRGGFGGGGFHYQ

SEQ ID NO: 9574 - protein, 423 aa, Plasmodium berghei
MDIEKIEDLKKFVASCEENPSILLKPELSFFKDFIESFGGKIKKDKMGYEKMKSEDSTEEKSDEEEEDEEEEEEEEEDDDPEKLELIKEEAVECPPLAPIIEGELSEEQIEEICKLKEEAVDLVENKKYEEALEKYNKIISFGNPSAMIYTKRASILLNLKRPKACIRDCTEALNLNVDSANAYKIRAKAYRYLGKWEFAHADMEQGQKIDYDENLWDMQKLIQEKYKKIYEKRRYKINKEEEKQRLKREKELKKKLAAKKKAEKMYKENNKRENYDSDSSDSSYSEPDFSGDFPGGMPGGMPGMPGGMGGMGGMPGMPGGFPGMPGGMPGGMPGGMGGMPGMPGGMPGGMGGMPGMPGGMPDLNSPEMKELFNNPQFFQMMQNMMSNPDLINKYASDPKYKNIFENLKNSDLGGMMGEKPKP

SEQ ID NO: 9575 - protein, 376 aa, Plasmodium berghei
MGYEKMKSEDSTEEKSDEEEEDEEEEEEEEDDDPEKLELIKEEAVECPPLAPIIEGELSEEQIEEICKLKEEAVDLVENKKYEEALEKYNKIISFGNPSAMIYTKRASILLNLKRPKACIRDCTEALNLNVDSANAYKIRAKAYRYLGKWEFAHADMEQGQKIDYDENLWDMQKLIQEKYKKIYEKRRYKINKEEEKQRLKREKELKKKLAAKKKAEKMYKENNKRENYDSDSSDSSYSEPDFSGDFPGGMPGGMPGMPGGMGGMGGMPGMPGGFPGMPGGMPGGMPGGMGGMPGMPGGMPGGMGGMPGMPGGMPDLNSPEMKELFNNPQFFQMMQNMMSNPDLINKYASDPKYKNIFENLKNSDLGGMMGEKPKP

SEQ ID NO: 9576 - protein, 248 aa, Plasmodium berghei
MDIEKIEDLKKFVASCEENPSILLKPELSFFKDFIESFGGKIKKDKMGYEKMKSEDSTEEKSDEEEEDEEEEEEEEEDDDPEKLELIKEEAVECPPLAPIIEGELSEEQIEEICKLKEEAVDLVENKKYEEALEKYNKIISFGNPSAMIYTKRASILLNLKRPKACIRDCTEALNLNVDSANAYKIRAKAYRYLGKWEFAHADMEQGQKIDYDENLWDMQKLIQEKYKKIYEKRRYKINKEEEKQRLK

SEQ ID NO: 9577 - protein, 407 aa, Plasmodium chabaudi
MGYEKMKSEDSTEEKTEEEEEEEEEEEEEEEEEEEEEEEQDDPEELELIKEETEECPPLAPIIEGELSEEQIEEICKLKEEAVNLVGDKKYEEALEKYNKIISFGNPSAMIYTKRASILLNLKSRKACIRDCTEALNLNIDSANAYKIRAKAYRYLGKWEFAHADMEQGQKIDYDENLRDMQKLIQEKYKKIYERRRYKINKEEEKQRLKREKGLKKRLAAKKKAEKMYKEKTKRKNYDSDSSDSSYSEPDFSGDFPGGMPGGMPGGMPGGMPGGFPGGFPGGMPGGMPGGFPGGMPGGMPGGMPGGMPGGMPGGMPGGMPGGMPSGMPGGMPGGMPGGMPGGMPDLNSPEMKELFNNPQFFQMMQNMMSNPQLISKYANDPKYKNLFENLKNSDFGNMMGKENGKN

SEQ ID NO: 9578 - protein, 173 aa, Plasmodium falciparum
ELPTTLREEEKKRKKREKELKKRLAARKAAEKAYKANNKRENYDSDSSDSSYSEPDFSGDFPGGMPGGMPGGMPGGMPGGFPGGFPGGMPGGMPGGFPGGMPGGMPGGMPGGMPGGMPGGMPGGMPGGMPGGMPGGMPGGMPGGMPDLNSPEMKELFNNPQFFQMMQNMMSNP

SEQ ID NO: 9579 - protein, 125 aa, Schistosoma japonicum
MKKPSHAIADCNEAISLNPDVAQPYKWRGFANKMIGNWENAYLDLQASLKLDYTDDAYEAVKEVEPKHKRIFEHNMKYMHKRQEKLDREKRERIRKAREERERAEKETEKPDFEMPNNGNISRHG

SEQ ID NO: 9580 - protein, 422 aa, Caenorhabditis elegans
MDHVALLKQFVGMCQANPAVLHAPEFGFFKDYLVSLGATLPPKPADKPEGKCPMSEEPKKETPAAEATPEPEIPKPEEIPFPKIDNEGVIEPEEAVALPMGDSAKEATEDEIEKASEERGKAQEAFSNGDFDTALTHFTAAIEANPGSAMLHAKRANVLLKLKRPVAAIADCDKAISINPDSAQGYKFRGRANRLLGKWVEAKTDLATACKLDYDEAANEWLKEVEPNAHKIQEYNRAVERQKADIELAERRERVRRAQEANKKAAEEEAKRQAEQGDDFDFEGGFPGGMPGGFPGAGGMPGGFPGAPGGGAPGGMGAGIEQLFSDPEIAAAIQDPEVLPALMDIMQNPANMMKYINNPKVAKLISKLQSKGAGMPGMFGGAPPSAGGGCEDADCGGPCPGARGGASVPQQPPRRAPEPDLD

SEQ ID NO: 9581 - protein, 373 aa, Drosophila melanogaster
MQTGDLKKLKYFIDFALENPTFLNMPQLQFVKDFVEKFGGTVPPGQFNGGSAGGKCPFGGVAGAKANEPANAPEDSEDEKSLSDPESDVELDMEGVIEADSDPAQPMGNYSKKATEEEVEQASELRAQAASAYGQQKFDEAIALYTKAIELSPGNALFHAKRGQAFLKLKKPNACIRDCDVALELNSDLAAGYKFRGRARRLLGDFELAAHDLRQACKLDFDEETDEWLKEVTPNAKKIEQHRLKQERRQAERKIKERQRDQRRARKEQEKHNASSGGSSGEFSGGNPGNGNMSDILGAMSDPEVSAAIQDILSNPGNITKYASNPKIYNLIKKIVPGGDVGAAFGQAGEKAGKPSEPKPKKDSADFVDDGLD

SEQ ID NO: 9582 - protein, 377 aa, Drosophila melanogaster
MAFTMQTGDLKKLKYFIDFALENPTFLNMPQLQFVKDFVEKFGGTVPPGQFNGGSAGGKCPFGGVAGAKANEPANAPEDSEDEKSLSDPESDVELDMEGVIEADSDPAQPMGNYSKKATEEEVEQASELRAQAASAYGQQKFDEAIALYTKAIELSPGNALFHAKRGQAFLKLKKPNACIRDCDVALELNSDLAAGYKFRGRARRLLGDFELAAHDLRQACKLDFDEETDEWLKEVTPNAKKIEQHRLKQERRQAERKIKERQRDQRRARKEQEKHNASSGGSSGEFSGGNPGNGNMSDILGAMSDPEVSAAIQDILSNPGNITKYASNPKIYNLIKKIVPGGDVGAAFGQAGEKAGKPSEPKPKKDSADFVDDGLD

SEQ ID NO: 9583 - protein, 447 aa, Plasmodium yoelii yoelii
MDIEKIEDLKKFVASCEEDPSILLKPELSFFKEFIESFGGKIKKDKMGYEKMKSEDSTEEKSDEEDEEDEEDEEEDEDEEDEEEEKDDPEKLELIKEETIECPPLAPIIEGELTEEQIEEICKLKEEAVNLVENNKYDEALEKYNKIISFGNPSAMIYTKRASILLNLKRPKACIRDCTEALNLNVDSANAYKIRAKAYRYLGKWEFAHADMEQGQKIDYDENLWDMQKLIQEKYKKIYEKRRYKINKEEEKQRLKREKELKKKLAAKKKAEKMYKENNKRENYDSDSSDSSYSEPDFSGDFPGGMPGMPGGMGGMPGGMGGMPGMPGMPGGMGGMPGGMPGGMPGGMGGMPGGFPGMPGMPGGMPGGMPGGMPGGMPGGMPGGMPDLNSPEMKELFNNPQFFQMMQNMMSNPDLINKYASDPKYKNIFENLKNSDLGGMMGGKPKP

SEQ ID NO: 9584 - protein, 369 aa, Homo sapiens
MDPRKVNELRAFVKMCKQDPSVLHTEEMRFLREWVESMGGKVPPATQKAKSEENTKEEKPDSKKVEEDLKADEPSSEESDLEIDKEGVIEPDTDAPQEMGDENAEITEEMMDQANDKKVAAIEALNDGELQKAIDLFTDAIKLNPRLAILYAKRASVFVKLQKPNAAIRDCDRAIEINPDSAQPYKWRGKAHRLLGHWEEAAHDLALACKLDYDEDASAMLKEVQPRAQKIAEHRRKYERKREEREIKERIERVKKAREEHERAQREEEARRQSGAQYGSFPGGFPGGMPGNFPGGMPGMGGGMPGMAGMPGLNEILSDPEVLAAMQDPEVMVAFQDVAQNPANMSKYQSNPKVMNLISKLSAKFGGQA

SEQ ID NO: 9585 - protein, 369 aa, Homo sapiens
MDPRKVNELRAFVKMCKQDPSVLYTEEMRFLREWVESIGGKVPPATQKAISEENTKEEKPDSKKVEEDLKADEPSSEESDLEIDKEGVIEPDTDAPQEMGDENAEITEEMMDQANDKKVAAIEALNDGELQKAIDLFTDAIKLNPRLAILYAKRASVFVKLQKPNAAIRDCDRAIEINPDSAQPYKWRGKAHRLLGHWEEAAHDLALACKLDYDEDASAMLKEVQPRAQKIAEHRRKYERKREEREIKERIERVKKAREEHERAQREEEARRQSGAQYGSFPGGFPGGMPGNFPGGMPGMGGGMPGMAGMPGLNEILSDPEVLAAMQDPEVMVAFQDVAQNPANMSKYQSNPKVMNLISKLSAKFGGQA

SEQ ID NO: 9586 - protein, 369 aa, Homo sapiens
MDPCKVNELRAFVKMCKQDPSVLHTEEMRFLREWVESMGGKVPPATQKAKSEENTKEEKPDSKKVEEDLKADEPSTEESDLEIDKEGVIEPDTDAPQEMGDENVEITEEMMDQANDKKVAAIEVLNDGELQKAIDLFTDAIKLNPRLAILYAKRASVFVKLQKPNAAIQDCDRAIEINPDSAQPYKWRGKAHRLLGHWEEAAHDLAFACKLDYDEDASAMLKEVQPRAQKIAEHWRKYERKHEEREIKERIERVKKAQEEQERAQREEEARRQSGAHYGPFPGGFPGGMPGNFPGGMPGMGGDMPGMAGMPGLNEILSDPEALAAMQDPEVMVAFQDVAQNPANMSKYQSNPKVMNLISKLSAKFGGQA

SEQ ID NO: 9587 - protein, 369 aa, Homo sapiens [sequence omitted]

SEQ ID NO: 9588 - protein, 369 aa, Homo sapiens
MDPHKVNELWAFVKMCKQDPSILHTEEMHFLREWVESTVGKVPPATQKAKSEENTKEEKPDSKRVEEDLKADEQSSEKSDLEIDKEGVTEPDTDAPQEMGDENAEIMEEMMDQANDKKVAAIETLNDGELQKATDLFTDAIKLNPRLAILYAKRASVFVKLQKPNAAIRDCDRAIEINPDSAQPYKWRGKAHRLLGHWEEAAHDLALACKLDYDEDVSAMLKEVQPRAQKIEEHRRKYERKREEREIKERIERVKKAREKHERAQREEEARRQSGAQYGSFLGGFPGGMPANFPRGMPGMGGGMPGMAGMPGLNEILSDPEVLAAMQDPEVLVAFQDVAQNPANMSKYQSNPKVMNLISKLSVKFGGQV

SEQ ID NO: 9589 - protein, 240 aa, Homo sapiens
MDPRKVNELRAFVKMCKKDPSILHTQEMRFLREWVESMGGTATQKAKSEENTKEEKPDSKVEEDLKADEPSSEESDLEIDKEGVIEPDTDAPQEMGDENAEITEEVMDQANDKKVAAIEALNDGELQKAIDLFTDAIKLNPRLAILYAKRASVFVKLQKPNAAIRDCDRAIEINPDSAQPYKRRGKAHRLLGHWEEAAHDLALACKFDYDEDASAMLKEVQPRAQKIAEHQRKYERKREE

SEQ ID NO: 9590 - protein, 316 aa, Homo sapiens
MDPRKVNELRAFVKTCKQDPSVPHAEKMHFLRERVESMAGKVPPATQKAKSEENTKEEKPDSKKESDLEIDNEGVVEPGTDAPQEMGDENAEITEEMMDQANEKVAAIEALNDGELQTAIDLFPDAIKLNPHLAILYAKTAAQPYKCREKAHRLSLQLDYDEDASAMLKEVQPGAQKIAEHRRKYERKREEQEIKERIERVKKAQEEHERAQREEEARRQSGAQYCSFPSGFPAGVPGNCPRRMSGMGGGMAGMARIPGLNEILSDPEILAAMQDPEIMLAFQDVAQDPANMSKYQRNTKTMHLISRLSAKFGGQA

SEQ ID NO: 9591 - protein, 400 aa, Homo sapiens
MIQQSILKVGTSVRQKTTVSRKTSVGVGALSGGIKKAIIPKKAKSDENTKEEKPGSKKVEEDLKADKPSSEESDLEIDNEGVIEPDTDAPQEMRDENAEITEEMMDQANDKKVAAIEALNDGELQKAIDVFTDAIKLNPHLAILYAKRASVFVKLQKPNAAIQHCDRAIEINPDLAQPYKWRGKAHRLPGHWKGAAHDLALVCKLEYDKDASATLKEVQFRAQKIAEHRRKYEQKCEGMPGIGGGIPGVARMPGLNEILSDPEVLTAMQDPEVMVAFQDVAQNPANISKYQSNPKILALKTVMNISLSPSLQMHNSQTRTPAPLRVSSCTTLTLERRQLLRVLQLHDPPTARTSNYNISSSPGFQQQDTHTRKTPAPPGFYSCTTLKLKKHQLLSGSPAA

SEQ ID NO: 9592 - protein, 146 aa, Homo sapiens
MGGENAEITEEMMDQANDKKVAAIEALNDGELQKAIDLFTDAIKLNPRLAVLYAKRASVFVKLQKPNAAIRDCDRAIEINPDSAQPHKWRGKAHRLLGHWEEAAHDLALACKLDYDEDASVMLKEVQLRAQKIAEHQRKYEQKREE

SEQ ID NO: 9593 - protein, 142 aa, Homo sapiens
MQKIAEHQKKCERKHEEREIKERTERVKKAPEEHERAQIEEEPRGQSGVQYGSFPGGFPGGMPDNFHGGMLGMGGAISGVAGMPGLNEILSDPEVLAAKQDPKVIVAFQHVVQNPANMSKYQSNPKVMNLISKLSAKFGCQA

SEQ ID NO: 9594 - protein, 90 aa, Homo sapiens
MMNQANDKKVAAIEALSDGELQKAIDLFTDAIRLNPCLAILYAKRASHWEEAAHDLAFACKLDYDEDASAMLKEVQPRAQKIAEHQRKYE

SEQ ID NO: 9595 - protein, 184 aa, Homo sapiens
MVSRLEEHRTGWGSPQANFRVERHAKKERKVGLCHISGFYPNALQIEVNTLRAFVKMCKQDLSVLHTKEMCFLREWVESMGSKVPPASQKAKSEENTKEEKSGSKNVEEDLKADEPSSKESYLEINNEGVIEPDTDAPQEMGDENAEITEEMMDQANDKKVAAVEALNDGELQKAIDLSQIPSS

SEQ ID NO: 9596 - protein, 115 aa, Homo sapiens
MGGKVPPATQKAKSEENTKEEKPESKKVEEDLKAYETSNTDAPQEMADENAEITEEMMDQANDKKLAAVEALNDGELQKAIDLFTDAIKLNLHLAILYAKRASVFVKLQKPNAAI

SEQ ID NO: 9597 - protein, 122 aa, Homo sapiens
MDPPQSERAGPCENVKLNLKKIPRGKKKPDSKKVEENLKADKPSSEESDLEVDNEWSHEINPDSAQPYKWRGKAHRRLGHWEDVAHDLALACKLDYDEDASTMLKEVQPRAQEIAEESMSET

SEQ ID NO: 9598 - protein, 92 aa, Homo sapiens
MDPCKVNELPAFMKIYTDAPQEMGNENAEIAEEMMDQVNDKKVDATEALTDDELQKAIDPFTVSIKLNPPLAVLYTKRASVFVKLQKPNPAI

SEQ ID NO: 9599 - protein, 926 aa, Homo sapiens
MTTKDYPSLWGFGTTKTFKIPIEHLDFKYIEKCSDVKHLEKILCVLRSGEEGYYPELTEFCEKHLQALAPESRALRKDKPAATAASFTAEEWEKIDGDIKSWVSEIKKEEDKMHFHETETFPAMKDNLPPVRGSNSCLHVGKEKYSKRPTKKKTPRDYAEWDKFDVEKECLKIDEDYKEKTVIDKSHLSKIETRIDTAGLTEKEKDFLATREKEKGNEAFNSGDYEEAVMYYTRSISALPTVVAYNNRAQAEIKLQNWNSAFQDCEKVLELEPGNVKALLRRATTYKHQNKLREATEDLSKVLDVEPDNDLAKKTLSEVERDLKNSEAASETQTKGKRMVIQEIENSEDEEGKSGRKHEDGGGDKKPAEPAGAARAAQPCVMGNIQKKLTGKAEGGKRPARGAPQRGQTPEAGADKRSPRRASAAAAAGGGATGHPGGGQGAENPAGLKSQGNELFRSGQFAEAAGKYSAAIALLEPAGSEIADDLSILYSNRAACYLKEGNCSGCIQDCNRALELHPFSMKPLLRRAMAYETLEQYGKAYVDYKTVLQIDCGLQLANDSVNRLSRILMELDGPNWREKLSPIPAVPASVPLQAWHPAKEMISKQAGDSSSHRQQGITDEKTFKALKEEGNQCVNDKNYKDALSKYSECLKINNKECAIYTNRALCYLKLCQFEEAKQDCDQALQLADGNVKAFYRRALAHKGLKNYQKSLIDLNKVILLDPSIIEAKMELEEVTRLLNLKDKTAPFNKEKERRKIEIQEVNEGKEEPGRPAGEVSMGCLASEKGGKSSRSPEDPEKLPIAKPNNAYEFGQIINALSTRKDKEACAHLLAITAPKDLPMFLSNKLEGDTFLLLIQSLKNNLIEKDPSLVYQHLLYLSKAERFKMMLTLISKGQKELIEQLFEDLSDTPNNHFTLEDIQALKRQYEL

SEQ ID NO: 9600 - protein, 926 aa, Homo sapiens [sequence omitted]

SEQ ID NO: 9601 - protein, 304 aa, Mus musculus
MKGKEEKEGGARLGTGGGGTPDKSPSAQELKEQGNRLFVGRKYPEAAACYGRAITRNPLVAVYYTNRALCYLKMQQPEQALADCRRALELDGQSVKAHFFLGQCQLEMESYDEAIANLQRAYSLAKEQRLNFGDDIPSALRIAKKKRWNSIEERRIHQESELHSYLTRLIAAERERELEECQRNHEGHEDDGHIRAQQACIEAKHDKYMADMDELFSQVDEKRKKRDIPDYLCGKISFELMREPCITPSGITYDRKDIEEHLQRVGHFDPVTRSPLTQEQLIPNLAMKEVIDAFISENGWVEDY

SEQ ID NO: 9602 - protein, 304 aa, Mus musculus
MKGKEEKEGGARLGTGGGGSPDKSPSAQELKEQGNRLFVGRKYPEAAACYGRAITRNPLVAVYYTNRALCYLKMQQPEQALADCRRALELDGQSVKAHFFLGQCQLEMESYDEAIANLQRAYSLAKEQRLNFGDDIPSALRIAKKKRWNSIEERRIHQESELHSYLTRLIAAERERELEECQRNHEGHEDDGHIRAQQACIEAKHDKYMADMDELFSQVDEKRKKRDIPDYLCGKISFELMREPCITPSGITYDRKDIEEHLQRVGHFDPVTRSPLTQEQLIPNLAMKEVIDAFISENGWVEDY

SEQ ID NO: 9603 - protein, 304 aa, Rattus norvegicus
MKGKEEKEGGARLGTGGGGSPDKSPSAQELKEQGNRLFVGRKYPEAAACYGRAITRNPLVAVYYTNRALCYLKMQQPEQALADCRRALELDGQSVKAHFFLGQCQLEMESYDEAIANLQRAYSLAKEQRLNFGDDIPSALRIAKKKRWNSIEERRIHQESELHSYLTRLIAAERERELEECQRNHEGDEDDGHIRAQQACIEAKHDKYMADMNELFSQVDEKRKKRDIPDYLCGKISFELMREPCITPSGITYDRKDIEEHLQRVGHFDPVTRSPLTQEQLIPNLAMKEVIDAFISENGWVEDY

SEQ ID NO: 9604 - protein, 331 aa, Anopheles gambiae str. PEST
TRRPKSIRPQSGFLRESCARKKRSKQKETVPLCGPPKPAYIPTMSKHMYSTANLSDVELKDQGNRLFSARKYDDAVNLYTKAIIKNSTNATYFTNRALCHIKMKRWETACVDCRRALDMDPNLVKGHFFLGLSLMELESFDEAIKHLQRAHDLAKEQKLNFGDDIASQLRLARKKRWNIQEEKRICQEIELQSYLNRLITEDMENRMAKLKVDDTINEETLKEKAMEIEREGENHMTELNNLFAKVDDRRRKREVPDYLCGKISFELLVDPVITPSGMTYERKDIEEHLQRVGHFDPVTRVKLTQDQLISNYSMKEVVDAFLQENEWALDY

SEQ ID NO: 9605 - protein, 278 aa, Arabidopsis thaliana
MVTGVASAMAERLKEDGNNCFKKERFGAAIDAYTEAIALSPNVPAYWTNRALCHMKRKDWTKVEEDCRKAIQLVHNSVKAHYMLGLALLQKKEFTNGVKELQRALDLGRCSNPTGYMVEEIWEELSKAKYMEWELVSAMRSWELNSLKETCEAALNQQRALDMSRTEESSDEAYTAHTERLKALERVFKKAAEEDKPTEVPDYLCCNITLEIFRDPVISPSGVTYERAAILEHLKKVGKFDPITREKIDPANLVPNLAIKEAVAAYLEKHVWAYKMGC

SEQ ID NO: 9606 - protein, 315 aa, Glycine max
  unsure (1)..(315): unsure at all Xaa locations
MGPNAAAAKQAEKLRIDGNTYFKKDRFGAAIDAYTEAITLCPNVPVYWTNRALCHLKRNDWERVEEDSRKAIQLDSNSVKAHYMLGLALLQRQESAKGIKELEKALDLGRGANPKGYMVEEIWQELAKAKYLEWERSSSKRSWELQSLKEACESALKEKHFLDYSQMEGFVDDATTSHSEQLEALERVFNTAAEADIPTEVPDYLCCRITLDIFHDPVITPSGLTYERAVILEHLQKVGKFDPITREPLDPSQLVPNLAIKEAVEAFLDKHGWAYKIDXRKITLQINNVLVGLSVEQCSRMLCSASVAKVVCFNC

SEQ ID NO: 9607 - protein, 108 aa, Glycine max
MGPNAAAAKQAEKLRIDGNTYFKKDRFGAAIDAYTEAITLCPNVPVYWTNRALCHLKRNDWERVEEDSRNAIQLDSNSVKAHYILWLALLQRQQSVTGITELTKPFDL

SEQ ID NO: 9608 - protein, 586 aa, Oryza sativa (japonica cultivar-group)
MASSTAANLWVLLGLGIAGVLLAAKRLRRPARPDNGAFIARLELLPPPQPPPPQARHPLTGLCFAIADAFHVTGYITSFGSLEWAKTHDAATQTSLVVSSLVDGGAMCVGKTVIDEMAFSIHGENKHFGTPTNPAAPDRVPGGCSSGSAVAVAAGIVDFSLGIDTIGGVRVPGSYCGVLAFRPSHAVVPNNGVIPVAPSLDAIGWFARDPSVLRRVGHLLLRLPYADIRQPRHFYIADDCFEMSKVHARRLTQVVTKSVEKLFGRQVLGHVNLENYLASRIPSLRNNSNGHGDSKFSSLLALSRAMQFLHKHEFKDQHMEWINSVKPAVDACIVGNLSDDGESTINNSQDARKEVRAALGALLKDDGILVIPTVLGCPPKLNARELSSQDYNVQTSCLTSLASMSGCCQVTVPLGTHDKCPVSVSLIARHGGDRFLLDTIQTIYATIQEQVDALAKSNVSSKQAMSEEAAEAAKEKGNIAFKEKQWQKAINFYTEAIKLNNKVATYYSNRAAAFLELASYRQAEADCTSAIDIDPKIVKAYLRRGTAREMLGYYKEAVDDFSHALVLEPMNKTAGVAINRLKKLFP

SEQ ID NO: 9609 - protein, 556 aa, Lycopersicon esculentum
MPGMEAENSNASRAEELKQLANEAFKGHKYSQAIDLYTQAIELNGENAVYYANRAFAHTKLEEYGSAIQDGTRAIEIDPRYSKGYYRRGAAYLAMGKFKDALKDFQQVKKLCPNDPDATKKLKECEKAVMKLKFEEAISVPESQRRSVADSIDYRSVGSGPGSSYVPTKTTAVSAAAALMGVLVVYMGTKAATMVAAAASAALLVVLITFLWGRCSDGFFTKSRTLELEVEPQYAGARIEGDVVTLDFVKKMLDDFKNQKNLHKRYAYQIVLQTREMLRALPSLVDIVVPEGKHFTVCGDVHGQFYDLLNIFELNGLPSEDNPYLFNGDFVDRGSFSLEVILTLFAFKCMCPSAIHLARGNHESKSMNKIYGFEGEVRSKLSEIFVELFAEVFCCLPLAHVINEKVFVVHGGLFSVDGVKLSDIRAIDRFCEPPEEGLMCELLWSDPQPQPGRGPSKRGVGLSFGGDVTKRFLQENNLDLVVRSHEVKDEGYEIEHDGKLITVFSAPNYCDQMGNKGAFIRFEAPDMKPNIVTFSAVPHPDVKPMAYANNFLRMFS

SEQ ID NO: 9610 - protein, 485 aa, Lycopersicon esculentum
MPGMEAENSNASRAEELKQLANEAFKGHKYSQAIDLYTQAIELNGENAVYYANRAFAHTKLEEYGSAIQDGTRAIEIDPRYSKGYYRRGAAYLAMGKFKDALKDFQQVKKLCPNDPDATKKLKECEKAVMKLKFEEAISVPESQRRSVADSIDYRSVEVEPQYAGARIEGDVVTLDFVKKMLDDFKNQKNLHKRYAYQIVLQTREMLRALPSLVDIVVPEGKHFTVCGDVHGQFYDLLNIFELNGLPSEDNPYLFNGDFVDRGSFSLEVILTLFAFKCMCPSAIHLARGNHESKSMNKIYGFEGEVRSKLSEIFVELFAEVFCCLPLAHVINEKVFVVHGGLFSVDGVKLSDIRAIDRFCEPPEEGLMCELLWSDPQPQPGRGPSKRGVGLSFGGDVTKRFLQENNLDLVVRSHEVKDEGYEIEHDGKLITVFSAPNYCDQMGNKGAFIRFEAPDMKPNIVTFSAVPHPDVKPMAYANNFLRMFS

SEQ ID NO: 9611 - protein, 378 aa, Triticum aestivum
  unsure (1)..(378): unsure at all Xaa locations
TNSKGEEASRRTRRFFQTQISPHSPTHPPTPFLPRRHEARAAGDVAGGGQRIGIEAAXAELLKQEGNTCFKKDRISAAIDAYTGAIALCQNVAVYWTNRALCYKKRNEWAKVEEDCRMAIHYDSHSVKAHYMLGLALLNRQELAGGIKALEKSLELGRGAHPASYMVEEIWQELSKAKYIEWEGLSKMRSSQLHKLNATCKEALKSYNSLDNPTGDMSEEHLNELDEVFRKAAKADTPTEVPDHLCCKITLDIFRDPVITPSGITYERAVILDHLNRVGKFDPVTREPLEPFQLISNLAVKEAVDVFLKEHGWAYKIRXLICTIELVGYTLIGRLAIHSSVVLLTSRKLYILSSVVKLDWIIHRTCHGYMCKEIDMWV

SEQ ID NO: 9612 - protein, 296 aa, Zea mays
  unsure (1)..(296): unsure at all Xaa locations
MAPAAPYGGAESQRQADLLKQEGNAFFRKERLSAAIDAYTGAITLCPNVAVYWTNRALCYRKRNEWTRVEEDCRTAIQLDSQSVKAHYMLGLSLVNSQRLSEGIKSLEKSLELGRGAHPASYMVEEIWQELSKAKYIEWESLSRDRTCQLQKLKCICSVSFRVACKEALTSYNSLDNPAAGAPVEQLNELEEVFKKAAKTDTPAEVPDHLCCKITLDIFRDPVITPSGITYERAVLLDHLQTVGRFDPVTREALEPHQLVPNLAIKEAVHAFLSEHGWAYKIRXSLWNTGFGYCRM

SEQ ID NO: 9613 - protein, 174 aa, Leishmania donovani
MESMGKYDEAQKAFQKALQLSPGNEEVMDKLHTVNTKVRERNEKTKSQQCKTPEEAKQLGNSFFKDGKYDQAAEFYTRAIELQTEPVKEKAVYYTNRAACHQQTHMYSLMVDDCNAAIEIDPANVKAYLRRGIAYEGMEKWKLALEDYTKAQSISPGVAGASQGILRCQRVLRN

SEQ ID NO: 9614 - protein, 961 aa, Plasmodium falciparum
MENKDNKRRGFLKNWNINYLSTNFNNLIKHNENTHNTKHDQKNEHVDDNKTNKIYDINENIKFIKEKEIMRENNKIDVNNNININLSSSLSNKGYYDSINHNVKDCINVMNDSNTTTTTTTTTTTTNNNNNNNNNNNNNNKPTSYLDFCEAWSKFKFRNLASHANDQINKDKQSYNHGESQGNIQNIGLGNKNSCDNKGLLNCNMAHNNSNINYLNNHNNINNCINRDNNNIDHNKRNNYHNNNNNNKNNCSSNNSSNNNSSSNNNNNNGNNSDNHNNDNGNHFNRHNNFNNNHMNNYNGHNNNNNDDDDNGDHSDNNNEKNNKFYKNNDGSSVSSSSSVSSSSSFISNDSYAAKNPKTNNEQCKRKKKKKKEREKENNNNPPDMDTYNSNISVMNNMNSMNNMNNNMESNMRTDVNVHHNNMNRRNSFNNSSNLQHTYNNNYNQYDHKNSNDSYTRNERRNSLNNYNFRKPSLNPNNEFYNNNDYSSDLINSHPINYSNVPESNYNMNHPIHHMNSASHGMSNNTSHGMSNNTSHGMSNNTSHGMSNNTSHGMSNNTSHGMSNNTSHGMSNNTSHSMNNTSHSMNNTSHSMNNPSHHINHSSHNVMNKNCGNKRNYTSNNSGDYNESVKSNNYYNHAGNNTNYYNSNKNSISSENLNKQIKKGAEGGDADNVRYSIDKTEEVEKKNPNMINIEMLNPEDRKKEAEKYKVLGNQSYKLGYFESAIDYYTKAIQYDNTNHVYYTNRALCYKKQKLWKLANMDARQALNLEEESVKAHFILGLTLLHLNSLEEGLKKLTKAKTLSSYLKDSNESEINRYIMQAKKLIYLRDEQNKQLSYTELQSFFIDKINLLNQIGYITNEEKSLRIQQTEGIFKELLDSFQKKQVPDYLCCKISMCLMNEPVITPSGMTYDKIFLYEHVKHNGSFDPVSREQFSIREVIPNYAIKEATEHFLKANPWAFEE

SEQ ID NO: 9615 - protein, 266 aa, Caenorhabditis elegans
MSSGAEQHNTNGKKCYMNKRYDDAVDHYSKAIKVNPLPKYYQNRAMCYFQLNNLKMTEEDCKRALELSPNEVKPLYFLGNVFLQSKKYSEAISCLSKALYHNAVITNAPDIENALKRARHQKYEEEESKRIVQDVEFHTYLESLIEKDRQENSENPEELQRADMAKKRLTELTLATQEKRQNREVPEMLCGKITLELMKEPVIVPSGITYDREEIVQHLRRIGHFDPVTRKPLTENEIIPNYALKEVIEKFLDDNPWAKYEPGGMV

SEQ ID NO: 9616 - protein, 272 aa, Caenorhabditis elegans
MSSGAEQHNTNGKKCYMNKRYDDAVDHYSKAIKVNPLPKYYQNRAMCYFQLNNLKMTEEDCKRALELSPNEVKPLYFLGNVFLQSKKYSEAISCLSKALYHNAVITNAPDIENALKRARHQKYEEEESKRIVQDVEFHTYLESLIEKDRQENSENPEELQRADMAKKRLTELTLATQEKRQNREVPEMLCGKITLELMKEPVIVPSGITYDREEIVQHLRRIGHFDPVTRKPLTENEIIPNYALKEVGNLYRVIEKFLDDNPWAKYEPGGMV

SEQ ID NO: 9617 - protein, 289 aa, Drosophila melanogaster
MTTKHIYSTTNLSDLQLKEQGNCLFAARKYDDAINCYSKAIIKNPTNATYFTNRALCNLKLKRWELCCQDSRRALDIDGNLLKGHFFLGQGLMEIDNFDEAIKHLQRAYDLSKEQKQNFGDDITLQLRLARKKRWNVMEEKRIQQEIELQSYLNGLIKGDMESRLANLKLNGNVHDEQLKDKQQEIEQECDDHIKELNNIFSKVDERRKKREVPDFLCGKISFEILTDPVITPSGITYERKDIEEHLQRVGHFDPVTRVKLTQDQLIPNFSMKEVVDSFIAENEWSLDY

SEQ ID NO: 9618 - protein, 919 aa, Plasmodium yoelii yoelii
MDNNREVKKKSFLKNWNINYLSNNFNKFIKSNSNNKNENNSAIKTGISSGTVDNTSKNDYNLMNNNIHITNIREMSNININNIKNIRPDYYGKGYSTAENGNNNTCIKNHKYNNYNSNSNDTSINFIHTNDRGKTHMNFSDTYNKINFQNFHQNNISSNVETNVEDNKNSFSKSSFNDMNSIKENSNSYNKRVYKNLHNCNNNNNSDTMNTQYNINYNKCTIDGKNNIKIESTKYHNNSNTESTNNNVQSRNKYDINNEYCMNKNRLINNSECKNNTINLNDQGNKNNDTSNNNDQISFKNNRSYSVSSMVSSNSSIPSSAYSGQPFNYSQIDRINQKKHKISRIIGSNDNNVNKRNSSVSHNINNNSNDLTYNGHENSHFDWNKNEKNNTLSEEQASKNAQTENYNIYRSELNKNISTYTSNDRNATTGFTQNCINTNSSTNTSSETRQNYYESTLNNNRNSGYGGHDDYRRNCKDARYSINYSSVNTNTENKRTSIFSNNNNNSNNNNKGDSENFTDSRRGLNQYSQEIDTKYSRFSNNNAYSENNNNYMRMSTDRQGNSGREEGGDDRYDRRDRYEKRGERSNGNNGQGNEGGDSDGGSGDNNGQGNREGDSDGDSDEDTNRKNNKNRRKESSMDDEVEKKNNNSLNLDMLNPEERKREAEKYKVLGNQSYKLGYFESAIDYYTKAIQYDNTNHVYFTNRALCYKKQKLWKLANIDARQALNLEEESVKAHFILGLTLLHLNSLEEGLKKLTKAKTLSSYLKDSNESEINRYILQAKKLIYLRDEQTKQLKYAELQSFFIEKINLLNQMGYITNEEKFLRTEQTEDLFKEILGTFQKKQIPDYLCCKISMCLMNEPVITPSGMTYDKIFLYEHVKHNGSFDPVSREQFSIREVIPNYAIKEATDNFLKTNPWAFEE

SEQ ID NO: 9619 - protein, 303 aa, Homo sapiens
MKGKEEKEGGARLGAGGGSPEKSPSAQELKEQGNRLFVGRKYPEAAACYGRAITRNPLVAVYYTNRALCYLKMQQHEQALADCRRALELDGQSVKAHFFLGQCQLEMESYDEAIANLQRAYSLAKEQRLNFGDDIPSALRIAKKKRWNSIEERRIHQESELHSYLSRLIAAERERELEECQRNHEGDEDDSHVRAQQACIEAKHDKYMADMDELFSQVDEKRKKRDIPDYLCGKISFELMREPCITPSGITYDRKDIEEHLQRVGHFDPVTRSPLTQEQLIPNLAMKEVIDAFISENGWVEDY

SEQ ID NO: 9620 - protein, 303 aa, Homo sapiens [sequence omitted]

SEQ ID NO: 9621 - protein, 303 aa, Homo sapiens
MKGKEEKEGGARLGAGGGSPEKSPSAQELKEQGNRLFVGRKYPEAAACYGRAITRNPLVAVYYTNRALCYLKMQQHEQALADCRRALELDGQSVKAHFFLGQCQLEMESYDEAIANLQRAYSLAKEQRLNFGDDIPSALRIAKKKRWNSIEERRIHQESELHSYLSRLIAAERERELEECQRNHEGDEDDSHVRAQQACIEAKHDKYMADMDELFSQVDEKRKKRDIPDYLCGKISFELMREPCITPSGITYDRKDIEEHLQRVGHFDPVTGSPLTQEQFIPNLAMKEVIDAFISENGWVEDY

SEQ ID NO: 9622 - protein, 231 aa, Homo sapiens
MQQHEQALADCRRALELDGQSVKAHFFLGQCQLEMESYDEAIANLQRAYSLAKEQRLNFGDDIPSALRIAKKKRWNSIEERRIHQESELHSYLSRLIAAERERELEECQRNHEGDEDDSHVRAQQACIEAKHDKYMADMDELFSQVDEKRKKRDIPDYLCGKISFELMREPCITPSGITYDRKDIEEHLQRVGHFDPVTRSPLTQEQLIPNLAMKEVIDAFISENGWVEDY

SEQ ID NO: 9623 - protein, 358 aa, Homo sapiens
MDELFSQVDEKRKKYDIPKYLCCKISFELMRELCITPTGISYDRKDIEEHLQRVDHFDPVTWSPLTQKQFIPNLAMKEAGEKAWGSLSHGSPILIPVLVETQSNLRQHPFPPELPFPKLLLDVQELPYPVSSDERRQKLEMPDWHGSSQEGPTSWISNWSAPHSKTMQVPKCDDLRHTTTEISEMNRNISWLQAEIEGLKGQKASLEAAVADAEQRGELAIKDANAKLSELEAALQRAKQDMAWQLHEYQELMNIKLALDMEIATYRKLLEGKDSRLESGMQNMSIHTKTTSSYAGGLSSAYGGLTSPSLSYGLGSSFGSGVGSSSFSHSSSTRAVVVKKIQTRNGKLVSESSDVLRK

SEQ ID NO: 9624 - protein, 276 aa, Oryza sativa
  unsure (1)..(276): unsure at all Xaa locations
MSPAADSAASKRQAELLKQEGNAFFKKDRISAAIDAYTGAIALCPKVAVYWTNRALCYKRRNEWVRAEEDCRTAIQLDSHSVKAHYMLGLALLNKDELAEGIKELEKSLELGRGAHPASYMVEEIWQELSKAKYIEWENLSSERVRQLHKLKEACKEALRNYNSLDNPPAYVPEEQLNELEEVFRNARKSDIPTEVPDHLCCKITLDIFRDPVITPSGITYERAVILDHLHRVGKFDPVTRETLEPHQLVPNLAIKEAVHAFLSEHGWAYRMRXLL

SEQ ID NO: 9625 - protein, 537 aa, Aspergillus awamori
MAPLSKALSVFMLMGITYAFNYDQPYRGQYHFSPQKNWMNDPNGLLYHNGTYHLFFQYNPGGIEWGNISWGHAISEDLTHWEEKPVALLARGFGSDVTEMYFSGSAVADVNNTSGFGKDGKTPLVAMYTSYYPVAQTLPSGQTVQEDQQSQSIAYSLDDGLTWTTYDAANPVIPNPPSPYEAEYQNFRDPFVFWHDESQKWVVVTSIAELHKLAIYTSDNLKDWKLVSEFGPYNAQGGVWECPGLVKLPLDSGNSTKWVITSGLNPGGPPGTVGSGTQYFVGEFDGTTFTPDADTVYPGNSTANWMDWGPDFYAAAGYNGLSLNDHVHIGWMNNWQYGANIPTYPWRSAMAIPRHMALKTIGSKATLVQQPQEAWSSISNKRPIYSRTFKTLSEGSTNTTTTGETFKVDLSFSAKSKASTFAIALRASANFTEQTLVGYDFAKQQIFLDRTHSGDVSFDETFASVYHGPLTPDSTGVVKLSIFVDRSSVEVFGGQGETTLTAQIFPSSDAVHARLASTGGTTEDVRADIYKIASTWN

SEQ ID NO: 9626 - protein, 618 aa, Poa secunda
MDSRGITPGAYAPLPSSGDDQRGGGVRYCLACVATVLAASAVVVVVAFVSVGGVRVLLAGGTGDSKDADAFPWSNSMLQWQRAGFHFQTEKNFMSDPNGPVYYRGYYHLFYQYNTKGVVWDDGIVWGHVVSRDLVHWRHLPIAMVPDHWYDNMGVLSGSITVLNSGRLVMIYTGVFSNTTDRSGMMEVQCLAVPAEPNDPLLRRWTKHPANPVLVHPPGIKDMDFRDPTTAWFDESDSTYRTVIGSKDDNQGDHAGFAMVYKTKDFLSFQRIPGILHRVEHTGMWECMDFYPVGGGDNSSSEVLYVIKASMNDERHDYYALGRYDAAGNTWTPLDPELDLGMGLRYDWGKFYASTSFYDPIKRRRVVLGYVGETDSRRSDEAKGWASIQSIPRTVALDKKTWTNLLLWPVQEIETLRANATAFNGITIDTGSVFLLPIRQGTQLDIEASFRLNASAVAAISEADVGYNCSSSGGAATRGVLGPFGLLVLADTRGEQTAVYFYVSRGLDGGLRTSFCNDESRSSWARDVTKRVVGSTVPVLDGEVLSMRVLVDHSIVQSFAMGGRVTATSRVYPTEAIYAAAGVYVFNNATGASVTAERLVMHEMDSVDNNQIFLVDDL

SEQ ID NO: 9627 - protein, 497 aa, Chloroflexus aurantiacus
MHLGDGLGARLHSLSEISSDNLHGEGDPMAGAQQRPRYHFLPPANWMNDPNGLIQWEDTFHLFYQYNPAGAYHRHIHWGHATSHDLIHWQHQPIALSPTPGGADADGCWSGCAVNDHGTPTLIYTGFRLPEVQQPCLAVSHDGLQTWQKWPEPIIAAPPPELDLLGFRDHTVWQEQGVWHMLIGSGIRGQGGTVLLYRSPDLRHWEYAGPLLIGDAGQFDPVWTGLLWECPDFFALGDQQVLVCSAWDRRPYYTIAMIGAYRDGRFVPHTTHKLDYGDAHFYAPQTMPIRDGRRIMFAWSMEGRSEESIVAAGWAGVMTLPREVKIADDGQIVTLPVNEVQQLRQDEIVIPSTRVMPHDIHWLPVHGAQLEVELILRPPRHGTCTVMLRASPDGSEATVLRYNSRTATLTLDRRRSSLAGDVWRDAHHAPLTLHNDEPLVLRIFLDASLIEVFANERRSITSRIYPTRPDSTGIAICADEAAVDLLAGRVWEMAGIW

SEQ ID NO: 9628 - protein, 172 aa, Populus tomentosa
YHLFYQYNPKGAVWGNIVWAHSVSKDLINWESLEPAIYPSKWFDNYGCWSGSATILPNGEPVIFYTGIVDGNNRQIQNYAVPANSSDPYLREWVKPDDNPIVYPDPSVNASAFRDPTTAWRVGGHWRILIGSKKRDRGIAYLYRSLDFKKWFKAKHPLHSVQGTGMVECPDF

SEQ ID NO: 9629 - protein, 103 aa, Pseudoroegneria stipifolia
SRGLDGGLRTSFCQDELRSSRAKDVTKRVIGSTVPVLEGEAFSMRVLVDHSIVQSFAMGGRSTMTSRVYPMEAYQKARVYLFNNATGAGVTAERLVMHEMDSA

SEQ ID NO: 9630 - protein, 702 aa, Penicillium sp. TN-88
MKSISMLWEVLLLGAFLSQVDAAPTKESYTELYRPQYHFTPAQNWMNDPNGLLYADGTYHMYYQYNPGGNTWGAMSWGHATSEDLTHWKEQPVALLARGYPNNITEMFFSGSAVIDEHNTSGFGKKGKAPWIAMYTSYYPTAQVLPSGKQVRDNQQAQSIAYSLDHGTTWTTYDEANPVILDPPAPYQDQFLDFRDPNIFWHQPIRKWVAVVSLAKLHKLLIYTSTNLKQWDLESEFGPFNAVGGNWECPNIFPLPVDGDKSKVKWVAIVGINPGGPPGTVGSGVQYFLGDFNGTTFTADSNSIHGGGPPDGSFIFEDFEGNHSFSDRGWIATGDFIGTSPVAGTLPGQNPVTGYLGNQLVNTFLNGDATTGTLTSPSFTISYKYINFLIGGGDNINQTAIQLKIDGNVVYAATGSNSEQLTWQHWDVSAFQNQTAVIEIIDLATGGWGHINVDEISFANTPATNNNANWLDWGPDFYATQGYNGLPQYQRTIISWMNNWQYGGVIPTSPWRSAMSIPRQLSLKTIDESIAVVQEPEECWKAITQTQIASTFPSITGTHSLGDIGNAAEIELTFSSGDGTNGSSEFGIIVRASKDFSQQTRIGYDFTTQQVFVDRTKSGDVSFDSTFASVYYAPLSPASDKTVTLRIFVDWSSVEVFGGQGQTTMTTQIFPDENATNAQLFSTGGSTKNVQLRISKVRSTWV

SEQ ID NO: 9631 - protein, 501 aa, Pediococcus pentosaceus
MIWNRKTRYTPYEQWPATKLPQLVAQARQSKWRMQHHIQPTSGLLNDPNGFSYFDGQWHLFYQVFPFGPVHGLKSWQHVTSKNLVDWHDEGLAIRPDTPYDSHGAYTGTALPIDDQLFIMYTGNVRTADWQRESYQLGAWMDTDNHIKKLSRPLIAHAPAGYTSSFRDPDLIRNDHGYYALIGAQTTTEIGAILVYFSKDLTTWTCQGELNVPANARGYMIECPKSGLDRSTARLIVLSQGLSQATIPYQNIYPNMYLVADQLNLAQAQFTEPHALTQLDDGFDVYATQAINAPDGRALAVSWIGLPEISYPTDRENWAHCLSLVKELTLKDGHLYQNPVAAVDDLRTTAHDLVFEQQRATVAALNGSFELLLTVPADKTVTVNIADQQESGQLQVTVDANHGQVMIDRRHTGNSFAEDYGQTRQVELTAHKTIKIRLIIDVSVFECYIDNGYSVMTGRFFLNATPSRLNVQGDTTAVTGKVWEWRQSEHTGVDNNETKIK

SEQ ID NO: 9632 - protein, 159 aa, Cichorium intybus x Cichorium endivia
WGNIVWAHSVSKDLINWIPLEPALYPSKPFHKYGCWSGSATVLPGEKPVILYTRLGEEKEQVQNFAIPEDFSDPYLRKWIKPDDNPILIPTHGENVSAFRDPTTAWMDKSGQWRFIIGSKQDRRGVAYLYRSKDFINWTQAEHPLHSKENTGMWECPDF

SEQ ID NO: 9633 - protein, 494 aa, Staphylococcus xylosus
MSEWTKEQRYQKYEDVDQQTIEKLTEQVNQSEYRQTFHIQPQIGLLNDPNGLIYFKGNYYVSHQWFPLGPVHGLKYWYTYQSKDLVDFKAIGPTIKPDTKDDSHGVYSGSAFEYHDHLYYMYTANHRDSDWNRISTQHIAKMSKDGSINKFPKAVISAPPSGYTQHFRDPKVHVQDGVYYAMIAAQNIKKQGRILQYRSTDIVNWEFQGEVQTNLDDFGYMWECPDYFNLNGYDMLLFCPQGIDSEGERFKNIYQSGYIMGQYDINNLTMNHADFHELDYGFDFYAPQTFLDENGQRILIGWMGLPDINYPSDADGWAHCLTIPRVLTIESGNLKQRPIKALEKLRTNEETALGYANKFTRQLHPYEGKQFELIIDILENEATEVYFEVRTSKTESTLITYNKREQKLTLDRSESGQLPEPVEGTTRSTYLDTPLSKLQLFVDTSSVEIFCNDGERVMTARIFTDENATGIKTSTESGQTYLKFTKYDLKGDTI

SEQ ID NO: 9634 - protein, 454 aa, Streptococcus mutans
MNLPQNIRYRRYQDWTEEEIKSIKTNVALSPWHTTYHIEPKTGLLNDPNGFSYFNGKFNLFYQNWPFGAAHGLKSWIHTESEDLVHFKETGTVLYPDTSHDSHGAYSGSAYEIGDQLFLFYTGNVRDENWVRHPLQIGAFMDKKGNIQKFTDVLIKQPNDVTEHFRDPQIFNYKGQFYAIVGAQSLDFGGSKSEYMIECPNLVFINEQPVLIYSPQGLSKSELDYHNIYPNTYKVCQSFDTEKPALVDASEIQNLDFGFECYATQAFNAPDGRVYAVSWIGLPDIDYPSDSYDYQGALSLVKELSLKHGKLYQYPVEAVRSLRSEKEAVTYKPETNNTYELELTFDSSSVNELLLFADNKGNGLAITVDTKMGTILIDRSKAGEQYALEFGSQRSCSIQAKETVVNIFVDKSIFEIFINKGEKVFTGRVFPNDKQTGIVIKSGKPSGNYYELKY

SEQ ID NO: 9635 - protein, 1423 aa, Streptococcus mutans
MEEETVCKNWFMRKSGKSWIFGCAVFFVLGLATALPVAAEEISQTTAADTAVTEVRTEDSSQTSSQETAVTETTQSEETASKQLTTPAVADQTTEPTDNEPISSSDGASSPYQVTDTTEPQQTLTPADSEPQAKADVQQAAAPKKEEINPVTNLEDMSHDTNGTWEVREDGIHSNAIGKGDSFLYSQSSGKNFVYATDVTFKQNSGAAALVFRSNNDSNNKNMYAVNVDIGGHKAKFWRWVDNKDIQLIDERDVVPTADNRYTLKVVAVNNWISYYVNDVLMASTGDYVLQKADKGQNTVIPEGHFGLLNWNGDMVFQNTKFALLDDTTAPLIDNITVRSDRGNVEKQGQFFSEEPLHIQYVSNDASQVSLDIAKHNPAATVTVEDKTGRVYTDPSHLPVNVGANYFTVKSTVIDSFGRTVTLTYRINVHRRQNDEVYYNELYRDQYHYSVKDGWANDPNGLVYYNGVYHLFHQFYDDTKWGPMHWAHATSTDLIHWKEEPIAFYPDSNGYMFSGCVVVDEHNSSGLFKTAKGGLVAIITANGNGQRMELAYSEDEGKTWQKYDRIVADWSNDPLQNQDFRDPKVFHWNNQWFMVLAGGPLRIYSSNNLKDWKVESTYPDLHTECPDMYPIVANDGVLKWVLSRGGRFYKVGDFKQVDGKWTFIADDAYKDKDQVMNFGKDSYAAMTYYVHDFGTETRPTIPKLTEVNWMNTWEDYCNLVADTVGQDFNGTFNLNLDLGLINENGQYILTQTPVKAYDSLRDVNTALHFKDVTVDANNTLLKDFKGDSYEIVSHFRPDEKTTKVGFNLRVGNGQATKVIYDLQTETLSIDRSQSGTILSAAFAKVNSQHVTKNADGSIDLHIYVDRASVEVFSKNNTVAGANQIFPNPEAVGASIIVEGGKAQADISVYQMKTIWTDKKDTAKPVAMNTTTAKELALQVGQTQDLQVYLAPASVRQDVEWTISDPSLVRTSQKGNVLHLTAVKKGKLTITAISKENPSLSKIFTISITLNNFKTNLKGLQSVTGKWYVDDETLYDSNTSSNDYYMASQKPGFKEYDYDIDLKYQRGLINLFVASGNIDPSQAYSVQFGDSETVRLYRFAGDTIAEANMGKRINDDQYHHIKVTKTKNSIIISVDGQEVMSHNFDQVDSYFNDAYVGLGLWDGAVEFQNFFVTDHATTPKPDSDPTPQPDAPEALAQERELIDPATGVRVILQKGELASIVRVKVSHIETNDAHTPAVLNAKDYDLFNITPIDKNEKVVAITKPATVLLPIDAGKVVDKVVYLPNTDKEESLPFTIVSLTDSNGKKQSYVRFTAEHFSEYGLVYQAENQTNLKSKEKQDNVAISYPLNLEQEVKVSSISRKYAANKTADVNSVQQTEPSVMSSSSKATLPDTGDHKTDLSQLGVLAMIGSFLVEIASYFKKSKD

SEQ ID NO: 9636 - protein, 479 aa, Streptococcus sobrinus
MAIAKEIRYRAYEDWSAEEIKTIQENVAKSPWHTTYHIEPQTGLLNDPNGFSYFNGKFQLFYQNWPFGAGHGLKSWVHTESDDLVHFRETGTILYPDNPHDSHGAYSGSAYEIDGKLFLFYTGNVRDDNWIRDPLQVGAFMDKEGHIEKFDQVLIQQPSDVTEHFRDPQIFDYQGQFFAIIGAQNLEKQGFIKLYKAVNNDIKNWVFVGNLDFGGTGSEYMIECPNLVFVDGRPVLLYSPQGLDKAELDYQNIYPNTYKICQAFDTEKAELIQPSEIHNLDFGFECYATQAFNAPDGRALCVSWIGLPDIDYPTDIFDYQGAMSLVKELTIKDGKLLQYPVQALKELRSEPEAFTDKKHTENTYELELKVEDDSTAELLLFADEDGNGLSLTIDTKQGKVTLDRSKAGEQYALDYGSQRSCQIPQQKTSINIFVDKSIVEIFINKGETVFTSRVFPKKGQNGIHLVSGQVEGNYFELTD

SEQ ID NO: 9637 - protein, 628 aa, Tulipa gesneriana
MGGRDLESSTPLLHHEPYSPRKTITTILSCITAVALLLSLVTLLNTKHEADHRPPDVAFPMSRGVFEGVSEKSTASLIGSAARFPWTDAMLQWQRTGFHFQTEKNWMSDPDGPMFYKGWYHIFYQHNPDSAVWGNITWGHAVSRDLIHWFHLPIAFFPDQWYDARGPLTGSATFLPDGRIAMLYTGITTEFVQVQCQVYPEDVDDPLLLKWFKSDANPILVPPPGIGSKDFRDPTTAWYDVAEASWKLAIGSKDEQHNGISLIYRTYDFVSYELLPILLHAVEGTGMWECVDFYPVLTNSTVGLDTSVPPGPGVRHVLKASLDDDKHDYYAIGTYDVVSGTWTPDDVESDVGIGWRYDYGKFYASKTFFDSAKGRRVLWGFTGETDSEQNNRLKGWASVLPIPRTILFDQKTGSNLLLWPVEEVERLRTSRQDFENIDIGIGAVVPLDIGKAIQLDIVAEFEIDGATLEASVEADLGYNCSTSDGAFGRGVLGPFGFLVLSDEDLSEQTAIYFYVGRKMDGALHTFFCQDELRSSKANDLVKRVFGSIVPVLHGETFTMRILLDHSIVESFAQGGRTCITSRIYPTKAFDGAARVFIFNNATGAKVTAKSIKIWQMNSASIIPYPFKA

SEQ ID NO: 9638 - protein, 628 aa, Tulipa gesneriana
MGGRDLESSTPLLHHEPYSPRKTITTIVSSIVAAALLLSLITLLNTKHEADHHPPDVAFPMSRGVFEGVSEKSTASLIGSAARFPWTDAMLEWQRTGFHFQPEKNWMNDPDGPMFYKGWYHIFYQYNPVSAVWGNITWGHAVSRNLIHWFHLPIAFVPDQWYDANGALTGSATFLPDGRIAMLYTGITTEFVQVQCQVYPEDVDDPLLLKWFKSDANPILVPPPGIGSKDFRDPTTAWYDVAEASWKLAIGSKDEQHNGISLIYRTYDFVSYELLPILLHAVEGTGMWECVDFYPVLTNSTVGLDTSVPPGPGVRHVLKASLDDDKHDYYAIGTYDVVSGTWIPDDVEADVGIGWRYDYGKFYASKTFFDWAKGRRVLFGFTGETDSEQNNRLKGWASVLPIPRTILFDQKTGSNLLLWPVEEVERLRFNRQDFENIDIGIGAVVPLDIGRAIQLDIVAEFEIDGATLEASVEADLGYNCSTSGGTFGRGVLGPFGFLVLSDEDLSEQTAIYFYVGRKVDGALQTFFCQDELRSSKADDLVKRVFGSIVPVLHGEILTMRILLDHSIVESFAQGGRTCITSRIYPTKAFDGAARVFVFNNATGAKVTAKSIKIWQMKSASISPYPFKA

SEQ ID NO: 9639 - protein, 625 aa, Tulipa gesneriana
RDLESSTPLLHREPYSPRKTITTILSCITAAAILLSLITLLNTKHEADHHPPDVAFPMSRGVFEGVSEKSTASLIGSAARFPWTDAMLQWQRTGFHFQPEKNWMNDPDGPMFYKGWYHIFYQYNPVSAVWGNITWGHAVSRNLIHWFHLPIAFFPDQWYDARGALTGSATFLPDGSIAMLYTGITTEFVQVQCQVYPEDVDDPLLLKWYKSDANPILVPPPGIGSKDFRDPTTAWYDVAEASWKLAIGSKDEQHNGISLIYRTYDFVSYELLPILLHAVPGTGMWECVDFYPVLTNSTVGLDTSVPPGPGVRHVLKASLDDDKHDYYAIGTYDVVSGTWTPDDVEADVGIGWRYDYGKFYASKTFFDWPKGRRVLFGFTGETDSEQNNRLKGWASVLPIPRTILFDQKTGSNLLLWPVEEVERLRFNRQDFENIDIGIGAVVPLDIGRAIQLDIVAEFEIDGATLEASVEADLGYNCSTSGGTFGRGVLGPFGFLVLSDEDLSEQTAIYFYVGRKVDGALQTFFCQDELRSSKANDLVKRVFGSIVPVLHGEILTMRILLDHSIVESFAQGGRTCITSRIYPTKAFDGAARVFVFNNATGAKVTAKSIKIWQMKSASITPYPFKA

SEQ ID NO: 9640 - protein, 473 aa, Lactococcus lactis subsp. lactis
MKWSTKQRYRTYDSYSESDLESLRKLALKSPWKSNFHIEPETGLLNDPNGFSYFNEKWHLFYQHFPFGPVHGLKSWVHLVSDDLVHFEKTGLVLYPDTKYDNAGVYSGSALAFENFLFLIYTGNHRGEDWVRTPYQLGAKIDKNNQLVKFTEPLIYPDFSQTTDHFRDPQIFSFQGQIYCLIGAQSSQKNGIIKLYKAIENNLTDWKDLGNLDFSKEKMGYMIECPNLIFINGRSVLVFCPQGLDKSIVKYDNIYPNVYVIADDFTTGSKNQLKNAGQLINLDEGFDCYATQSFNAPDGSAYAISWLGLPETSYPTDKYNVQGVLSMVKKLSIKDNKLYQYPVEKMKELRQMEQDLLLADNNIITSNSYELEVDFRQQTSTLLSLMTNEKGDSALKVEIDKENNTITLIRNYEKRLAHVKIEKMNVFIDQSIFEIFINDGEKVLSDCRVFPNKNQYSIRSQNPIKIKLWELKK

SEQ ID NO: 9641 - protein, 1503 aa, Bacillus circulans
MREVKRGKKSGFAALAIWSLFFQLIAPGISAAAEPGADIEDALISEAESEIPVTDAVYQIENPGFETGDLTGWSVAEGGAFGPDSVSDETVWWAERIPYDQEGAYHLNGWKYPESETGVLRSSTFELGGSGWISFKLGGAKDPDKAFINIVEADTGQVVARYGNSAFTDVGFPDPAQGMRLANMEQYKADLSGHIGKKLYIEIVDHATSDWGLIFADAFFMYHESEPAEGIVATDIKPDFERYQIENPSFETGDLTGWTVIEGDAFGPNSVSDETVWWAERIPYDQEGAYHLNGWKYPESETGVLRSSTFELGGSGWITFKLGGGKHTDQVYVSVIEAETGNLIARYGNSAFTDVGFPDPAQGMRLANMEQYKADLSKHIGKKLYLEIVDHGVSDWGLVFADAFRTFHEIVPEDGVVAENIIPAEIANRGFETGNLDGWTVEGDAFHVTDEAHAAKEGNFYALSSTEGQGSITSNTFTLQGAGIINFTVLDILNPEGAYVALYDASSNTVIKITGNIGANEQISWKVQEHYNKKLYVKVVDQSGDAGIAVDGFQARTEGTVVHLGLDEGAGKKALEEVRNVEHDVNYVFNDARYMAPKDPRWTPRGVKGGALLFDGYSNYIEIDADETVPVSDALTIEAWVAPRSYEWGDGNKLSAIVNQSDQDKAEGFALGMYRHGTWSLQAGIGGRWIQAWVNDHPLEKYKWNYVAATFDKEDGMMRLYLNGEEVASQATPAGVPISPSGESLIVGKNNKPVELAGLFSFNMFSGLIDEVKVHNRALTNGEILAEYESAKALHGGVVPEIPNADIDEDPSVFDGDQHRPQYHAIPPQNWMNEAHAPIYYNGKYHLFYQHNPQGPYWHQIHWGHWVSDDMVHWENVRPALAPEAGSLDPDGAWSGSAAYDRNGNPVLFYTAGNDSESPNQRTGLATPADLSDPYLEQWVKYPEPVTEQNGIGIHNEFRDPFVWYDEETDKWYQLVTSGLPDFSSGTALVYVSDDMYNWEYKGPLYVSDRSLYPELGTVWELPVLLPLGTDSTGKKKHIFIINPHEKPEHVPPAKDVQRDVEVYYWIGTWDRDNFRFIPDREAPSKMDVGDGYLTAESGLVTPDGRTVVFSMVQNVRTPQAEYQSGWAHNLALPVALSLDEHDELRIEPIQELQSLRGNKLADISDKNLESANQLIKDIKGDMLEIVMEIDPGEAQKFGLKVRRSENGQEETLIYYDKSDSTFNVDRTKSSIDPDVRVDGIQGGYVNLDGENLKLHIFLDRSVVEAFANYKKKLTTRVYVGRYDSLGLQIWADGDITVKSMEVWAMNALTGEPAAPVYVPENWDNSVYKDITELPNHDFAMGDLTGWIAEGDAFQNIHVTDAKFFWDTIYFNPSQKIPGGYHLWGFNEQAGGDSLTGTLRSQNFVLGGNGRIDFLMSGGRDIDRLYVALVRASDGKELFKETATNYEEYQRKIWDASDYIGEELYIKVVDQSTGGFGHLNVDDFNVPVQVMRTDRSNRSNNRS

SEQ ID NO: 9642 - protein, 636 aa, Prunus cerasus
MDTNTTSYTPLPGDPFLSGPPATPRRPLKGFAVIFASVIFLMSLVALIINQGPPQQDGHHHEKQSASTASSETASFSRLPRGIAQGVSAKSNPSFSDEASYNWTNAMLSWQRTAFHFQPERNWMNDPNGPMFYKDWYHLFYQYNPNSALRGNITWGHAVSPDLIHGSTSRWLWSPIDGSMPTGLDWVCAILPDGQIVILYTGSTNESVQVQNLAYPANLSDPLLLDWVKYSGNPVLTPPAGIGSTDFRDPTTAWIGPDGLWRTTLGSKVNKTGISIVYTTANFIDYELLDGVLHAVPGTGMWECVTFYPVSINGSTGLKTSVNGPGVKHVLKASLDDTKMDHYAIGTYFVETNTWIPDDPKMDVGIGLKCDYGRYYASKTFYDQNKERRILLGWINETYTETDDLEKGWSSLQTIPRTVLFDNATGTNLLQWPVEEIEDLRLNSTEFSDVLVEAGTVVPLDIGTATQLDIFVDFEIEVLETESVNGSVGCGGGATDRSTLGPFGILVIADETLSELTPVYFRVSNSTDGDITTHFCADETRSSKAPEVYKTVYGDQVPVLDGETYSARVLVDHSIVESFAQGGRTVIASRIYPTEAIYGAARLFLFNNATGVNVKATLKIWQLNSAFIHPFPLHQI

SEQ ID NO: 9643 - protein, 488 aa, Bacillus megaterium
MLTINKIEQAQHSLNEAEKKVNHQYRLGYHIMAPANWINDPNGLVQYKGEYHVFYQHHPYDENWGPMHWGHVKSKDLVHWQHLPIALAPGDSFDKDGCFSGSAVDNEGELTLIYTGHNYIDKELDTFFQNQNIAVSKDGITFEKAEANPVIAEPPADSSHHFRDPKVWKHEGFWYMILGNSTKKQEGRVILYRSSNLQKWEYVGVLAKSDGDLGYMWECPDFFELDGKHVLMISPQGIEAKGDSYHNLFQTGYLVGEYNYGTNTFHHGSFTELDYGHDFYAVQTLLDDKGRRIAIGWMDMWEANMPTKEDGWCGALTLPRELTLREDKVLMNPVQELTSLRKTQYNMLTNKALSNSYVVEVNEDLLEIQAVFDLADCQASSVGIKIRGINNEETLMCYNLNEQKLLLDCTHSGKEDGVRKVALQAGETLALRIFVDRSSVEVFANEGQATMTSRIYPKESRLGIELFTEGGNVIVKELTYWNLKDIWG

SEQ ID NO: 9644 - protein, 1333 aa, Paenibacillus polymyxa
MRKAKGRKCWISGMVIWAMVLQLVVPGISVASENRTVAGETLVPKNDVKSSVTDAIYQIKNIPKNDMGLSVTDSVYQIRNPGFETGDLTGWTVVKGEAFGPNSVTDETTWWAEKIPYNQEGAYHLNGWKYDESATGIIHSSTFELGGSGWISFRLGGAKNPDKVFINIVEIDTGQVIARYGNSAFADVGFPDPALGMRLANMVQYKADLSTYLGKKLYVEVVDNATSDWGVIFADAFSMYHESEPAEGIVATDIKPDFKRYEIDNPSFETGNLDGWTVEGDAFEVTNEAHVSKEGNFFAKSSMQGKGSIASSTFTLQGTGTINFTILDILKPENAYVALYDANSNTLLMKTGNVSANEKISWKVQEHYNNKLYVKVVDHSNEASIAVDSFQASGKGTIFHLNLDEGAGKKALEKVHNLRHDVNYVFSNARYMASKDPRWTPRGIKGGALLFDGYSNYIEVNANDTVPVSDALTIEAWVAPRSYEWGDGNKLSAIVNQSDQDKAEGFSLGMYRHGTWSMQVGIGGQWIQVWVKDHPLEKYKWNYVAATFSKEDGKIKLYLNGEEVASQATPVNVPITPSTESLIIGKNNKPVELAGVFSFNMFSGLLDEVKLHNKALTNQEILAGYESVKALHGGSIPKILNADIDEDPSVFDGDQHRPQYHAMPPQNWMNEAHAPIYYNGKYHLFYQHNPQGPFWHQIHWGHWVSDDMVNWENVRPALAPEAGTLDPDGTWSGSAAYDRNGNPVLFYTAGNDSLSPNQRTGLATPADLSDPYLEKWVKYPKPVTEQNGKGIHNEFRDPFVWYDKEVDKWYQLVTSGLPDFSSGTALVYVSDDMYNWEYKGPLYVSDRSRYPELGTVWELPVLLPLGTDSTGKQKYIFMINPHEKPEHVPPANDVQRDVEVFYWIGTWDRDNFKFIPDQEAPSKMDVGDGYLTAESGLVTPDGRTVVFSMVQNVRTPQAEYQSGWAHNLSLPVSLSLDKHDKLHIEPIKELQSLRGKKWVDFSDKNLESANQLIKNVKGDILEIVMEIDPREAQKFGLKVRRSEKGQEETLIYYDKKNGTFNVDRTKSSIDPDVRVDGIQGGYVDLKGENLKLHIFLDRSVIEAFANYKKKLTTRVYVGRYDSLGLQIWADGDINIKSMQVWDMNALTGKPAAPVYVPDKWDNSVYKDITELPNHDFATGDLTGWITEGDAFQNVHVTNTQFFWDNIYFNPSHKIPGGYHLWGFNEQAGGDSLTGALRSQNFVLGGNGKINFLISGGRDIDRLYVALVRASDGKELFKETATNYEEYQRKIWDASDYIGEELYIKVVDQSKGGFGHINVDDFNVPVQVKKKTNN

SEQ ID NO: 9645 - protein, 512 aa, Paenibacillus polymyxa
MKELKSNYSETYRPQFHYSPEKNWMNDPNGLVYFEGEYHLFYQHTPHDTQPDFGNMHWGHAVSKDLVHWTELPPAIPPGEDGAIFSGSAVVDKNNTSGFFDEEGSGLVAIYTNEGNKSQPGKPQVQSIAYSKDKGRTWTKYEGNPVLFPTDTLDFRDPKVIWHDESSMWIMVLAVRDRVEFYTSPNLKEWSFASEFGSDIPHIHRGIFECPDIFRIQVDEDLNTTKWILMLSVGDRNGVNPDDPEPPAGGSGMMYFVGSFDGKSFTPDEALESIDTIKWVDYGSDFYAAVSWNGISNEDGRKIWLGWMNNWRYATTLPSKEWRGKTSIPRELQLRTYPEGLRLIQTPINELSQLRKPILSLQDLTIKPGMNVLSDISAAKAEIIAEFEIGTAVEFGFKVRKSANQETIIGYNISNEELFVDRTKSSATDFHSDFTAIHKATMKPEHERIQLSIYLDWSSVEVFGNHGKAIISDMIFPDFESKGLELYAIGGELRVVSLQINDLVSIWGNENV

SEQ ID NO: 9646 - protein, 485 aa, Paenibacillus polymyxa
MNVIRQEKYRPSYHFSPKSGWMNDPNGMVYYEGRYHLFYQHHPFGTTWGPMHWGHAVSTDLMNWEEQPIALEPDELGTIFSGSAVVDEQDTSGFFGGKPGLVAIFTHHASLPGTEQVRQCQSLAYSTDSGKTWIKYTGNPVLEDKECIDFRDPKVFWHKPTEQWVMVLACGQTIRIYHSPNLKEWTFASEFGHGIGSHDAVWECPDLFPLYIDEKREQVKWVMLVSIGDVPEIREGSRTQYFTGEFDGTTFVADAESEKVRWLDYGRDNYAGVCWSDIPAEDGRRLFMGWMSNWRYANQTPTERWRGAMSIPRELALETRKGTVALVQRPVRELEGLRTPVLSLTEPSWEEVRNALSALQLDCYELVAEFATTGDFGFKVRVSDEQETLVGYTSATQEVYVDRKRSGRSDFHEDFAGKHGASLTILPDRMDIRIYVDRSSIEVFFDRGQVAITDLIFPDAEAKGLEIFSAEEQITVFSLELYALK

SEQ ID NO: 9647 - protein, 493 aa, Geobacillus stearothermophilus
MKTHNSEKYRPTFHFSPKKNWMNDPNGLVYFKGEYHLFFQHNPNDSIWGPMHWGHAVSKDMIEWEELDIALYPDENGTIFSGSVVIDWNNTSGFFPKEPGMVAIFTQNLHDADHTTPIQTQSLAFSHDRGRTWTKYEKNPVLKHPTKVDFRDPKVFWHYESEKWIMVLATGQTVSIYSSPNLIDWQFESEFGENIGCHDGVWECPDLFELPVENSEEKKWVMFVSIGDNRQFDSGSRTQYFIGSFDGSNFKVDENNNEVLWLDFGKDNYAGVTFSDIPKEDGRRIYIGWMSNWRYANEVPTVGWRGQMTLPRVLSLRKIGDKLRVIQNPVKELDNYFTKQIVIHDEIISSGIQKKIDINQPSVEIVLNVNNLGAKQFGLVLHHTENQSTTITIDLLTNLLSLDRTNSGEVSFSENFLNNQVMKIHDTTKLNLRIIVDSSSVEIFVNEGAHALTSLIYPDKACEKISIFSLGGDIQLSNSYISFPNSIRRNFGY

SEQ ID NO: 9648 - protein, 445 aa, Geobacillus stearothermophilus
MKSETEREKIEQAYREIEKYRDKVEKDYYRLQYHLMPPVGLMNDPNGLIHWNGVYHVFYQWMPFHTGHGAKFWGHYTSCDLIHWKQEKIALAPSEWYDKDGCYSGSAIDHDGVLTLFYTGNVKDEHGNRQTYQCMAMSKNGIDFEKKGIVVTLPDGYTAHFRDPKVWKKGDKWYMIVGAQSESLDGKAVLFRSQNLRDWEHLGPITGGNSRQLGKFGYMWECPDLFELDGQEVLIVCPQGLEAEAMRYQNVHQSGYFVGRLDYEPAQFLHGPFAELDRGFEFYAPQTMLDAKGRRILIAWMGVPDQDEDKHPTITHRWVHALTLPRELKLKDRKLYQTPVEELQMLRKDKIAYSNVTIANEEMILEGISGDVIELNLENIRLSGGIMEIAIRNTARIIYHSDERVLTLERKSFANGLTEKRQCPFGTFALAAYVFRHVLDGGICE

SEQ ID NO: 9649 - protein, 653 aa, Bacillus subtilis
ADSSYYDEDYRPQYHFTPEANWMNDPNGMVYYAGEYHLFYQYHPYGLQWGPMHWGHAVSKDLVTWEHLPVALYPDEKGTIFSGSAVVDKNNTSGFQTGKEKPLVAIYTQDREGHQVQSIAYSNDKGRTWTKYAGNPVIPNPGKKDFRDPKVFWYEKEKKWVMVLAAGDRILIYTSKNLKQWTYASEFGQDQGSHGGVWECPDLFELPVDGNPNQKKWVMQVSVGNGAVSGGSGMQYFVGDFDGTHFKNENPPNKVLWTDYGRDFYAAVSWSDIPSTDSRRLWLGWMSNWQYANDVPTSPWRSATSIPRELKLKAFTEGVRVVQTPVKELETIRGTSKKWKNLTISPASHNVLAGQSGDAYEINAEFKVSPGSAAEFGFKVRTGENQFTKVGYDRRNAKLFVDRSESGNDTFNPAFNTGKETAPLKPVNGKVKLRIFVDRSSVEVFGNDGKQVITDIILPDRSSKGLELYAANGGVKVKSLTIHPLKKVWGTTPFMSNMTGWTTVNGTWADTIEGKQGRSDGDSFILSSASGSDFTYESDITIKDGNGRGAGALMFRSDKDAKNGYLANVDAKHDLVKFFKFENGAASVIAEYKTPIDVNKKYHLKTEAEGDRFKIYLDDRLVIDAHDSVFSEGQFGLNVWDATAVFQNVTKES

SEQ ID NO: 9650 - protein, 677 aa, Bacillus subtilis
MKKRLIQVMIMFTLLLTMAFSADAADSSYYDEDYRPQYHFTPEANWMNDPNGMVYYAGEYHLFYQYHPYGLQWGPMHWGHAVSKDLVTWEHLPVALYPDEKGTIFSGSAVVDKNNTSGFQTGKEKPLVAIYTQDREGHQVQSIAYSNDKGRTWTKYAGNPVIPNPGKKDFRDPKVFWYEKEKKWVMVLAAGDRILIYTSKNLKQWTYASEFGQDQGSHGGVWECPDLFELPVDGNPNQKKWVMQVSVGNGAVSGGSGMQYFVGDFDGTHFKNENPPNKVLWTDYGRDFYAAVSWSDIPSTDSRRLWLGWMSNWQYANDVPTSPWRSATSIPRELKLKAFTEGVRVVQTPVKELETIRGTSKKWKNLTISPASHNVLAGQSGDAYEINAEFKVSPGSAAEFGFKVRTGENQFTKVGYDRRNAKLFVDRSESGNDTFNPAFNTGKETAPLKPVNGKVKLRIFVDRSSVEVFGNDGKQVITDIILPDRSSKGLELYAANGGVKVKSLTIHPLKKVWGTTPFMSNMTGWTTVNGTWADTIEGKQGRSDGDSFILSSASGSDFTYESDITIKDGNGRGAGALMFRSDKDAKNGYLANVDAKHDLVKFFKFENGAASVIAEYKTPIDVNKKYGLKTEAEGDRFKIYLDDRLVIDAHDSVFSEGQFGLNVWDATAVFQNVTKES

SEQ ID NO: 9651 - protein, 677 aa, Bacillus subtilis
MKKRLIQVMIMFTLLLTMAFSADAADSSYYDEDYRPQYHFTPEANWMNDPNGMVYYAGEYHLFYQYHPYGLQWGPMHWGHAVSKDLVTWEHLPVALYPDEKGTIFSGSAVVDKNNTSGFQTGKEKPLVAIYTQDREGHQVQSIAYSNDKGRTWTKYAGNPVIPNPGKKDFRDPKVFWYEKEKKWVMVLAAGDRILIYTSKNLKQWTYASEFGQDQGSHGGVWECPDLFELPVDGNPNQKKWVMQVSVGNGAVSGGSGMQYFVGDFDGTHFKNENPPNKVLWTDYGRDFYAAVSWSDIPSTDSRRLWLGWMSNWQYANDVPTSPWRSATSIPRELKLKAFTEGVRVVQTPVKELETIRGTSKKWKNLTISPASHNVLAGQSGDAYEINAEFKVSPGSAAEFGFKVRTGENQFTKVGYDRRNAKLFVDRSESGNDTFNPAFNTGKETAPLKPVNGKVKLRIFVDRSSVEVFGNDGKQVITDIILPDRSSKGLELYAANGGVKVKSLTIHPLKKVWGTTPFMSNMTGWTTVNGTWADTIEGKQGRSDGDSFILSSASGSDFTYESDITIKDGNGRGAGALMFRSDKDAKNGYLANVDAKHDLVKFFKFENGAASVIAEYKTPIDVNKKYHLKTEAEGDRFKIYLDDRLVIDAHDSVFSEGLFGLNVWDATAVFQNVTKES

SEQ ID NO: 9652 - protein, 493 aa, Bacillus subtilis
MSSLIAGLIEDPEDDFGYGKLTRLGTAASLAAAITVGRPILHYTAKNTWLNDPNGLVWHQGVYHLFYQNNPFDNVWGNMSWGHATSTDLLHWTEHPVAIACNEEEDVFSGSIVVDHGNTSGFGTAEDPALVAIYTSAFKEGSVHQGTQAQSLAFSTDAGMTWSKYAGNPVLGRGSAHFRDPKVFRYEGPAGSRWIMVAVEAQHQQVVLYRSADLKDWEYLSTFGPANASDGEWECPLPVDGDPDNVKWVLVVNINPGAVAGGSGGQYFVGDFDGVQFPADPDSLVPTDADGNVDLRHCLWLDWGRDYYAAVSFSNAPENRRIMIGWMNNWDYANSLPTSPWRSSMSLAREIELATVDGFPRLVQRPVLPLDSGEPARTIQNMELTTPCCNCPTRRPPGSAQLIEAEILPGTARHIAFRLLGAPDGSAATVLSFDALTSRLTLDRRNSGNTAFTISSRRLNPQPVKASTGGALRLKVIIDQCSVEVFAQTAGLC

SEQ ID NO: 9653 - protein, 490 aa, Clostridium acetobutylicum
MNSLEFIKKVSYIEEKYRDKVEKDYYRQNYHLMPKVGFMNDPNGLIEINGEYHVFYQYNPFYPDEKHVCWGHFRSKDLITWECLPVALSPLEWYDSHGCYSGSAVNKGGKLVLMYTGNVKDSKGERETYQCLAESSDGVEFKKPYINPVIKNQHEGYTRHFRDPKVWKHNDKWYMVLGAQREEEKGSTVLYCSDDLQNWSIVHEILGSNLSKFDFLGYMWECPNLFTLDNKDVLLFCPQGVDKQGDLYNNIYQCGYVLGSLNYETGEFSCGDFLELDRGFEFYAPQVMKTSDGRTLLLGWMGLPDREVSPTIDNRWLHCLTIIRELKMKDNKVVQKPLRELKRLRKGKVEYKNKIIKDTETKLDGINGDSFELKCKFEFDKVNQFGIKMRYNSHKDEEILMFYDAINEKIVFDRSKDGFHKEADAERKCFIKNNGKVKMHIFMDKSSVEIFINDGEETFTSRIYPSKDSKDIVFYSKGGEVRLSVDHWQI

SEQ ID NO: 9654 - protein, 1142 aa, Clostridium acetobutylicum
MRLKQIAVLLLSSIVIVTGNNWVKANTSISSTSAYRREAYRPQYHFTPDIGWMNDPNGMVYYHGVYHLFYQYNPYDTVWGPMHWGHAESKDMINWKQKSIALAPDTNGDIFSGSVVVDWNNSSGLFNKVSDHTGLVAFYTTNSAVASQQYQSMAYSTDDGSTWTKYNGGKPIIAQPENTPDFRDPKVSWDNEHNKWVMVLAAGNQTQFYSSNDLKNWTKTGEFGAEGQASHAGVWECPDLYQMTVSGQNIKKWVLSINLGSSVSPDSPPAGGSGMMYVVGDFDGSKFIADPKFTVSNNIGASDIVKGYYLLPGDTINVYDAKEGGNLLGSATVEDNQSTATVNLTKDLGNGSGKVWVAIVRNKIEKNRQEIDYSSEVASTSTGTSAVAPSGQDIINPDFETGDLTGWTATGNEWSNKNVVDNKTWGGGSGKYHCSGYRDPATGGAGDPGTGTLESTVFTLGGNGSINFLVAGGDLPKSAYVTLEDATTRKELTQFNASGLSTATVRRVNWDASAYLGKKLRIKVVDNATGAFGHIDVDDFHVYNTVPYKPPVNQLPSYPVNWIDYGPDFYAGVTWNDTTQQTNATTSEYGKYVPDGRRILLGWMSNWAYADRTPTTTWRSADSIPREEKLVATNDGYKITQQPIKELSSIRKKPTKTLTNTTITKGNTMSLGSEGIYEITSKFNINSTTSSEFGINVKVGGNQYTTIGYDKATSILFLNRHNSSSLNFLDYMPNKQEAPLKPDAKGNIKLQILVDKDSVEVFGSNDDNASVTITDQIFSDNLNNGIKLYSVGGSTKVNSLAITPLKSAVFTPYINNTLPYNPKSVQKTLPTSDFESGVVPGFWKQAEGYDTTFTVSNSTSWWGGTYNQDGKSFLTTFGENGDTASGILKSNYFKLSGDGKISFLIGGGNHPTSEYLALVDGVNGNKLFSATGADSETLRSVTWDASKYVGKVVYLEIADESQSGWGHINLDDINVPHFNCNIKKYRTTGTWGEIGPYGMKGSSTSAVSNGIYMASQNARNLSYEAKVSNVTSLSKTKSGEAGLVFGASKNLANAYEFNIDTSKGVARLFNKKNGKDLAPEVKETLSSDKSYQLKVLISGTNVKAYLDGTKIFDVNITSYAGRNVGLDVLDGSADFQDVSFQN

SEQ ID NO: 9655 - protein, 514 aa, Clostridium acetobutylicum
MKRKKLKLLTILMIFTVIILIVLLSLYIQNNSTIKSTTTKKQNYREVYHFTVPNKWKNDPQRPVFFDGEYHYYYLYNKDYPNGNGTEWRQATSKDLVTWKDEGVCIPKYTNENGDIWSGSFVVDAQNTAGFGKGAIVAIVTQPSASMDKQEQFLWYSTDRGRTFKPYSNQPIIPNPCTKDFRDPKIIWDFKNNKWVMVLAEGTKIGFYESYNLKNWQHTGDFFTNNIGIVECPDIFMMQSNDGNYKWILGTSANGKVSGEPNTYAYWVGNYDGKKFIADISTPKWLDYGFDWYAAVTFESENQSKNLKKRYALAWMNNWDYANNTPTIQNRFNGMDSIVREITLSKQKDNTYSLLSKPIKRIENITTSIDQFKQISVKGLKHLKVQGKAYQLDTDINWVDAKNVGIRLRESLDKKRHIDVGIFTEGKYSYVNRAYTGNPDKSKKYVESRAPFDINNKKVHLRIFVDKVSVEVFIDDGKITYSNEVFPRPEDKGITLFSIKGKAVFKNITIKHID

SEQ ID NO: 9656 - protein, 485 aa, Clostridium beijerinckii
MPNPKSYQEINQNLNNYYSNKEMSIWRNNFHIEMPFGLINDPNGLSYYDNKFHIFYQWNPFGCEHKTKHWGLVTTTNFINFTKPQMALKPQDWFDRNGCYSGCGLVKDNELKLYYTGNVKGPNGERESYQCLAIYRKDGIIEKHGVIIDKQPNGYTAHFRDPYVFIEDDTYYMILGVQSEDLKGRALIYESIDSVKWNLLGELKTDMKDFGYMWECPNIIRISKGKHAFIFSPQGLEKEELKNQNLYQSGYVIGELDIESVELKNHSRFKELDMGFDFYAPQIFKHNGENIMIGWIGMPDRDSEYPTYEHGWMYSLTMPRVLEYKNNVLYQKPINEMRNLRENELINIKGLILNNYNLALESRSVEIMISIEVEDIESTEVKFKFNDEYILITYDNKRQLCTVDRSNMNIGGKGIRKFKLNSSKELKMNVFIDNSVMEIYYQDGLEVTTLTYYPKSEGLELQIRNDSKITINELNMWNLRSVKYE

SEQ ID NO: 9657 - protein, 477 aa, Escherichia coli O157:H7 EDL933
  unsure (1)..(477): unsure at all Xaa locations
MTQSRLHAAQNALAKLHERRGNTFYPHFHLAPPAGWMNDPNGLIWFNDRYHAFYQHHPMSEHWGPMHWGHATSDDMIHWQHEPIALAPGDENDKDGCFSXSAVDDNGVLSLIYTGHVWLDGAGNDDAIREVQCLATSRDGIHFEKQGVILTPPEGIMHFRDPKVWREADTWWMVVGAKDPGNTGQILLYRGSSLREWTFDRVLAHADAGESYMWECPDFFSLGDQHYLMFSPQGMNAEGYSYRNRFQSGVIPGMWSPGRLFAQSGHFTELDNGHDFYAPQSFVAKDGRRIVIGWMDMWESPMPSKREGWAGCMTLARELSESNGKLLQRPVHEAESLRQQHQSISPRTISNKYVLQENAQAVEIQLQWALKNSDAEHYGLQLGTGMRLYIDNQSERLVLWRYYPHENLDGYRSIPLPQRDTLALRIFIDTSSVEVFINDGEAVMSSRIYPQPEERELSLYASHGVAVVQHGALWQLG

SEQ ID NO: 9658 - protein, 494 aa, Staphylococcus aureus subsp. aureus Mu50
MTEWTREERYQRIEDVDTEYFKTLKQQVDQSKFRQQFHIQPETGLLNDPNGLIFYKGKYYVSHQWFPLGAVHGLKYWYNYTSDDLINFKPEGPILNPDTKYDSHGVYSGSAFEYNGHLYYMYTGNHRDNHWQRHASQMIARLKEDGSVEKFPKPVISQQPEGYTSHFRDPKVFKYGEKYYAIIGAQNNDQQGRLLLYNTEDIINWHYLGEINTELDDFGYMWECPDYFNLDNQDVILICPQGIEPKGNQFKNIYQSGYILGKFDIEKLTYEHENFVELDNGFDFYAPQTFLDEKGRRVLIGWMGLPEIEYPTDNEGWAHCLTIPRVLNVENGQLKQRPYPALEKLRHNKETALGYANKFTRKLHPYEGKQYELIIDILDNDATEVYFELRTSKTSSTLIAYNKRENKITLDRSDSGLLPTNVEGTTRSTILDTPLKQLQIFVDTSSIEIFCNDGERVLTSRIFPTEDALGIKTSTESGQVYLQFTKYDLKDEHK

SEQ ID NO: 9659 - protein, 231 aa, Lactobacillus plantarum
SYFDGQWHLFYQVFPFGPVHGLKSWQHVTSKNLVDWHDEGLAIRPDTPYDSHGAYTGTALPIDDQLFIMYTGNVRTADWQRESYQLGAWMDTDNHIKKLSRPLIAHAPAGYTSSFRDPDLIRTDHGYYALIGAQTTTEIGAILVYFSKDLTTWTCQGELNVPANARGYMIECPNLVWIDQQPVLLFCPQGLSQTTTPYQNIYPNMYLVADQLDLAQAQFTEPHALTQLDDG

SEQ ID NO: 9660 - protein, 493 aa, Bacillus sp. snu-7
MSSLIAGLIEDPEDDFGYGKLTRLGTAASLAAAITVGRPILHYTAKNTWLNDPNGLVWHQGVYHLFYQNNPFDNVWGNMSWGHATSTDLLHWTEHPVAIACNEEEDVFSGSIVVDHGNTSGFGTAEDPALVAIYTSAFKEGSVHQGTQAQSLAFSTDAGMTWSKYAGNPVLGPGSAHFRDPKVFRYEGPAGSRWIMVAVEAQHQQVVLYRSADLKDWEYLSTFGPANASDGEWECPLPVDGDPDNVKWVLVVNINPGAVAGGSGGQYFVGDFDGVQFPADPDSLVPTDADGNVDLRHCLWLDWGRDYYAAVSFSNAPENRRIMIGWMNNWDYANSLPTSPWRSSMSLAREIELATVDGFPRLVQRPVLPLDSGEPARTIQNMELTTPCCNCPTRRPPGSAQLIEAEILPGTARHIAFRLLGAPDGSAATVLSFDALTSRLTLDRRNSGNTAFTISSRRLNPQPVKASTGGALRLKVIIDQCSVEVFAQTAGLC

SEQ ID NO: 9661 - protein, 489 aa, Lactobacillus gasseri
MEWTREQRYRKYKDWDAQTLLDLQAQAATSPYQMHYHIHPLSGLLNDPNGFSYYNGEYHLFCQSYPFGPVHGVKSWIHFASPDLVHWHYLGPAIDPDSDLDNAGAYSGSAMEHNGKLLLMYTGNHRDEDWTRIPYQVIAEMDENNHITKPDAAAILPPEHVSEHFRDPQLFKHDGKYYVLLGAQDAETKSGHIDIYESDDLKTWHENGYLDLGKDEMGYMIECPNLVFVNNYPVLIFCPQGLDKAISDYQNIYPNMYWIGKDINLNEAKFTPLQSHPANLDDGFDVYATQAFNAPDGNAYAISWVGLPDCTYPTDKENWANCYSQVKRLEIKDGALYQHPVDAIKNLRHNETQLNDEKIISQKAGKQYELKLYLAAGQAGKLHLASNDDLSASLVIDFNTAQDAKLTIDRASSGPAVNPDYGATRTIGLNDNEDLDLDIFVDGSLCEIFINDGRHVATLRFFARSSNQKIAFDKDTKYTGRLWSMNSIL

SEQ ID NO: 9662 - protein, 348 aa, Lactobacillus gasseri
  unsure (1)..(348): unsure at all Xaa locations
MINRRKQFEYLVSNLKDIPKENLNKEKNSVKRSPYHQRIHIESLFGMLGDPNGFSYFNGYYHLFHQWFPMKYSTNPNYFQQGWFHWKSRNLVDWIPVGEAMNNDTVFDKYGVYSGSAIPINNKLFLMYNGNSWTNTDTDDWHRVPSQLGAYMNENDNVAKLANPLIKGPISGYTGHFRDPKIFKKNGKYYSIIGAQTKAKTGTVLIYESQNLKLWNKVGEIKTNFEKNGYMWECSDYFELDNKGVVLFCPQGLKSKGNQFLNAFQACYAIGNKLDFRNLYFEGKKYEEIDSGFDFYAPQTMIAPDGRRILSAWMSIMNSNSPLIKYHYDXXXXXXXXXXXXXXXXXLF

SEQ ID NO: 9663 - protein, 172 aa, Clivia miniata
YHLFYQYNPYAAVWGNITWGHSVSHNLIDWIDLEHAIEPTEPYDINGCWSGSATIIPGRNPVILYTGADFKKRQVQNLAVPKNPRDPYLKEWIKAKNNPLMTPINGIDPQFFRDPTTAWNGPDKRWRVVVGSQIDGHGTALLYHSKDFVAWTKREKPLHFSNKTTMWECPDF

SEQ ID NO: 9664 - protein, 479 aa, Streptococcus pyogenes M1 GAS
MDLPQAIRYRPYKEWSSKDYQAITEKMAQSPWHSQFHVEPKTGLLNDPNGFSYFNGRYHLFYQNWPYGAAHGLKQWVHMTSTDLVHFTETRSRLLPDHAHDSHGAYSGSAYAIDDKLFLFYTGNVRDANWVRTPLQVGAWMDKQGNISKIPQVLIEQPDDVTEHFRDPQLFSYQGQFYAIIGAQGLDGKGKIKLYKAVDNHVDNWRFIADLDFDDSGTEYMIECPNLVFVDDKPVLIFSPQGLAKADLDYQNIYPNTYKIFESFNPETGQLLGGGALQNLDFGFEAYATQAFSSPDGRVLAVSWIGLPDIDYPTDRYDYQGALSLVKELRIKDGILYQTPVSALQNLRGPAELFHNKIDSSNCYELELTIPGQKKLDLLLFADQKGNGLRLKVDTTKGQLSIDRSRAGVQYAQDYGTVRSCQIPQGHVTLNVYVDNSILEIFINQGQKVLTSRVFPTHGQTGIQVVEGQAFGHYYEMRY

SEQ ID NO: 9665 - protein, 691 aa, Beta vulgaris
MSESSDSILPYSYAPLATKNEFNGFGPGENQPRRRSLKIGLAVFSTLMICALLMSILDYNNNVIENNVSNNNAPNKYNNVVGDLTLRPPPENVASVEVMPGSKDLLFKVSRGKPHGVSQKANSLPLRGLKVPFFDWNDLQLAWQRTAFHFQPQKNWMNDPNGPLYYNGWYHFFYQYNPAGAVWGNIVWGHAVSKDLIRWKHLPIAMVADRWYDFNGVWTGSATILPDGQIMMLYTGSTNESVQVQNLAYPANLSDPLLLEWVKYPGNPVLVPPPGIGKLDFRDPTTAWLTSEGKWRITIGSKLNKTGISLVYDTTDFKNYELLSNILHAVQGTGMWECVDFYPVSVAEPNGLDTSTNGPSVKHVLKASMDDDRNDYYTLGTYIEDNVTWVPDNPAIDVGIGLRYDYGRFYASKTFYDHEKKRRILWGWITEGDSEAADVKKGWASLQGIPRTVLFDQKTRTNLVQWPVEEVETLRQNNKDFDKVEVPAGSVVPLDVSAATEIDIIAEFDIDKEALENLPVSEEHYSCPASKGAAQRGALGPFGLLVLANNDLAEQTPVYFYVIKTLSGSFKTFFCTDLSRSSAATDVFKNIYGSTVPVLKGEKLSMRILVDHSIVEAFAQGGRTCITSRVYPTKAIYKETKLYVFNNATTATVTASIKTWQMSSARMLRNSIWVHLIMFFSTFIFIGRPLI

SEQ ID NO: 9666 - protein, 675 aa, Beta vulgaris
MSESSDSTLPYSYAPLATKNEFNGFGPGENQPRRRSLKIGLAVFSTLMICALLMSILDYNNNVDVNNVSKNNAPNKYNVGDLTFRPQPENVASVEVMPGSKDLLFKVSRGKPHGVSQKANSLPLRGLKVPFFDWNDLQLAWQRTAFHFQPQKNWMNDPNGPLYYNGWYHFFYQYNPAGAVWGNIVWGHAVSKDLIRWKHLPIAMVADRWYDFNGVWTGSATILPDGQIMMLYTGSTNESVQVQNLAYPANLSDPLLLEWVKYPGNPVLVPPPGIGKLDFRDPTTAWLTSEGKWRITIGSKINKTGISLVYDTTDFKNYELLSNILHAVQGTGMWECVDFYPVSVAEPNGLDTSTNDQSVKHVLKASMDDDRNDYYTLGTYIEDNVTWVPDNPAIDVGIGLRYDYGRFYASKTFYDHEKKRRILWGWITEGDSEAADVKKGWASLQGIPRTVLFDQKTRTNLVQWPVEEVETLRQNNKDFDKVEVPAGSVVPLDVSAATEIDIIAEFDIDKEALENLPVSEEHYSCPASKGAAQRGALGPFGLLVLANNDLAEQTPVYFYVIKTLSGSFKTFFCTDLSRSSAATDVFKNIYGSTVPVLKGEKLSMRILVDHSIVEAFAQGGRTCITSRVYPTKAIYKETKLYVFNNATTATVTASIKTWQMSSARLQENIEETKER

SEQ ID NO: 9667 - protein, 943 aa, Actinomyces naeslundii
MSRTTRALSALTAFCLLAAASTLASMPAAASGQARPVSAAPNAPAAPTAPKADQTGERWRPQSHYTPQKNWMNDPNGLVYYDGEYHMFYQYNPEGSDWGNMSWGHAVSKDLVHWQELGVAIPHTSQYGVFSGSAVIDTKNTSGLGSPDNPAMVAVWTRADVGGNQSQSLAYSTDKGGTWNLYNNGDPVLDIGSNEFRDPKVFWDQASGRWTMVVSHATEHRVSFYSSPDLIHWTEQSSFGGEGITSAVWACPDFFPLPVDGSSQEVKWVLVVTVADSAQYFVGSWDGTTFTPDEIPHYSGEEGTTLADFENGYAGWKADGAAFGSGPATGDLPGHQGKAYVDSFGSGDADTGTLTSDEFTVSSSYINLRTAGGKHPYNPQATGDNGGGRLLAGFDGSWEGWTVEGSAFAATPPQGATPAQQPLVNHSSAGLLNTYLDAATGQGSDAPTGTATSPTFTIDSAYLNLLMGGGNNPRPEGGADGGSRVSVVELIVDGKVVRSATGRNLEELNWQSWDVSDLKGKSAQIVVTDTATGGWGHILLDEVRASDKKASPIADNTSVNLVVDGKVVASATGNNSGTLEWTSMNVAAYKGRKARLVIEDRNGNAEDWGHLMVDQILQSDTKAFSGADVVPRLDYGKDYYAAVTWDNVPNGKRYQVGWMSNWAYVRDLPTTTWRTAMSTVREMGLTRVNGKLRLTAQPVTALESLRTGQELIRKDTDIPVGETSLGKAAQGTSLDISVDLSPSASSFAGLKVLDNGEQYTLIGYDSQAKQLVVDRTHSGVTDFSPKFPARSTAPLSPDSKGQVHLRIIVDAHSVEVFAADGTPVITQTVYPEQDATGVSLYAEGGTAHLGSLSLWHLGSVQDAGAPAEGPDSPGAGKPAVQGPARGQAKAASASASPTAAAAGKSVSARFPLARTGTSLTLGALGAAAAATGAYSLRLPRRRS

SEQ ID NO: 9668 - protein, 439 aa, Streptococcus pneumoniae TIGR4
MGDKKYTVEKANRFIAENKHLVNTQYKPEEHFSAEIGWINDPNGFVYFRGEYHLFYQFYPYDSVWGPMHWGHAKSKDLVTWEHLPVALAPDQDYDRNGCFSGSAIVKDDRLWLMYTGHIEEETGVRQVQNMVFSDDGIHFEKISQNPVATGSDLPDELIAADFRDPKLFEKDGRYYSVVAAKHKDNVGCIVLLGSDNLVEWQFESIFLKGGEHQGFMWECPDYFELDGKDCLIMSPMRYQREGDSYHNINSSLLFTGKVDWREKRFIPESVQEIDHGQDFYAPQTLLDDQNRRILIAWMQTWGRTLPTHDQEHKWACAMTLPRILRLEDGKLRQFPVKKGQYQIQIDKDCHYHLGNDIDYLEFGYDSNAQQVYIDRSHLIQKILGEEEQDTSRRYVDIEAKELEVVLDKNSIEIFVNQGEASLTATYYLTVPAELSRID

SEQ ID NO: 9669 - protein, 484 aa, Streptococcus pneumoniae TIGR4
MEWTTERRYRLYQDWTQEEIQHIKENMAQSPWHTHYHVEPKTGLLNDPNGFSYFDGKWILFYQNFPFGAAHGLKSWAQLESDDLIHFKETGIKVLPDTPLDSHGAYSGSAMQFGDNLFLFYTGNVRDKNWIRHPYQIGALMDKEGKITKIDKILIDQPADSTDHFRDPQIFNFQGQYYAIVGGQDLEKKGFVRLYKAVNNDYTNWQAVGDLDFANDRTAYMMECPNLVFVEEQPVLLYCPQGLDKKVLDYDNIFPNMYKIGASFDPKNAKMVDVSQLQNMDYGFEAYATQAFNAPDGRALAVSWLGLPDVSYPSDRFDHQGTFSLVKELTIKDDKLYQYPVAAIKDLRASEEAFSNRSQTKNTYELELNLEANSQSEIVLLADKEGKGLSINFDLVNGQVTVDRSQAGEQYAQEFGTTRSCPIENQATTATIFIDNSVFEIFINKGEKVFSGRVFPHADQNGILIKSGNPTGTYYELDYGRKTN

SEQ ID NO: 9670 - protein, 439 aa, Streptococcus pneumoniae R6
MINKTFTVEKANRFIAENKHLVNTQYKPEEHFSAEIGWINDPNGFVYFRGEYHLFYQFYPYDSVWGPMHWGHAKSKDLVTWEHLPVALAPDQDYDRNGCFSGSAIVKDDRLWLMYTGHIEEKTGVRQVQNMAFSDDGIHFEKISQNPVATGSDLPDELIAADFRDPKLFEKDGRYYSVVAAKHKNNVGCIVLLGSDNLVEWQFESIFLKGVEHQGFMWECPDYFELDGKDCLIMSPMRYQREGDSYHNINSSLLFTGKVDWGEKCFIPESVQEIDHGQDFYAPQTLLDDQNRRILIAWMQTWGRTLPTHDQEHKWACAMTLPRILRLEDGKLRQFPVKKGQYQIQIDKDCHYHLGNDTDYLEFGYDSNVQQVYIDRSHLIQKILGEEEQDTSRRYVDIEAKELEVVLDKNSIEIFVNQGEASLTATYYLTVPAELSRID

SEQ ID NO: 9671 - protein, 484 aa, Streptococcus pneumoniae R6
MEWTTERRYRLYQDWTQEEIQHIKENMAQSPWHTHYHVEPKTGLLNDPNGFSYFDGKWILFYQNFPFGAAHGLKSWAQLESDDLVHFKETGIKVLPDTPLDSHGAYSGSAMQFGDNLFLFYTGNVRDENWIRHPYQIGALMDKEGKITKIDKILIDQPADSTDHFRDPQIFNFKGQYYAVVGGQDLEKKGFVRLYKAVNNDYTNWQAVGDLDFANDRTAYMMECPNLVFVEEHPVLLYCPQGLDKKVLDYDNIFPNMYKIGASFDPKNAKMVDVSQLQNMDYGFEAYATQAFNAPDGRALAVSWLGLPDVSYPSDRFDHQGTFSLVKELTIKDDKLYQYPVAAIKDLRASEEAFSNRSQTKNTYELELNLEANSQSEIVLLADKEGKGLSINFDLVNGQVTVDRSQAGEQYAQEFGTTRSCPIENQATTATIFIDNSVFEIFINKGEKVFSGRVFPHADQNGILIKSGNPTGTYYELDYGRKTN

SEQ ID NO: 9672 - protein, 174 aa, Fortunella crassifolia
YHLFYQYNPKGAVWGNIVWAHSTSRDLINWFPHPPTIFPSQKSDVNGCWSGSATILPGEKPVILYTGIDPDKKQVQNIAYPKDLSDPYLKEWVKSDKNPLMAPDNVNNINASSFRDPTTAWQGPDNIWRMAIGSKINDLGFAILYKSKDFLKWVKAKRPLHAARHTGMWECPDF

SEQ ID NO: 9673 - protein, 490 aa, Staphylococcus epidermidis ATCC 12228
MEWTREERYQRIEDVDETYLEQLKHQVDTSLYRQTFHIQPEMGLLNDPNGLIYYEGYYYISHQWFPLGAVHGLKYWFNYKSKDLLHFEPQGTLLKPDTKYDSHGVYSGSAFEYQNHLYYMYTGNHRDQHWNRISSQMIARMNKDGKIEKFPKPVIHGQPEGYTSHFRDPKVFEKNSQLYAILGAQNENEMGRLLLYRSQDVVDWHFEGEIKTNLTQFGYMWECPDYFRLGNKDVILMCPQGVEAEGDKYRNIYQSGYMIGDLNFNNLFFDHESFQELDNGFDFYAPQTFVDADGQRILIGWMGLPDTEYPTDKEGWAHCLTIPRVLTIENGKLKQRPFKQLEDLRTNKETALGYANKFKRKLHPYEGKQYEMIIDILENDASEIYFELRSSRSESTLITYNKHENKLTLDRTDSGTLPSNVDGTTRSTILDSPLKQLQIFVDTSSIEIFCNDGERVLTSRIFPNEDATGIKASTESGQVYLKFTKYELKG

SEQ ID NO: 9674 - protein, 543 aa, Agrobacterium tumefaciens str. C58 (Cereon)
MWLKAKKDAEAGAVSFSNQNGKFAEVSSVNTEEFSFRIYQVFGGGHVELSYDTVTTAVSVIYWFTASDVLETGITVVHTKPDNAAPELPGSYHFRPPFGWMNDPNGFGRFEGRPHLFYQHYSHGLRWNTMHWGHAVSSDYLRWRHLPIFLFPSEDLTTRPDKRGGAYSGSTIPLVEGSGIRVFFTEQVQDRIPEQQIQLTATSSDLIMAGQADVILAHRPDGQGLTPDFRDPYVFRGPDGLWKMLLGSQSDGGGVILLYETLDPTAASGWTYVGKLWVETRYKTTAIECPCLLPLDGPANARSTRWVLIYGLMHSEDPETGRKNLTMADVGWFDGKVFTKEFGQELDFGTDNYAFQAFLDGDSIIGIGWLANWADANPEIDFPTSMTLPRRIHYANGELLTPPIGAAESLRSHILDRTRLAAGERVTFINGAVEILIELASSDAAFELALDHPTVTLGLVSDETGLWIRHEDGRDGASPHYIAKGARASRIRIFLDYGSIEVFANRGRYVGTKRIEGFEPVRSALLRADPGAVVHATSWALKP

SEQ ID NO: 9675 - protein, 479 aa, Streptococcus pyogenes MGAS8232
MDLPQAIRYRPYKGWSSKDYQAITEKMAQSPWHSQFHVEPKTGLLNDPNGFSYFNGRYHLFYQNWPYGAAHGLKQWVHMTSTDLVHFTETRSRLLPDHAHDSHGAYSGSAYAIDDKLFLFYTGNVRDANWVRTPLQVGAWMDKQGNISKIPQVLIEQPDDVTEHFRDPQLFSYQGQFYAIIGAQGLDGKGKIKLYKAVDNHVDNWRFIADLDFDDSGTEYMIECPNLVFVDDKPVLIFSPQGLAKADLDYQNIYPNTYKIFESFNPETGQLLGGGALQNLDFGFEAYATQAFSSPDGRVLAVSWIGLPDIDYPTDRYDYQGALSLVKELRIKDGILYQTPVSALQNLRGPAELFHNKIDSSNCYELELTIPGQKKLDLLLFADQKGNGLRLKVDTTKGQLSIDRSRAGVQYAQDYGTVRSCQIPQSHVTLNVYVDNSILEIFINQGQKVLTSRVFPTQGQTGIQVVEGQAFGHYYEMRY

SEQ ID NO: 9676 - protein, 464 aa, Bacillus anthracis str. A2012
MSKYKTILQSNKDELHSLYEIANQDSWKPIYHIHPPFGLMNDPNGVSYYNDEYHVFYQWYPFGPIHGMKHWGHVKSKDLINWERMPVAIIPTESYESHGAYSGSAIVKDDLLHLLYTGNIKNPDDSRDAKQCMATMDSQYTMTKYSNNPVIDIIPDGYTKHVRDPKVWKHNDIYYMLLGAQRKNKTGTLLLYKSKDLYNWNFQGEITTNLKEFGFMWECPDYFQLSGKDVLLFSPQGIEKDREDFHNIYNVVYAIGHFDIKNLYFHIDSYYEADKGFDFYAPQTLEDSTSRRLLFAWAGSSEITYPSDDYMWAHCLTLPRELTLEDNILKQKPVSELTKLRTTKKEISGDITAGLNVLSTLDNEGSYELIVTLKTEDAKRFGLSLFHNEEECFPITFNREQGTISIDRGNFYHQFGGEYGFERCKKIDIQDTIELQIFVDKSIVEILIYDGSTVFTSRVFPRKD

SEQ ID NO: 9677 - protein, 480 aa, Streptococcus pyogenes SSI-1
MMDLPQAIRYRPYKEWSSKDYQAITEKMAQSPWHSQFHVEPKTGLLNDPNGFSYFNGRYHLFYQNWPYGAAHGLKQWVHMTSTDLVHFTETRSRLLPDHAHDSHGAYSGSAYAIDDKLFLFYTGNVRDANWVRTPLQVGAWMDKQGNISKIPQVLIEQPDDVTEHFRDPQLFSYQGQFYAIIGAQGLDGKGKIKLYKAVDNHVDNWRFIADLDFDDSGTEYMIECPNLVFVDDKPVLIFSPQGLAKADLDYQNIYPNTYKIFESFNPETGQLLGGGGLQNLDFGFEAYATQAFSSPDGRVLAVSWIGLPDIDYPTDRYDYQGALSLVKELRIKDGILYQTPVSALQNLRGPAELFHNKIDSSNCYELELTIPGQKKLDLLLFADQKGNGLRLKVDTTKGQLSIDRSRAGVQYAQDYGTVRSCQIPQGHVTLNVYVDNSILEIFINQGQKVLTSRVFPTQGQTGIQVVEGQAFGHYYEMRY

SEQ ID NO: 9678 - protein, 487 aa, Clostridium perfringens str. 13
MEFLNDEDINKKSKEYYNKTKDIWRDNFHFEPPFGLINDPNGLSYYKGEYYIFFQWNPYGCEHKNKHWGIVKTKNFKDFSIPKIALTPKEYFDKDGCYSGGSIVKDGNLQVFYTGNVKGEKGERISYQCKGILEENGQLKKLGPVISTLPKGYTAHFRDPYIWENNGYYYMILGIQTEKLKGRCVIYKSNDLDNWKFYGELKTSYEDFGFMWECPSFFKIDNKDILIFSPQGIKEEEFRYQNIYQSGYLIGNLNYDTLEFKNNNEFKELDMGFDFYAPQVFKDEKGRNILIGWMGLPEKEEFHCSRENGWIFSLTMPRELTLKNGVLHQNPIEEMRKLRGDKIVSLKNILIEDLNFNEVKENSYELKLDIERREASKIEINFMESNEEHTSLIYDFKKEICIIDRNSMINGEKGIRKFKLHSNGNLKINMFVDKSSVEIYFQDGIEVASLKLYPKKDSFNLSLKSEEGKIKINSLSIWEMNEVNYNE

SEQ ID NO: 9679 - protein, 494 aa, Staphylococcus aureus subsp. aureus MW2
MTEWTREERYQRIEDVDTEYFKTLKQQVDQSKFRQQFHIQPETGLLNDPNGLIFYKGKYYVSHQWFPLGAVHGLKYWYNYTSDDLINFKAEGPILNPDTKYDSHGVYSGSAFEYNGHLYYMYTGNHRDNHWQRHASQMIARLKEDGSVEKFPKPVISQQPEGYTSHFRDPKVFKYSEKYYAIIGAQNNDQQGRLLLYNTEDIINWHYLGEINTELDDFGYMWECPDYFNVDNQDVILICPQGIEPKGDQFKNIYQSGYILGKFDIEKLTYEHENFVELDNGFDFYAPQTFLDEKGRRVLIGWMGLPEIEYPTDNEGWAHCLTIPRVLNVENGQLKQRPYPALEKLRHNKETALGYANKFTRKLHPYEGKQYELIIDILDNDATEVYFELRTSKTSSTLIAYNKRENKITLDRSDSGLLPTNVEGTTRSTILDTPLKQLQIFVDTSSIEIFCNDGERVLTSRIFPTEDALGIKTSTESGQVYLQFTKYDLKDEHK

SEQ ID NO: 9680 - protein, 433 aa, Corynebacterium glutamicum ATCC 13032
MCGAMHTELSSLRPAYHVTPPQGRLNDPNGMYVDGDTLHVYYQHDPGFPFAPKRTGWAHTTTPLTGPQRLQWTHLPDALYPDASYDLDGCYSGGAVFTDGTLKLFYTGNLKIDGKRRATQNLVEVEDPTGLMGGIHRRSPKNPLIDGPASGFTPHYRDPMISPDGDGWKMVLGAQRENLTGAAVLYRSTDLENWEFSGEITFDLSDAQPGSAPDLVPGGYMWECPNLFTLRDEETGEDLDVLIFCPQGLDRIHDEVTHYASSDQCGYVVGKLEGTTFRVLRGFSELDFGHEFYAPQVAVNGSDAWLVGWMGLPAQDDHPTVAREGWVHCLTVPRKLHLRNHAIYQELLLPEGESGVIRSVLGSEPVRVDIRGNISLEWDGVRLSVDRGGDRRVAEVKPGELVIADDNTAIEITAGDGQVSFAFRAFKGDTIER

SEQ ID NO: 9681 - protein, 480 aa, Shigella flexneri 2a str. 301
MIKMTQSRLHAAQNALAKLHEHRGNTFYPHFHLAPPAGWMNDPNGLIWFNDRYHAFYQHHPMSEHWGPMHWGHATSDDMIHWQHEPIALALGDDNDKDGCFSGSAVDDNGVLSLIYTGHVWLDGAGNDDAIREVQCLATSRDGIHFEKQGVILTPPEGIMHFRDPKVWREADTWWMVVGAKDPGNTGQILLYRGSSLREWAFDRVLAHADAGESYMWECPDFFSLGDQHYLMFSPQGMNAEGYSYRNRFQSGVIPGMWSPGRLFAQSGHFTELDNGHDFYAPQSFLAKDGRRIVIGWMDMWESPMPSKREGWAGCMTLARELSESNGKLLQRPVHEAESLRQQHQSVSPRRISNKYVLQENAQAVEIQLQWALKNSDAEHYGLQLGTGMRLYIDNQSERLILWRYYPHENLDGYRSIPLPQRDTLALRIFIDTSSVEVFINDGEAVMSSRIYPQPEERELSLYASHGVAVLQHGALWLLG

SEQ ID NO: 9682 - protein, 477 aa, Shigella flexneri 2a str. 2457T
MTQSRLHAAQNALAKLHEHRGNTFYPHFHLAPPAGWMNDPNGLIWFNDRYHAFYQHHPMSEHWGPMHWGHATSDDMIHWQHEPIALALGDDNDKDGCFSGSAVDDNGVLSLIYTGHVWLDGAGNDDAIREVQCLATSRDGIHFEKQGVILTPPEGIMHFRDPKVWREADTWWMVVGAKDPGNTGQILLYRGSSLREWAFDRVLAHADAGESYMWECPDFFSLGDQHYLMFSPQGMNAEGYSYRNRFQSGVIPGMWSPGRLFAQSGHFTELDNGHDFYAPQSFLAKDGRRIVIGWMDMWESPMPSKREGWAGCMTLARELSESNGKLLQRPVHEAESLRQQHQSVSPRRISNKYVLQENAQAVEIQLQWALKNSDAEHYGLQLGTGMRLYIDNQSERLILWRYYPHENLDGYRSIPLPQRDTLALRIFIDTSSVEVFINDGEAVMSSRIYPQPEERELSLYASHGVAVLQHGALWLLG

SEQ ID NO: 9683 - protein, 479 aa, Streptococcus pyogenes MGAS315
MDLPQAIRYRPYKEWSSKDYQAITEKMAQSPWHSQFHVEPKTGLLNDPNGFSYFNGRYHLFYQNWPYGAAHGLKQWVHMTSTDLVHFTETRSRLLPDHAHDSHGAYSGSAYAIDDKLFLFYTGNVRDANWVRTPLQVGAWMDKQGNISKIPQVLIEQPDDVTEHFRDPQLFSYQGQFYAIIGAQGLDGKGKIKLYKAVDNHVDNWRFIADLDFDDSGTEYMIECPNLVFVDDKPVLIFSPQGLAKADLDYQNIYPNTYKIFESFNPETGQLLGGGGLQNLDFGFEAYATQAFSSPDGRVLAVSWIGLPDIDYPTDRYDYQGALSLVKELRIKDGILYQTPVSALQNLRGPAELFHNKIDSSNCYELELTIPGQKKLDLLLFADQKGNGLRLKVDTTKGQLSIDRSRAGVQYAQDYGTVRSCQIPQGHVTLNVYVDNSILEIFINQGQKVLTSRVFPTQGQTGIQVVEGQAFGHYYEMRY

SEQ ID NO: 9684 - protein, 421 aa, Leuconostoc mesenteroides subsp. mesenteroides ATCC 8293
MFIKDDINHFEKYHLYPTQGLLNDPNGLIYFKGQYHVFFQWNPHACNHKYKEWGHFVSNDLKTWTRLETALKPSLPDMDSAGIYSGTAFVKDDKLYVFYTGNVRDESGRSVASHQMWAVSEDGIHFEKLGELFPHPEGFTKDVRDPKVWQGRNGRYYLMVGARSNENIGDILIYESENFSQWQLHGSLIEGELTDIRGYMIECPDLIEIDGKQILMFSPQGLPADEENYRYQNIHNTGYVVGTFDEETLHFKPETSFKEVDKGFEFYAPQTMHTNEGRKIMWGWAGMMTPEREASTPTIASNNWVHVLTIPRELHVTSDNLLTQTPISEILHTKPLTNFGAINVGQYTIDSHDNWTLSFGENMTLVRNKNQLILSRRQWENGEIEKRLVVGDINHTLLIVDTDIIEVFTNNNQSVMTARYF

SEQ ID NO: 9685 - protein, 554 aa, Bifidobacterium longum DJO10A
  unsure (1)..(554): unsure at all Xaa locations
MMIRKSAATRSTPTSSCVRWKRPRPERTAMTDFTPETPVLTPIRDHAAELAKAEAGVAEMAAKRNNRWYPKYHIASNGGWINDPNGLCFYKGRWHVFYQLHPYGTQWGPMHWGHVSSTDMLNWKREPIMFAPSLEQEKDGVFSGSAVIDDNGDLRFYYTGHRWANGHDNTGGDWQVQMTALPDNDELTSATKQGMIIDCPTDKVDHHYRDPKVWKTGDTWYMTFGVSSADKRGQMWLFSSKDMVRWEYERVLFQHPDPDVFMLECPDFFPIKDKDGNEKWVIGFSAMGSKPSGFMNRNVSNAGYMIGTWEPGGEFKPETEFRLWDCGHNYYAPQSFNVDGRQIVYGWMSPFVQPIPMEDDGWCGQLTLPREITLGDDGDVVTAPVAEXXXXXXXXXXXXXXXXXHGSVTLDMDGEQIIADDAEAVEIEMTIDLAASTAERAGLKIHATEDGAYTYVAYDGQIGRVVVDRQAMANGDRGYRAAPLTDAELASGKLDLRVFVDRGSVEVYVNGGHQVLSSYSYASEGPRAIKLVAESGSLKVDSLKLHHMKSIGLE

SEQ ID NO: 9686 - protein, 500 aa, Pseudomonas syringae pv. syringae B728a
MSFSVNAMSNPMSPALERAHHALEEGLSQLIHDYRPGYHLAPPAGWMNDPNGVVFFRGEYHVFYQHHPFDAKWGPMYWGHAKSADLVHWQHLPIALAPGDDFDRDGCFSGSAVVCGDTLALIYTGHIWLGDVGDERFIRQVQCLATSTDGISFVKHGAVIDTPPQDEMIHFRDPKVWRQDGHWYLIAGARLGDKPLLPLYRSKDLHAWEFVSYVSSGEEGDGYMWECPDLFGLNERDVLLYSPQGMPAQRYERLNRFHTGYRVGQVDSQWQFTGGPFIELDSGHDFYAAQTLVAADGRRLLWAWIDMWESPTPTEAHHWRGMLGLPRELEVRENRLCVHPARELTALRDASLPGTAWWSDAGSQWLTDIHGDMLEIHVQLDLLDCIEGHLGVALRCSPDGQEQTLLYYDASLKRLILDRTQSGTHVSGQRSVAIDPQQNQLELRIFLDRSSIEVFEQNGSFSFSSRLYPQTDSLGVKLVANGTGGRVCIANAWQLSSGYL

SEQ ID NO: 9687 - protein, 518 aa, Bifidobacterium longum NCC2705
MTDFTPETPVLTPIHDHAAELAKAEAGVAEMAANRNNRWYPKYHIASNGGWINDPNGLCFYKGRWHVFYQLHPYGTQWGPMHWGHVSSTDMLNWKREPIMFAPSLEQEKDGVFSGSAVIDDNGDLRFYYTGHRWANGHDNTGGDWQVQMTALPDNDELTSATKQGMIIDCPTDKVDHHYRDPKVWKTGDTWYMTFGVSSADKRGQMWLFSSKDMVRWEYERVLFQHPDPDVFMLECPDFFPIKDKDGNEKWVIGFSAMGSKPSGFMNRNVSNAGYMIGTWEPGGEFKPETEFRLWDCGHNYYAPQSFNVDGRQIVYGWMSPFVQPIPMEDDGWCGQLTLPREITLGDDGDVVTAPVAEMEGLREDTLDHGSITLDMDGEQIIADDAEAVEIEMTIDLAASTAERAGLKIHATEDGAYTYVAYDDQIGRVVVDRQAMANGDRGYRAAPLTDAELASGKLDLRVFVDRGSVEVYVNGGHQVLSSYSYASEGPRAIKLVAESGSLKVDSLKLHHMKSIGLE

SEQ ID NO: 9688 - protein, 479 aa, Streptococcus agalactiae 2603V/R
MNLPTEIRYRPYDEWTEEDKENIVKNVSKSPWRATYHLEAKTGLLNDPNGFSYFNGKFHLFYQNWPFGAAHGLKQWVHTESDDLVHFKETGIKLKPDHVNDSHGAYSGSALAIDDKLFLFYTGNVRDMKWNRDPRQIGAWMTNDGKITKFDKVLISQPNDVTEHFRDPQIFNYDNQFYAVIGAQNSKKCGFIKLYKALNNDIHHWEFVGDLDFGGTGSEYMIECPNIIFVKGKPVLLYSPQGLDKNELDYQNIYPNTYKIGQYFDANSSKIVEPSPIYNLDYGFEAYATQGFNTSDGRAFIVSWIGLPDIDYPSDQFDYQGAMSLVKELSIKNGNLYQYPVPAMKNLRQHQAEFKTQLQTNNTYELELLVPRNDLSSFVLFANPKGQGLSITIDTVKGKVIIDRSQAGQQYATEFGTSRQCDIPKDATSINIFIDKSIFEIFINKGEKVFTGRVFPDAEQSGIQLKEGHVHGKYFELKY

SEQ ID NO: 9689 - protein, 479 aa, Streptococcus mutans UA159
MNLPQNIRYRRYQDWTEEEIKSIKTNVALSPWHTTYHIEPKTGLLNDPNGFSYFNGKFNLFYQNWPFGAAHGLKSWIHTESEDLVHFKETGTVLYPDTSHDSHGAYSGSAYEIGDQLFLFYTGNVRDENWVRHPLQIGAFMDKKGNIQKFTDVLIKQPNDVTEHFRDPQIFNYKGQFYAIVGAQSLDKKGFIKLYKAVDNDIKNWQEVGNLDFGGSKSEYMIECPNLVFINEQPVLIYSPQGLSKSELDYHNIYPNTYKVCQSFDTEKPALVDASEIQNLDFGFECYATQAFNAPDGRVYAVSWIGLPDIDYPSDSYDYQGALSLVKELSLKHGKLYQYPVEAVRSLRSEKEAVTYKPETNNTYELELTFDSSSVNELLLFADNKGNGLAITVDTKMGTILIDRSKAGEQYALEFGSQRSCSIQAKETVVNIFVDKSIFEIFINKGEKVFTGRVFPNDKQTGIVIKSGKPSGNYYELKY

SEQ ID NO: 9690 - protein, 1423 aa, Streptococcus mutans UA159
MEEETVCKNWFMRKSGKSWIFGCAVFFVLGLATALPVAAEEISQTTAADTAVTEVRTEDSSQTSSQETAVTETTQSEGTASKQLTTPAVADQTTEPTDNEPISSSDGASSPYQVTDTTEPQQTLTPADSEPQAKADVQQAAAPKKEEINPVTNLEDMSHDTNGTWEVREDGIHSNAIGKGDSFLYSQSSGKNFVYATDVTFKQNSGAAALVFRSNNDSNNKNMYAVNVDIGGHKAKFWRWVDNKDIQLIDERDVVPTADNRYTLKVVAVNNWISYYVNDILMASTGDYVLQKADKGQNTVIPEGHFGLLNWNGDMVFQNTKFALLDDTTAPLIDNITVRSDRGNVEKQGQFFSEEPLHIQYVSNDASQVSLDIAKHNPAATVTVEDKTGRVYTDPSHLPVNVGANYFTVKSTVIDSFGRTVTLTYRINVHRRQNDEVYYNELYRDQYHYSVKDGWANDPNGLVYYNGVYHLFHQFYDDTKWGPMHWAHATSTDLIHWKEEPIAFYPDSNGYMFSGCVVVDEHNSSGLFKTAKGGLVAIITANGNGQRMELAYSEDEGKTWQKYDRIVADWSNDPLQNQDFRDPKVFHWNNQWFMVLAGGPLRIYSSNNLKDWKVESTYPDLHTECPDMYPIVANDGVLKWVLSRGGRFYKVGDFKQVDGKWTFIADDAYKDKDQVMNFGKDSYAAMTYYVHDFGTETRPTIPKLTEVNWMNTWEDYCNLVADTVGQDFNGTFNLNLDLGLINENGQYILTQTPVKAYDSLRDVNTALHFKDVTVDANNTLLKDFKGDSYEIVSHFRPDEKTTKVGFNLRVGNGQATKVIYDLQTETLSIDRSQSGTILSAAFAKVNSQHVTKNADGSIDLHIYVDRASVEVFSKNNTVAGANQIFPNPEAVGASIIVEGGKAQADISVYQMKTIWTDKKDTAKPVAMNTTTAKELALQVGQSQDLQVYLAPASVRQDVEWTISDPSLVRTSQKGNVLHLTAVKKGKLTITAISKENPSLSKTFTISITLNNFKTNLKGLQSVTGKWYVDDETLYDSNTSSNDYYMASQKPGFKEYDYDIDLKYQRGLINLFVASGNIDPSQAYSVQFGDSETVRLYRFAGDTIAEANMGKRINDDQYHHIKVTKTKNSIIISVDGQEVMSHNFDQVDSYFNDAYVGLGLWDGAVEFQNFFVTDHATTPKPDSDPTPQPDAPEALAQERELIDPATGVRVILQKGELASIVRVKVSHIETNDAHTPAVLNAKDYDLFNITPIDKNEKVVAITKPATVLLPIDAGKVVDKVVYLPNTDKEENLPFTIVSLTDSNGKKQSYVRFTAEHFSEYGLVYQAENQTNLKSKEKQDNVAISYPLNLEQEVKVSSISRKYAANKTADVNSVQQTEPSVMSSSPKATLPDTGDHKTDLSQLGVLAMIGSFLVEIAGYFKKRKD

SEQ ID NO: 9691 - protein, 479 aa, Streptococcus agalactiae NEM316
MNLPTEIRYRPYDEWTEEDKENIVKNVSKSPWRATYHLEAKTGLLNDPNGFSYFNGKFHLFYQNWPFGAAHGLKQWVHTESDDLVHFKETGIKLKPDHVNDSHGAYSGSALAIDDKLFLFYTGNVRDMKWNRDPRQIGAWMTSDGKITKFDKVLISQPNDVTEHFRDPQIFNYDNQFYAVIGAQNSKKCGFIKLYKALNNDIHHWEFVGDLDFGGTGSEYMIECPNIIFVKGKPVLLYSPQGLDKNELDYQNIYPNTYKIGQYFDANSSKIVEPSPIYNLDYGFEAYATQGFNTSDGRAFIVSWIGLPDIDYPSDQFDYQGAMSLVKELSIKNGNLYQYPVPAMKNLRQHQAEFKTQLQTNNTYELELLVPRNDLSSFVLFANPKGQGLSITIDTAKGKVIVDRSQAGQQYATEFGTSRQCNIPKDATSVNVFIDKSIFEIFINKGEKVFTGRVFPDAEQSGIQLKEGHVHGKYFELKY

SEQ ID NO: 9692 - protein, 501 aa, Lactobacillus plantarum WCFS1
MIWNRKTRYTPYEQWPATKLPQLVAQVRQSKWRMQHHIQPTSGLLNDPNGFSYFDGQWHLFYQVFPFGPVHGLKSWQHVTSKNLVDWHDEGLAIRPDTPYDSHGAYTGTALPIDDQLFIMYTGNVRTADWQRESYQLGAWMDTDNHIKKLSRPLIAHAPAGYTSSFRDPDLIRTDHGYYALIGAQTTTEIGAILVYFSKDLTTWTCQGELNVPANARGYMIECPNLVWIDQQPVLLFCPQGLSQTTTPYQNIYPNMYLVADQLDLAQAQFTEPHALTQLDDGFDVYATQAINAPDGRALAVSWIGLPEISYPTDRENWAHCLSLVKELTLKDGHLYQNPVAAVDDLRTTAHDLVFEQQRATVAALNGSFELLLTVPADKTVTVNIADQQESGQLQVTVDANHGQVMIDRRHTGNSFAEDYGQTRQVELTAHKTIKIRLIIDVSVFECYIDNGYSVMTGRFFLNATPSRLNVQGDTTAVTGKVWEWRQSEHTGVDNNETKIK

SEQ ID NO: 9693 - protein, 493 aa, Pseudomonas syringae pv. tomato str. DC3000
MSNPMSPALERAHHALEEGLSQVIHDYRPGYHLAPPAGWMNDPNGVVYFRGEYHVFYQHHPFDAKWGPMYWGHAKSADLVHWQHLPIALAPGDDFDRDGCFSGSAVVCGDTLALIYTGHTWLGEVGDERFIRQVQCLATSLDGINFVKHGAVIDSPPQDTIIHFRDPKVWQQDEHWYLIAGARLGDKPLLPLYRSADLHAWELVSYVSSGNEGDGYMWECPDLFRLDGRDVLLYSPQGMPAQGYERLNKFHTGYRVGQIDSQWQFSGGPFIELDNGHDFYAAQTLVAADGRRLVWAWLDMWESPTPTTAHHWRGMLGLPRELEVRDERLCVHPARELTGLRHASVPGTPWWSEPGTRWVTEVRGDLLEIHVHLDLLDCLEGHLGVALRCSADGKEQTLLYYDASLKRLILDRDPSGSHVSGQRSVAIDPKQGQLELRVFLDRSSIEVFDKNGSFSLSSRLYPQADSLGVKLIANGTGGRVCIANAWTLASGYR

SEQ ID NO: 9694 - protein, 677 aa, Bacillus subtilis subsp. subtilis str. 168
MKKRLIQVMIMFTLLLTMAFSADAADSSYYDEDYRPQYHFTPEANWMNDPNGMVYYAGEYHLFYQYHPYGLQWGPMHWGHAVSKDLVTWEHLPVALYPDEKGTIFSGSAVVDKNNTSGFQTGKEKPLVAIYTQDREGHQVQSIAYSNDKGRTWTKYAGNPVIPNPGKKDFRDPKVFWYEKEKKWVMVLAAGDRILIYTSKNLKQWTYASEFGQDQGSHGGVWECPDLFELPVDGNPNQKKWVMQVSVGNGAVSGGSGMQYFVGDFDGTHFKNENPPNKVLWTDYGRDFYAAVSWSDIPSTDSRRLWLGWMSNWQYANDVPTSPWRSATSIPRELKLKAFTEGVRVVQTPVKELETIRGTSKKWKNLTISPASHNVLAGQSGDAYEINAEFKVSPGSAAEFGFKVRTGENQFTKVGYDRRNAKLFVDRSESGNDTFNPAFNTGKETAPLKPVNGKVKLRIFVDRSSVEVFGNDGKQVITDIILPDRSSKGLELYAANGGVKVKSLTIHPLKKVWGTTPFMSNMTGWTTVNGTWADTIEGKQGRSDGDSFILSSASGSDFTYESDITIKDGNGRGAGALMFRSDKDAKNGYLANVDAKHDLVKFFKFENGAASVIAEYKTPIDVNKKYHLKTEAEGDRFKIYLDDRLVIDAHDSVFSEGQFGLNVWDATAVFQNVTKES

SEQ ID NO: 9695 - protein, 480 aa, Bacillus subtilis subsp. subtilis str. 168
MTAHDQELRRRAYEEVEKKEPIANSDPHRQHFHIMPPVGLLNDPNGVIYWKGSYHVFFQWQPFQTGHGAKFWGHYTTQDVVNWKREEIALAPSDWFDKNGCYSGSAVTKDDRLYLFYTGNVRDQDGNRETYQCLAVSDDGLSFEKKGVVARLPEAILTAHFSRSEVWEHEGTWYMVIGAQTENLKGQAVLFASDNLTEWRFLGPITGAGFNGLDDFGYMWECPDLFSLQGSDVLIVSPQGLEADGFRYQNVYQSGYFVGRLDYNKPELKHGEFTELDQGFDFYAPQTLEDDQGRRILFAWMAVPDQDEGSHPTIDCHWIHCMTLPRQLTLSGQKLIQQPLPELKAMRRNEKKIHINMHGSSGALPVEKPERTEILLEDIHTESGFSISIRGTATFSFHKDEGIVTLERKSFDGKRTEARHCRIKDLHTVHMFLDASSVEIFINNGEEVFSARYFPFPGNHEVTASATGKSEMNVGIWTLM

SEQ ID NO: 9696 - protein, 516 aa, Bacillus subtilis subsp. subtilis str. 168
MNYIKAGKWLTVFLTFLGILLFIDLFPKEEHDQKTKSKQKPDYRAAYHFTTPDKWKNDPQKPIYFDGKYHYFYLYNRDYPKGNGTEWRHAVSEDLVHWTDEGVAIPKYTNPDGDIWTGSVVVDKENTAGFGKNALVAIVTQPSAKDKKQEQYLWYSTDKGKSFKFYSGNPVMPNPGTDDFRDPKVIWDDQDNKWVMVMAEGSKIGFYESDNLKDWHYTSGFFPEQAGMVECPDLYMMRASDGTNKWVLGASANGKPWGKPNTYAYWTGSFDGKEFKADQTEAQWLDYGFDWYGGVTFEDSKSTDPLEKRYALAWMNNWDYANNTPTMKNGFNGTDSVIRELRLKEQDGTYSLVSQPIEALEQLTVSTDEIEDQDVNGSKTLSITGDTYQLDTDLSWSELKNAGVRLRESEDQKRHIDVGIFAEGGYAYVNRAATNQPDKSNTYVESKAPYDVNKRKVHLKILVDKTTIEVFVGDGKTVFSNEVFPKPEDKGITLYSDGGTASFKNITVKHFDSIHE

SEQ ID NO: 9697 - protein, 486 aa, Enterococcus faecalis V583
MNQWTDELRYAPYSSWTSAHLENLTSIIAQSSWRFKYHIQPQTGLLNDPNGFSYFNNQWHLFYQAFPFGSVHGLKSWAHLTSSDLIHWDYEGIALYPDSEYDSHGVYSGSALTIDNQLCLFYTGNVRDQTWQRFAYQNIAWLNSLGAITKESTPFLPIDPNYSSHFRDPMVFPYQEGLVLLIGASDLNGQGKIVVYFSKDRNVHNFHQLGELTFTNQELGYMVECPNLVFIDGQPVLLFCPQGLSPSVKSYQNIYPNMYTLAETFDLENLSLVQAGPFENLDEGFDVYATQAFNAPDGRALAVSWIGLPEITYPSDVEGWANGLSLVKELTIHNGKLFQYPVSETEMLRQSATTLSNGCHFLSTASFELEVDIPKNEIAFIRLLANETGSKGLLITIDTIHGKITLDRTFAGQSFAEKYGTIRETKIRKNKSVQLTIFVDCSVAEIYVNKGEKTMTGRFFPDKAQQYLHLSKTAKACFYELENTNN

SEQ ID NO: 9698 - protein, 479 aa, Enterococcus faecalis V583
MELSREIRYRAYSEWSKDEITKIKENIKQSPWHASYHIEPKTGLLNDPNGFSFFNGKFTLFYQNWPFGAAHGLKKWVHAESDDLVHFNITGTELLPDTKYDSHGAYSGSAYEVDGKLLLLYTGNVRDKNWRRDSFQLGAWMDRSYNITKCEDVFINKPEDVTDHFRDPQIFDYKGQFYAIVGGQSLEKRGVIKLYKAVGNSVEKWSEVGNLDFCSSGSEYMIECPNLLFVNDTPILIYCPQGLDKSELSYDNIYPNTYKICQSFDERTAKLVGSSKIKNLDYGFDVYATQGFNSPDGRTLIVSWIGLPDVEYPTDKYDYQGAMSLVKELSINNGKLYQYPVDAIKTLRTSCEDFTSKIETSNTYELEVTFPANQKSELLLFADDKGNGLSLIVDTKEGKVILDRSKAGIQYAIDFGMTRECLIDTEETIANIFVDNSIIEIFINKGEKVFTSRVFPEKDQNGIQIKSGKPIGKYFELEY

SEQ ID NO: 9699 - protein, 610 aa, Bacteroides thetaiotaomicron VPI-5482
MNVFLPVKQLQTFLICFILMTISVSTRAADSPLLIKNLGEGHCLVRVNTSQNYLLLPVEDASPDVRISMIVNNKEVKNFDVRLAIHKVDYFVPVDLSDFSGKTVSFKFKMNSNDPIRVNLSPDNTACCKEMKLSDTFDTTNREKFRPTYHFSPLYGWMNDPNGMVYKDGEYHLFYQYNPYGSKWGNMNWGHAISKDLVNWEHRPVAIAPDALGTIFSGSAVVDHNNTAGFGAGAIIAIYTQNSDRQVQSIAYSTDNGRTFTKYENNPVLVSEARDFRDPKVFWYEATKRWIMVLAVGQEMQIFSSPNLKDWAFESSFGEGYGAHGNVWECPDLFELPVEGTNEKKWVLLCSLGDGPFGDSATQYFIGSFDGKKFSCDNQPNVTKWMDWGKDHYATVTWSDAPDNRRIAIAWMSNWQYANDVPTSQYRSPNSIPRDLSLFAIDGGIYLQSAPSPELLKLRGVSKKRSFKVNGTRIVKDLIPNNEGAYEIELSLKNQQAEIIGFRLYNDKGEEVDMQYDMKEKKFSMDRRKSGEVNFNENFPMLTWTAIEEDKDEMKLRLFVDRSSVEAFGDGGRFAMTNQVFPSEPYNHISFYSKGGAYKVDSFVVYKLKK

SEQ ID NO: 9700 - protein, 627 aa, Bacteroides thetaiotaomicron VPI-5482
MKTTPWIKLCKGAVLALTVSFGLTYCQSTKSTFTLEQKGDSLTIVHITHPTNYILLPIEEEEADESQVRLDTGNAADTDMDIRLAQTKVDYFVPFALPADTKVATLRIQKKSKDALCWEEIKLSDTFDTTNTDKFRPVYHHTPLYGWMNDANGLVYKDGEYHLYYQYNPYGSKWGNMHWGHSVSKDLMHWEHLAPAIARDTLGHIFSGSSIVDQENVAGYGAGSILAYYTSASDKNGQIQCLAYSKDNGRTFTKYEKNPVLRPSDGLKDFRDPKVFWYAPESKWVMIVSADKEMRFYDSHNLKDWNYLSSFGEGYGVQPCQFECPDMVELPVDGDINYKKWALIVNVNPGCYFGGSATQYFIGDFDGTKFICDNQPNVTKWLDWGKDHYATVCFSNTGDRVVAVPWMSNWQYCNIVPTRQFRSANALPRELGLYTQDNDIYLSAAPVAETKNLRKESKDVPSFTVDKDYHIESLLTDNEGAYELSLNIEAGKAEIMGFSLFNDKGEKVDIYFNLPEKKLVMDRTKSGIVDFGKNSSPHEIEAHDRRKTTSINYIDDFALATWAPIQKENEYKLDVFVDKCSVEIFLDGGKIAMTNLIFPTEPYNRMCFYSKGGTFAVDSFSVYRLGL

SEQ ID NO: 9701 - protein, 548 aa, Bacteroides thetaiotaomicron VPI-5482
MKTLSRTVLTLFVLSFSCLAAIAGEVSFKITKQYLNFPISHKENRGRMTFEVNGKPDLSVVIRLAPDEAEYWVFKDVSAFKGKTIKITYDGNEKGLSKIYQSDEIEGQAELYKEKNRPQFHFTTRRGWINDPNGLIYYEGEYHLFYQHNPFERDWENMHWGHAVSKDLIHWTELPDALYPDHLGTMFSGSAVIDYDNTAGFNKGKTPAMVAAFTAASSDRQVQGIAYSLDKGRTFTKYDKNPVINSKEKWNSQDTRDPKVFWYAPSKHWVLVLNERDGHSIYTSSNLKDWKYESHVTGFWECPELFELPVDGDKNHTKWVMYGATGTYMLGSFDGKVFTPEAGKYCYTTGSIYAAQTFTNIPASDGRRIQIGWGRISHPGMPFNGMMMLPTELTLRTTKDGIRLVNVPVKEVESLCKPLRSWKSLSSDEANRHLKEFYDADCLRIKTTIKLSHATDAGFNLFGQRMIGYDMNSNTLNGRFYSPQDPTSMELSADIYIDRTSIEVFIDGGLYSYSMERRPDTNNREGLHFWGNRIEVKDLQVFSVESIW

SEQ ID NO: 9702 - protein, 491 aa, Bacillus cereus ATCC 14579
MSKYKTILQSNKDELHSLYEIANQDSWKPIYHIHPPFGLMNDPNGVSYYNDEYHVFYQWYPFGPIHGMKHWGHVRSKDLINWERMPVAIIPTESYESHGAYSGSAIVKDGLLHLLYTGNIKKPDDSRDAKQCMASMDSQYTMTKYSNNPVIDIIPDGYTKHVRDPKVWKHNDMYYMLLGAQRENKTGTLLLYKSQDLYNWHFQGEITTNLKEFGFMWECPDYFQLSGKDVLLFSPQGIEKDGENFHNVYNVVYAIGHFDIKNLYFHVDSYYEADKGFDFYAPQTLEDSTSRRLLFAWAGSSEITYPSDDYMWAHCLTLPRELTLEDNILKQKPVSELTKLRTTKKDISGDITAGLNVLSTLDDEDSYELIVTLKTEDAKRFGLSLFHNEEECFPITFNREQGTISIDRGNFYHQFGGEYGFERCKKIDIQDTIELQIFVDKSIVEIFLYDGSTVFTSRVFPRKDMKHHIAIFSDAKLNFTITQYKLKRGIV

SEQ ID NO: 9703 - protein, 174 aa, Pyrus communis
YHLFYQYNPKGVVWGNIVWAHSTSTDLVNWTPHDAAIFPSQPSDINGCWSGSATILPSGKPVILYTGINPQNQQVQNLAFPKNLSDPFLREWVKVPQNPLMAPTQANRINASSFRDPTTAWLGPDKRWRVIIGSKQNQRGLAILYRSKDFLHWVKAKHPLHSAKKTGMWECPDF

SEQ ID NO: 9704 - protein, 432 aa, Thermotoga maritima
MFKPNYHFFPITGWMNDPNGLIFWKGKYHMFYQYNPRKPEWGNICWGHAVSDDLVHWRHLPVALYPDDETHGVFSGSAVEKDGKMFLVYTYYRDPTHNKGEKETQCVAMSENGLDFVKYDGNPVISKPPEEGTHAFRDPKVNRSNGEWRMVLGSGKDEKIGRVLLYTSDDLFHWKYEGVIFEDETTKEIECPDLVRIGEKDILIYSITSTNSVLFSMGELKEGKLNVEKRGLLDHGTDFYAAQTFFGTDRVVVIGWLQSWLRTGLYPTKREGWNGVMSLPRELYVENNELKVKPVDELLALRKRKVFETAKSGTFLLDVKENSYEIVCEFSGEIELRMGNESEEVVITKSRDELIVDTTRSGVSGGEVRKSTVEDEATNRIRAFLDSCSVEFFFNDSIAFSFRIHPENVYNILSVKSNQVKLEVFELENIWL

SEQ ID NO: 9705 - protein, 588 aa, Citrus sinensis
MDTPYHHLHSPPQYPPLLPEEQPSDAGPPASHRKPFKGFAAILASVIFLLSLVALIINQTQKPLPSQNNIVPTSKPTSFSNPEPRGVAEGVSAKSNSHLLRNIKGSYNWTNAMFTWQRTSFHFQPEKNWMNDPNGPLFYKGWYHLFYQYNPDSAVWGNITWGHAVSADLIHWLYLPIAMVPDQWYDINGVWTGSATILPDGQIVMLYTGSTDKSVQVQNLAYPADPSDPLLLDWVKYPGNPVLMPPRHIGPKDFRDPTTAWAGPDGKWRLTIGSKIGKTGISLVYQTTDFKTYELLDEYLHAVPGTGMWECVDFYPVAINGSVGLDTSATGPGIKHVLKASLDDTKVDHNKTGTYNPENDKWTPDNPEEDVGIGLKWDYGRYYASKSFYDPYKKRRIVWGWINETDTESDDLEKGWASVQLDISAEFETELLGSGAPEEGYGCSGGAIDRSAMGPFGLLVNAHDSLSELTPIFFRSSNTTKGTNTYFCADETRSSLAPDVFKQVHGSKVPVIQGEKLSMRILVDHSIVESFGQGGRTVITSRIYPTKAIYGAARLFLFNNATGVNVKATLKIWRLNSAFIHPFPLDQI

SEQ ID NO: 9706 - protein, 533 aa, Debaryomyces occidentalis
MVQVLSVLVIPLLTLFFGYVASSSIDLSVDTSEYNRPLIHFTPEKGWMNDPNGLFYDKTAKLWHLYFQYNPNATAWGQPLYWGHATSNDLVHWDEHEIAIGPEHDNEGIFSGSIVVDHNNTSGFFNSSIDPNQRIVAIYTNNIPDLQTQDIAFSLDGGYTFTKYENNPVIDVSSNQFRDPKVFWHERFKSMDHGCSEIARVKIQIFGSANLKNWVLNSNFSSGYYGNQYGMSRLIEVPIENSDKSKWVMFLAINPGSPLGGSINQYFVGDFDGFQFVPDDSQTRFVDIGKDFYAFQTFSEVEHGVLGLAWASNWQYADQVPTNPWRSSTSLARNYTLRYVIQMLKLTANIDKSVLPDSINVVDKLKKKNVKLTNKKPIKTNFKGSTGLFDFNITFKVLNLNVSPGKTHFDILINSQELNSSVDSIKIGFDSSQSLFYIDRHIPNVEFPRKQFFTDKLAAYLEPLDYDQDLRVFSLYGIVDKNIIELYFNDGTVAMTNTFFMGEGKYPHDIQIVTDTEEPLFELESVIIRELNK

SEQ ID NO: 9707 - protein, 532 aa, Bifidobacterium animalis
MATLPTNIPANGILTPDPALDPVLTPISDHAEQLSLAEAGVSALETTRNDRWYPKFHIASNGGWINDPNGLCRYNGRWHVFYQLHPHGTQWGPMHWGHVSSDNMVDWHREPIAFAPSLEQERHGVFSGSAVIGDDGKPWIFYTGHRWANGKDNTGGDWQVQMLAKPNDDELKTFTKEGMIIDCPTDEVDHHFRDPKVWKTGDTWYMTFGVSSKEHRGQMWLYTSSDMVHWSFDRVLFEHPDPNVFMLECPDFFPIRDARGNEKWVIGFSAMGAKPNGFMNRNVNNAGYMVGTWKPGESFKPETEFRLWDEGHNFYAPQSFNTEGRQIMYGWMSPFVAPIPMEEDGWCGNLTLPREITLGDDGDLVTAPTIEMEGLRENTIGFDSLDLGTNQTSTILDDDGGALEIEMRLDLNKTTAERAGLHVHATSDGHYTAIVFDAQIGGVVIDRQNVANGDKGYRVAKLSDTELAADTLDLRVFIDRGCVEVYVDGGKHAMSSYSFPGDGARAVELVSESGTTHIDTLTMHSLKSIGLE

SEQ ID NO: 9708 - protein, 515 aa, Penicillium purpurogenum
MISLRIALAINALSYICALVELAVADDYRPTFHFCPAENWMNEPNGLIKIDSTWHLFYQADPTANVWGNECWGHATSSDLLHWDHLPVAIPVENGIESFTGTSYYDANNTSSLGTSTNPPYLAFFTGYTSSNGTQDQRLAYSTDLGTTWLKFSGNPIISAALEAPHDVTGGLESRDPKVFFHEPSGKWVMVLAHGGQDKLTFWTSLDAKSWTWMSDLLASQIEGFPSSVTGWEVPDMFQLPIQGTNETTWVIIFTPAQGSPAGGNGVVALTGSFDGETFLANPVDSSTLWLDYGRDFDGAMSWENVPASDGRLIIAAVMNSYGSNPPTNTWKGMLSFPRTLTLEKIGSKQYFLQQPIAELSTVDNALASIQNQTIAPKQTLLSSIHGSSLDVRIAFSVDSGATLSLAVRKGGSEQTVIRYSQSNSTLSVDRTASGDISYDPAAGGIHSAQLARDNTELVYLRVLVDTCSVEVFGGQGEAVISDLIFPSNSSDGLSLEVIGGTATLQSVEVFSVSL

SEQ ID NO: 9709 - protein, 609 aa, Kluyveromyces lactis
MLKLLSLMVPLASAAVIHRRDANISAIASEWNSTSNSSSSLSLNRPAVHYSPEEGWMNDPNGLWYDAKEEDWHIYYQYYPDAPHWGLPLTWGHAVSKDLTVWDEQGVAFGPEFETAGAFSGSMVIDYNNTSGFFNSSTDPRQRVVAIWTLDYSGSETQQLSYSHDGGYTFTEYSDNPVLDIDSDAFRDPKVFWYQGEDSESEGNWVMTVAEADRFSVLIYSSPDLKNWTLESNFSREGYLGYNYECPGLVKVPYVKNTTYASAPGSNITSSGPLHPNSTVSFSNSSSIAWNASSVPLNITLSNSTLVDETSQLEEVGYAWVMIVSFNPGSILGGSGTEYFIGDFNGTHFEPLDKQTRFLDLGKDYYALQTFFNTPNEVDVLGIAWASNWQYANQVPTDPWRSSMSLVRNFTITEYNINSNTTALVLNSQPVLDFTSLRKNGTSYTLENLTLNSSSHEVLEFEDPTGVFEFSLEYSVNFTGIHNWVFTDLSLYFQGDKDSDEYLRLGYEANSKQFFLDRGHSNIPFVQENPFFTQRLSVSNPPSSNSSTFDVYGIVDRNIIELYFNNGTVTSTNTFFFSTGNNIGSIIVKSGVDDVYEIESLKVNQFYVD

SEQ ID NO: 9710 - protein, 104 aa, Bromus tectorum
SRGLDGGLKTSFCQDETRSSRARDVTKRVIGSTVPVLDGEAFSMRVLVDHSIVQGFAMGGRTTMTSRVYPMEAIYEKSGLYLFNNATTAGVTAEKLVVYEMDSS

SEQ ID NO: 9711 - protein, 473 aa, Ralstonia solanacearum
MLDTLALDVIEDPWRQAYHLCPPQGLLNDPNGLIFWRGAYHVFYQWNPHGCRHENKHWAHARSTDLIHWELLPPALAPDAPYDEDGCYSGCAVEVDGDLFLLYSGNVRSPDGGRASYQCLAHSRDGVGFDKLGPVINGVLPGYTGHFRDPKAWRQGDHWYAVLGAQRTDLTGTVLLLKSPDLRQWQLLGELIAPALPCYMYECPDLFTLDRRTVLVCCQQTMETGAGGNRRSDVAGYMLGQIDLERAQFPHSGFRPLDQGFDFYAPQTLLGPDGRRLLIGWMGLPVQPQTPTVASGWMHCLTLPRELTLEGDQLMQRPARELAMLRSATIRVPDVDLEANTAFVLPQPDGGAWELDLSIRAECPAGWVLHLFDSAQQSLSLAFDGVGTLTLRRHCPMAGQINERKTCGIGGPVTRLQVFIDRSSVEMFVNDGVAVLTTCCYPAAEPEAPRLQARQPLSLRDIHVWPLEDRLAR

SEQ ID NO: 9712 - protein, 534 aa, Gluconacetobacter diazotrophicus
MTMTGTVPRSAGWRRLSRRCLPAAFALLFPLGAPHAADTPQWRPVLHFSPAAYWMNDPNGPILLDGVYHLFYQYAPGSMTWGHPSWGHATSTDLLHWTEHGVAIAATPGEEIFSGSLVPDPLNRSGLGSTDAPPLLAFHTSVFHDNPAHPDGTQAQSVSVSHDGGFTWRPYAHNPVLTLHPDSRQFRDPSVFWYQDGGCWIMTTVVGDAQLVKLYRSTDLLHWSFLSDFQPSGYRKPGMLWEMPTLVPLKLDGNPRATRWVMIVSVNPWSIAGGSGVQYFVGRFDGVTFTPDALPPPGSDPSRYDWLDHGADQYATTLFANTGSGAPVLIGWMDNWDYATDLPTAPWRGQMTLPVDIALKTVDGHPTVIQTPTRAYEDMVRKKGVVTYGDRNLPQDGRVTIPSRGEVLDIRLVLRRGGARRAGIVVRETPDGRTGTSVSYDFVDGTLTVDRGRSGLVGFSPRFSTRHIAYLAAPGGEVALHLVVDRASVELFANDGVLRMTDLIFPPAGSDRISLFAEGGGATIHGLRVAVLAR

SEQ ID NO: 9713 - protein, 677 aa, Lolium temulentum
MPMETRDGGSRLEPALLPCSYVPLPDDAEAAVVGRGHRTGPLFAALLLALAAVLLVVATLAGVRLVGQLPATGVVMLNQPVDEAMSTTSSSRGPESGVSEKTSGVPAEHGGMLAADAASSNAFPWSNAMLQWQRTGFHFQPEKNWMNDPNGPVYYKGWYHLFYQYNPDGAIWGNKIAWGHAVSRDLVRWRHLPIAMFPDQWYDINGAWSGSATVLPDGRIVMLYTGSTNASVQVQCLAFPSDPSDPLLTNWTKYEGNPVLYPPPHIGEKDFRDPTTAWYDGSDGMWRIVIGSKDDRHAGMALTYKTNNFIDFELIPGVLHRVPATGMWECIDLYPVGAARGIDMTEAVAAASNNGGGEVLHVMKESSDDDRHDYYALGRYDAATNKWTPLDADADVGIGLRYDWGKFYASKTFYDPAKKRRVLWGWVGETDSERADVAKGWASLQSTPRTVVLDNKTGSNLIQWPVVEVETLRTNSTNLGSITVDHGSIFPLSLHRATQLDIEASFRLDPLDVVAAKEADVGYNCSTSGGAAGRGALGPFGLLVLADARRHGGDTEQTAVYFYVARGLDGGLRTHFCHDESRSSRANDIVKRVVGNVVPVLDGEALSIRVLVDHSIVESFAQGGRSTVTSRVYPTEAIYANTGVYLFNNATGARVTATSLAVHEMDFSYNQAYMASL

SEQ ID NO: 9714 - protein, 533 aa, Lolium temulentum
SNAMLQWQRTGFHFQPEMNWMNDPNGPVYYRGWYHLFYQYNPEGAVWGNIAWGHAVSRDLVHWRHLPLAMVPDQWYDINGVWTGSATVFPDGTLNMLYTGSTNASVQVQCLAVPEDPNDSLLRNWTKHEANPVLLPPPGIGDKDFRDPTTAWFDESDQTWRTVIGSKDNNGHAGIAMVYKTKDFLNYELIPGYLHRVDGTGMWECIDFYPVGGKNGSEELYVIKESSDDDRHDWYTLGKYDAAANTFTAADPENDLGIGLRYDWGKFYASKTFYDPAKQRRVLWGWIGETDSERADVAKGWASLMSIPRTVELDEKTRTNLIQWPVEEIETLRINSTDLSGVTIDHGSVYPLALHRATQLDIEASFRLDSATIAALNEADVGYNCSTSGGSANRGALGPFGLLVLADGKAEQTAVYFYVAKGLDGSLQTHFCHDESRSTLAKDVVKRVVGYTVPILDGEAFSMRVLVDHSIVESFVMGGRSTATSRVYPTEAIYGAAGAYLFNNATSGTVTVEKLVVHEMDSSYNQIFMADDL

SEQ ID NO: 9715 - protein, 625 aa, Lolium temulentum
MESRAIPSAAYAALLPSAADDVALAKQDRPGVGWRGFLTVLAASGVVVLLVGATLLAGSRMGQAGDGEGNTDEDGAGGFPWSNEMLQWQRAGFHYQPEGHFMSDPNGPVYYRGYYHLFFQYNRRGVAWDDYIEWGHVVSQDLVHWRPLPLAMRPDHWYDKKGVLSGTITVLHNGTLVLLYTGVTEDPMAESQCIAVPTDPNDPLLRHWTKHPANPVLAHPQGVQGMDFRDPTSAWWDKSDATWRILIGSKDDDNGSHAGIAFIFKTKDFLSFERVPGIVHRVEGTGMWECIDFYPVGGGHSSSSSEELYVIKASMDDERHDYYSLGRYDAAANTWTPLDAELDLGIGLRYDWGKLYASTSFYDPLKQRRIMLGYVGEVDSARADVAKGWASLQSIPRTVALDEKTRTNLLLWPVEEVEALRYNSTDLSGITIDDGSVFHLPLHQATQLDIEATFRLDASDVAAINEADVGYNCSSSGGAAARGALGPFGLLVHAAGDLIRGEQTAVYFYVSRALDGTLRTSFCNDETRSTRAKDVTKRVVGSTVPVLDGEALSMRVLVDHSIVQSFAMGGRVTATSRVYPTEAIYARAGVYLFNNATGASVTAERLVVHEMASAVYDDTVMVEDS

SEQ ID NO: 9716 - protein, 231 aa, Lolium temulentum
MESRSIPGAYAYAYEPLPRSSDDDRRSTGGVRWRACAAVLAASALVVFVVASTLAGSRVDRVAVDVAAMPALSETARSRGRDAGVSEKTSGAADEMGFLGAGSGADADGFPWSNAMLQWQRTGFHFQPEMNWMNDPNGPVYYRGWYHLFYQYNPEGAVWGNIAWGHAVSRDLVHWRHLPLAMVPDQWYDINGVWTGSATVFPDGTLNMLYTGSTNASVQVQCLAVPEDPND

SEQ ID NO: 9717 - protein, 803 aa, Azotobacter vinelandii
MGLAGLGGRDGRGRRGVRHRPGHRLLHEQRRRPGVPADPLPAGHGRLQEPRDAGRRVRPGTHRRHPATAAPAALLGVQPVPDRGRRGLHDLRAAVPGVLRLLLPYPGRRHPRLRLPELLAGTGRGPAHAGRALGGRPHRRQIRPAAGRHHHVRAHPRLGAGQRCLDHRRLQDAACHRGADPVGRGVQVHLRQLRCAAVGHALPGQFPVRPATDRHAVVAGRGLWLRQARLRQRLPAAGQSGRRLPAAVLVAAARRPVQQDHPGGGRRPGTAGHRPGGQPLRTLNEAIRVISSAPAGMTPLETFPRTFEDHDMQADLLDEAQRAIARTLPARRDDYRLGYHLSPPAGWMNDPNGLVYFRGEYHVFYQHHPYSPQWGPMYWGHARSADLVHWEHLPIALAPGDPFDRDGCFSGSAVVDGDTLYLIYTGHRWLGEAGNDEQGMRQVQCLASSTDGIAFTKHGAVIDTPPHPDIMHFRDPRVWRRGDHWWMALGARQGDDPLLLLYRSRDLRQWDCLGRALEGRREADGYMWECPDLFELEGRDVFLFSPQGLEPDGHERWNLFQNGYRLGRLDERARFVAESELREIDHGHDFYAAQTLLAPDGRRLLWAWMDMWQSPMPSQAHHWCGALTLPRELSRDGDRLRMRPARELAALRQSRQALAIGALESGSRTLEVRGALLEFELELELTGSSAERFGLALRCSDDGRERTLLYFDAMARRLVLDRQHSGAGVSGVRSVPVAPGQTRIALRIFLDRSSIEVFVDDGVHTLSSRIYPRPDSLGVGAFAVNGRGVFAEGAVWSLADLKL

SEQ ID NO: 9718 - protein, 513 aa, Chenopodium rubrum
SAKLACLHCDSRGSPLHLFYQYNPDSAVWGNITWGHAVSRNLIHWKYLPISMVPDQWYDINGVWTGSATILDGNIMLACLQVDSRGSPGTELEFAAALSDPLLLDWVKYSGNPVLTPPEGIGAKDFRDPTTAWLGPNGVWRFIIGSKKGKTGISLVYKTKDFKSYELEGNLHGVPDTGMWECVDFYPVSTTGQNGLDTSAYGPGMKHLLKASLDDNKQDHYALGTYDVASQTWTPDNPEMDVGIGLRLDYGKYYASKTFFDQNKQRRILWGWVGETDTEADDLLKGWSSLQSVPRVVTYDAKTGTNVIQWPVKEVESLRTDSIVYDNLVLQPGSIINLNITSAAQLDVSAEFMMDQEALKSTVGDDVINNCSAAAIRQALGPFGVLVLADGSLSEFTPVYFYIAKTSDGTVKNWFCTDQSRSSKASSVDKQVYGGPVPVLEGEKYSMRLLVDHSIVEAFGQGGRTCITSRIYPTKAINGEARVFLFNNATDLSVTASVKIWKLKSADISPYKF

SEQ ID NO: 9719 - protein, 346 aa, Cucumis melo
DPTTAWTGPQNGQWLLTIGSKIGKTGVALVYETSNFTSFKLLDGVLHAVPGTGMWECVDFYPVSTKKTNGLDTSYNGPGVKHVLKASLDDNKQDHYAIGTYDLGKNKWTPDNPELDCGIGLRLDYGKYYASKTFYDPKKERRVLWGWIGETDSESADLQKGWASVQSIPRTVLYDKKTGTHLLQWPVEEIESLRVGDPTVKQVDLQSGSIELLRADSAAELDIEASFEVDKVALQGIIEADHVGFSCSTSGGAASRGILGPFGVIVIADQTLSELTPVYFYISKGADGHAETHFCADQTRSSEAPGVGKQVYGSSVPVLDGEKHSMRLLVDHSIVESFAQGGRTVI

SEQ ID NO: 9720 - protein, 663 aa, Lagenaria siceraria
MAITSLYLTLLHSIHSPFLLLCLFLTYFFICLPYPFFPRSLSFLFYCRYFPPHHSGPFLLCSLFPLSLFFLLLLVSLLTLVSYHTPSPDATNLPENTQSPPPFRLARGVAEGVSAKSNPYFSDSVDSFNWTNAMFSWQRTFFHFQPEGNWMNDPNGPLYHKGWYHLFYQYNPESAVWGNISWGHAVSRDLITLAYISAYAMVPDQPYDVNGVWTGSATILPDGRIIMLYTGDTIDGVQVQNLAYPANLSDPLLLNWVKYPGNPVLVPPPGIGPKDFRDPTTAWLGHDGKWRITIGSRVGTTLGVSLVYTTNDFIKYELVDRFLHAVPGTGMWECVDFYPVSVHGSKGLDTSVNGHGVKHVLKASLDDTKMDHYAIGTYFSNNDTWVPDNPEEDVGIGLKLDYGRYYASKTFYDQNKERRILWGWINETDTEANDLAKGWASVQTIPRTVLFDHKTGSNIIQWPVEEVESLRLGSTEFNDVLVEPGSVVELEVGTATQLDILTEFELEALGSEKATISEEGCGGGAAERSSLGPFGLLVLAHQSLSELTPIYFNVANSSKGSREAYFCADEKRSSKAPDVFKQVYGSKIPVLEGENFSMRVLVDHSIVESFGQGGRRVITSRIYPTEAIYGAAKLFLFNNATSANVKATVKVWRLNSAFIQPFS

SEQ ID NO: 9721 - protein, 664 aa, Arabidopsis thaliana
MASSDALLPISAREEEPLCPYTRLPMADPNQETHGPRRRRPFKGLLAVSFGLLFIAFYVALIATHDGSRSNDEGIDETETITSRARLAGVSEKRNDGLWKLSGDRNTPAFEWNNSMLSWQRTAFHFQPEQNWMNDPNGPLFYKGWYHFFYQYNPNAAVWGDIVWGHAVSRDLIHWVHLPIAMVADQWYDSNGVWTGSATFLPDGSIVMLYTGSTDKAVQVQNLAYPEDPNDPLLLKWVKFPGNPVLVPPPGILPKDFRDPTTAWKTSEGKWRITIGSKLNKTGISLVYDTIDFKTYEKLDTLLHRVPNTGMWECVDFYPVSKTAGNGLDTSVNGPDVKHIVKASMDDTRFDHYAVGTYFDSNGTWIPDDPTIDVGMTASLRYDYGKFYASKSFYDQNKGRRVLWSWIGESDSEASDVQKGWSSLQGIPRTVVLDTKTGKNLVQWPVEEIKSLRLSSKQFDLEVGPGSVVPVDVGSAAQLDIEAEFEINKESLDKIIGNASVVAEAEEFSCEKSGGSTVRGALGPFGFSVLATESLSEQTPVYFYVAKGKDSELKTFFCTDTSRSSVANDVVKPIYGSVVPVLKGEKLTMRILVDHSIVEAFGQGGRTCITSRVYPTTAIYGAAKLFLFNNALDATVTASFTVWQMNSAFIHPYSDEAVRALSRT

SEQ ID NO: 9722 - protein, 660 aa, Arabidopsis thaliana
DALLPISAREEEPLCPYTRLPMADPNQETHGPRRRRPFKGLLAVSFGLLFIAFYVALIATHDGSRSNDEGIDETETITSRARLAGVSEKRNDGLWKLSGDRNTPAFEWNNSMLSWQRTAFHFQPEQNWMNDPNGPLFYKGWYHFFYQYNPNAAVWGDIVWGHAVSRDLIHWVHLPIAMVADQWYDSNGVWTGSATFLPDGSIVMLYTGSTDKAVQVQNLAYPEDPNDPLLLKWVKFPGNPVLVPPPGILPKDFRDPTTAWKTSEGKWRITIGSKLNKTGISLVYDTIDFKTYEKLDTLLHRVPNTGMWECVDFYPVSKTAGNGLDTSVNGPDVKHIVKASMDDTRFDHYAVGTYFDSNGTWIPDDPTIDVGMTASLRYDYGKFYASKSFYDQNKGRRVLWSWIGESDSEASDVQKGWSSLQGIPRTVVLDTKTGKNLVQWPVEEIKSLRLSSKQFDLEVGPGSVVPVDVGSAAQLDIEAEFEINKESLDKIIGNASVVAEAEEFSCEKSGGSTVRGALGPFGFSVLATESLSEQTPVYFYVAKGKDSELKTFFCTDTSRSSVANDVVKPIYGSVVPVLKGEKLTMRILVDHSIVEAFGQGGRTCITSRVYPTTAIYGAAKLFLFNNALDATVTASFTVWQMNSAFIHPYSDEAVRALSRT

SEQ ID NO: 9723 - protein, 648 aa, Arabidopsis thaliana
MASTEALLPVTSLQDPLSESRSDQIPETRRRRPIKVHLAVYSGLLLIALYVTLIVTHDGSKAEIATESRPRMAGVSEKSNDGVWISSDDGKVEAFPWNNTILSWQRTAFHFQPEKNWMNDPNGPLFYKGWYHFFYQYNPNAAVWGDIVWGHAVSKDLIHWLYLPIAMVPDQWYDANGVWTGSATFLDDGSIVMLYTGSTDEFVQVQNLAYPEDPSDPLLLKWVKFSGNPVLVPPPGIGAKDFRDPTTAWKTSSGKWRITIGSKINRTGISLIYDTTDFKTYEKHETLLHQVPNTGMWECVDFYPVSKTQLNGLDTSVNGPDVKHVIKASMDDTRIDHYAIGTYDDSNATWVPDNPSIDVGISTGLRYDYGKYYASKTFYDQNKGRRILWGWIGESDSEAADVQKGWSSVQGIPRTVVLDTRTHKNLVQWPVEEIKSLRLSSKKFDMTIGPGTVVPVDVGSATQLDIEAEFEIKTDDLKLFFDDDSVEADNKFSCETNGGSTARGALGPFGFSVLADEGLSEQTPVYFYVTKGKHSKLNTVFCTDTSRSTLANDVVKPIYGSFVPVLKGEKLTMRILVDHSIVEGFAQGGRSCITSRVYPTKAIYGATKLFLFNNAIDATVTASFTVWQMNNAFIHPYSSDDLGVPSST

SEQ ID NO: 9724 - protein, 650 aa, Arabidopsis thaliana
MASTEALLPVTSLQDPLSESRSDQIPETRRRRPIKVHLAVYSGLLLIALYVTLIVTHDGSKAEIATESRPRMAGVSEKSNDGVWISSDDGKVEAFPWNNTILSWQRTAFHFQPEKNWMNGTNIKCPLFYKGWYHFFYQYNPNAAVWGDIVWGHAVSKDLIHWLYLPIAMVPDQWYDANGVWTGSATFLDDGSIVMLYTGSTDEFVQVQNLAYPEDPSDPLLLKWVKFSGNPVLVPPPGIGAKDFRDPTTAWKTSSGKWRITIGSKINRTGISLIYDTTDFKTYEKHETLLHQVPNTGMWECVDFYPVSKTQLNGLDTSVNGPDVKHVIKASMDDTRIDHYAIGTYDDSNATWVPDNPSIDVGISTGLRYDYGKYYASKTFYDQNKGRRILWGWIGESDSEAADVQKGWSSVQGIPRTVVLDTRTHKNLVQWPVEEIKSLRLSSKKFDMTIGPGTVVPVDVGSATQLDIEAEFEIKTDDLKLFFDDDSVEADNKFSCETNGGSTARGALGPFGFSVLADEGLSEQTPVYFYVTKGKHSKLNTVFCTDTSRSTLANDVVKPIYGSFVPVLKGEKLTMRILVDHSIVEGFAQGGRSCITSRVYPTKAIYGATKLFLFNNAIDATVTASFTVWQMNNAFIHPYSSDDLGVPSST

SEQ ID NO: 9725 - protein, 728 aa, Arabidopsis thaliana
MASTEALLPVTSLQDPLSESRSDQIPETRRRRPIKVHLAVYSGLLLIALYVTLIVTHDGSKAEIATESRPRMAGVSEKSNDGVWISSDDGKVEAFPWNNTILSWQRTAFHFQPEKNWMNGTNIKCPLFYKGWYHFFYQYNPNAAVWGDIVWGHAVSKDLIHWLYLPIAMVPDQWYDANGVWTGSATFLDDGSIVMLYTGSTDEFVQVQNLAYPEDPSDPLLLKWVKFSGNPVLVPPPGIGAKDFRDPTTAWKTSSGKWRITIGSKINRTGISLIYDTTDFKTYEKHETLLHQVPNTGMWECVDFYPVSKTQLNGLDTSVNGPDVKHVIKASMDDTRIDHYAIGTYDDSNATWVPDNPSIDVGISTGLRYDYGKYYASKTFYDQNKGRRILWGWIGESDSEAADVQKGWSSVQGIPRTVVLDTRTHKNLVQWPVEEIKSLRLSSKKFDMTIGPGTVVPVDVGSATQLDIEAEFEIKTDDLKLFFDDDSVEADNKFSCETNGGSTARGALGPFGFSVLADEGLSEQTPVYFYVTKGKHSKLNTVFCTDTSRSTLANDVVKPIYGSFVPVLKGEKLTMRILVDHSIVEGFAQGGRSCITSRVYPTKAIYGATKLFLFNNAIDATVTASFTVWQMNNAFIHPYSSDDLGQILSLTYLRTQSRASSNAAFYFISYKTTKTVVTMTQYELKSLAVHKTITKQKSLSFVKKKEGEKQKQSHPRARKISIRNLKSA

SEQ ID NO: 9726 - protein, 648 aa, Arabidopsis thaliana
MASTEALLPVTSLQDPLSESRSDQIPETRRRRPIKVHLAVYSGLLLIALYVTLIVTHDGSKAEIATESRPRMAGVSEKSNDGVWISSDDGKVEAFPWNNTILSWQRTAFHFQPEKNWMNDPNGPLFYKGWYHFFYQYNPNAAVWGDIVWGHAVSKDLIHWLYLPIAMVPDQWYDANGVWTGSATFLDDGSIVMLYTGSTDEFVQVQNLAYPEDPSDPLLLKWVKFSGNPVLVPPPGIGAKDFRDPTTAWKTSSGKWRITIGSKINRTGISLIYDTTDFKTYEKHETLLHQVPNTGMWECVDFYPVSKTQLNGLDTSVNGPDVKHVIKASMDDTRIDHYAIGTYDDSNATWVPDNPSIDVGISTGLRYDYGKYYASKTFYDQNKGRRILWGWIGESDSEAADVQKGWSSVKGIPRTVVLDTRTHKNLVQWPVEEIKSLRLSSKKFDMTIGPGTVVPVDVGSATQLDIEAEFEIKTDDLKLFFDDDSVEADNKFSCETNGGSTARGALGPFGFSVLADEGLSEQTPVYFYVTKGKHSKLNTVFCTDTSRSTLANDVVKPIYGSFVPVLKGEKLTMRILVDHSIVEGFAQGGRSCITSRVYPTKAIYGATKLFLFNNAIDATVTASFTVWQMNNAFIHPYSSDDLGVPSST

SEQ ID NO: 9727 - protein, 639 aa, Arabidopsis thaliana
VTSLQDPLSESRSDQIPETRRRRPIKVHLAVYSGLLLIALYVTLIVTHDGSKAEIATESRPRMAGVSEKSNDGVWISSDDGKVEAFPWNNTILSWQRTAFHFQPEKNWMNDPNGPLFYKGWYHFFYQYNPNAAVWGDIVWGHAVSKDLIHWLYLPIAMVPDQWYDANGVWTGSATFLDDGSIVMLYTGSTDEFVQVQNLAYPEDPSDPLLLKWVKFSGNPVLVPPPGIGAKDFRDPTTAWKTSSGKWRITIGSKINRTGISLIYDTTDFKTYEKHETLLHQVPNTGMWECVDFYPVSKTQLNGLDTSVNGPDVKHVIKASMDDTRIDHYAIGTYDDSNATWVPDNPSIDVGISTGLRYDYGKYYASKTFYDQNKGRRILWGWIGESDSEAADVQKGWSSVQGIPRTVVLDTRTHKNLVQWPVEEIKSLRLSSKKFDMTIGPGTVVPVDVGSATQLDIEAEFEIKTDDLKLFFDDDSVEADNKFSCETNGGSTARGALGPFGFSVLADEGLSEQTPVYFYVTKGKHSKLNTVFCTDTSRSTLANDVVKPIYGSFVPVLKGEKLTMRILVDHSIVEGFAQGGRSCITSRVYPTKAIYGATKLFLFNNAIDATVTASFTVWQMNNAFIHPYSSDDLGVPSST

SEQ ID NO: 9728 - protein, 562 aa, Arabidopsis thaliana
IRHEKVEAFPWNNTILSWQRTAFHFQPEKNWMNDPNGPLFYKGWYHFFYQYNPNAAVWGDIVWGHAVSKDLIHWLYLPIAMVPDQWYDANGVWTGSATFLDDGSIVMLYTGSTDGFVQVQNLAYPEDPSDPLLLKWVKFSGNPVLVPPPGIGAKDFRDPTTAWKTSSGKWRITIGSKINRTGISLIYDTTDFKTYEKHDTLLHQVPNTGMWECVDFYPVSKTQVNGLDTSVNGPDVKHVIKASMDDTRIDHYAIGTYDDSNATWVPDNPSIDVGISTGLRYDYGKYYASKTFYDQNKGRRILWGWIGESDSEAADVQKGWSSVQGIPRTVVLDTRTHKNLVQWPVEEIKSLRLSSKKFDMTIGPGTVVPVDVGSATQLDIEAEFEIKTDDLKLFFDDDSVEADNKFSCETNGGSTARGALGPFGFSVLADENLSEQTPVYFYVTKGKHSKLNTVFCTDTSRSTLANDVVKPIYGSFVPVLKGEKLTMRILVDHSIVEGFAQGGRSCITSRVYPTKAIYGATKLFLFNNAIDATVTTSFTVWQMNNAFIHPYSSDDLGVPSST

SEQ ID NO: 9729 - protein, 662 aa, Brassica oleracea
MAKSDALLPISAREEDPLLSDGSRSDPNAETHGRRRPVKGLLAVSFGLFFIAFYVALIATHDGSRSNDVKIESDGTATKASRAHLAGVSEKSNDQLWKLSGDRNTVAFSWNNSMLSWQRTAFHFQPEQNWMNDPNGPLFYKGWYHFFYQYNPNAAVWGDIVWGHAVSKDLIHWVHLPLAMAADQWYDANGVWTGSATFLEDGSIVMLYTGSTDKSVQVQNLAYPEDLNDPLLLKWVKFPGNPVLVPPPGILPKDFRDPTTAWKTSAGKWRITIGSKINRTGISLVYDTTDFKTYEKLETLLHKVPNTGMWECVDFYPVSKTLVKGLDTSVNGPDVKHIVKASMDDTRIDHYAIGTYFDSNGTWTPDDPTIDVGISTSLRYDYGKFYASKTFYDQNKGRRILWGWIGESDSESADVQKGWSSLQGIPRTVVLDTKTGKNLVQWPVEEVKSLRLSSKKFDMEVGPGSLVHIDVGSAAQLDIEAEFEIKKESLEKILGDASAAAEAEEFSCQKSGGSTVRGALGPFGFSVLAHESLSEKTPVYFYVAKGKDSKLITFFCTDSSRSSFANDVVKPIYGSSVPVLKGEKLTMRILVDHSIVEAFGQGGRTCITSRVYPTKAIYGAAKLFLFNNAIDATITASFKVWQMNSAFIQPYSEEAVRALSRT

SEQ ID NO: 9730 - protein, 663 aa, Brassica oleracea
MASSDALLPISAREEDPLLSDGSRCDPNAETHRRRRPVKGLLAVSFGLLFIAFYVVLIATHDGSSRSNDVKIESDETATTTSRARLAGVSEKSNGQLWKLSGERNTVSFAWNNSVLSWQRTAFHFQPEQNWMNDPNGPLFYKGWYHFFYQYNPNAAVWGDIVWGHAVSKDLIHWVHLPIAMVADQWYDANGVWTGSATFLDDGSLVMLYTGSTDKSVQVQNLAYPEDLNDPLLLKWVKYSGNPVLVPPPGILPKDFRDPTTAWKTSDGKWRITIGSKINKTGISLVYDTIDFKTYEKHDTLLHKVPNTGMWECVDFYPVSKTAVNGLDTSVNGPNVKHIVKASMDDTRFDHYAVGTYFDSNGTWIPDDPTIDVGMSASLRYDYGKFYASKTFYDQNKGRRILWSWIGESDSEAADVQKGWSSLQGIPRTVVLDTKTGKNLVQWPVEEIKSLRLSSKQFDMEVGPGSVVPVDVDSAAQLDIEAEFEINKESLDKILGDASVVVEAEEFSCQKSGGASVRGALGPFGFSVLADKSLSEQTPVYFYVAKGKDSKLKTFFCTDTSRSTFANDVVKPIYGSSVPVLKGEKLTMRILVDHSIVEGFAQAGRTCISSRVYPTKAIYGAAKLFVFNNAIDATITASFKVWQMNSAFIHPYSEEAVRALSST

SEQ ID NO: 9731 - protein, 247 aa, Malus x domestica
SSFLSVQPQQSSMGDIVWGHAVSKDLIHWLHLPLAMVADQWYDINGVWTGSATILPDGKIVMLYTGSTNESVQVQNLAYPADHSDPLLLNWVKYSGNPVLVPPPGIGYKDFRDPTTAWFTSEGKWRITIGSKLNKTGMSLVYDTKDFKTYELLNGVLHAVPGTGMWECVDFYPVSKTSDKGLDTSVNGPDVKHVVKASLDDDRNDYYAFGTYDEKTGKWVPDNEKIDVGIGIRYDYGKFYASKTFFD

SEQ ID NO: 9732 - protein, 143 aa, Prunus persica
  unsure (1)..(143): unsure at all Xaa locations
DPLALPPARDGPRSMVRRQRRVDRSSTILPDGQIVILXTGSTNESVQVQNLAYPANLSDPLLLHWVKYSGNPVLTAPPGIGSTDFRDPTTAWIGPDGLWRITLGSKVNKTGISIVYTTANFIDYELLEGVLHAVPGTGMWECP

SEQ ID NO: 9733 - protein, 103 aa, Heteranthelium piliferum
SRGLDGGLHTSFCQDELRSSRAKDVTKRVIGSTVPVLEGEAFSMRVLVDHSIVQGFAMGGRTTMTSRVYPMEAYQEARVYLFNNATGAGVTAERLVVHEMDSA

SEQ ID NO: 9734 - protein, 103 aa, Agropyron mongolicum
SRGLDGGLQTSFCQDELRSSRAKDVTKRVIGSTVPVLDGEAFSMRVLVDHSIVQGFAMGGRITMTSRVYPMEAYQEAGVYLFNNATGARVTAERLVVHEMDSS

SEQ ID NO: 9735 - protein, 103 aa, Agropyron puberulum
SRGLDGGLQTSFCQDELRSSRAKDVTKRVIGSTVPVLDGEAFSMRVLVDHSIVQGFAMGGRITMTSRVYPMEAYQEAGVYLFNNATGASVTAERLVVHEMDSA

SEQ ID NO: 9736 - protein, 103 aa, Psathyrostachys huashanica
SRGLDGGLQTSFCQDELRSSWAKDVTKRVIGSTVPVLDGEAFSMRVLVDHSIVQGFAMGGRTTMTSRVYPMEAYQEAGVYLFNNATGAGVTAERLVVHEMDSS

SEQ ID NO: 9737 - protein, 586 aa, Oryza sativa (indica cultivar-group)
MATARARAALVFVALLQMAAVVVVRASHVVYPELQSLEAKHVDGKLRTGYHFQPPKHWINDPNGPMYYKGLYHLFYQYNPKGAVWGNIEWAHSVSTDLIDWTALEPGIYPSKTFDEKGCWSGSATVLPSGVPVIMYTGIDPDERQVQNVAYPVNLSDPYLREWYKPDYNPIINPDGGINASAFRDPTTAWYGPDGHWRLLVGSKVNMKGLAVLYRSRDFKKWVKAHHPLHSAHTGMWECPDFFPVAVAGGSRHYRRGVDTAELHDAAVAEEVKYVLKVSLDLTRYEYYTVGWYDHATDRYVPDAAFPDNDYGLRYDYGDFYASKSFYDPAKRRRIVWGWANESDTVPDDRRKGWAGIQAIPRKLWLSADGKQLVQWPVEELKALRAKHVNVTDKVIKKGNYFEVTGFKSVQSDVDMAFAIKDLSKAEEFDPAWRTDAEALCKKLGSDVDGGVGPFGLWALASGDLKERTAVFFRVFKANDSSHVVLMCNDPTRSSYESKIYRPTFAGFVDVDIAKNKQIALRTLIDHSVVESFGARGKTCILTRVYPRKAVGDDAHLFVFNNGESDVKVTNLDAWEMKTPKMNAEE

SEQ ID NO: 9738 - protein, 179 aa, Apium graveolens
KASKSPEMLEPLSRGVAQGVSEKRFRQATAEPAYPWTNDMLSQQRTSFHFQPQENWMNDPNGPLFHMGWYHLFYQYNPDSAIWGNITWGHAISTDLINWLHLPFAMQPDQWYDINGVWTGSATILPDGKIVMLYTGDTDDLVQVQNLAYPANLSDPLLLDWIKYPDNPVMFPPPGIGST

SEQ ID NO: 9739 - protein, 630 aa, Helianthus tuberosus
MMASSTTTTPLILHDDPENLPELTGSPTTRRLSIAKVLSGILVSVLVIGALVALINNQTYESPSATTFVTQLPNIDLKRVPGKLDSSAEVEWQRSTYHFQPDKNFISDPDGPMYHMGWYHLFYQYNPQSAIWGNITWGHSVSKDMINWFHLPFAMVPDHWYDIEGVMTGSATVLPNGQIIMLYSGNAYDLSQVQCLAYAVNSSDPLLIEWKKYEGNPVLLPPPGVGYKDFRDPSTLWSGPDGEYRMVMGSKHNETIGCALIYHTTNFTHFELKEEVLHAVPHTGMWECVDLYPVSTVHTNGLDMVDNGPNVKYVLKQSGDEDRHDWYAIGSYDIVNDKWYPDDPENDVGIGLRYDFGKFYASKTFYDQHKKRRVLWGYVGETDPQKYDLSKGWANILNIPRTVVLDLETKTNLIQWPIEETENLRSKKYDEFKDVELRPGALVPLEIGTATQLDIVATFEIDQKMLESTLEADVLFNCTTSEGSVARSVLGPFGVVVLADAQRSEQLPVYFYIAKDIDGTSRTYFCADETRSSKDVSVGKWVYGSSVPVLPGEKYNMRLLVDHSIVEGFAQNGRTVVTSRVYPTKAIYNAAKVFLFNNATGISVKASIKIWKMGEAELNPFPLPGWTFEL

SEQ ID NO: 9740 - protein, 615 aa, Helianthus tuberosus
MQTPEPFTDLEHEPHTPLLDHHHNPPPQTTTKPLFTRVVSGVTFVLFFFGFAIVFIVLNQQNSSVRIVTNSEKSFIRYSQTDRLSWERTAFHFQPAKNFIYDPDGQLFHMGWYHMFYQYNPYAPVWGNMSWGHSVSKDMINWYELPVAMVPTEWYDIEGVLSGSTTVLPNGQIFALYTGNANDFSQLQCKAVPVNLSDPLLIEWVKYEDNPILYTPPGIGLKDYRDPSTVWTGPDGKHRMIMGTKRGNTGMVLVYYTTDYTNYELLDEPLHSVPNTDMWECVDFYPVSLTNDSALDMAAYGSGIKHVIKESWEGHGMDWYSIGTYDAINDKWTPDNPELDVGIGLRCDYGRFFASKSLYDPLKKRRITWGYVGESDSADQDLSRGWATVYNVGRTIVLDRKTGTHLLHWPVEEVESLRYNGQEFKEIKLEPGSIIPLDIGTATQLDIVATFEVDQAALNATSETDDIYGCTTSLGAAQRGSLGPFGLAVLADGTLSELTPVYFYIAKKADGGVSTHFCTDKLRSSLDYDGERVVYGGTVPVLDDEELTMRLLVDHSIVEGFAQGGRTVITSRAYPTKAIYEQAKLFLFNNATGTSVKASLKIWQMASAPIHQYPF

SEQ ID NO: 9741 - protein, 172 aa, Citrus aurantium
YHLFYQYNPNGAIWGDIVWGHAVSKDLIHWYHLPLAMVADQWYDIMGVWTGSATILPDGKLMMLYTGSTNESVQVQNLAYPADPSDPLLIKWVKYPGNPVLVPPPGIGAKDFRDPTTAWLTSEGKWRIAIGSRINRTGITFVYDTKDFINYELLRGVLHGVPNTGMWECPDF

SEQ ID NO: 9742 - protein, 171 aa, Hamamelis virginiana
LHLFYQYNPDSAVWGNITWGHAVSRDMIHWLYLPIAMIPDHWFDWFGVWTGSATLLPDGRIIILYTGETDHYVQVQNLAYPANQSDPLLLDWVKYEDNPVIVPPTGIKPKDFRDPTTAWLGPDGTWRVTVGSKVNKTGISLVYQTTNFTSYELLDGVLHAVVGTGMWECPD

SEQ ID NO: 9743 - protein, 173 aa, Hamamelis virginiana
LHLFYQYNPYSAVWGNITWAHSTSTDLVNWIPHEYAIYMSQPSDINGCWSGSATMLPTGKPVILYTGINTRNQQVQNLAVPKNLSDPFLREWVKSPNNPLMAPTTMNKINASSFRDPTTAWLGPDRLWRVIIGSKRNRHGLAILYRSKDFLRWTKAQHPLHSSKNTGMWECPD

SEQ ID NO: 9744 - protein, 171 aa, Hamamelis virginiana
LHLFYQYNPYSAVWGNITWAHSTSTDLVNWIPHEYAIYMSQPSDINGCWSGSATMLPTGKPVILYTGINTQNQQVQNLAVPKNLSDPFLREWVKSPNNPLMAPTTMNKINASSFRDPTTAWLGPDRLWRVIIGSKRNRRGLAILYRSKDFLRWTKAQHPLHSSKNTGMWEC

SEQ ID NO: 9745 - protein, 173 aa, Hamamelis virginiana
LHLFYQYNPYSAVWGNITWAHSTSTDLVNWIPHEYAIYMSQPSDINGCWSGSATMLPTGKPVILYTGINTQNQQVQNLAVSKNLSDPFLREWVKSPNNPLMAPTTMNKINASSFRDPTTAWLGPDRLWRVIIGSKRNRRGLAILYRSKDFLRWTKAQHPLHSSKNTGMWECPD

SEQ ID NO: 9746 - protein, 170 aa, Hamamelis virginiana
HLFYQYNPKGAVWGNIVWAHSVSKDLVNWEALEHAIYPSKPFDINGCWSGSATILSDNKPVILYTGIDTQNRQVQNFAIPANLSDPYLREWIKPDNNPLVVAGDGMNSSAFRDPSTAWLGEDGHWRIVVGSKRKHRGIAFLYKSRDFMKWTEAQHPLQSKPKTGMWECPD

SEQ ID NO: 9747 - protein, 171 aa, Hamamelis virginiana
LHLFYQYNPKGAVWGNIVWAHSVSKDLVNWEALDHAIYPSKPFDINGCWSGSATILKNNKPVILYTGIDTQNRQVQNFAIPANLSDPYLREWIKPDNNPLVVAGDGMNSSAFRDPSTAWLGEDGHWRIVVGSKRKHRGIAFLYKSRDFMKWTKAQHPLQSKPKTGMWECPD

SEQ ID NO: 9748 - protein, 169 aa, Hamamelis virginiana
FTYSTSTIHMVQFTWAHSTSTDLVNWIPHEYAIYMSQPSDINGCWSGSATMLPTGNPVILYTGINTQNQQVQNLAVPKNLSDPFLREWVKSPNNPLMAPTIMNKINASSFRDPTTAWLGPDRLWRVIIGSKRNRRGLAILYMSKDFLRWTKAQHPLHSSKNTGMWECPD

SEQ ID NO: 9749 - protein, 1333 aa, Paenibacillus macerans
MRKVKRGKCWISGMVIWAMVLQLVVPGISVASENRTVAGETLIPKNDVKSSVTDAIYQIKNIPQNDMGLSVTDSVYQIRNPGFETGDLTGWTVIKGDAFGPNSVTDETTWWAEKIPYNQEGAYHLNGWKYDESATGVLRSSTFELGGSGGISFKLGGAKNPDKVFINIVEVDTGQVIARYGNSAFADVGFPDPAQGMRLANMVQYKADLSTQLGKKLYVEVVDNATSDWGVIFADAFSMYHESEPAEGIVATDIKPDFKRYEIDNPSFETGNLDGWTVEEDAFEVTDEAHASKEGNFYAKSSLQGKGSITSNTFTLQGTGTINFTVLDILKPENAYVALFDANSNTLLMKTGNVSANEKISWKVQEHYNKKLYVKVVDHSNEASIAVDSFQASDRGTIFYLNLDEGAGKKALEKVHNLRHDVNYVFNNARYMASKDPRWTPRGIKGGALLFDGSSNYIEVNANVTVPVSDALTIEAWVAPRSYEWGDGNKLSAIVNQSDQDKAEGFSLGMYRHGTWSMQVGIGGQWIQVWVKDHPLEKYKWNYVAATFSKEDGKIKLYLNGEEVASQATPVNVPITPSTESLIIGKNNKPVELAGVFSFNMFSGLLDEVKLHNKALTNQEILAGYESVKALHGGSIPKIPNADIDEDPSVFDGDQHRPQYHAMPPQNWMNEAHAPIYYNGKYHLFYQHNPQGPFWHQIHWGHWVSDDMVNWENVRPALAPEAGTLDPDGTWSGSAAYDRNGNPVLFYTAGNDSLSPNQRTGLATPADLSDPYLEKWEKYPKPVTEQNGKGIHNEFRDPFVWYDKEVDKWYQLVTSGLPDFSSGTALVYVSDDMYNWKYKGPLYVSDRIRYPELGTVWELPVLLPLGTDSTGKQKYIFMINPHEKPEHVPPANDVQRDVEVFYWIGTWDRDNFKFIPDQEAPSKMDVGDGYLTAESGLVTPDGRTVVFSMVQNVRTPQAEYQSGWAHNLSLPVSLSLDKYDKLHIEPIKELQSLRGEKWVDFSDKNLESANQLIKNVKGDMLEIVMEIDPREAQKFGLKVRRSEKGQEETLIYYDKKNGTFNVDRTKSSIDPDVRVDGIQGGYVDLEGENLKLHIFLDRSVIEAFANYKKKLTTRVYVGRYDSLGLQIWADGDINIKSMQVWDMNALTGKPAAPVYVPDKWDNSVYKDITELPNHDFATGDLTGWMTEGDAFQNVHVTNTQFFWDNIFFNPSHKIPGSYHLWGFNEQAGGDSLTGALRSQNFVLGGNGKINFLISGGRDIDRLYVALVRASDDKELFKETATNYEEYQRKIWDATDYIGEELYIKVVDHSKGGFGHINVDDFNVPVQVKKKTNN

SEQ ID NO: 9750 - protein, 103 aa, Aegilops markgrafii
SRGLDGGLHTSFCQDELRSSRAKDVTKRVIGSTVPVLDGEAFSMRVLVDHSIVQGFAMGGRTTMTSRVYPMEAYQEAKVYLFNNATGASVTAERLVVHEMDSA

SEQ ID NO: 9751 - protein, 170 aa, Avena sativa
ERAHVPTMASTIRSTSITPMAPLGDIVWGHAVSTDLVNWIILEPAIERDSPGDINGCWTGSATILPGGQPIVIYTGGDAENHQVQNIMLPKNRSDPYLREWTKAGNNPVLQLVGPGFNSSQFRDPTTGWIGPDGLWRMSIGAEVNGYGAALLYKSERLSKLDYSSSPTVF

SEQ ID NO: 9752 - protein, 625 aa, Hordeum vulgare
MGSHGKPPLPYAYKPLPSDAADGKRTGCMRWSACATVLTASAMAVVVVGATLLAGLRMEQAVDEEAAAGGFPWSNEMLQWQRSGYHFQTAKNYMSDPNGLMYYRGWYHMFYQYNPVGTDWDDGMEWGHAVSRNLVQWRTLPIAMVADQWYDILGVLSGSMTVLPNGTVIMIYTGATNASAVEVQCIATPADPNDPLLRRWTKHPANPVIWSPPGVGTKDFRDPMTAWYDESDETWRTLLGSKDDHDGHHDGIAMMYKTKDFLNYELIPGILHRVVRTGEWECIDFYPVGRRSSDNSSEMLHVLKASMDDERHDYYSLGTYDSAANTWTPIDPELDLGIGLRYDWGKFYASTSFYDPAKNRRVLMGYVGEVDSKRADVVKGWASIQSVPRTVALDEKTRTNLLLWPVEEIETLRLNATELTDVTINTGSVIHIPLRQGTQLDIEASFHLDASAVAALNEADVGYNCSSSGGAVNRGALGPFGLLVLAAGDRRGEQTAVYFYVSRGLDGGLHTSFCQDELRSSRAKDVTKRVIGSTVPVLDGEALSMRVLVDHSIVQGFDMGGRTTMTSRVYPMESYQEARVYLFNNATGASVTAERLVVHEMDSAHNQLSNEDDGMYLHQVLESRH

SEQ ID NO: 9753 - protein, 670 aa, Lolium perenne
  unsure (1)..(670): unsure at all Xaa locations
MPMEARDGVSMPYSYAALPEDAEAAVVGRGRRTGPLFAALLLTLVAALLAVAALAGVRLVGELPAGGVXMPNHPMEVMDVSGSRGPESGVSEKTSGAASESGGMLGADAGSNAFPWSNAMLQWQRTGFHFQPEKNWMNDPNGPVYYKGWYHLFYQYNPEGAIWGNKIAWGHAVSRDMLRWRHLPIAMFPDQWYDINGAWSGSATVLPDGRIVMLYTGSTNASVQVQCLAFPSDPSDPLLTNWTKYEGNPVLYPPPHVGEKDFRDPTTAWYDGSDGMWRIVIGSKDNRRAGMALTYKTKNFHDFELVPGVLHRVPATGMWECIDLYPVGGARGIDMTEAVAAASNSGGGEVLHVMKESSDDDRHDYYALGRYDAATNKWTPLDADADVGIGLRYDWGKFYASKTFYDPAKKRRVLWGWVGETDSERADVAKGWASLQSIPRTVVLDTKTGSNLIQWPVVEVETLRTNSTNLGSIIVEHGSVFPLSLHRATQLDIEASFRLDPLDVAAAKEADVGYNCSTSGGAAGRGALGPFGLLVLADARRHGGDTEQTAVYFYVARGLDGNLRTHFCHDESRSSRANDIVKRVVGNIVPVLDGEALSVRVLVDHSIVESFAQGGRSVVTSRVYPTEAIYANAGVYLFNNATGARVTATSLVVHEMDPSYNQNQAEMASL

SEQ ID NO: 9754 - protein, 648 aa, Lolium perenne
MESRSIPGAYAYEPLPHSSDDAHGHDDRRSAGGVRWRACAAVLAASALVVFVVASTLAGSRVDRVAVDVAAMPALSETARSRGKDAGVSEKTSGAADEMGFLGAGSGADADGFPWSNAMLQWQRTGFHFQPEMNWMNDPNGPVYYRGWYHLFYQYNPEGAVWGNIAWGHAVSRDLVHWRHLPLAMVPDQWYDINGVWTGSATVFPDGTLNMLYTGSTNASVQVQCLAVPEDPNDSLLRNWTKHEANPVLLPPPGIGDKDFRDPTTAWFDESDQTWRTVIGSKDNNGHAGIAMVYKTKDFLNYELIPGYLHRVDGTGMWECIDFYPVGGKNGSEELYVIKESSDDDRHDWYTLGKYDAAANTFTAADPENDLGIGLRYDWGKFYATKTFYDPAKNRRVLWGWIGETDSERADVAKGWASLMSIPRTVELDEKTRTNLIQWPVEELETLRIKSTDLGGVTIDHGSVYPLPLHRATQLDIEASFRIDTATVAALNEADVGYNCSTSGGSANRGALGPFGLLVLADGKAEQTAVYFYVAKGLDGTLQTHFCHDESRSTLARDVVKRVVGYTVPVLDGEAFSVRVLVDHSIVESFAMGGRSTATSRVYPTEAIYGAAGAYLFNNATGGSVTVEKLVVHEMDSSYNQIFMADDL

SEQ ID NO: 9755 - protein, 653 aa, Lolium perenne
MESPSAVVPGTTAPLLPYAYAPLPSSADDARQNRSGGRWRACAAVLAASALAVVVVVGLLAGGRVDRVPAGGDVASATVPAVPMEFPRSRGKDFGVSEKSSGAYSTDGGFPWSNAMLQWQRTGFHFQPEQHYMNDPNGPVYYGGWYHLFYQHNPKGDSWGNIAWAHAVSKDMVNWRHLPLAMVPDQWYDSNGVLTGSITVLPDGQVILLYTGNTDTLAQVQCLATPADPSDPLLREWVKHPANPILYPPPGIGLKDFRDPLTAWFDHSDHTWRTVIGSKDDDGHAGIILSYKTKDFVNYELMPGNMHRGPDGTGMYECIDLYPVGGNSSEMLGGDDSPGVLFVLKESSDDERHDYYALGRFDAVANVWTPIDRELDLGIGLRYDWGKYYASKSFYDQKKNRRIVWAYIGETDSEQADITKGWANLMTIPRTVELDRKTRTNLIQWPVEEVDTLRRNSTDLGRITVNAGSVIRLPLHQGAQLDIEASFQLNSSDVDAINEADVGYNCSTSGAAVRGALGPFGLLVLANGRTEQTAVYFYVSKGVDGALQTHFCHDESRSTRAKDVVNRMIGSIVPVLDGETFSVRVLVDHSIVQSFAMGGRITATSRAYPTEAIYAAAGVYLFNNATGATVTAERLVVHEMASADNHIFTNDDL

SEQ ID NO: 9756 - protein, 645 aa, Lolium perenne
MESSAVVVQGTTAPLLPYAYAPLPSSADDARENQSSGGGVRWRACAASALVVLLVVVGFFAGGRVDLGQDGEVSATSSVPGSSRGKDSGVSEKESPADGGFPWSNAMLQWQHTGFHFQPLKHYMNDPNGPVYYGGWYHLFYQHNPYGDSWGNVSWGHAVSKDLVNWRHLPVALVPDQWYDINGVLTGSITVLPDGRVILLYTGNTDTFSQVQCLAVPADPSDPLLRSWIKHPANPILFPPPGIGLKDFRDPLTAWFEHSDNTWRTIIGSKDDDGHAGIVLSYKTTDFVNYELMPGNMHRGPDGTGMYECLDIYPVGGNSSEMLGGDSSPEVLFVLKESANDEWHDYYALGWFDAAANTWTPQDPEADLGIGLRYDWGKYYASKSFYDPIKNRRVVWAFVGETDSEQADKAKGWASLMSIPRTVELDKKTRTNLIQWPVEEIETLRRNVTDLGGITVEAGSVIHLPLQQGGQLDIEASFRLNSSDIDALNEADVGFNCSSSDGAAVRGALGPFGLLVFADGRHEQTAAYFYVSKGLDGSLLTHYCHDESRSTRAKDVVSRVVGGTVPVLDGETFSVRVLVDHSIVQSFVMGGRTTVTSRAYPTEAIYAAAGVYLFNNATSATITAEGLVVYEMASAESRAFLADDM

SEQ ID NO: 9757 - protein, 623 aa, Lolium perenne
MESRAIPSAAYAPLLPSAADDVALAKQDRPSVGWRGFLTVLAASGVVVLLVGATLLAGSRMGQAGDGEGNTDEDGAGGFPWSNEMLQWQRAGFHYQPEGHFMSDPNGPVYYRGYYHLFFQYNRRGVAWDDYIEWGHVVSQDLVHWRPLPLAMRPDHWYDKKGVLSGTITVLHNGTLVLLYTGVTEDPMAESQCIAVPTDPNDPLLRHWTKHPANPVLAHPQGVQGMDFRDPTSAWWDKSDSTWRILIGSKDDDNGSHAGIAFIFKTKDFLSFERVPGIVHRVEGTGMWECIDFYPVGGGHNSSSEELYVIKASMDDERHDYYSLGRYDAAANTWTPLDAELDLGIGLRYDWGKLYASTSFYDPLKQRRIMLGYVGEVDSARADVAKGWASLQSIPRTVALDEKTRTNLLLWPVEEVEALRYNSTDLSGITVENGSIFHLPLHQATQLDIEASFRLDASDVAAINEADVGYNCSSSGGAAARGALGPFGLLVHAAGDLRGEQTAVYFYVSRALDGSLRTSFCNDETRSSRARDVTKRVVGSTVPVLDGEALSMRVLVDHSIVQSFAMGGRVTATSRVYPTEAIYARAGVYLFNNATGASVTAERLIVHEMASAVYDETVMVKDS

SEQ ID NO: 9758 - protein, 567 aa, Saccharum officinarum
HDGGGNAFPWSNAMLQWQRTGFHFQPQKNWMNDPNGPVYYKGWYHLFYQYNPDGAIWGNKIAWGHAVSRDLIHRRHLPLAMVPDQWYDTNGVWTGSATTLPDGRLAMLYTGSTNASVQVQCLAVPADDADPLLTNWTKYEGNPVLYPPPGIGPRDFRDPTTAWFDPSDSTWRIVIGSKDDAEGDHAGIAVVYRTRDFVHFELLPDLLHRVAGTGMWECIDFYPVATRGKVSGNGVDMSDALGKNGAVVGDVVHVMKAGMDDDRHDYCALGRYDAAANAWTPLDAEKDVGTGLRYDWGKFYASKTFYDPAKRRRVLWGWVGETDSERADVSKGWASLQGIPRTVLLDTKTGSNLLQWPVEEVETLRTNSTDLSGITIDYGSAFPLNLRRATQLDIEAEFELDRRAVMSLNEADVGYNCSTSGGAAARGALGPFGLLVLADKHLHEQTAVYFYVAKGLDGSLTTHFCQDESRSSSANDIVKRVVGSAVPVLEDETTLSLRVLVDHSIVESFAQGGRSTATSRVYPTKAIYANAGVFLFNNATAARVTAKKLVVHEMDSSYNHDYMVTDI

SEQ ID NO: 9759 - protein, 103 aa, Secale cereale
SRGLDGGLHTSFCQDELRSSRAKDVTKRVIGSTVPVLDGEAFSMRVLVDHSIVQGFAMGGRTTMTSRVYPMEAYQEARVYLFNNATGASVTAERLVVHEMDSA

SEQ ID NO: 9760 - protein, 662 aa, Triticum aestivum
MDSSRVILIPGTPPLPYAYEQLPSSSADAKGIEEERAGGGGLRWRACAAVLAASAVVALVVAAAVFGASGAGWDAVAASVPATPATEFPRSRGKEHGVSEKTSGAYSANAFPWSNAMLQWQRTGYHFQPDKYYQNDPNGPVYYGGWYHFFYQYNPSGSVWEPQIVWGHAVSKDLIHWRHLPPALVPDQWYDIKGVLTGSITVLPDGKVILLYTGNTETFAQVTCLAEPADPSDPLLREWVKHPANPVVFPPPGIGMKDFRDPTTAWFDESDGTWRTIIGSKNDSDHSGIVFSYKTKDFLSYELMPGYMYRGPKGTGEYECIDLYAVGGGRKASDMYNSTAEDVLYVLKESSDDDRHDWYSLGRFDAAANKWTPIDEELELGVGLRYDWGKYYASKSFYDPVKKRRVVWAYVGETDSERADITKGWANLQSIPRTVELDEKTRTNLVQWPVEELDALRINTTDLSGITVGAGSVAFLPLHQTAQLDIEATFRIDASAIEALNEADVSYNCTTSSGAATRGALGPFGLLVLANRALTEQTGVYFYVSKGLDGGLRTHFCHDELRSSHASDVVKRVVGSTVPVLDGEDFSVRVLVDHSIVQSFAMGGRLTATSRAYPTEAIYAAAGVYMFNNATGTSVTAEKLVVHDMDSSYNHIYTDDDLVVVD

SEQ ID NO: 9761 - protein, 616 aa, Triticum aestivum
MGSHGKPPLPYAYKPLPSDADGERAGCTRWRVCAVALTASAMVVVVVGATLLAGFRVDQAVDEEAAGGFPWSNEMLQWQRSGYHFQTAKNYMSDPNGLMYYRGWYHMFFQYNPVGTDWDDGMEWGHAVSRNLVQWRTLPIAMVADQWYDILGVLSGSMTVLPNGTVIMIYTGATNASAVEVQCIATPADPTDPLLRRWTKHPANPVIWSPPGVGTKDFRDPMTAWYDESDDTWRTLLGSKDDNNGHHDGIAMMYKTKDFLNYELIPGILHRVERTGEWECIDFYPVGRRTSDNSSEMLHVLKASMDDERHDYYSLGTYDSAANRWTPIDPELDLGIGLRYDWGKFYASTSFYDPAKKRRVLMGYVGEVDSKRADVVKGWASIQSVPRTIALDEKTRTNLLLWPVEEIETLRLNATELSDVTLNTGSVIHIPLRQGTQLDIEATFHLDASAVAALNEADVGYNCSSSGGAVNRGALGPFGLLVLAAGDRRGEQTAVYFYVSRGLDGGLHTSFCQDELRSSRAKDVTKRVIGSTVPVLDGEAFSMRVLVDHSIVQGFAMGGRTTMTSRVYPMEAYQEAKVYLFNNATGASVTAERLVVHEMDSAHNQLSNMDDHSYVQ

SEQ ID NO: 9762 - protein, 518 aa, Triticum aestivum
  unsure (1)..(518): unsure at all Xaa locations
QPGGAVWGNIAWGHAVSRDLIHWRHLPLAMVPDQWYDINGVWTGSATVLPDGSLVMLYTGSTNASVQVQCLAVPADPNDSLLRNWTKYEANPILVPPPGIGDKDFRDPTTAWFDESDKTWRTVIGSKDNHGHTGIVMTYKTKDFINYELIPGLLHSVPGTGMWECIDFYPVGGADGSEELYVMKESSDDDRHDWYALGRYDAAANKYTPIDPEMDVGIGLRYDWGKFYASKTFYDPSKNRRVLWGWIGETDSERADVAKGWASLQSIPRTVELDEKTRTNLIQWPVVEIETLRINSTDLGGTTIDTGSVLPLPLRRATQLDIEATFHLDTSAIAAVNEADVGYNCSTSGGAANRGALGPFGLLVLADGALKEQTAVYFYVSRGLDGGLQTHFCQDESRSSLAQDVVKRVVGFTVPVLDGEDLSLRVLVDHSIVESFAMGGRSTAXVEGVSDGGHLRRRWRVPFQQRHWRRRHRREARGARDGRLLQPDLHGRRCLGRLVAESNQALGPVMHIHLYYIL

SEQ ID NO: 9763 - protein, 509 aa, Triticum aestivum
GTRGHAVSRDLIHWRHLPLAMVPDQWYDINGVWTGSATVLPDGSLVILYTGSTNASVQVQCLAVPADPNDSLLRNWTKYEANPILVPPPGIGDKDFRDPTTAWFDESDKTWRTSSAPRDNHGHTGIVMTYKTKDFINYELIPGLLHSVPGTGMWECIDFYPVGGADGSEELYVMKESSDDDRHDWYALGRYDAAANKYTPIDAEMDVGIGLRYDWGKFYASKTFYDPSKNRRVLWGWIGETDSERADVAKGWASLQSIPRTVELDEKTRTNLIQWPVVEIETLRINSTDLGGTTIDTGSVLPLPLRRATQLDIEATFHLDTSAIAAVNEADVGYNCSTSGGAANRGALGPFGLLVLADGALKEQTAVYFYVSRGLDGGLQTHFCQDESRSSLAQDVVKRVVGFTVPVLDGEDLSLRVLVDHSIVESFAMGGRSTANIEGVSDGGHLRRRWRVPFQQRHRRCRHRGEARGARDGRLLQPDLHGRRCLSRLVAAINQALGPVMHIHPYYIL

SEQ ID NO: 9764 - protein, 509 aa, Triticum aestivum; identical to SEQ ID NO: 9763

SEQ ID NO: 9765 - protein, 485 aa, Triticum aestivum
  unsure (1)..(485): unsure at all Xaa locations
LVQWRTLPXAMVADQWYDILGVLSGSMTVLPNGTVIMIYTGATNASAVEVQCIATPADPTDPLLRRWTKHPANPVIWSPPGVGTKDFRDPMTAWYDESDDTWRTLLGSKDDNNGHHDGIAMMYKTKDFLNYELIPGILHRVERTGEWECIDFYPVGRRSSDNSSEMLHVLKASMDDERHDYYSLGTYDSAANTWTPIDPDLDLGIGLRYDWGKFYASTSFYDPAKKRRVLMGYVGEVDSKRADVVKGWASIQSVPRTIALDEKTRTNLLLWPVEEIETLRLNATELSDVTMNTGSVIHIPLRQGTQLDIEATFHLDASAVAALNEADVGYNCSSSGGAVNRGALGPFGLLVLAAGDRRGEQTAVYFYVSRGLDGGLHTSFCQDELRSSRAKDVTKRVIGSTVPVLDGEAFSMRVLVDHSIVQGFAMGGRTTMTSRVYPMEAYQEAKVYLFNNATGATVTAERLVVHEMDSAHNQLSNMDDHSYVQ

SEQ ID NO: 9766 - protein, 505 aa, Triticum aestivum
  unsure (1)..(505): unsure at all Xaa locations
XPYXREQKLELHRGGGRSRTSGSXRAAGIRPHASEWYDILGVLSGSMTVLPNGTVIMIYTGATNASAVEVQCIATPADPTDPLLRRWTKHPANPVIWSPPGVGTKDFRDPMTAWYDESDDTWRTLLGSKDDHDGHHDGIAMMYKTKDFLNYELIPGILHRVERTGEWECIDFYPVGRRTSDNSSEMLHVLKASMDDERHDYYSLGTYDSAANTWTPIDPELDLGIGLRYDWGKFYASTSFYDPAKKRRVLMGYVGEVDSKRADVVKGWASIQSVPRTIALDEKTRTNLLLWPVEEIETLRLNATELSDVTLNTGSVIHIPLRQGTQLDIEATFHLDASAVAALNEADVGYNCSSSGGAVNRGALGPFGLLVLAAGDRRGEQTAVYFYVSRGLDGGLHTSFCQDELRSSRAKDVTKRVIGSTVPVLDGEAFSMRVLVDHSIVQGFAMGGRTTMTSRVYPMEAYQEAKVYLFNNATGASVTAERLVVHEMDSAHNQLSNMDDHSYVQ

SEQ ID NO: 9767 - protein, 456 aa, Triticum aestivum
  unsure (1)..(456): unsure at all Xaa locations
XRERERERERPDGRVILLYTGNTETFAQVTCLAEAADPSDPLLREWVKHPANPVVFPPPGIGMKDFRDPTTAWFDESDGTWRTIIGSKNDSDHSGIVFSYKTKDFLSYELMPGYMYRGPKGTGEYECIDLYAVGGGRKASDMYNSTAEDVLYVLKESSDDDRHDWYSLGRFDAAANKWTPIDEELELGVGLRYDWGKYYASKSFYDPVKKRRVVWAYVGETDSERADITKGWANLQSIPRTVELDEKTRTNLIQWPVEELDTLRINTTDLSGITVGAGSVAFLPLHQTAQLDIEATFRIDASAIEALNEADVSYNCTTSRGAATRGALGPFGLLVLANHALTEQTGVYFYVSKGLDGGLRTHFCHDELRSSHASDVVKRVVGSTVPVLDGEDFSVRVLVDXSIVQXFAMGGRLTATSRAYXTEAIYAAAXVYMFNNATGTSVTAEKLVVHDMDSSX

SEQ ID NO: 9768 - protein, 479 aa, Triticum aestivum
  unsure (1)..(479): unsure at all Xaa locations
AITSSKPSFAFHFNFVPMEARDGGSAPLPCSYAPLPEDAEAAATVGRVRRTAGLLCAALLLATVAVLLVVAALAGVRLAGQLPAGGIVVMSGHQTTVDTAPMSASSRGPESGVSEKTSYAGEQAAGALGVGRXNAYPGNNAMLXXQRTGLSFPPDKNWMNDPNGPVYYKGWYHLFYQYNPERMLWGNKIAWGHAASRDLLRWRHLPVAMSPDQWYDINGVWSGSATVLPDGRIVMLYTGSTNASVQVQCLAFPTDPSDPLLINWTKYENNPVMYPPPGVGDKDFRDPTTAWFDGSDDTWRLVIGSKDDHHAGMVMTYKTKDFIDYELVPGLLHRVPGTGMWECIDLYPVGGVRGIDMTEAVAAASNNGGGDVLHVMKESSDDDRHDYYALGRYDAAMNTWTPLDSDADVGIGLRYDWGKFYASKTFYDPSKKRRVLWGWVGETDSEHADVAKGWASLQVLDIFIIXXSSDXLIPPLIDX

SEQ ID NO: 9769 - protein, 573 aa, Triticum aestivum
  unsure (1)..(573): unsure at all Xaa locations
MDSSRVILIPGTPPLPYAYEQLPSSSADAKGIEEQRAGGGLRWRACAAVLAASAVVALVVAAAVFGAGGAGRDAVAASVPATPATEFPRSRGKEHGVSEKTSGAYSANAFPWSNAMLQWQRTGYHFQPDKYFAQVTCLAEPADPSDPLLREWVKHPANPVVFPPPGIXXDFRDPTTAWFDESDGTWRTIIGSKNDSDHSGIVFSYKTKDFLSYELMPGYMYRGPKGTGEYECIDLYAVGGGRKASDMYNSTAEDVLYVLKESSDDDRHDWYSLGRFDAAANKWTPIDTELELGVGLRYDWGKYYASKSFYDPVKKXRVVWAYVXETDSERADITKGWANXQSIPRTXELDXKTRTNLVQWPXEELDALXNTTDLSGITVGAGSVAFLPLHQTAQLDIEATFRIDASAIEALNEADVSYNCTTSSGAATRDALGPFGLLVLANRALTEQTGVYFYVSKGLDGGLRTHFCHDELRSSHASDVVKRVVGSTVPVLDGEDFSVRVLVDHSIVQSFAMGGRLTATSRAYPTEAIYAAAGVYMFNNATGTSVTAEKLVVHDMDSSYNHIYTDDDLVVVD

SEQ ID NO: 9770 - protein, 590 aa, Triticum monococcum
MARLSLAACAVAFHLCLLVSSSASLRWLSDKAAAVTTAGGVRTRSAYHFQPAKNWQNDPNGPMYHNGLYHFFYQYNPDGVTWGNGNLSWGHSVSVDLVNWFALDAALQPSRPFDANGCWSGSATILPDGSPVMLYTGIDARGDQVQNVAYPKNASDPLLVDWVKPEYNPVIPVPADIKRDDFRDPSTAWLGADGLWRIAVAARVHDVGGATLIYRSKDFLRWERNADPLYLAHAAGMVECPDLFPVSEPGVEVGLPASGAGARHVLKMSVMDTVQDYYVVGRYDDAADTFVPEDDEDCRSWRRLDYGHVYASKSFFDPARTGACSGAGPTSPTACPTTSSGDGPVFKLFPRKIWLDEDGKQLRQWPVEEIETLRSKRVNLLIPEVNAGGVNEIIGVMGAQADVEVVFEVPALEHADVLEPNWLLDPQSLCGEKGASVPGSVGPFGLLVMASGDMQEHTAVFFRVFRQNDKYKVLMCTDLSRSSTRDGVYKPPYGAFVDMDIEAHGGIISLRTLVDHSVVESFGGGGRACITARVYPDHVVNGNSHLYVFNNGTGAVKVSSLDAWEMATATVNVLPDELIAASSVSRAQAY

SEQ ID NO: 9771 - protein, 103 aa, Triticum urartu
SRGLDGGLHTSFCQDELRSSRAKDVTKRVIGSTVPVLDGEAFSMRVLVDHSIVQGFAMGGRTTMTSRVYPMEAYHEAKVYLFNNATGASVMAERLVVHEMDSA

SEQ ID NO: 9772 - protein, 103 aa, Aegilops speltoides
SRGLDGGLHTSFCQDELRSSRAKDVTKRVIGSTVPVLDGEAFSMRVLVDHSIVQGFAMGGRTTMTSRVYPMEAYQEAKVYLFNNATGATVTAERLVVHEMDSA

SEQ ID NO: 9773 - protein, 670 aa, Zea mays
MIPAVADPTTLDGGGARRPLLPETDPRGRAAAGAEQKRPPATPTVLTAVVSAVLLLVLVAVTVLASQHVDGQAGGVPAGEDAVVVEVAASRGVAEGVSEKSTAPLLGSGALQDFSWTNAMLAWQRTAFHFQPPKNWMNDPNGPLYHKGWYHLFYQWNPDSAVWGNITWGHAVSRDLLHWLHLPLAMVPDHPYDANGVWSGSATRLPDGRIVMLYTGSTAESSAQVQNLAEPADASDPLLREWVKSDANPVLVPPPGIGPTDFRDPTTACRTPAGNDTAWRVAIGSKDRDHAGLALVYRTEDFVRYDPAPALMHAVPGTGMWECVDFYPVAAGSGAAAGSGDGLETSAAPGPGVKHVLKASLDDDKHDYYAIGTYDPATDTWTPDSAEDDVGIGLRYDYGKYYASKTFYDPVLRRRVLWGWVGETDSERADILKGWASVQSIPRTVLLDTKTGSNLLQWPVVEVENLRMSGKSFDGVALDRGSVVPLDVGKATQLDIEAVFEVDASDAAGVTEADVTFNCSTSAGAAGRGLLGPFGLLVLADDDLSEQTAVYFYLLKGTDGSLQTFFCQDELRASKANDLVKRVYGSLVPVLDGENLSVRILVDHSIVESFAQGGRTCITSRVYPTRAIYDSARVFLFNNATHAHVKAKSVKIWQLNSAYIRPYPATTTSL

SEQ ID NO: 9774 - protein, 670 aa, Zea mays; identical to SEQ ID NO: 9773

SEQ ID NO: 9775 - protein, 671 aa, Zea mays
  unsure (1)..(671): unsure at all Xaa locations
MIPAVADPRTSASACATTTALPETDRPSTTPCSAAEKRRPATARLLTAVVSAVLVLVLVAVTVLASQHVDGQGGGVPAGEDAVVVEVAASRGVAEGVSEKSTAPLLGAGALQDFSWTNAMLAWQRTAFHSQPPKNWMNDPNGPLYHKGWYHLFYQWNPDSAVWGNITWGHAVXRDLLHWLHLPLAMVPDHPYDANGVWSGSATRLPDGRIVMLYTGSTAESSAQVQNLAEPADASDPLLREWVKSDANPVLVPPPGIGPTDFCDPTTVWRTPVGNDTAWRVAIGSKDRDHAGLALVYRTEDFVRYDPAPALMHAVPGTGMWECVDFYPVAAGSGAAADSGDGAETSTAPGPGVKHVLKASLDDDKHDYYAIGTYDPATDTWTPDSAEDDVGIGLRYDYGKYYASKTFYDPVLRXRRVLWGWVGETDSEXADILKGWASVQSIPRTVLLDTKTGSNLLQWPVVEVENLRMSGKSFDGVALDRGSVVPLDVGKATQLDIEAVFEVDASDAAAVTEADVTFNCSTSAGAAGQGLLGPFGLLVLADDDLSEQTAVYFYLLKGTDGSLQTFFCQDELRASKANDLVKRVYGSLVPVLDGENLSVRILVDHSIVESFAQGGRTCITSRVYPTRAIYDSARVFLFNNATHAHVKAKSVKIWQLNSAYIRPYPATTTSL

SEQ ID NO: 9776 - protein, 634 aa, Zea mays
  unsure (1)..(634): unsure at all Xaa locations
XLTAVVSAVLVLVLVAVTVLASQHVDGQGGGVPAGEDAVVVEVAASRGVAEGVSEKSTAPLLGAGALQDFSWTNAMLAWQRTAFHSQPPKNWMNDPNGPLYHKGWYHLFYQWNPDSAVWGNITWGHAVXRDLLHWLHLPLAMVPDHPYDANGVWSGSATRLPDGRIVMLYTGSTAESSAQVQNLAEPADASDPLLREWVKSDANPVLVPPPGIGPTDFCDPTTVWRTPVGNDTAWRVAIGSKDRDHAGLALVYRTEDFVRYDPAPALMHAVPGTGMWECVDFYPVAAGSGAAADSGDGAETSTAPGPGVKHVLKASLDDDKHDYYAIGTYDPATDTWTPDDVEKDVGVGLRYDYGKFYASKTFYDPVLRRRVLWGWVGETDSERADVLKGWASVQSIPRTVLLDTKTGSNLLQWPVVEVENLRMSGKSYDGVALDRGSVVPLDVGKATQLDIEAVFEVDAEGVGVAEEADVTFNCSTSAGAASRGLLGPFGLLVLADEDLSERTAVYFYLVKATDGSLKTFFCQDELRSSKANDLVKRVYGSLVPVLDGENLSVRILVDHSIVESFAQGGRTCITSRVYPTRAINDSARVFLFNNATGVHVKAKSVKIWQLNSAYIRPYPASSLXASKVTVTDK

SEQ ID NO: 9777 - protein, 321 aa, Psathyrostachys juncea
MLHVLKASMDDERHDYYSLGRYDSAANTWTPIDPELDLGIGLRYDWGKFYASTTFYDPAKKRRVLMGYVGEVDSKRADVVKGWASIQSVPRTVALDEKTRTNLLLWPVEEIETLRLNATELSDVTINTGSVFHVPLRQGTQLDIEASFRLDASAVAALNEADVGYNCSSSGGAATRGALGPFGLLVLAAGDRLGEQTAVYFYVSRGLDGGLQTSFCQDELRSSWAKDVTKRVIGSTVPVLDGEAFSMRVLVDHSIVQGFAMGGRTTMTSRVYPMEAIYEKAGVTLFNNATSAVVMAEKLVVHEMDSSHNQLSNEDDELYVQ

SEQ ID NO: 9778 - protein, 103 aa, Psathyrostachys juncea
SRGLDGGLQTSFCQDELRSSWAKDVTKRVIGSTVPVLDGEAFSMRVLVDHSIVQGFAMGGRTTMTSRVYPMEAYQEAGVYLFNNATGAGVTAERLVVHEMDSA

SEQ ID NO: 9779 - protein, 623 aa, Agropyron cristatum
MGSHTMPGKPPLPYAYKPLLSGTTDEANGQRTGCTRRRVCAAMLTASAMVVVVVAAAFLARARVDKVVNEEAAGGFPWSNEMLQWQRSSYHFQPAKNYMSDPDGLLYYGGWYHMFYQYNPVGTDWADGMAWGHAVSRNLVQWRTLPIAMKPDQWYDILGVLSGSVTVLPNGTVIMLYTGATNDWYVEATCLALPADPNDPLLRRWTKHPANPIIWSPPGIGTKDFRDPMTPWYDDSDHTWRTLFGSKDDHHGHHDGIAIMYKTKDFLNYELIPGILHRVENTGEWECIDFYPVGGGGSENSSEVLHVLKASMDDERHDYYSLGTYDSAANIWTPIDPELDLGIGLRYDWGKFYASTSFYDPAKKRRVLMGYVGEVDSKRADVVKGWASIQSVPRTIALDEKTRTNLLLWPVEEIETLRLNATELSDVTLNTGSLVHVPLRQGTQPDIEATFHLDAAAVAALNEADVGYNCSSSGGAVNRGALGPFGLLVLAAGDRRGEKTAVYFYVSRGLDGGLQTSFCQDELRSSRAKDVTKRVIGSTVPVLGGEAFSMRVLVDHSIVQGFAMGGRITMTSRVYPMEAYQEAGVYLFNNATGASVTAERLVVHEMDSAHNQLSNEDAYMYVR

SEQ ID NO: 9780 - protein, 103 aa, Australopyrum retrofractum
SRGLDGGLHTSFCQDELRSSRAKDVTKRVIGSTVPVLDGEAFSMRVLVDHSIVQGFAMGGRTTMTSRVYPMEAYAEAGVYLFNNATGASVTAERLVVHEMDSA

SEQ ID NO: 9781 - protein, 103 aa, Thinopyrum bessarabicum
SRGLDGGLHTSFCQDELRSSWAKDVTKRVIGSTVPVLEGEAFSMRVLVDHSIVQGFAMGGRTTMTSRVYPMESYQEAKVYLFNNATGASVTAERLVVHEMDSA

SEQ ID NO: 9782 - protein, 103 aa, Pseudoroegneria spicata
SRGLDGGLRTSFCQDESRSSRAKDVTKRVIGSTVPVLEGEAFSMRVLVDHSIVQSFAMGGRSTMTSRVYPMEAYAKARVYLFNNATGAGVTAERLVVHEMDSA

SEQ ID NO: 9783 - protein, 654 aa, Schedonorus arundinaceus
MESSAVVPGTTAPLLPYAYAPLPSSADDARENQSSGGVRWRVCAAVLAASALAVLIVVGLLAGGRVDRGPAGGDVASAAVPAVPMEIPRSRGKDFGVSEKASGAYSADGGFPWSNAMLQWQRTGFHFQPEKHYMNDPNGPVYYGGWYHLFYQYNPKGDSWGNIAWAHAVSKDMVNWRHLPLAMVPDQWYDSNGVLTGSITVLPDGQVILLYTGNTDTLAQVQCLATPADPSDPLLREWIKHPANPILYPPPGIGLKDFRDPLTAWFDHSDNTWRTVIGSKDDDGHAGIILSYKTKDFVNYELMPGNMHRGPDGTGMYECIDLYPVGGNSSEMLGGDDSPDVLFVLKESSDDERHDYYALGRFDAAANIWTPIDQELDLGIGLRYDWGKYYASKSFYDQKKNRRIVWAYIGETDSEQADITKGWANLMTIPRTVELDKKTRTNLIQWPVEELDTLRRNSTDLSGITVDAGSVIRLPLHQGAQIDIEASFQLNSSDVDALTEADVSYNCSTSGAAVRGALGPFGLLVLANGRTEQTAVYFYVSKGVDGALQTHFCHDESRSTQAKDVVNRMIGSIVPVLDGETFSVRVLVDHSIVQSFAMGGRITATSRAYPTEAIYAAAGVYLFNNATGATVTAERLVVYEMASADNHIFTNDDL

SEQ ID NO: 9784 - protein, 501 aa, Pseudomonas mucidolens
MDKVYYQEKFRPQFHFTPETNWMNDPNGLVYYEGEYHLFYQYHPFGNTWGPMHWGHAVSKDLIHWDHLPIALYPDHIGQIFSGSAVIDWQDTSGFFNGGAGMVALFTHADKFPDSGRPRQRQSLAYSTDRGRTWIKYEGNPFFADEAMTDFRDPKVFWHKASNKWIMILAAGNCVRIYHSSNLKQWKFASEFGANEGSHTGVWECPDLFELPVDGDRNRKKWVMVVSIGNSDEYLEGSRTQYFIGQFDGIRFTNENDPETVLWVDHGRDNYAGVTWSDIPEEDGRRLFIAWMSNWKYANHTPTEIWRSAMTIPRSLSLRSTPEGTRLFQTPVTELESLRLEKLEWKDLEVTTNGNVLSNISGDIFEIIAEFELNTALEFGFKVRKSADQETIVGYDAEQQMLFIDRTQSGVSDFCEHFPCKHGAVMIPNQNRIQMHIFVDRSSVEVFGNNGELTMTDLIFPDDSSTGIEVYAKEGNVKLVSLMLFPLMPIHSHLKSFVMNN

SEQ ID NO: 9785 - protein, 776 aa, Pseudomonas mucidolens
MHNTEDTGLIAYWSFDEESGKTAVDVIGKMNDSIDYVFNHARFKASSDPQRRKGISGNALLFDGYSTWIKRSADQIGKPENALTLEAWVAPRSYEWGDEQRLSAIVNQHDREKKEGFILGMYRHGTWSLQLGLDHEWIEVWSEDHPLPKNEWSYVVATYDKKTSMLKLACPSMLKLYLNGVEVASKQTTAHSTITPSRQDLLIGKNNQAVVLAGVFSLNMFNGLIDEIKIYNRALSSDEIASSFHRYLVPYGGKIPSIPYDHLKLDRSLLADDRHRPQYHVSPPAHWMNEPHAPIYFNGQYHLFYQHNPQGPYWHQIHWGHWVSDDLVHWRDLPVALSPEKNAVDPDGDWSGSATYDEHGLPVLFFTAGDDSAKPNQRVGLARSTFAQDGDNDLVHWVKHPTPVVVQQQGVGKFGDFRDPFVWKDGDTWYMLVGSGTDGEGGTALAYTSKNLTEWEYRGPFYISDHKNYPYLGKVWELPVLLPLGKDKKGHDKHVFLISPVGAGADVEVFYWIGTFDKEQFRFIPDQNEPQLIDVGDSHFTGPSGMVDPNTGRKILFTIAQGERTPALDYSAGWAHNGGLPVSLSLREDGRLGVEPIEELKSLRGKKLVSFTKKSAEEANDLLTNVKGDMLEIILELEPGTAKQFGIKVRRSPGGEEETLLYYNTEASTLNVNRMKTTLDNFERSKGIQGGKLELNGENLKLHIYLDRSMIEAYANGLKSLTTRAYPSRPDSLGLQIWGDGSVSVKSMEVWEMNSAFGPTVSAYIPEQHADGVQTK

SEQ ID NO: 9786 - protein, 623 aa, Allium sativum
MESRDIESSPALNAPLLQTTPPVKSSKLKVVLLAISTSVILVLATFFAVKYSVFESGTGLVKEDAPAAGDGYPWTNDMFEWQRPGYHFQPPYHFMGDPNAAMYYKGWYHFFYQYNPYGSAWDTTISWAHAVSKDMIHWLHLPIAMVPDHWYDSKGVWSGYATTLPDGRIIVLYTGGTDELVQVQNLAEPADPSDPLLIEWKKSNHNPILMPPPGVGPHDFRDPFPVWYNESDSNWHMLIGSKDDNHYGTVLIYLTKDFKTYTLLPEILHKTKDNVGMLECVDLYPVATTGNQIGNGLEMQVGFGKGIKHVLKASMDDERHDYYAIGTFDLESFTWVPDDDTIDVGVGLRYDYGKFYASKTFYDQEKRRRILWGYVGEVDSKTDDARKGWANVLNIARTILFDVKTRSNLLVWPVEELDALRTSSKEFNGVVVEPGFTYHLDVGTASQLDIEAEFEINQEAVDAVVEADVTYNCSTSDGSAHRGLLGPFGLLVLANEKMTEKTATYFYVSRTVDGGLQTHFCQDELRSSKANDITKRVVGHTVPVLHGETFSLRILVDHSIVESFAQKGRAVATSRVYPTEAIFDSTRIFLFNNATSATLTAKSVKIWHMNSTHNHPFPGFPFP

SEQ ID NO: 9787 - protein, 662 aa, Asparagus officinalis
MASSRDVESPPTSYAPLPSDDEQRPGSAPPRSRLRLIAIAMPPILLLALAAALFLSGSGAVTDLVAGPSPDTMPEIVRTDRGVEEGVSSKSSGAGPGLLTSVSHGQYPWTNKMLSWQRTGFHFQPEKNWMNDPNGPLYYKGWYHFFYQYNPNAAVWGDIAWGHAVSKDLLSWRHLPLAMVPDRWYDINGVWTGSATILPDGRIIMLYTGATNESVQVQNLAVPADLSDPLLLEWTKVDDANPILVPPPGVGATDFRDPTTAWFEPSDSTWRIAIGTKDADHSGVALVYSTKDFLNYTLLPGTLHTVKHVGMWECIDFYPIATSGAGANRGLDPSVRPSKLVKHVLKESSDDDRQDWYAIGTYDPDTNKWTPDDESLDVGIGLRYDLGKFYASKTFYDQEKKRRVLWGWIGESDSESADILKGWASLQGIPRTVLYDLRTGSNLITWPIEEVESLRSNLHDFSGITIDKGSTFHLDVHGAAQLDIEAEFKINEESLSAEAENGTGVMYNCSGGGGAAERGLLGPFGLLVLANSDLTEQTAAYFYVSRGVDGELQTHFCQDEMRSSKANDIVKSVVGGTVPVLKGETLSLRILVDHSIVESFAQGGRASATSRVYPTEAIYSSAKVFLFNNATGASITAQSLKIWHMNSTLSRPFDFNDGAQAQ

SEQ ID NO: 9788 - protein, 440 aa, Novosphingobium aromaticivorans
MRPLYHYAPAANWLSDPNGLVWQDGEWHLFYQYNPFGEDWGHMSWGHAVSRDLVTWQELPVALAEEDGTMIFSGSAVIDHQGSAGFGKGAMVAVYTGARTDRAHQFQSIAASTDRGRTFTKFTGNPVLDLQMADFRDPNVFWHGPSGRWIMSVVLSEENRAQLYASVDLRHWDLLSDIGRDGAPGHLWECPWMVELPVEGTDETRWLFKVDVLSGAAGQASPWRVGHFDGRRFVPETGWAVGDHGPDFYAAIGWNAAPDAEGRPVWIGWAGNHAYQKYLEPQGWRGAMTLPRRVSLRRDESGYALVQEVEPACRALFGKAEATSLCDGCIPLPSAALLSFPAGKDWSFRIEDDHGRSIECALSGGRLTVRRHDPVTPQLEHRAAMEAGKGPVELWLDAGSLEVFANRGGAVLTLQHRLAGEAWALRGEGACSVAYPAAMA

SEQ ID NO: 9789 - protein, 581 aa, Schizosaccharomyces pombe
MFLKYILASGICLVSLLSSTNAAPRHLYVKRYPVIYNASNITEVSNSTTVPPPPFVNTTAPNGTCLGNYNEYLPSGYYNATDRPKIHFTPSSGFMNDPNGLVYTGGVYHMFFQYSPKTLTAGEVHWGHTVSKDLIHWENYPIAIYPDEHENGVLSLPFSGSAVVDVHNSSGLFSNDTIPEERIVLIYTDHWTGVAERQAIAYTTDGGYTFKKYSGNPVLDINSLQFRDPKVIWDFDANRWVMIVAMSQNYGIAFYSSYDLIHWTELSVFSTSGYLGLQYECPGMARVPVEGTDEYKWVLFISINPGAPLGGSVVQYFVGDWNGTNFVPDDGQTRFVDLGKDFYASALYHSSSANADVIGVGWASNWQYTNQAPTQVFRSAMTVARKFTLRDVPQNPMTNLTSLIQTPLNVSLLRDETLFTAPVINSSSSLSGSPITLPSNTAFEFNVTLSINYTEGCTTGYCLGRIIIDSDDPYRLQSISVDVDFAASTLVINRAKAQMGWFNSLFTPSFANDIYIYGNVTLYGIVDNGLLELYVNNGEKTYTNDFFFLQGATPGQISFAAFQGVSFNNVTVTPLKTIWNC

SEQ ID NO: 9790 - protein, 453 aa, Schizosaccharomyces pombe
MPVRPCIHFTPPEGFMNDPNGLVYSNGKWHLFFQWNPTGNQAGNQHWGHAVSKNLYKWKLLPTALAPGDDHGLMFSGSAVIDKTNSSGFFESGFFSRKSVDPEERIVLIYTTHYDNRETQNIAYSLDGGITFIKYKKNPILDIKESQFRDPKVFWHEESRAWIMVVVLAQKYKVLFYHSLNLRDWVKLSEFGSAGVLGYQYECPDFVRLPIEGTDEFRWVLIVSINPGSSINGGSMVQYFIGDFDGQTFTPIDSASRILDCGHDCYATQTFGNAPDGRVISISWASNWNYTNDVPMRMKHRGMFTIPRELTLCYTHLNQETRGLVLRQRPVNLHHLYYPDSLPAPLLLNRVCEFPTVWTSATVFYLAVSIPKSIVLESPMEFLCLTWSTTPDVETSKEYFELGYRFHDGAVYVERGVCSSSWKYPLYPERCTSSVPPSSYEDNYILEIEAVVD

SEQ ID NO: 9791 - protein, 490 aa, Schizosaccharomyces pombe
FTPSSGFMNDPNGLVYTGGVYHMFFQYSPKTLTAGEVHWGHTVSKDLIHWENYPIAIYPDEHENGVLSLPFSGSAVVDVHNSSGLFSNDTIPEERIVLYWTGVPERLAIAYTTNGGYTFKKYSGNPVLDINSLQFRDPKVIWDFDANRWVMMVALSQNYGIAFYPSYDLIHWTELSVFSTSGYLGLQYECPGMARVPVEGTDEYKWVLFISINPGAPLGGSVVQYFVGDWNGTNFVPDDGQTRFVDLGKDFYASALYHSSSANADVIGVGWASNWQYTNQAPTQVFRSAMTVARKFTLRDVPQNPMTNLTSLIQTPLNVSLLRDETLFTAPVINSSSSLSGSPITLPSNTAFEFNVTLSINYTEGCTTGYCLGRIIIDSDDPYRLQSISVDVDFAASTLVINRAKAQMGWFNSLFTPSFANDIYIYGNVTLYGIVDNGLLELYVNNGEKTYTNDFFFLQGATPGQISFAAFQGVSFNNVTVTPLKTIWNC

SEQ ID NO: 9792 - protein, 533 aa, Pichia jadinii
MSLTKDASEDQEDIKSLTMNTSLVDSSIYRPLVHLTPPVGWMNDPNGLFYDSSESTYHVYYQYNPNDTIWGLPLYWGHATSDDLLTWDHHAPAIGPENDDEGIYSGSIVIDYDNTSGFFDDSTRPEQRIVAIYTNNLPDVETQDIAYSTDGGYTFEKYENNPVIDVNSTQFRDPKVIWYEETEQWVMTVAKSQEYKIQIYTSDNLKDWSLASNFSTKGYVGYQYECPGLFEATIENPKSGDPEKKWVMVLAINPGSPLGGSINEYFVGDFNGTEFIPDDDATRFMDTGKDFYAFQAFFNAPENRSIGVAWSSNWQYSNQVPDPDGYRSSMSSIREYTLRYVSTNPESEQLILCQKPFFVNETDLKVVEEYKVSNSSLTVDHTFGSSFANSNTTGLLDFNMTFTVNGTTDVTQKDSVTFELRIKSNQSDEAIALGYDYNNEQFYINRATESYFQRTNQFFQERWSTYVQPLTITESGDKQYQLYGLVDNNILELYFNDGAFTSTNTFFLEKGKPSNVDIVASSSKEAYHRGPAD

SEQ ID NO: 9793 - protein, 556 aa, Kluyveromyces marxianus
MKLAYSLLLPLAGVSASVINYKRDGDSKAITNTTFSLNRPSVHFTPSHGWMNDPNGLWYDAKEEDWHLYYQYNPAATIWGTPLYWGHAVSKDLTSWTDYGASLGPGSDDAGAFSGSMVIDYNNTSGFFNSSVDPRQRAVAVWTLSKGPSQAQHISYSLDGGYTFQHYSDNAVLDINSSNFRDPKVFWHEGENGEDGRWIMAVAESQVFSVLFYSSPNLKNWTLESNFTHHGWTGTQYECPGLVKVPYDSVADSSSNSSDSKPDSAWVLFVSINPGGPLGGSVTQYFVGDFNGTHFTPIDDQTRFLDMGKDYYALQTFFNTPNEKDVYGIAWASNWQYAQQAPTDPWRSSMSLVRQFTLKDFSTNPNSADVVLNSQPVLNYDALRKNGTTYSITNYTVTSENGKKIKLDNPSGSLEFHLEYVFNGSPDIKSNVFADLSLYFKGNNDDNEYLRLGYETNGGAFFLDRGHTKIPFVKENLFFNHQLAVTNPVSNYTTNVFDVYGVIDKNIIELYFDNGNVVSTNTFFFSTNNVIGEIDIKSPYDKAYTINSFNVTQFNV

SEQ ID NO: 9794 - protein, 555 aa, Kluyveromyces marxianus
MKFAYSLLLPLAGVSASVINYKRDGDSKAITNTTFSLNRPSVHFTPSHGWMNDPNGLWYDAKEEDWHLYYQYNPAATIWGTPLYWGHAVSKDLTSWTDYGASLGPGSDDAGAFSGSMVIDYNNTSGFFNSSVDPRQRAVAVWTLSKGPSQAQHISYSLDGGYTFEHYTDNAVLDINSSNFRDPKVFWHEGENGEDGRWIMAVAESQVFSVLFYSSPNLKNWTLESNFTHHGWTGTQYECPGLVKVPYDSVVDSSNSSDSKPDSAWVLFVSINPGGPLGGSVTQYFVGDFNGTHFTPIDGQTRFLDMGKDYYALQTFFNTPNEKDVYGIAWASNWQYAQQAPTDPWRSSMSLVRQFTLKDFSTNPNSADVVLNSQPVLNYDALRKNGTTYSITNYTVTSENGKKIKLDNPSGSLEFHLEYVFNGSPDIKSNVFADLSLYFKGNNDDNEYLRLGYETNGGAFFLDRGHTKIPFVKENLFFTHQLAVTNPVSNYTTNVFDVYGVIDKNIIELYFDNGNVVSTNTFFFSTNNVIGEIDIKSPYDKAYTINSFNVTQFNV

SEQ ID NO: 9795 - protein, 555 aa, Kluyveromyces marxianus
MKLAYSLLLPLAGVSASVINYKRDGDSKAITNTTFSLNRPSVHFTPSHGWMNDPNGLWYDAKEEDWHLYYQYNPAATIWGTPLYWGHAVSKDLTSWTDYGASLGPGSDDAGAFSGSMVIDYNNTSGFFNSSVDPRQRAVAVWTLSKGPSQAQHISYSLDGGYTFQHYSDNAVLDINSSNFRDPKVFWHEGENGEDGRWIMAVAESQVFSVLFYSSPNLKNWTLESNFTITVWTGTQYECPGLVKVPYDSVADSSNSSDSKPDSAWVLFVSINPGGPLGGSVTQYFVGDFNGTHFTPIDDQTRFLDMGKDYYALQTFFNTPNEKDVYGIAWASNWQYAQQAPTDPWRSSMSLVRQFTLKDFSTNPNSADVVLNSQPVLNYDALRKNGTTYSITNYTVTSENGKKIKLDNPSGSLEFHLEYVFNGSPDIKSNVFADLSLYFKGNNDDNEYLRLGYETNGGAFFLDRGHTKIPFVKENLFFNHQLAVTNPVSNYTTNVFDVYGVIDKNIIELYFDNGNVVSTNTFFFSTNNVIGEIDIKSPYDKAYTINSFNVTQFNL

SEQ ID NO: 9796 - protein, 555 aa, Kluyveromyces marxianus
MKFAYSLLLPLAGVSASVINYKRDGDSKAITNTTFSLNRPSVHFTPSHGWMNDPNGLWYDAKEEDWHLYYQYNPAATIWGTPLYWGHAVSKDLTSWTDYGASLGPGSDDAGAFSGSMVIDYNNTSGFFNSSVDPRQRAVAVWTLSKGPSQAQHISYSLDGGYTFEHYTDNAVLDINSSNFRDPKVFWHEGENGEDGRWIMAVAESQVFSVLFYSSPNLKNWTLESNFTHHGWTGTQYECPGLVKVPYDSVVDSSNSSDSKPDSAWVLFVSINPGGPLGGSVTQYFVGDFNGTHFTPIDGQTRFLDMGKDYYALQTFFNTPNEKDVYGIAWASNWQYAQQAPTDPWRSSMSLVRQFTLKDFSTNPNSADVVLNSQPVLNYDALRKNGTTYSITIYTVTSENGKKIKLDNPSGSLEFHLEYVFNGSPDIKSNVFADLSLYFKGNNDDNEYLRLGYETNGGAFFLDRGHTKIPFVKENLFFTHQLAVTNPVSNYTTNVFDVYGVIDKNIIELYFDNGNVVSTNTFFFSTNNVIGEIDIKSPYDKAYTINSFNVTQFNV

SEQ ID NO: 9797 - protein, 550 aa, Pichia anomala
MIQLSPLLLLPLFSVFNSIADASTEYLRPQIHLTPDQGWMNDPNGMFYDRKDKLWHVYFQHNPDKKSIWATPVTWGHSTSKDLLTWDYHGNALEPENDDEGIFSGSVVVDRNNTSGFFNDSTDPEQRIVAIYTNNAQLQTQEIAYSLDKGYSFIKYDQNPVINVNSSQQRDPKVLWHDESNQWIMVVAKTQEFKVQIYGSPDLKKWDLKSNFTSNGYLGFQYECPGLFKLPIENPLNDTVTSKWVLLLAINPGSPLGGSINEYFIGDFDGTTFHPDDGATRFMDIGKDFYAFQSFDNTEPEDGALGLAWASNWQYANTVPTENWRSSMSLVRNYTLKYVDVNPENYGLTLIQKPVYDTKETRLNETLKTLETINEYEVNDLKLDKSSFVATDFNTERNATGVFEFDLKFTQTDLKMGYSNMTTQFGLYIHSQTVKGSQETLQLVFDTLSTTWYIDRTTQHSFQRNSPVFTERISTYVEKIDTTDQGNVYTLYGVVDRNILELYFNDGSIAMTNTFFFREGKIPTSFEVVCDSEKSFITIDELSVRELARK

SEQ ID NO: 9798 - protein, 532 aa, Saccharomyces cerevisiae
MLLQAFIFLLAGFAAKISALMTNETSDRPLVHFTPNKGWMNDPNGLWYDAKEGKWHLYFQYNPNDTVWGLPLFWGHATSNDLTHWQDEPVAIAPKRNDSGAYSGSMVIDHNNTSEFFNDTVDPRQRCVAIWTYNTPESEEQYISYSLDGGYTFTEYQKNPVLAANSTQFRDPKVFWYEPSQKWIMTAAKSQDYKIEIYSSDDLKSWKLESAFANEGFLGYQYECPGLIEVPTEQDPSKSHWVMFISINPGAPAGGSFNQYFVGSFNGTHFEAYDNQSRVVDFGKDYYALQTFFNTDPTYGSALGIAWASNWEYSAFVPTNPWRSSMSLVRKFSLNTEYQANPETELINLKAEPILNISNAGPWLHFASNSTLTKANSFSVDLSNSTGTLEFELVYAVNTTQSVSKSVFSDLSLWFKGLEDPEEYLRMGFEASASSFFLDRGNSKVKFVKENPYFTNRMSVNNQPFKSENDLSYYKVYGLLDQNILELYFNDGDVVSTNTYFMTTGNALGSVNMTTGVDNLFYIDKFQVREVK

SEQ ID NO: 9799 - protein, 532 aa, Saccharomyces cerevisiae
MLLQAFLFLLAGFAAKISASMTNETSDRPLVHFTPNKGWMNDPNGLWYDEKDAKWHLYFQYNPNDTVWGTPLFWGHATSDDLTNWEDQPIAIAPKRNDSGAFSGSMVVDYNNTSGFFNDTIDPRQRCVAIWTYNTPESEEQYISYSLDGGYTFTEYQKNPVLAANSTQFRDPKVFWYEPSQKWIMTAAKSQDYKIEIYSSDDLKSWKLESAFANEGFLGYQYECPGLIEVPTEQDPSKSYWVMFISINPGAPAGGSFNQYFVGSFNGTHFEAFDNQSRVVDFGKDYYALQTFFNTDPTYGSALGIAWASNWEYSAFVPTNPWRSSMSLVRKFSLNTEYQANPETELINLKAEPILNISNAGPWSRFATNTTLTKANSYNVDLSNSTGTLEFELVYAVNTTQTISKSVFADLSLWFKGLEDPEEYLRMGFEVSASSFFLDRGNSKVKFVKENPYFTNRMSVNNQPFKSENDLSYYKVYGLLDQNILELYFNDGDVVSTNTYFMTTGNALGSVNMTTGVDNLFYIDKFQVREVK

SEQ ID NO: 9800 - protein, 532 aa, Saccharomyces cerevisiae
MLLQAFLFLLAGFAAKISASMTNETSDRPLVHFTPNKGWMNDPNGLWYDAKEGKWHLYFQYNPNDTVWGLPLFWGHATSDDLTHWQDEPVAIAPKRKDSGAYSGSMVIDYNNTSGFFNDTIDPRQRCVAIWTYNTPESEEQYISYSLDGGYTFTEYQKNPVLAANSTQFRDPKVFWYEPSKKWIMTAAKSQDYKIEIYSSDDLKSWKLESAFANEGFLGYQYECPGLIEVPSEQDPSKSHWVMFISINPGAPAGGSFNQYFVGSFNGHHFEAFDNQSRVVDFGKDYYALQTFFNTDPTYGSALGIAWASNWEYSAFVPSNPWRSSMSLVRPFSLNTEYQANPETELINLKAEPILNISSAGPWSRFATNTTLTKANSYNVDLSNSTGTLEFELVYAVNTTQTISKSVFADLSLWFKGLEDPEEYLRMGFEVSASSFFLDRGNSKVKFVKENPYFTNRMSVNNQPFKSENDLSYYKVYGLLDQNILELYFNDGDVVSTNTYFMTTGNALGSVNMTTGVDNLFYIDKFQVREVK

SEQ ID NO: 9801 - protein, 632 aa, Taraxacum officinale
MASSTTAATPLILHNDSTPRRRLSLAKLLSGIPVAVLVIFALVTVILNQSQHTSATGNIDFHGGDKPSSDTTFTEMVPEELKQVLIKLESNAGVEWERSAYHFQPDKNFISDPDGPMYHMGWYHLFYQYNPESAIWGNITWGHSISRDMINWFHLPFAMVPDHWYDIEGVMTGSATMLPDGQIIMLYTGNAYDLAQLQCLAYAVNSSDPLLLEWKKYEGNPILFPPPGVGYKDFRDPSTLWRGPDGDWIMIMGSKHNQTIGCALVYRTSNFTHFELSEEPLHAVPHTGMWECVDLYPVSTTHTNGLDMMDNGPNVKYILKQSGDEDRHDWYAIGSFDPINDKWYPDDPENDVGIGLRYDYGKFYASKTFYDQHKSRRVLWGYVGETDPPKDDLLKGWANMLNIPRTIVLDTVTGTNLIQWPIDEVENLRSKKYDEFKDVELRPGSIIPLEIGSATQLDIMATFEIDEKMLESTLEADVLFNCTTSEGSVGRGVLGPFGIVVLADAKRSEQLPVYFYIAKNTDGSSKTYFCADESRSSMDKSVGKWVYGDSVPVLEGEKHNMRLLVDHSIVEGFAQGGRTVVTSRVYPTKAIYGAAKLFLFNNATGISVKASLKIWKMAEAQLDPFPLSGWSS

SEQ ID NO: 9802 - protein, 342 aa, Saccharum hybrid cultivar H65-7052
TRGKASGNGVDMSDALGKNGAVVGDVVHVMKASMDDDRHDYYALGRYDAAANAWTPLDAEKDVGTGLRYDWGKFYASKTFYDPAKRRRVLWGWVGETDSERADVSKGWASLQGIPRTVLLDTKTGSNLLQWPVEEVETLRTNSTDLSGITIDYGSAFPLNLRRATQLDIEAEFQLDRRAVMSLNEADVGYNCSTSGGAAARGALGPFGLLVLADKHLHEQTAVYFYVAKGLDGSLTTHFCQDESRSSSANDIVKRVVGSAVPVLEDETTLSLRVLVDHSIVESFAQGGRSTATSRVYPTKAIYANAGVFLFNNATAVRVTAKKLVVHEMDSSYNHDYMVTDI

SEQ ID NO: 9803 - protein, 164 aa, Saccharum hybrid cultivar H65-7052
  unsure (1)..(164): unsure at all Xaa locations
YNPDGAIWGNKIAWGHAVSRDLIHWRHLPLAMVPDQWYDTNGVWTGSATTLPDGRLAMXYTGSTNASVQVQCLAVPADDADPLLTNWTKYEGNPVLYPPPGIGPKDFRDPTTAWFDPSDNTWRIVIGSKDDXEGDHAGIAVVYRTRDFVHFELLPDLLHRVAGT

SEQ ID NO: 9804 - protein, 516 aa, Aspergillus ficuum
MLNPKVAYMVWMTCLGLTLPSQAQSNDYRPSYHFTPDQYWMNEPNGLIKIGSTWHLFFQHNPTANVWGNICWGHATSTDLMHWAHKPTAIADENGVEAFTGTAYYDPNNTSGLGDSANPPYLAWFTGYTTSSQTQDQRLAFSVDNGATWTKFQGNPIISTSQEAPHDITGGLESRDPKVFFHRQSGNWIMVLAHGGQDKLSFWTSADTINWTWQSDLKSTSINGLSSDITGWEVPDMFELPVEGTEETTWVVMMTPAEGSPAGGNGVLAITGSFDGKSFTADPVDASTMWLDNGRDFDGALSWVNVPASDGRRIIAAVMNSYGSNPPTTTWKGMLSFPRTLSLKKVGTQQHFVQQPITELDTISTSLQILANQTITPGQTLLSSIRGTALDVRVAFYPDAGSVLSLAVRKGASEQTVIKYTQSDATLSVDRTESGDISYDPAAGGVHTAKLEEDGTGLVSIRVLVDTCSVEVFGGQGEAVISDLIFPSDSSDGLALEVTGGNAVLQSVDVRSVSLE

SEQ ID NO: 9805 - protein, 516 aa, Aspergillus niger
MLNPKVAYMVWMTCLGLTLPSQAQSNDYRPSYHFTPDQYWMNEPNGLIKIGSTWHLFFQHNPTANVWGNICWGHATSTDLMHWAYKPTAIADENGVEAFTGTAYYDPNNTSGLGDSANPPYLAWFTGYTTSSQTQDQRLAFSVDNGATWTKFQGNPIISTSQEAPHDITGGLESRDPKVFFHRQSGNWIMVLAHGGQDKLSFWTSADTIHWTWQSDLKSTSINGLSSDITGWEVPDMFELPVEGTGETTWVVMMTPAEGSPAGGNGVLAITGSFDGKTFTADPVDASTMWLDNGRDFDGALSWVNVPASDGRRIIAAVMNSYGSNPPTTTWKGMLSFPRTLSLKKVGTQQHFVQQPITELDTISTSMQTLANQTITPGQTLLSSIRGTALDVRVAFYPDAGSVLSLTVRKGASEQTVINYTQSNATLSVDRTESGDISYDPAAGGVHTAKLEEDGTGLVSIRVLVDTCSVEVFGGQGEAVISDLIFPSDSSDGLALEVTGGNAVLQSVDVRSVSLE

SEQ ID NO: 9806 - protein, 516 aa, Aspergillus niger
MLNPKVAYMVWMTCLGLTLPSQAQSNDYRPSYHFTPDQYWMNEPNGLIKIGSTWHLFFQHNPTANVWGNICWGHATSTDLMHWAHKPTAIADENGVEAFTGTAYYDPNNASGLGDSANPPYLAWFTGYTVSSQTQDQRLAFSVDNGATWTKFQGNPIISTSQEAPHDITGGLESRDPKVFFHRQSGNWIMVLAHGGQDKLSFWTSADTINWTWQSDLKSTSINGLSSDITGWEVPDMFELPVEGTEETTWVVMMTPAEGSPAGGNGVLAITGSFDGKSFTADPVDASTMWLNNGRDFDGALSWVNVPASDGRRIIAAVMNSYGSNPPTTTWKGMLSFPRTLSLKKVGTQQHFVQQPITELDTISTSLQTLENQTITPGQTLLSSIRGTALDVRVAFYPDAGSVLSLAVRKGASEQTVIKYTQSDATLSVDRTESGDTSYDPAAGGVHTAKLEEDDTGLVSIRVLVDTCSVEVFGGQGEAVISDLIFPSDSSDGLALEVTGGNAVLQSVDVRSVSLE

SEQ ID NO: 9807 - protein, 516 aa, Aspergillus niger
MLNPKVAYMVWMTCLGLTLPSQAQSNDYRPSYHFTPDQYWMNEPNGLIKIGSTWHLFFQHNPTANVWGNICWGHATSTDLMHWAHKPTAIADENGVEAFTGTAYYDPNNASGLGDSANPPYLAWFTGYTVSSQTQDQRLAFSVDNGATWTKFQGNPIISTSQEAPHDITGGLESRDPKVFFHRQSGNWIMVLAHGGQDKLSFWTSADTINWTWQSDLKSTSINGLSSDITGWEVPDMFELPVEGTEETTWVVMMTPAEGSPAGGNGVLAITGSFDGKSFTADPVDASTMWLNNGRDFDGALSWVNVPASDGRRIIAAVMNSYGSNPPTTTWKGMLSFPRTLSLKKVGTQQHFVQQPITELDTISTSLQTLENQTITPGQTLLSSIRGTALDVRVAFYPDAGSVLSLAVRKGASEQTVIKYTQSDATLSVDRTESGDTSYDPAAGGVHTAKLEEDDTGLVSIRVLVDTCSVEVFGGQGEAVISDLIIPSDSSDGLALEVTGGNAVLQSVDVRSVSLE

SEQ ID NO: 9808 - protein, 516 aa, Aspergillus niger
MLNPKVAYMVWMTCLGLMLPSQAQSNDYRPSYHFTPDQYWMNEPNGLIKIGSTWHLFFQHNPTANVWGNICWGHATSTDLMHWAHKPTAIADENGVEAFTGTAYYDPNNTSGLGDSANPPYLAWFTGYTTSSQTQDQRLAFSVDNGATWTKFQGNPIISTSQEAPHDITGGLESRDPKVFFHRQSGNWIMVLAHGGQDKLSFWTSADTINWTWQSDLKSTSINGLSSDITGWEVPDMFELPVEGTEETTWVVMMTPAEGSPAGGNGVLAITGSFDGKSFTADPVDASTMWLDNGRDFDGALSWVNVPASDGRRIIAAVMNSYGSNPPTTTWKGMLSFPRTLSLKKVGTQQHFVQQPITELDTISTSLQTLANQTITPGQTLLSSIRGTALDVRVAFYPDAGSVLSLAVRKGASEQTVINYTQSDATLSVDRTESGDISYDPAAGGVHTAKLEEDGTGLVSIRVLVDTCSVEVFGGQGEAVISDLIFPSDSSDGLALEVTGGNAVLQSVDVRSVSLE

SEQ ID NO: 9809 - protein, 516 aa, Aspergillus niger
MLNPKVAYMVWMTCLGLMLPSQAQSNDYRPSYHFTPDQYWMNEPNGLIKIGSTWHLFFQHNPTANVWGNICWGHATSTDLMHWAHKPTAIADENGVEAFTGTAYYDPNNTSGLGDSANPPYLAWFTGYTTSSQTQDQRLAFSVDNGATWTKFQGNPIISTSQEAPHDITGGLESRDPKVFFHRQSGNWIMVLAHGGQDKLSFWTSADTINWTWQSDLKSTSINGLSSDITGWEVPDMFELPVEGTEETTWVVMMTPAEGSPAGGNGVLAITGSFDGKSFTADPVDASTMWLDNGRDFDGALSWVNVPASDGRRIIAAVMNSYGSNPPTTTWKGMLSFPRTLSLKKVGTQQHFVQQPITELDTISTSLQTLANQTITPGQTLLSSIRGTALDVRVAFYPDAGSVLSLAVRKGASEQTVINYTQSNATLSVDRTESGDISYDPAAGGVHTAKLEEDGTGLVSIRVLVDTCSVEVFGGQGEAVISDLIFPSDSSDGLALEVTGGNAVLQSVDVRSVSLE

SEQ ID NO: 9810 - protein, 494 aa, Aspergillus niger
MQSNDYRPSYHFTPDQYWMNEPNGLIKIGSTWHLFFQHNPTANVWGNICWGHATSTDLMHWAHKPTAIADENGVEAFTGTAYYDPNNASGLGDSANPPYLAWFTGYTVSSQTQDQRLAFSVDNGATWTKFQGNPIISTSQEAPHDITGGLESRDPKVFFHRQSGNWIMVLAHGGQDKLSFWTSADTINWTWQSDLKSTSINGLSSDITGWEVPDMFELPVEGTEETTWVVMMTPAEGSPAGGNGVLAITGSFDGKSFTADPVDASTMWLNNGRDFDGALSWVNVPASDGRRIIAAVMNSYGSNPPTTTWKGMLSFPRTLSLKKVGTQQHFVQQPITELDTISTSLQTLENQTITPGQTLLSSIRGTVLDVRVAFYPDAGSVLSLAVRKGRSEQTVIKDTQSDATLSVDRTESGDTSYDPAAGGVHTAKLEEDDTGLVSIRVLVDTCSVDLFGGQGEAVISDLIFPSDSSDGLALEVTGGNAVLQSVDVRSLSLE

SEQ ID NO: 9811 - protein, 494 aa, Aspergillus niger
MQSNDYRPSYHFTPDQYWMNEPNGLIKIGSTWHLFFQHNPTANVWGNICWGHATSTDLMHWAHKPTAIADENGVEAFTGTAYYDPNNASGLGDSANPPYLAWFTGYTVSSQTQDQRLAFSVDNGATWTKFQGNPIISTSQEAPHDITGGLESRDPKVFFHRQSGNWIMVLAHGGQDKLSFWTSADTINWTWQSDLKSTSINGLSSDITGWEVPDMFELPVEGTEETTWVVMMTPAEGSPAGGNGVLAITGSFDGKSFTADPVDASTMWLSWVNVPASDGRRIIAAVMNSYGSNPPTTTWKGMLSFPRTLSLKKVGTQQHFVQQPITELDTISTSLQTLENQTITPGQTLLSSIRGTVLDVRVAFYPDAGSVLSLAVRKGRSEQTVIKDTQSDATLSVDTQSDATLSVDRTESGDTSYDPAAGGVHTAKLEEDDTGLVSIRVLVDTCSVDLFGGQGEAVISDLIFPSDSSDGLALEVTGGNAVLQSVDVRSLSLE

SEQ ID NO: 9812 - protein, 515 aa, Penicillium sp.
MISQGLTGALKALPLVCALVARAVADDYRPAFHFCPAENWMNEPNGLIQINSTWHLFYQADPAANVWGNECWGHATSSDLLHWDHLPVAIPVENGIESFTGTSYYDSNNTSGLGTSTNPPYLAFFTGYTESNKTQDQRLAYSTDLGQTWVKFAGNPIIGAAQEAPQDISGGLESRDPKVFFHAPSGKWVMVLAHGGQDKLTFWTSLDAKNWTWVSDLSSSQIEGFPSSITGWEVPDMFQLPIQGIKKTTWVLIFTPAQGSPPGGNGVVALTGSFDGETFVADPVDPSTLWLDYGRDFDGALSWENVPASDGRRIIAAVMNSYGSNPPTTTWKGMLSFPRTLALKQIGSKQYFLQQPVAELSTIDGSLTSIQNQTITPNQTLLSSIHGTSLDIRMAFVIDSGATLSLAVRKGGSEQTVIRYFQSNSTLSVDRTASGDISYDPAAGGVHTAQLAQDNTELVHIWALIDTCSVEVFGGEGEAVISDLIFPSNSSDGLSLEVSGGTAMLRSVNVSSVSL

SEQ ID NO: 9813 - protein, 695 aa, Neurospora crassa
MTKTTPYKNALVGLLSLASVLPDGTTASVLPRTQECQRQQYPGPKNPSFETGDLSGWTVVNGTAFGKSSVTTAASSQLGSGPFNQVGKQFLSTNLQDGEAATGTLRSSTFKASSVMSFLIGGNYDPANLYVGLVLEKDGSLLFSQTATNDEALIRIVWDTSAYAGQNVYLVVVDTSTTGHISLDDVRTGCDALKDGPHTFNILGQSNQPTSKNLTALSAASRYAVDPTRPQYHYTPYQGWINDPAGLIQWGGKYHLFNQYNPVAPLWGPMYWSHAESTDAVHWRDLPVALTPPYVNNTQDTSGRYTGSAVKNQDTGALQLIYTDATNVTYHPHAVPEVVSSAVSSDGIHFDLYSGNPIVAEAPPTSSAGFRDPKVFWDPTANNWKMVVGSGDGHTGNVQLYKSTGPSSSELLSWEYVGVLHQGDGSRGIMWECPNFFPIDDKWVLFYGQDKGFKGWYEVGSFNGTTFVSEKLGLFDSGPDSYATQWFVDDAGRNLAVTWINNWNTTKWPSRVNGWAGTQSIMRELFIREDGGLGQKPVEEVSLLASGPAKSLGQTDVFGTYEVGFTDTARLQATVDLAASDAPAFTIELFASGAESTSLVYNFANRSLTIDTMNAGYGQAGTWEATIAKPADNRLSLDILIDRSSIEVFVGDGTAMTVRVFPRYQESKNIRITSDGGKKTVFDDIVLTPMGSAWE

SEQ ID NO: 9814 - protein, 512 aa, Zymomonas mobilis
MESPSYKNLIKAEDAQKKAGKRLVSSEWYPGFHVTPLTGWMNDPNGLIFFKGEYHLFYQYYPFAPVWGPMHWGHAKSRDLVHWETLPVALAPGDSFDRDGCFSGCAVDNNGILTLIYTGHIVLSNDSPDAIREVQCMATSIDGIHFQKEGIILEKPPMPQVAHFRDPRVWKENDRWFMVVGYRTDDEKHQGIGHVALYRSENLKDWIFVKTLLGDNSQLPLGKRAFMWECPDFFSLGNRSVLMFSPQGLKASGYKNRNLFQNGYILGKWQAPQFTPETSFQELDYGHDFYAAQRFEDKDGRQILIAWFDMWENQKPSQRDGWAGCMTLPRKLDLIDNKIVMTPVREMEILRQSEKIESVVTLSDAEHPFTIDSPLQEIELIFDLEKSSAYQAGLALRCNDKGQETLLYIDRSQNRIILDRNRSGQNVKGIRSCPLPNTSKVRLHIFLDRSSIEIFVGDDQTQGLYSISSRIFPDKDSLKGRLFAIEGYAVFDSFKRWTLQDANLAAFLSDAC

SEQ ID NO: 9815 - protein, 512 aa, Zymomonas mobilis
MESPSYKNLIKAEDAQKKAGKRLLSSEWYPGFHVTPLTGWMNDPNGLIFFKGEYHLFYQYYPFAPVWGPMHWGHAKSRDLVHWETLPVALAPGDLFDRDGCFSGCAVDNNGVLTLIYTGHIVLSNDSPDAIREVQCMATSIDGIHFQKEGIVLEKAPMPQVAHFRDPRVWKENDHWFMVVGYRTDDEKHQGIGHVALYRSENLKDWIFVKTLLGDNSQLPLGKRAFMWECPDFFSLGNRSVLMFSPQGLKASGYKNRNLFQNGYILGKWQAPQFTPETSFQELDYGHDFYAAQRFEAKDGRQILIAWFDMWENQKPSQRDGWAGCMTLPRKLDLIDNKIVMTPVREMEILRQSEKIESVVTLSDAEHPFTMDSPLQEIELIFDLEKSSAYQAGLALRCNGKGQETLLYIDRSQNRIILDRNRSGQNVKGIRSCPLPNTSKVRLHIFLDRSSIEIFVGDDQTQGLYSISSRIFPDKDSLKGRLFAIEGYAVFDSFKRWTLQDANLAAFSSDAC

SEQ ID NO: 9816 - protein, 511 aa, Zymomonas mobilis
MESPSYKNLIKAEDAQKKAGKRLLSSEWYPGFHVTPLTSWMNDPNGLIFFKGEYHLFYQYYPFAPVWGPMHWGHAKSRDLVHWETLPVALAPGDSFDRDGCFSGCAVDNNGVLTLIYTGHIVLSNDSPDAIREVQCMATSIDGIHFQKEGIVLEKAPMPQVAHFRDPRVWKENDHWFMVVGYRTDDKKHQGIGHVALYRSENLKDWIFVKTLLGDNSQLPLGKRAFMWECPDFFSLGNRSVLMFSPQGLKASGYKNRNLFQNGYILGKWQAPQFTPETSFQELDYGHDFYAAQRLKLKDGRQNINCMVDMWKSKPSQRDGWAGCMTLPRKLDLIDNKIVMTPVREMEILRQSEKIESVVTLSDAEHPFTMDSPLQEIELIFDLEKSNAYQAGLALRCNGKGQETLLYIDRSQNRIILDRNRSGQNVKGIRSCPLPNTSKVRLHIFLDRSSIEIFVGDDQTQGLYSISSRIFPDKDSLKGRLFAIEGYAVFDSFKRWTLQDANLAAFSSDAC

SEQ ID NO: 9817 - protein, 687 aa, Citrus unshiu
MADSNVSYNPLPDGERPRPTRRRSIVLVLSGLLVVGFLVALLSDNGSITPANVIDNDNNNVNDNAKNGLNDVSSSSKEPERLRPFTSASSAGVSEKSNRRFGSRTASYPWTNNMLSWQRTAFHFQPQKNWMNDPNGPVFYKGWYHLFYQYNPNGAIWGDIVWGHAVSKDLIHWYHLPLAMVADQWYDIMGVWTGSATILPDGKLMMLYTGSTNESVQVQNLAYPADPSDPLLIKWVKYPGNPVLVPPPGIGSKDFRDPTTAWLTSEGKWRIAIGSRINRTGITFVYDTKDFINYELLRGVLHGVPNTGMWECVDFYPVSTTGEHGLDTSHNGLGVKHVVKASMDDDRHDYYAIGTYHEKNVTWVPDNPEIDVGIGIRYDYGLFYASKTFYDQNKKRRVLWGWIGESDSEIADVKKGWASLQGIPRTVALDTKTGSNLLQWPVEEVDSLRLTSKEFKKIELKPGSVMPLDVGSATQLDIVAEFELDKAALEKTAESNVEFSCSSSEGSAERGALGPFGLLVLADDSLSEQTPVYFYIAKGKDGSLKTYFCTDQSRSSEANDVNKSKYGSFVPVLEGEKFSMRVLVDHSIVEGFAQGGRTTITSRVYPTKAIYGAARVFLFNNATGASVTSSLKAWQMNSAFIRPYPDDDDERHSGTEPTHEVRGSKTKYLGNLLTSSLLFLNARNNFL

SEQ ID NO: 9818 - protein, 469 aa, Erwinia amylovora
MSEAHLLKQALRAVLSGQQRAARDHHRPMWHLAPPVGLLNDPNGFIHFEQRYVLCYQWNPLDCKHGAKFWGQWSSCDLVHWRHEPLALAPSENYESHGCYSGCAVNNQGVLTLIYTGNVKFDDGSRTAWQCLATRDQQGEFHKLGPVLALPEGYTGHVRDPKVWQHDGQWYMVLGAQDLQLQGKVLLLRSADLHHWTLLGEIAGSQLNGLGDFGYMWECPDLFELDGSHVLVVCPQGLASEARRYRNTFQSGYFCGQLDHDSASFCHGQFQELDHGFEFYAPQTCLSDDGRRLLIGWMGIPDDDEFYQPTKAHGWMHTLTCPRELTLCAGRIHQQPARELQQLRQQETRLVGCAEDLPALDIGSAELELSVDGVCHARFGDRLTLCIDRPGITLRRNNLRSGDVEERYWMGEVRTLRILCDSSSIEIFINDGEGVMSSRYFPAAEPRLRFSGSAQIALRYWRLQQCVIE

SEQ ID NO: 9819 - protein, 477 aa, Escherichia coli
MTQSRLHAAQNALAKLHERRGNTFYPHFHLAPPAGWMNDPNGLIWFNDRYHAFYQHHPMSEHWGPMHWGHATSDDMIHWQHEPIALAPGDENDKDGCFSGSAVDDNGVLSLIYTGHVWLDGAGNDDAIREVQCLATSRDGIHFEKQGVILTPPEGIMHFRDPKVWREADTWWMVVGAKDPGNTGQILLYRGSSLREWTFDRVLAHADAGESYMWECPDFFSLGDQHYLMFSPQGMNAEGYSYRNRFQSGVIPGMWSPGRLFAQSGHFTELDNGHDFYAPQSFVAKDGRRIVIGWMDMWESPMPSKREGWAGCMTLARELSESNGKLLQRPVHEAESLRQQHQSISPRTISNKYVLQENAQAVEIQLQWALKNSDAEHYGLQLGAGMRLYIDNQSERLVLWRYYPHENLDGYRSIPLPQGDMLALRIFIDTSSVEVFINDGEAVMSSRIYPQPEERELSLYASHGVAVLQHGALWQLG

SEQ ID NO: 9820 - protein, 476 aa, Escherichia coli
MKQRLSLAQSALEKLSARRGNTWYPIFHLAPPAGWMNDPNGLIYFNGRYHAFFQHHPASAYQGPMHWGHATSTDMLHWQHELVALAPGDKYDRDGCFSGSAVDDDGVLSLIYTGHICLEDRGNDSIIREVQCLATSHDGIRFEKQGCVLTPPEGIMHFRDPKVWHEDGSWWMVIGARDASDNGQVLLYRGTSLRDWHLEHVLAHSAAGESYMWECPDFFRCGNFHWLMFSPQGMNPSGYRFRNLFQSGVLAGNWKPGSVFALKGVFEELDYGHDFYAPQSMLAEDGRRIIMAWMNMWDSPVPTRSEAWAGCLTLPREVFERDGRLCQRPVREVESLRRKCQPLSPVRLHGVQLLTENVQAAELLVTWHTVDSHAEHYGIRLGEGLRFYVDNQAGRLILWRYYPEEGLDGYRSVELPDTEYLTLRIFLDRSSVEVFVNDGEATLSSRIYPQADSRQLSLYAAHGDAILTDGTLWMLT

SEQ ID NO: 9821 - protein, 477 aa, Escherichia coli
MTQSRLHAAQNALAKLHEHRGNTFYPHFHLAPPAGWMNDPNGLIWFNDRYHAFYQHHPMSEHWGPMHWGHATSDDMIHWQHEPIALAPGDDNDKDGCFSGSAVDDNGVLSLIYTGHVWLDGAGNDDAIREVQCLATSRDGIHFEKQGVILTPPEGIMHFRDPKVWREADTWWMVVGAKDPGNTGQILLYRGSSLREWTFDRVLAHADAGESYMWECPDFFSLGDQHYLMFSPQGMNAEGYSYRNRFQSGVIPGMWSPGRLFAQSGHFTELDNGHDFYAPQSFLAKDGRRIVIGWMDMWESPMPSKREGWAGCMTLARELSESNGKLLQRPVHEAESLRQQHQSVSPRTISNKYVLQENAQAVEIQLQWALKNSDAEHYGLQLGTGMRLYIDNQSERLVLWRYYPHENLDGYRSIPLPQRDTLALRIFIDTSSVEVFINDGEAVMSSRIYPQPEERELSLYASHGVAVLQHGALWLLG

SEQ ID NO: 9822 - protein, 640 aa, Leishmania major
MIPGSVRCGVILFLVAVAMMAAAAMKDGVPYEPIYHIRPPKNWINDPNGPYRDPVTGKIHLYMQYNPNGPLWGDIAWYHVTSQDYVKWTRPESPVAVWADRWYDKWGAYSGTMMNNNYSEPVMMYTCTEPENIQRQCIANPPKSDLQGKRTLNTLVKSALNVIMSEDMIPGVVAMENFRDPTEWWQDPTNPNRWLIAFVARIKDREGDNAHVIVFSTEDPSFQSGYSFSHSLYVYKYDLDHMFECPDFFTLKQGGEHYLKVSTMPSHRDYIIYGSYQLNTTSSQYVFVEDPARSFTFIDYGPFYASKTFYDPILNRRAIWGWTNDELTNEQIIANGWSGVQNMLRTMVYDHTEKKIKTQPVPETKGLRLDKLVDLRGVAVTATPTQVIASNTNNTLYHEIVARFTLADPTTFAAAATYPSDSDVPEVGVMIRANANLSQYTTVSVRMPGGGPSALQSTEQIETYPPIKIFAGSSAANCSAECDKMRLCESYTFWGKNNTCKLYWKTNPMKSKDDATSGTVREPLLYLGRTQSGTIGSTAPLHGRAPFATATPNGFELHIFVDDSVLEIFKDEGLETLTGRLYIDNGADTTGIAVYARNAGTVTVDVEVYTMDTIWKAPTPNAAKNFTDALYNLLDTLIAV

SEQ ID NO: 9823 - protein, 513 aa, Leishmania major
MSSQAQQRAPAYAPRDTHAERLAAADREAAARRDSSTNWTWYPEYHLAPYMGWMNDPTGLVHFRDHYHVFYQYHPYSAEWGPMHWGHMTSEDLVHWQHEKVALAPGDACDRNGCFSGTAVVHEDRMYVFYTGHFALDAATPSNPDAIFEQQCVAVSSDGVNFEKLGAVVRPPPGYVHFRDPKVWQQDGRWWMVCGARDVTKDLGQLLLFTTEDLLKWDDTNWQVLGMTEDKNVFMWECPDYFTIGSREDMKLLLFCPQGKKASEYNYRNRFQNGYTVGQWMPGGPWTVQREFRELDRGHDFYAAQTFLAADGQRRMLMAWCNMWESPMPTKQYGWSGCLTLPRELSYNEATGQLCMLPARELVGLRTPEMMIVPSLLVENNSDAQILENCTAYELDIAFNMETSTAEKYGLWLGSGAELYVDAQSKRLVLNRHYPQHMLSGYRSCELPIGLLLQLHVFIDRSSIEVFVNNGEATFSSRVFPDEGDRALRVFSVNGTADMVGGTMWKLKATVRH

SEQ ID NO: 9824 - protein, 581 aa, Leishmania major
MRASERVPADDAATRVCPHSLIDSPSPSLMQAASAVATATATSSGIANLKQEASHEERLKVADHTAVKAWSLLNKMWYPDYHMASLAGWMGVPGGLCYHNGFYHVFYQYNPFSENWGPMHWGHMTSEDLVHWQHQPIALAPGELFDHDGCFSGSSVSYNNKLYIFYTGHTWRTESEKGSGNGTMGDGASFYQQQCVAVSSDGVNFEKLGAVVRPPPGYVHFRDPKVWQQDGRWWMVCGARDVTKDLGQLLLFTTEDLLKWDDTNWQVLGMTEDKNVFMWECPDMFRLGQMNVFLYSPQGMRKADYAYRNRFQSGYLLGSWNMSLVTAALSEREAGSPKGTASGSHAIGGPRWLASFDVTQRFREIDRGHDFYAPQTLLTKDGRRLIIGWMDMWESPMPTRGHGWSGCLTLPRELILDPFTGSVRMVPPKELLQLRCAQATILAQRIQESTDVLLVESCTAYELDIAFNMETSTAEKYGLWLGSGAELYVDAQSKRLVLNRHYPQHMLSGYRSCELPIGLLLQLHVFIDRSSIEVFVNNGEATFSSRVFPDEGDRALRVFSVNGTADMVGGTMWKLKATVRH

SEQ ID NO: 9825 - protein, 486 aa, Leishmania major
MTHANPPANRPPRRPLPFSPTPAQTHPSERIHLTRRHDRSLIAFVARIKDREGDNAHVIVFSTEDPSFQSGYSFSHSLYVYKYDLDHMFECPDFFTLKQGGEHYLKVSTMPSHRDYIIYGSYQLNTTSSQYVFVEDPARSFTFIDYGPFYASKTFYDPILNRRAIWGWTNDELTNEQIIANGWSGVQNMLRTMVYDHTEKKIKTQPVPETKGLRLDKLVDLRGVAVTATPTQVIASNTNNTLYHEIVARFTLADPTTFAAAATYPSDSDVPEVGVMIRANANLSQYTTVSVRMPGGGPSALQSTEQIETYPPIKIFAGSSAANCSAECDKMRLCESYTFWGKNNTCKLYWKTNPMKSKDDATSGTVREPLLYLGRTQSGTIGSTAPLHGRAPFATATPNGFELHIFVDDSVLEIFKDEGLETLTGRLYIDNGADTTGIAVYARNAGTVTVDVEVYTMDTIWKAPTPNAAKNFTDALYNLLDTLIAV

SEQ ID NO: 9826 - protein, 550 aa, Tritrichomonas foetus
MSGIQITRTHNDGFNPVVLKFDVAKKYLLIPIEEEAPERPFTVINSKYRRTFLIRLAVKKVEYNVPLELEEAGTVVEIYKAPAETAIGWSKLELADSYDTTNTDYYRPNYHFTPPFGWMNDPNGLFYLDGVYHLYYQHNPFASTWGNMSWGHATTKDFVHYEHHPIVLFPDELGHIFSGSIVIDKDNTAGFGANAVIAFYTNAGGDDYQIQTNSIAYSTDGGYTFTKYENNPVVTFDCRDFRDPTVIRYNDQWNLFIATGQCIRIYSSLNLKEWKYESTFGRGIGCHDGVWECPAVLKVDGKWVILLNINPGGPFGGSATQYFVGEFDGHQFICESDPWNTKWMDYGRDAYATVCFHNAPVNTAIAWMSNWDYAKIAPTHQFRSAFSIPRIFKLVECPCSHEHYLYSYPLPSFEEKFVNKVDELTTACLATVDLSKVTAKQVRIILKNQQEEVTLVVNREVEGGRFEFERGLKSGLHTFSDAFCCLTHCPYQISDHYQLKLFVDKHSVEVFDGAGSFTMTTTVFPRSPYTTIVVEPIDGECSSTVTIKSL

SEQ ID NO: 9827 - protein, 466 aa, Klebsiella pneumoniae
MSLPSRLPAILQAVMQGQPQALADSHYPQWHLAPVNGLLNDPNGFCQVAGRYHLFYQWNPLACDHTYKCWGHWSSADLLHWRHEPIALMPDEEYDRNGCYSGSAVEFEGALTLCYTGNVKFPDGGRTAWQCLATENADGTFRKLGPVLPLPEGYTGHVRDPKVWRQDGRWYMVLGAQDVQQRGKVLLFTASDLREWRLVGEIAGHDVNGLANAGYMWECPDLFPLADTHLLICCPQGLAREAQRFLNTYPAVWMAGRFDAERGIFDHGPLHELDSGFEFYAPQTMQADDGRRLLVGWMGVPDGDEMHQPTRAQGWIHQMTCVRELEWQAGTLYQRPLRELVALRGEAQGWCGQTLPLAPMELAFDLSPDSTLGLDFAGALQLTVNRDGLRLSRRGLQTAEMHHRYWRGEARRLRIFIDRSSVEIFINDGEGVMSSRFFPGYPGQLIFSGATPVAFCRWLLRPCMVE

SEQ ID NO: 9828 - protein, 229 aa, Arabidopsis lyrata
KTGKNLVQWPVEEIKSLRLSSKQFDIKVGPGSVVPVDVGSAAQLDIEAEFEINKESLDKILGNASVMAEAEEFSCEKSGGSTVRGALGPFGFSVLATESLSEQTPVYFYVAKGKDSELKTFFCIDTSRSSVANDVVKLIYGSVVPVLKGEKLTMRILVDHSIVEAFGQGGRTCITSRVYPTSAIYGAAKLFLFNNALDATVTASFRVWQMNSAFIHPYTEEAFRALTRT

SEQ ID NO: 9829 - protein, 637 aa, Cynara scolymus
MASSTTTPLLPHHHLQNPQQLAGSPAAHRLSRPTLLSGILVSVLVICALVAVIHNQSQQPYHDGGAKPSSSAATTTFPTASPEAGLKRFPIELKTNAEVEWQRSAYHFQPDKNYISDPDGPMYHMGWYHLFYQYNPESAIWGNITWGHSVSKDMINWFHLPFAMVPDQWYDIEGVMTGSATVLPDGQIIMLYTGNAYDLSQLQCLAYAVNSSDPLLLDWKKYEGNPILFPPPGVGYKDFRDPSTLWLGPDGEYRMVMGSKHNETIGCALIYHTTNFTHFELKEEVLHAVPHTGMWECVDLYPVSTTHTNGLDMVDNGPNVKHVLKQSGDEDRHDWYALGTYDVVNDKWYPDDPENDVGIGLRYDFGKFYASKTFYDQHKKRRVLWGYVGETDPPKYDVYKGWANILNIPRTIVLDTKTNTNLIQWPIAEVENLRSNKYNEFKDVELKPGSLIPLEIGTATQLDITATFEVDQTMLESTLEADVLFNCTTSEGSAGRGVLGPFGLVVLADAERSEQLPVYFYIAKDTDGSSKTYFCADESRSSNDVDIGKWVYGSSVPVLEGEKFNMRLLVDHSIVEGFAQGGRTVVTSRVYPAKAIYGAAKLFLFNNATGISVKASLKIWKMKEAQLDPFPLSGWSS

SEQ ID NO: 9830 - protein, 617 aa, Cynara scolymus
MRTTEPQTDLEHAPNHTPLLDHPEPPPAAVRNRLLIRVSSSITLVSLFFVSAFLLILLYQHDSTYTDDNSAPSESSSQQPSAADRLRWERTAFHFQPAKNFIYDPNGPLFHMGWYHLFYQYNPYAPFWGNMTWGHAVSKDMINWFELPIALAPTEWYDIEGVLSGSTTILPDGRIFALYTGNTNDLEQLQCKAVPVNASDPLLVEWVRYDANPILYAPSGIGLTDYRDPSTVWTGPDGKHRMIIGTKRNTTGLVLVYHTTDFTNYVMLDEPLHSVPNTDMWECVDLYPVSTTNDSALDVAAYGPGIKHVLKESWEGHAMDFYSIGTYDAFNDKWTPDNPELDVGIGLRCDYGRFFASKSLYDPLKKRRVTWGYVAESDSYDQDVSRGWATIYNVARTIVLDRKTGTHLLQWPVEEIESLRSNGHEFKNITLEPGSIIPLDVGSATQLDIVATFEVDQEALKATSDTNDEYGCTTSSGAAQRGSFGPFGIAVLAHGTLSELTPVYFYIAKNTKGGVDTHFCTDKLRSSYDYDGEKVVYGSTVPVLDGEEFTMRILVDHSVVEGFAQGGRTVITSRVYPTKAIYEAAKLFVFNNATTTSVKATLKVWQMSQAFVKAYPF

SEQ ID NO: 9831 - protein, 466 aa, Salmonella typhimurium
MSLPSRLPAILQAVMQGQPRALADSHYPRWHHAPVTGLMNDPNGFIEFAGRYHLFYQWNPLACDHTFKCWAHWSSIDLLHWQHEPIALMPDEEYDRNGCYSGSAVDNNGTLTLCYTGNVKFAEGGRTAWQCLATENADGTFRKIGPVLPLPEGYTGHVRDPKVWRHEDLWYMVLGAQDRQKRGKVLLFSSADLHQWTSMGEIAGHGINGLDDVGYMWECPDLFPLGDQHILICCPQGIAREEECYLNTYPAVWMAGEFDYAAGAFRHGELHELDAGFEFYAPQTMLTSDGRRLLVGWMGVPEGEEMLQPTLNNGWIHQMTCLRELEFINGQLYQRPLRELSALRGEANGWSGNALPLAPMEIDLQTRGGDMLSLDFGGVLTLECDASGLRLARRSLASDEMHYRYWRGNVRSLRVFIDQSSVEIFINGGEGVMSSRYFPACSGQLTFSGITPDAFCYWPLRTCMVE

SEQ ID NO: 9832 - protein, 466 aa, Salmonella typhimurium
MSLPSRLPAILQAVMQGQPRALADSHYPRWHHAPVTGLMNDPNGFIEFAGRYHLFYQWNPLACDHTFKCWAHWSSIDLLHWQHEPIALMPDEEYDRNGCYSGSAVDNNGTLTLCYTGNVKFAEGGRTAWQCLATENADGTFRKIGPVLPLPEGYTGHVRDPKVWRHEDLWYMVLGAQDRQKRGKVLLFSSADLHQWTSMGEIAGHGINGLDDVGYMWECPDLFPLGDQHILICCPQGIAREEECYLNTYPAVWMAGEFDYAAGAFRHGELHELDAGFEFYAPQTMLTSDGRRLLVGWMGVPEGEEMLQPTLNNGWIHQMTCLRELEFINGQLYQRPLRELSALRGEANGWSGNALPLAPMEIDLQTRGGDMLGLDFGGVLTLECDASGLRLARRSLASAEMHYRYWRGNVRSLRVFIDQSSVEIFINGGEGVMSSRYFPACSGQLTFSGITPDAFCYWPLRTCMVE

SEQ ID NO: 9833 - protein, 567 aa, Saccharum robustum
  unsure (1)..(567): unsure at all Xaa locations
HDGGGNAFPWSNAMLQWQRTGFHFQPQKNWMNDPNGPVYYKGWYHLFYQYNPDGAIWGNKIAWGHAVSRDLIHRRHLPLAMVPDQWYDTNGVWTGSATTLPDGRLAMLYTGSTNASVQVQCLAVPADDADPLLTNWTKYEGNPVLYPPPGIGPRDFRDPTTAWFDPSDSTWRIVIGSKDDAEGDHAGIAVVYRTRDFVHFELLPDLLHRVAGTGMWECIDFYPVATRGKVSGNGVDMSDALGKNGAVVGDVVHVMKAGMDDDRHDYCALGRYDAAANAWTPLDAEKDVGTGLRYDWGKFYASKTFYDPAKRRRVLWGWVGETDSERADVSKGWASLQGIPRTVLLDTKTGSNLLQWPVEEVETLRTNSTDXSGITIDYGSAFPLNLRRATQLDIEAEFELDRRAVMSLNEADVGYNCSTSGGAAARGALGPFGLLVLADKHLHEQTAVYFYVAKGLDGSLTTHFCQDESRSSSANDIVKRVVGSAVPVLEDETTLSXRVLVDHSIVESFAQGGRSTATSRVYPTKAIYANAGVFLFNNATAARVTAKKLVVHEMDSSYNHDYMVTDI

SEQ ID NO: 9834 - protein, 750 aa, Bacillus sp. L7
MMKWFAKLILSLSLAVVMAASSAAISFGASNSSLDTHASLVTQLDSAASEAAEGKSAMINESAINSNVTGWKLHGKGRMEVTGEGLRLTSDPQENVMAISETVADDFIYEADVMVTDPQADATLLFRSGEDGWSSYMLQLALGAGVIRLKDASGGEGVLNVERKVEAKPGDIYHLRVKAEGTRLQVYWGQQYEPVIDTEAAAHRTGRLGLHVWNGSALFQNIRVSDMSGNTLEPISSQGLWQPDLKGLKGTGEDGLEAKKVFRNHEADVVLEGDLILNGQGSAGLLFRSNAQGTEGYAAVLQGEGERVRVYLKKADGTILHESRVTYPSQRESRHHLEVKAIGERIQIFVDGYEPAAIDMVDTAFPSGYHGVMASSGIAYFQDVYITPYASYYTEKYRPQYHYSPIRGSASDPNGLVYFEGEYHLFHQDGGQWAHAVSRDLIHWKRLPIALPWNDLGHVWSGSAVADTTNASGLFGSSGGKGLIAYYTSYNPDRHNGNQKIGLAYSTDRGRTWKYSEEHPVVIENPGKTGEDPGGWDFRDPKVVRDEANNRWVMVVSGGDHIRLFTSTNLLNWTLTDQFGYGAYIRGGVWECPDLFQLPVEGSKKRKWVLMISTGANPNTQGSDAEYFIGDLTPEGKFINDNPAGTVLKTDWGKEYYASMSFSDMPDGRRIMLAWMTNWDYPFSFPTTGWKGQLSIPRQVSLKETEEGIRMHQTPIEELAQLRSPVLHITNREVGDFRRKSAQRDHIRRL

SEQ ID NO: 9835 - protein, 537 aa, Aspergillus foetidus
MARLLKAVTVCALAGIAHAFNYDQPYRGQYHFSPQKNWMNDPNGLLYHNGTYHLFFQYNPGGIEWGNISWGHATSEDLTHWEEQPVALLARGYGSDVTEMYFSGSAVADVNNTSGFGKDGKTPLVAMYTSYYPVAQTLPSGQTVQEDQQSQSIAYSLDDGLTWTTYDAANPVIPNPPQPYQAQYQNFRDPFVFWHDESQKWVVVTSIAELHKLAIYTSDNLKDWKLVSEFGPYNAQGGVWECPGLFKLPLDGGSSTKWVITSGLNPGGPPGTVGSGTQYFVGEFDGTTFTPDADTVYPGNSTANWMDWGPDFYAAAGYNGLSIKDHVHIGWMNNWQYGANIPTYPWRSAMAIPRHLALKTINNKTTLVQQPQEAWSSISSKHPLYSRTYSTFSEGSTNASTTGETFRVDLSFSATSKASTFAIALRASANFTEQTLAGYDFAKQQIFLDRTKSGDVSFDNTFASVYHGPLVPDSTSMVRLSIFVDRSSVEVFGGQGETSLTAQIFPSNDAVHARLVSTGGATEDVRVDVHNITSTWN

SEQ ID NO: 9836 - protein, 546 aa, Vibrio cholerae
MLLDTQLELAGGINNVTRILAPQGQVVLALKHPPHAPHLPDDVSLQSVLGEWQLSVQRTAEVSDQQLATIGKAISERQKLETLPYQTALDCPYRPLWHISPPQGLLNDPNGFIYHQGEYHLFYQWHPFVCEHKDKYWVHLKSLDLVHWQWQSVALTPSDWFDSHGVFSGHAVSHQQDLWLFYTGNTRLGVDRQRQTMQCAARMNANGEFEKLGPVIRCLPEGVTEHIRDPKVIYTQGKWHMLLGAQTLAHQGRLAVYHSDDLLHWHFDKLYGDELGNYGYMWECPDWFELQGEAFFVFGPQGIASANPHHTIEHQNRIFRATQNAQGEIALLQGWPLDEGFDFYAPQTAQTTDGRRVLCGWMGLPDETQHPSCDQGWIHQLTALRELEWREGKIYQHPLRELDTLRSEPHTLLLSDTVTELKAKSFDVQVTLPWGCQLRLMQNAQYCVTLTLDAENRLLRLDRSATQIRQGDTIRELKLDSPTVELRILADQSSLEIFINQGEHVMTSRIFTPLDATGISLHGASVDAKLYYMAPASAPFNLEVNV

SEQ ID NO: 9837 - protein, 548 aa, Vibrio cholerae
MLLDTLLELAGGINNVTRILAPQGQVVLALKHPPLVPHLPDDVSLQSVLGEWQLSVQRTAEVSDQQLAAIGKAIAERQKLETLPYQTALDCPYRPLWHISPPQGLLNDPNGFIYHQGEYHLFYQWHPFACEHKDKYWVHLKSLDLVDWQWQSVALTPSDWFDSHGVFSGHAVSHQQDLWLFYTGNTRLGVDRQRQTMQCAARMNANGEFEKLGPVIRCLPEGVTEHIRDPKVIYTQGKWQMLLGAQTLAHQGRLAVYHSDDLLHWHFDKLYGDELGDYGYMWECPDWFELQGEAFFVFGPQGIASANPHHTIEHQNRIFRATQNAQGEIALLQGWPLDEGFDFYAPQTAQTADGRRVLCGWMGLPDETQHPSCDQGWIHQLTALRELEWREGRIYQHPLRELDTLQSEPHTLLLSDNVTELKTKSFALQVTLPWGCELRLMQNTQYRVTLTLDAENQLLRLDRSATQIRQGDTIRELKLDSPTVELRILADQSSLEIFINQGEHVMTSRIFTPRDASGISLHGASVDAKLYYMAPASAPFNLEVNVQP

SEQ ID NO: 9838 - protein, 499 aa, Pasteurella multocida
MPFSLSKVRSFFCHFWTSPMYIFNQGKYKSLHAQQVGELAQIRQHVLRDTQFRPTYHLAPETGLLNDPNGLVFDGEKYHIFYQWFPYAAIHGMKHWKHFMTYDFHHFQVADPLIPDELFESHGCYSGGALLWQDQIVAFYTGNTRNAENQRIPHQNIAIFKKDGTLLKKRCLLNQAPTGYTEHVRDPKPFITEEGKIRFILGAQREDLSGTALIYEMTDLDATPQLIGEFKLPDFDNQQVFMWECPDLLKLQEQDLFLWSPQGKAQKTYCFQNHYHATYALGQYANLHFSAQHIEELDYGFDFYAPQSIQGSEGIYYAWVGLPDLTYPTDEYQWHSMLSLPRQFSIQQGILYQRPIPQVYAQCLPAHKYWVEGKQQIPHLDRSYVAFDAENQPFTLRFFTNQRGQQLILRYQNGILTLDRTYTTQTALMQQFGEQRHCILPQLNHVEIFFDRSVVEIFLNQGEKVMTSRFFIADRENALDSSRPLCVSVAELKPIILTP

SEQ ID NO: 9839 - protein, 622 aa, Bacteroides fragilis
MKTTFMNVSRGVIGALAFSLGISSCQSSQSKMTFEQEGDSLTVIHITNPTQYLLLPVEEKTPEAQVCIASDSVPVDMDVRLSREKVDYFVPFALPKGEKEVAVRIRHLPKEALCWKELKLSDTFDTTNTDQYRPLYHHTPLYGWMNDANGLVYKDGEYHLFYQYNPYGSMWGNMHWGHSVSKDLVHWEHLEPALARDTLGHIFSGSSVVDDANTAGYGAGAIVAFYTSASDKNGQIQCMAYSTDNGRTFTKYEKNPVLTPFDGLKDFRDPKVFWYAPDQKWVMVVSADKEMRFYSSENLKEWTYMSGWGEGYGVQPSQFECPDMVELPVDGNPDHKKWALIVNVNPGCYFGGSATQYFIGDFDGEKFVCDNKPETVKWLDWGKDHYATVCFSNTGDRTIAVPWMSNWQYANIVPTRQFRSANALPRELSLYTQDGDIYMAAAPVEETKSLRKESREIPAFEVGDAYHVDSLLSDNKGAYEIELELAAGSAEIMGLKLFNEKGENVDIYISLPEKKLVMDRTKSGIVDFGKDSAPHAIEAHDRRKQNSINYVDDFALGTWAPVQKAGNYKLDIFVDKCSVEIFLNGGKIAMTNLIFPTTPYNQMSFYSRGGAFKVDRCKIYRL

SEQ ID NO: 9840 - protein, 477 aa, Escherichia coli O157:H7
MTQSRLHAAQNALAKLHERRGNTFYPHFHLAPPAGWMNDPNGLIWFNDRYHAFYQHHPMSEHWGPMHWGHATSDDMIHWQHEPIALAPGDENDKDGCFSGSAVDDNGVLSLIYTGHVWLDGAGNDDAIREVQCLATSRDGIHFEKQGVILTPPEGIMHFRDPKVWREADTWWMVVGAKDPGNTGQILLYRGSSLREWTFDRVLAHADAGESYMWECPDFFSLGDQHYLMFSPQGMNAEGYSYRNRFQSGVIPGMWSPGRLFAQSGHFTELDNGHDFYAPQSFVAKDGRRIVIGWMDMWESPMPSKREGWAGCMTLARELSESNGKLLQRPVHEAESLRQQHQSISPRTISNKYVLQENAQAVEIQLQWALKNSDAEHYGLQLGTGMRLYIDNQSERLVLWRYYPHENLDGYRSIPLPQRDTLALRIFIDTSSVEVFINDGEAVMSSRIYPQPEERELSLYASHGVAVVQHGALWQLG

SEQ ID NO: 9841 - protein, 286 aa, Citrus reticulata
GMWECVDFYPVAINGSVGLDTSATGPGIKHVLKASLDDTKVDHYAIGTYNPENDKWTPDNPEEDVGIGLKWDYGRYYASKSFYDPYKKRRIVWGWINETDTESDDLEKGWASVQTIPRTVLYDNKTGSNVVQWPVEEIESLRQNSTMFEEVVVEPGSVVPLDIGVATQLDISAEFETELLGSGAPEEGYGCSGGAIDRSAMGPFGLLVNAHDSLSELTPIFFRSSNTTKGTNTYFCADETRSSLAPDVFKQVHGSKVPVIQGEKLSMRILVDHSIVESFGQGGRTV

SEQ ID NO: 9842 - protein, 812 aa, Arthrobacter sp. S37
MTTATRKVVPMTELRQTQPTTNLPGLGRRTFLQGAAVSAAVIATGALFRPAAAATGDPVLRLTYDQPNGSTTVLDEVGRSNFTVHVSNNPAERVPGVRGNAFRTDGFSTWATGQFATPLTTQMTIQTWIALESYPSDSEQPYDALTPSSIIYQRTNDAGFDIAINTYGEWWFTAHVGGQWRTVKAPWLFPLYEWVQIAAVVDGDAGQLRLHLDDAAGPKVASVAIPTGSRFTQAAGAPLVVGKASKDVTTGVFLINALNAAYDDTRIYDIARGAAALTGEYTSGIAGASPAHDVALQVTGLRFADDILRPRYHAMPPANWTNEPHGLVRHDCSYHMFYQRTPNGPFKWQMNWGHMTSTDLVHWTNMPDALRPELNDREARLGAVAGSGLSGQGSKGIWSGDVVSVDGTAHAFFTTVNFGGPFDPGITRASSTDPDLLTWTKASTGVIDKNAPAHVADFRDPYLWQEGGTWHMIIGAATDAGGALEHYTTQDIQGQWTRASRPFSTVSFASMDIGSAIWEMPVFEKIGTHAGRDKYVLVVSPIGRSVSKLSEPYTRSVYWTGTWNGSQFTPDYARPKSLDLIHGHLSPTVAHGPDGKLVAIGIVDERSSSKMQLDLGWAHTFSAPREWRLLEDGQTLGQRPIAQLMTLRAGSAQTATNVAVTGEHNLAAAGNQVEILAKVDPASTGARYGLCIGASPDGSEITRIYYDGNDIVIDKTRSSRNFENEEAVLLRGAYDEAVFGKPHTFHVFVDHSVIDVFINDAAAFSNRIYPTSRGADGAAASTGLRLYSEGGQTRFTQTDVWQLQSAWPTPAF

SEQ ID NO: 9843 - protein, 321 aa, Pascopyrum smithii
MLHVLKASMDDERHDYYSLGTYDSAANTWTPIDPELDLGIGLRYDWGKFYASTSFYDPAKKRRVLMGYVGEVDSKRADVVKGWASIQSVPRTVALDEKTRTNLLLWPVEEIETLRLNATELSDITINTGSVFHVPLRQGAQLDIEASFRLDASAVAALNEADVGYNCSSSGGAATRGALGPFGLLVLTAGDRRGEQTAVYFYVSRGLDGGLRTSFCQDEFRSSRAKDVTKRVIGSTVPVLDGEAFSMRVLVDHSIVQGFAMGGGPRMTSRVYPMEAIYEKAGVYLFNNATSAVVTAEKLVVHEMDSSHNQLSNEDDELYVQ

SEQ ID NO: 9844 - protein, 104 aa, Pascopyrum smithii
SRGLDGGLRTSFCQDESRSSRAKDVTKRVIGSTVPVLEGEAFSMRVLVDHSIVQGFAMGGRSTMTSRVYPMEAIYQKAGVYLFNNATSTVVTEEMLVLHEMDSS

SEQ ID NO: 9845 - protein, 487 aa, Bacillus halodurans
MTNRDQELRQKAKETIKRYERLVERDPYRLVYHLMPPVGLLNDPNGFIDWDGTYHLFYQWHPFEAAHGPKFWGHFVSGDLVFWEEKEPALTPSDWFDKNGCYSGSAVADNGKLKLFYTGNVKNENDERESYQCVAESEDGLTFTKKGVILHVPDGYTAHFRDPKVWKRDGIWYLVIGAQTKQIDGHVLLFRSDDLKEWQFAGIVTGSNVRSMGDFGYMWECPDLFHLDGEDVLLVSPQGLEKQGYLYHNVHNTGYFIGRLDYETGELVHGPFKELDRGFEFYAPQTTIDRYGRRILFGWMGVPDQGEEKHPTVKHQWIHAMTLPRELKLVDGKIYQRPVEELKQLRKNEVSRPSVKISEHPQRFEEISGEAFELLLDVEENQAEVFELTIRDNVRVIFNRGLKRLTLERVSFVDGLTESRHCELAELSSLHLYVDTSAVELFVNEGEEVFTARYFADPANRSIQFKTLHGSLTASLKKWALDSIMKK

SEQ ID NO: 9846 - protein, 487 aa, Hordeum vulgare subsp. vulgare
MNQSGMARSDEGSLVPREVPGSYGLPFVSAIRDRLDFYYFQGQDKYFESRVEKYGSTVVRINVPPGPFMARDPRVVAVLDAKSFPVLFDVTKVEKKNLFTGTYMPSTSLTGGFPVCSYLDPSEPTHTKVKQLLFSLLASRKDAFIPAFRSHFSSLLATVESQLLLSGKSNFNTLNDATSFEFIGDGYFGVLPSASDLGTTGPAKAAKWLIFQLHPLVTLGLPMILEEPLLHTVHLPPFLVSGDYKALYKYFFAAATKALDTAEGLGLKRDEACHNLLFATVFNSYGGLKVLLPGILARIADSGEKFHKKLVTEIRAAVAEAGGKVTIEALEKMELTKSAVWEALRLDPAVKFQYGRAKADMNIESHDAVFAVKKGEMLFGYQPCATKDPRVFGPTAREFVGDRFVGKEGSKLLKYVYWSNGRETESPSVHNKQCPGKNLVVLVGRLLVVELFLRYDTFTAKVGLDLLGTKVEFTGVTKATSGVADAV

SEQ ID NO: 9847 - protein, 480 aa, Hordeum vulgare subsp. vulgare
MNQSAIGSLVPRQAPGSYGLPFVSAIRDRLDFYYFQGEAKYFESRVEKHGSTVLRINVPPGPFMARDPRVVAVLDAKSFPVLFDVDKVEKKNLFTGTYMPSTSLTGGFRVCAYLDPSEPTHTKVKQLLFSLLASRKDAVIPAFRSHFSSLLATVESQLVLSGKSNFNTLNDFTSFEFIADTYFGVLPSASDLGTTGPAKAAKWLIFQLHPLVTFGLPMILEEPLLHTVLLPPIFVSGDYKALYKYFYAAATKALDMAESLGLNRDEACHNLLFATVFNSYGGLKVMLPGFLGRIAEAGEKFHQRLAAEVRTAVADAGGKVTIEALEKMELTKSAVWEALRLEPPVKFQYGRAKVDMNIESHDAVFAVQKGEMLFGYQPCATKDPRVFGSTAREFVGDRFVGEGSKLLQYVYWSNGRETESPSVDNKQCPGKNLVVLVGRLLVVELFLRYDTFTADVGVDLLGPKVEFTGVTKATSGPGAV

SEQ ID NO: 9848 - protein, 532 aa, Citrus sinensis
MASTSLSFSLLPTEFQSPRKSSKLYTPRVRSAAIRPRPITASISEKQSVPVPPPIIISPSDEQPTKLPIRKIPGSYGLPYLGPIKDRQDYFYNLGRDEFFKSKIQKYGSTVFRANMPPGPFISSNPKVIVLLDGKSFPVLFDVSKVEKKDLFTGTYMPSTDLTGGYRVLSYLDPSEPNHAKLKQLLFFLLMNRRDKVIPELHSTYTEAFETLERDLAAKGKADFSGANEQAAFNFLARAWFGKNPADTTLGSDAPTLIGKWILFQLAPLLSLGLPKLVEEPLLRTRPLPPALVKKDYQRLYDFFHESSGFVLDEAEKLGVSREEACHNLVFATCFNSFGGMKILFPNMVKWIGRGGVKLHMQLAEEIRSVVRSNGGKVTMAGMEQMPLMKSVVYEVLRMEPPVALQYGKAKRDLIISSHEASFEVKEGEMLFGYQPFATKDPKIFEQAEEFVADRFVGEGEKMLKHVLWSNGPETENPPVGNKQCAGKDFVVLASRLLLVELFLRYDSFDIQVGKSAIGSSVTLTSLKRASF

SEQ ID NO: 9849 - protein, 475 aa, Physcomitrella patens
MAVPSSKLPLKAIPGDYGVPYFGAIKDRLDYFWLQGEEQFYRSRMAKYNSTVFRVNMPPGPPISEHPQVICLLDQKSFPILFDVSKVEKKDVFTGTYMPSVSFTSGYRVCSYLDPSEERHTKLKQWCFEVIAMNGRNFLPEFHKSIEESMVLWETSLAKGEKTSVSDEVKQFAFNFLMRAVCHHDPAAPGEYSLGRNGGPYATAWANPQLAPIAGQTGLPHVVEELVLHTVPLPSALVKKNYDALYNFIKNYATEALDRAEAMGIERNDATANLLFFLCFNAYGGFSIFFPLITILISSCGPELMHDLHDEVTKAVAATDGKVTLQSIENMPLVKSVVYEAFRFKPPVPYQYGKAKFDFTIENHENSFEVKKGEMLYGYQPIVMHDPKVFSDPDQFLPRRFMGPDGEKLIKYIFWSNGYETDEPTTANKQCAGKDLVVTMARAFVAEMFLRYKEYTLTMEGAGNATKVFFSDLKK

SEQ ID NO: 9850 - protein, 489 aa, Physcomitrella patens
RTVVASLGNIETTSTSTVGQESNLPLREIPGSYGIPYLSQLLDRWTFFYREGEPQFWQSRMAKYGSTVIRSNMPPGWFWTDSRCIMLLDQKSYPTVFDYDKVDKYKAFAGTIMPSTEYNGGYEVCAYLDASDKKHEQLKGYCFELLKFSSSKWAREFHTAISETFNQWEGKLAQKTPALINPTLPESLFSFVINALTTARFDDSSIPDAEKPVCGDLQKWAGFQLMPVIRTGAPIYIEEMLHVAPIPASLTKGGYDKMVVFLQKYAAETLSIAEKFGLSQDEAVHNLIFFLILNAHGGFCRFLPVILREVAKNGQLQADLREEVRAAVKASGSDQVTMKAVMNDMPLVASTVFEALRFDPPVPFQYARAKKDFIIESHDARYQIKTGDFLGGVNYMVSRDPKVFTDRPNEFNARRFMGPEGDKLLAHLVWSNGRQTDETTVYTKQCAGKEIVPLTGRLLLAELFMRFDSFNIEGLEMEATFTSLTPRSD

SEQ ID NO: 9851 - protein, 473 aa, Parthenium argentatum
MDPSSKPLREIPGSYGIPFFQPIKDRLEYFYGTGGRDEYFRSRMQKYQSTVFRANMPPGPFVSSNPKVIVLLDAKSFPILFDVSKVEKKDLFTGTYMPSTKLTGAYRVLSYLDPSEPRHAQLKNLLFFMLKNSSNRVIPQFETTYTELFEGLEAELAKNGKAAFNDVGEQAAFRFLGRAYFNSNPEETKLGTSAPTLISSWVLFNLAPTLDLGLPWFLQEPLLHTFRLPAFLIKSTYNKLYDYFQSVATPVMEQAEKLGVPKDEAVHNILFAVCFNTFGGVKILFPNTLKWIGVAGENLHTQLAEEIRGAIKSYGDGNVTLEAIEQMPLTKSVVYESLRIEPPVPPQYGKAKSNFTIESHDATFEVKKGEMLFGYQPFATKDPKVFDRPEEFVPDRFVGDGEALLKYVWWSNGPETESPTVENKQCAGKDFVVLITRLFVIELFRRYDSFEIELGESPLGAAVTLTFLKRASI

SEQ ID NO: 9852 - protein, 537 aa, Cucumis melo
MSSIVIPSLQPHLRFPSSQETPQRSRSRVGFVSIRPIYATDGVSSSSSSSLQVPQRIVSPPEPTKLPLRKVPGDYGPPMFGALKDRHDYFYNQGREEYLKSRMLRYESTVYRTNMPPGPFITSDSRVVVLLDGKSFPVLFDHSKVEKKDLFTGTYMPVTELTGGYRVLSYIDPSEPDHAKLKQLIFFLLKHRRDKIMPEFHSTFSELFETLEKDLAAAGRAEYNASGEQAAFNFLARSLFGADPVDSKLGRDAPKLIAKWVLFQLGPVLSLGLPKVVEELLLRTVRLPPALIKADYRRLYDFFYKSSEAVFEEADRLGISREEACHNLLFTTCFNSFGGMKIFFPNMIKWIGRAGVNLHTRLAREIRTAVKANGGKITMGAMEQMPLMKSVVYEALRIEPPVPVQYGRAKKDLVVESHDAAFEIKEGEVICGYQPFATRDPKIFDRADELVPDRFTGEGEELLKHVIWSNGPETQSPSVQNKQCAGKDFIVFISRLLVVELFLRYDSFDIEASNTPLGAAVTVSAAVTVTSLKKASF

SEQ ID NO: 9853 - protein, 518 aa, Arabidopsis thaliana
MASISTPFPISLHPKTVRSKPLKFRVLTRPIKASGSETPDLTVATRTGSKDLPIRNIPGNYGLPIVGPIKDRWDYFYDQGAEEFFKSRIRKYNSTVYRVNMPPGAFIAENPQVVALLDGKSFPVLFDVDKVEKKDLFTGTYMPSTELTGGYRILSYLDPSEPKHEKLKNLLFFLLKSSRNRIFPEFQATYSELFDSLEKELSLKGKADFGGSSDGTAFNFLARAFYGTNPADTKLKADAPGLITKWVLFNLHPLLSIGLPRVIEEPLIHTFSLPPALVKSDYQRLYEFFLESAGEILVEADKLGISREEATHNLLFATCFNTWGGMKILFPNMVKRIGRAGHQVHNRLAEEIRSVIKSNGGELTMGAIEKMELTKSVVYECLRFEPPVTAQYGRAKKDLVIESHDAAFKVKAGEMLYGYQPLATRDPKIFDRADEFVPERFVGEEGEKLLRHVLWSNGPETETPTVGNKQCAGKDFVVLVARLFVIEIFRRYDSFDIEVGTSPLGSSVNFSSLRKASF

SEQ ID NO: 9854 - protein, 517 aa, Arabidopsis thaliana
MASISTPFPISLHPKTVRSKPLKFRVLTRPIKASGSETPDLTVATRTGSKDLPIRNIPGNYGLPIVGPIKDRWDYFYDQGAEEFFKSRIRKYNSTVYRVNMPPGAFIAENPQVVALLDGKSFPVLFDVDKVEKKDLFTGTYMPSTELTGGYRILSYLDPSEPKHEKLKNLLFFLLKSSRNRIFPEFQATYSELFDSLEKEAFPLRESGFRRFQRRNRLLFLGSSFLRDESRRYKLKADAPGLITKWVLFNLHPLLSIGLPRVIEEPLIHTFSLPPALVKSDYQRLYEFLRIRGEILVEADKLGISREEATHNLLFATSFNTWGGMKILFPNMVKRIGPGGHQVHNRLAEEIRSVIKSNGGELTMGAIEKMELTKSVVYECLRFEPPVTAQYGRAKKDLVIESHDAAFKVKAGEMLYGYQPLATRDPKIFDRADEFVPERFVGEEGEKLLRHVLWSNGPETETPTVGNKQCAGKDFVVLVARLFVIEIFRRYDSFDIEVGTSPLGSSVNFSSLRKASF

SEQ ID NO: 9855 - protein, 534 aa, Glycine max
YPPPPPRVRGRASSASTTLSSPFLRLELPSRTKKRSSSIIPVPSIRASVSEKPPLPAVSVTSPEPSKLPIRKIPGDCGFPVIGPLKDRQDYFYKQGRDEFFKSRIQKYQSTVFRTNMPPGPFLAPNPNVVVLLDAKTFPILFDNSKVDKRDVFTGTFMPSTQLTGGYRVLSYLDPSEPKHSLLKQLMFFLLKSRRAHVISEFHASYKDLFHALEANLAEAGKASFGDANDQAAFNFLSRSLFNSNPADTKLGRDGPKIVQKWVLFQLGPILRLGLPQFLEESTIRSFRLPFSLIQKDYQRLYDFFYQSSGSVLDEAERLGITRDEACHNLLFATCFNSFGGMKLFFPNVLKWIGRAGVKLHARLAEEIRSAVRGAGGEITMAAMENMPLMKSVVYEAFRIDPPVPLQFGRAKRDLIIESHDHAFQVKEGEMLFGYQPFATKDPRIFERAEEFVGDRFVGEEGEKLLKHVLWSNGPETESPTIGNKQCAGKDFVTLVSRLLVVEFFLRYDSFEIQVGTSPLGSSVTITSLKRASF

SEQ ID NO: 9856 - protein, 520 aa, Glycine max
  unsure (1)..(520): unsure at all Xaa locations
MASSASTTLSSPFLRLEFPSSTKQRSSISIRASVSEKPPLPAVSVTSPEPSKLPIRKIPGDCGFPVIGPFKDRQDYFYKQGRDEFFKSRIQKYQSTVFRTNMPPGPFLAPDPNVXVVLLDAKSFPVLFDNSKVEKKDVFTGTFMPSTELTGGYRVLSYLDPSEPKHALLKQLMFFLLKSRRAHVISEFHASYKELFHALEANLAEAGKASFGDANDQAAFNFLSRSLFNSNPADTKLGLDGPKIVQKWVLFQIGPILRLGLPQFLEESTIRTFRLPFSLIKKDYQRLYDFFYESSGLVLDEAERLGITRDEACHNLLFATCFNSFGGMKLFFPNVLKWIGRAGVKLHARLAEEIRSAVRSGGGEISMAAMEKMPLMKSVVYEAFRIDPPVALQFGRAKRDLIIESHDHAFQVKEGEMLFGYQPFATKDPRIFERAEEFVGDRFVGEEGEKLLKHVLWSNGPETESPTLGNKQCAGKDFVTLVSRLFVVEFFLRYDSFEIQVGTSPLGSSVTITSLKRASF

SEQ ID NO: 9857 - protein, 478 aa, Oryza sativa (japonica cultivar-group)
MELGVPLPRRPVPGSYGVPFVSAVRDRLDFYYLQGQDKYFESRAERYGSTVVRINVPPGPFMARDPRVVALLDAKSFPVLFDVAKVEKRDVFTGTFMPSTSLTGGYRVCAYLDPSEPNHAKIKQLLLSLLVSRKDAFVPVFRSNFGALLDTVESQLASGGGKSDFTALNDATSFEFIGEAYFGVRPSASSSLGTGGPTKAALWLLWQLAPLTTLGLPMIIEDPLLHTLPLPPFLISSDYKALYAYFAAAASQALDAAEGLGLSREEACHNLLFATVFNSYGGFKLLLPQILSRVAQAGEKLHERLAAEIRSAVADAGGNVTLAALEKMELTRSVVWEALRLDPPVRFQYGRAKADLEIESHDASFAIKKGEMLFGYQPCATRDPRVFGATAREFVGDRFVGEEGRKLLQYVYWSNGRETENPSVDNKQCPGKNLVVLVGRLLLVELFLRYDTFTAEAGKKVVITGVTKASTSAVNRTA

SEQ ID NO: 9858 - protein, 536 aa, Linum usitatissimum
MASSALNNLVAVNPNTLSPSPKSTPLPNTFSNLRRVSAFRPIKASLFGDSPIKIPGITSQPPPSSDETTLPIRQIPGDYGLPGIGPIQDRLDYFYNQGREEFFKSRLQKYKSTVYRANMPPGPFIASNPRVIVLLDAKSFPVLFDMSKVEKKDLFTGTYMPSTELTGGYRILSYLDPSEPNHTKLKQLLFNLIKNRRDYVIPEFSSSFTDLCEVVEYDLATKGKAAFNDPAEQAAFNFLSRAFFGVKPIDTPLGKDAPSLISKWVLFNLAPILSVGLPKEVEEATLHSVRLPPLLVQNDYHRLYEFFTSAAGSVLDEAEQSGISRDEACHNILFAVCFNSWGGFKILFPSLMKWIGRAGLELHTKLAQEIRSAIQSTGGGKVTMAAMEQMPLMKSVVYETLRIEPPVALQYGKAKKDFILESHEAAYQVKEGEMLFGYQPFATKDPKIFDRPEEFVADRFVGEGVKLMEYVMWSNGPETETPSVANKQCAGKDFVVMAARLFVVELFKRYDSFDIEVGTSSLGASITLTSLKRSTF

SEQ ID NO: 9859 - protein, 534 aa, Lycopersicon esculentum
MASTSLSLPSLKLQFPSHTSSSSRKNSSSYRVSIRPIQASVSEIPPYISSPSQSPSSSSSPPVKQAKLPAQKVPGDYALPLVGPWKDRLDYFYNQGKNEFFKSRIQKHQSTVFRTNMPPGPFISFNPNVVVLLDGKSFPVLFDVSKVEKKDLFTGTFMPSTDLTGGYRVLSYLDPSEPNHAKLKKLMFYLLSSRRNEVIPEFHNSYSELFETLENELSTKGKAGLNAANDQAAVNFLARSLYGINPQDTELGTDGPKLIGKWVLFQLHPLLILGLPKVLEDLVMHTFRLPPALVKKDYQRLYNFFYENSTSVLDEAEKIGISREEACHNLLFATCFNSFGGIKIFFPNMLKWIGRAGAKLHSQLAQEIRSVISSNSGKVTMAAMEKMPLMKSVVYESLRIEPPVASQYGRAKHDMVIESHDASFEIKEGELLYGYQPFATKDPKIFDRSEEFVADRFKGEEGEKLLKHVLWSNGSETENASINNKQCAGKDFVVLVSRLLLVELFLRYDSFEIEVGASPLGAAITLTSLRRASF

SEQ ID NO: 9860 - protein, 510 aa, Lycopersicon esculentum
MALTLSFSLPLPSLHQKIPSKYSTFRPIIVSLSDKSTIEITQPIKLSTRTIPGDYGLPGIGPWKDRLDYFYNQGKNDFFESRIAKYKSTIFRTNMPPGPFITSNPKVIVLLDGKSFPVLFDASKVEKKDLFTGTFVPSTELTGGYRILSYLDPSEPNHEKLKKLMFFLLSSRRDHVIPEFHETYTELFETLDKEMEEKGTVGFNSGSDQAAFNFLARSLFGVNPVETKLGTDGPALIGKWILLQLHPVITLGLPKFLDDVLLHTFRLPPILVKKDYQRLYDFFYTNSANLFIEAEKLGISKDEACHNLLFATCFNSFGGMKIFFPNMLKSIAKAGVEIHTRLANEIRSEVKSAGGKITMSAMEKMPLMKSVVYEALRVDPPVASQYGRAKQDLKIESHDAVFEVKKGEILFGYQPFATKDPKIFDRPGEFVADRFVGEEGEKLLKHVLWSNGPETESPTVGNKQCAGKDFVVMVSRLFVTEFFLRYGTLNVDVGTSALGSSITITSLKKA

SEQ ID NO: 9861 - protein, 478 aa, Nicotiana tabacum
MSSFLVSSNNLPEREIPGDYGFPIISAIKDRYDYFYKQGEDVWFHSKAEKYNSTVVKINMAPGPFTSNDYKLVAFLDANSFVYMFDNSLIDKTDTLGGTFKPGKEYYGGYRPVAFVDTSDPNHAALKNYILTSFAKRHNLFIPLFRNSVSDHLFQNLEKQVSDQGKSDFNALLPNMTFGFIFRLLCDQTNPSDTVLGAQGPEHLRKWLFPQLIPSLSARKLPSFIEDLLFHNFLIPFGLVKSDYNKLVDAFSKNAGSMLDEAEKLGIKREEAVHNILFLVGINMFAGLNAFFPHLIRFVGEAGPTLHARLAKEIRTAIKEEGGAVTLSAINKMSLVESIVYETLRLRPPVPLQYGKAKKDFMVQSHDASYMIKKGQFLVGYQPMASRDPKIFDKPDDFIPDRFMGEGVKMLKHVLWSNGRETENPAPDNKQCAGKDLVHLLGRLMLVEFFLRYDTFTVEITPLFRAPNVAIKTLTKAT

SEQ ID NO: 9862 - protein, 507 aa, Solanum tuberosum
MASFSLPLPSLHQQFPSKYSTFRPIIVSLSEKPTIVVTQPTKLPTRTIPGDYGLPGIGPWKDRLDYFYNQGKDEFFESREVKYKSTIFRTNMPPGPFISSNPKVIVLLDGKSFPVLFDVSKVEKKDLFTGTYMPSTELTGGYRVLSYLDPSEPNHEKLKKLMFFLLSSRRDHVIPKFHETYTEFFETLDKEMAEKGTAGLNSGNDQAAFNFLARSLFGVNPVETKLGTDGPTLIGKWVLLQLHPVLTLGLPKFLDDLILHTFRLPPFLVKKDYQRLYDFFYTNSASLFAEAEKLGISKEEACHNLLFATCFNSFGGMKIFFPNMLKSIAKAGVEVHTRLANEIRSEVKSAGGKITMSAMEKMPLMKSVVYEALRVDPPVASQYGRAKQDLKIESHDAVFEVKKGEMLFGYQPFATKDPKIFDRPEEFVADRFVGEEGEKLLKYVLWSNGPETESPTVGNKQCAGRDFVVMVSRLFVTEFFLRYDTFNVDVDKSALGASITITSLKKA

SEQ ID NO: 9863 - protein, 530 aa, Solanum tuberosum
MASTSLSLPSLKLQFPSHKSSSSRKNSSSHRVSIRPIQASVSERPPYISSPSPSPSPPVKQAKLPTRKVPGDYGLPLVGPWKDRLDYFYNQGKNEFFKSRIQKHQSTVFRTNMPPGPFISFNPNVVVLLDGKSFPILFDVSKVEKKDLFTGTFMPSTDLTGGYRVLSYLDPSEPNHAKLKKLMFYLLSSRRNEVIPEFHNSYSELFETLENELSTKGKARLNAANDQAAFNFLARSLYGINPQDTKLGTDGPKLIGKWVLFQLHPLLILGLPKVLEDLVMHTFRLPPALVKKDYQRLYNFFYENSTSVLDEAEKIGISREEACHNLLFATCFNSFGGIKIFFPNMLKWIGRAGAKLHSQLAQEIRSVISSNSGKVTMAAMEKMPLMKSVVYESLRIEPPVASQYGRAKHDMVIESHDASFEIKEGELLYGFQPFATKDPKIFDRSEEFVADRFIGEEGEKLLKHVLWSNGSETENPSINNKQCAGKDFVVLVSRLLLVELFLRYDSFEIEVGASPLGAAITLTSLRRASF

SEQ ID NO: 9864 - protein, 490 aa, Solanum tuberosum
MALTLSFSLPLPSLHQQFPSKYSTFRPIIVSLSEKPTIVVTQPTKLPTRTIPGDYGLPGIGPWKDRLDYFYNQGKDEFFESRVVKYKSTIFRTNMPPGPFISSNPKVIVLLDGKSFPVLFDVSKVEKKDLFTGTYMPSTELTGGYRVLSYLDPSEPNHEKLKKLMFFLLSSRRDHVIPKFHETYTEFFETLDKEMAEKGTAGLNSGNDQAAFNFLARSLFGVNPVETKLGTDGPTLIGKWVLLQLHPVLTLGLPKFLDDLILHTFRLPPFLVKKDYQRLYDFFYTNSASLFAEAEKLGISKEEACHNLLFATCFNSFGGMKIFFPNMLKSIAKAGVEVHTRLANEIRSEVKSAGGKITMSAMEKMPLMKSVVYEALRVDPPVASQYGRAKQDLKIESHDAVFEVKKGEMLFGYQPFATKDPKIFDRPEEFVADRFVGEGEKLLKYVLWSNGPETESPTVGNKQCAGKDFVVMVSRLFVTEFFLRYDTFNV

SEQ ID NO: 9865 - protein, 487 aa, Hordeum vulgare
  unsure (1)..(487): unsure at all Xaa locations
MLPSFSPAVTAAAMAPPPPKPIPGGYGAPVLGPLRDRLDYFWFQGPEEFFRRRAAQHRSTVFRANIPPTFPFFVGINPRVIAIVDTAAFTALFDPELVDKRDCLIGPYNPSDSFTGGTRVGVYLDTEEPEHERTKAFAMDLLRRSSRVWAPEFLEGVDGMLAAIESDLAAGKEGGASFLVPLQRCIFRFLCRSVASADPAAEGLVDRYGLFILDVWLGLQLLPTQKVGAIXQPLEELLLHSFPFPSILAKPGYDLLYRFVAKHGAESVAVGVTNHGMSEKDAINNILFLLGFNAFGGFSVFLPFLILQIGKDAALRARLRDEVRAALDQHDGEVGFASVKGMPLVRSTVYEVLRMNPPVPLQFGRARRDFVLRSHGGEGFSVAGGEMLCGYQPLAMRDPEVFERPEEFVADRFVGAGGEALLRYVYWSNGPETGEPALGNKQCAAKDVVIATACMLVAELFRRYDDFECTGTAFTSLKKRPQPQPSS

SEQ ID NO: 9866 - protein, 478 aa, Oryza sativa
MELGVPLPRRPVPGSYGVPFVSAVRDRLDFYYLQGQDKYFESRAERYGSTVVRINVPPGPFMARDPRVVALLDAKSFPVLFDVAKVEKRDVFTGTFMPSTSLTGGYRVCAYLDPSEPNHAKIKQLLLSLLVSRKDAFVPVFRSNFGALLDTVQSQLASGGGKSDFTALNDATSFEFIGKAYFGVRPSASSSLGTGGLDQGRLWLLWQLAPLTTLGLPMIIEDPLLHTLPLPPFLISSDYKALYAYFAAAASQALDAAEGLGLSREEACHNLLFATVFNSYGGFKLLLPQILSRVAQAGEKLHERLAAEIRSAVADAGGNVTLAALEKMELTRSVVWEALRLDPPVRFQYGRAKADLEIESHDASFAIKKGEMLFGYQPCATRDPRVFGATAREFVGDRFVGEEGRKLLQYVYWSNGRETENPSVDNKQCPGKNLVVLVGRLLLVELFLRYDTFTAEAGKKVVITGVTKASTSAVNRTA

SEQ ID NO: 9867 - protein, 481 aa, Oryza sativa
  unsure (1)..(481): unsure at all Xaa locations
MELGVPLPRRPVPGSYGVPFVSAVRDRLDFYYLQGQDKYFESRAERYGSTVVRINVPPGPFMXARDPRVVALLDAKSFPVLFDVAKVEKRDVFTGTFMPSTSLTGGYRVCAYLDPSEPNHAKIKQLLLSLLVSRKDAFVPVFRSNFGALLDTVQSQLASGGGKSDFTALNDATSFEFIGKAYFGVRPSASSSLGTGGLDQGRLWLLWQLAPLTTLGLPMIIEDPLLHTLPLPPFLISSDYKALYAYFAAAASQALDAAEGLGLSREEACHNLLFATVFNSYGGFKLLLPQILSRVAQAGEKLHERLAAEIRSAVADAGGNVTLAALEKMELTRSVVWEALRLDPPVRFQYGRAKADLEIESHDXASFAIKKGEMLFGXYQPCATRDPRVFGATAREFVGDRFVGEEGRKLLQYVYWSNGRETENPSVDNKQCPGKNLVVLVGRLLLVELFLRYDTFTAEAGKKVVITGVTKASTSAVNRTA

SEQ ID NO: 9868 - protein, 511 aa, Oryza sativa
  unsure (1)..(511): unsure at all Xaa locations
XGLQEFGTRVRRIDTICTPAPARPASASASATDRQEVVSPKRRLPLRKVPGDYGPPVVGAIRDRYEYFYGRGRDGFFAARVRAHRSTVVRLNMPPGPFVARDPRVVALLDAASFPVLFDTSLVDKTDLFTGTFMPSTDLTGGYRVLSYLDPSEPNHAPLKTLLFYLLSHRRQQVXFPKFREVYGDLFGLMENDLARVGKADFGVHNDAAAFGFLCQGLLGRDPAKSALGRDGPKLITKWVLFQLSPLLSLGLPTLVEDTLLHSLRLPPALVKKDYDRLADFFRDAAKAVVDEGERLGIAREEAVHNILFALCFNSFGGMKILFPTLVKWLGRAGARVHGRLATEVRGAVRDNGGEVTMKALAEMPLVKSAVYEALRIEPPVAMQYGRAKRDMVVESHDYGYEVREGEMLFGYQPMATKDPRVFARPEEYVPDRFLGEDGARLLRHVVWSNGPETAAPTLHDKQCAGKDFVVLVARLLLVELFLRYDSFDVEVGTSTLGSSVTVTSLKKATF

SEQ ID NO: 9869 - protein, 534 aa, Oryza sativa
  unsure (1)..(534): unsure at all Xaa locations
XAVAVTIRHLHASTXVRIRSQYPXSRPWRRREPTPATVTTAPSEGRASSRRRXLLIREIPGGYGVPFLSPLRDRLDYYYFQGADEFFRSRVARHGGATVLRVNMPPGPFLAGDPRVVALLDARSFRVLLDDSMVDKADTLDGTFMPSLALFGGHRPLAFLDAADPRHAKIKRVVMSLAAARMHHVAPAFRAAFAAMFDEVDAGLVAGGPVEFNKLNMRYMLDFTCAALFGGAPPSKAMGDAAVTKAVKWLIFQLHPLASIVKPWPLEDLLLHTFRLPPFLVRREYGEITAYFAAAAAAILDDAENPGIPRDELLHNLVFVAVFNAYGGFKIFLPHIVKWLARAGPELHAKLASEVRAAAPAGGGEITISAVEKEMPLVKSVVWEALRMNPPVEFQYGRARRDMVVESHDAAYEVRKGELLFGYQPLATRDEKVFDRAGEFVPDRFVSGAGSAARPLLEHVVWSNGPETGTPSEGNKQCPGKDMVVAVGRLMVAGLFRRYDTFAADVEELPLEPVVTFTSLTRAADGDGAARRGV

SEQ ID NO: 9870 - protein, 488 aa, Triticum aestivum
  unsure (1)..(488): unsure at all Xaa locations
TNRSGMAGGDEGSLVPREVPGSYGMPFVSAIRDRLDFYYFQGQDKYFESRVDKYGSTVVRINVPPGPFMARDPRVVAVLDAKSFPVLFDVDKVEKKNLFTGTYMPSTSLTGGFRVCSYLDPSEPTHTKVKQLLFSLLASRKDAFIPAFRSHFSSLLATVESQLVLSKKSNFNTLNDATSFECSGDAYFGVLPSASDLGTTGPAKAAKWLIFQLHPLVTLGLPMILEEPLLHTVHLPPILVSGDYKALYKYFYAAATKALDTAEGLGLKRDEACHNLLFATVFNSYGGLKVLLPGILARIAGAGEKFHQKLVAEIRAAVADAGGKVTVEALEKMELTKSAVWEALRLDPPVKFQYGRAKADMNIESHDAVFAVKKGEMLFGYQPCATRDPRVFGPTAREFVGDRFVGEEGRKLLQYVYWSNGRETESPSVXSSWQCPGKNLVVLVGRLLGGELFLRCHPFTADVGVDLLGTKVEFTGVTKATSGPESAV

SEQ ID NO: 9871 - protein, 488 aa, Triticum aestivum
  unsure (1)..(488): unsure at all Xaa locations
TNRSGMAGGDEGSLVPREVPGSYGMPFVSAIRDRLDFYYFQGQDKYFESRVEKYGSTVVRINVPPGPFMARDPRVVAVLDAKSFPVLFDVDXVAXKVEKKNLFTGTYMPSTSLTGGFRVCSYLDPSEPTHTKXLCSRLAPRSPPASPPSRPPFSSPSPPVAPPSGRSAFSACNSLFDAPSVESIGDAYFGVLPSASDLGTTGPTKAAKWLIFQLHPLVTLGLPMILEEPLLHTVHLPPILVSGDYKALYKYFYAAATKALDTAEGLGLKRDEACHNLLFATVFNSYGGLKVLLPGILARIAGAGEKFHQKLVAEIRAAVADAGGKVTIEALEKMELTKSAVWEALRLDPPVKFQYGRAKADMNIESHDAVFAVKKGEMLFGYQPCATRDPRVFGSTAREFVGDRFVGEEGRKLLQYVYWSNGRETESPSVDNKQCPGKNLVVLVGRLLVVELFLRYDTFTADVGVDLLGTKVEFTGVTKATSGPESAV

SEQ ID NO: 9872 - protein, 465 aa, Triticum aestivum
MNQSAVGSLVPRQAPGSYGLPFVSAIRDRLDFYYFQGEAKYFESRVEKHGSTVLRINVPPGPFMARDPRVVAVLDAKSFPVLFDVDKVEKKNLFTGTYMPSTSLTGGFRVCSYLDPSEPTHTKVKQLLFSLLASRKDAVIPAFRSHFSSLLATVESQLVLAGKSNFNTLNDFTSFEFIADAYFGVLPSASDLGTTGPTKAAKWLIFQLHPLVTFGLPLILEEPLLHTVLLPPIFVSGDYKALYKYLYAAATKALDMAESLGLNRDEACHNLLFATVFNSYGGLKVMLPGILGRIAEAGEKFHQRLAAEVRTAVADAGGKVTIEALEKMELTKSAVWEALRLEPPVKFQYGRAKADMNIESHDAVFAVNKGEMLFGYQPCATKDPRVFGSTAREFVGDRFVGERSKLLQYAYWSNGRETESPSVDNKQCPGKNLVVLVGRLLVVELFLPVRHLHRRRRGRPAGHQG

SEQ ID NO: 9873 - protein, 143 aa, Triticum aestivum
  unsure (1)..(143): unsure at all Xaa locations
XPFLVKGDYRALYKYFSTVAKQALDTAEGLGLSREEACHNLLFATTFNSYGGLKVLFPGLLANVASGGEKLHERLVAEIRGAVADAGGKVTLAAVERMELAKSVVWESLRLDPPVKFQYGHAKKDLLVESHDAVFQVRKGEMX

SEQ ID NO: 9874 - protein, 346 aa, Triticum aestivum
  unsure (1)..(346): unsure at all Xaa locations
TSACPPCHDVQGSQQLRQQQCGCQAIAVGAPRXREVPGGYGVPFLSPLRDRLDYYYFQGAEEYFRSRIARNGGATVLRVNMPPGPFITTDFRVVAFLDARSFSVLLDDAKVDKTDTLDGTFMPSLALFGGYRPLAFLDAADPRHXRAKRVMISLAAARMHHVAPVFRXRFGAVFDAADAGLGDGPXFQFNKLNEHHMFDFTCSALFXRHAAEQGHGRPAPVTKAIKVAWAXQLHPLASKIIKPWLLEDLLLHTFRLPPLLVRRDYADLTAYFAEAAAGFLNDAEQSGISRDELLHNLVFTAIFNAYGGFKIFLPHVIKWLARAGPALHARLASEVRAAVPNGSDIX

SEQ ID NO: 9875 - protein, 519 aa, Nicotiana attenuata
MAVATATATLSSSSSLPFHSLHQQFPSKYFTVRPITVSLSEKIPAVTQSSEFTKLPIRTIPGDYGLPLIGPWKDRQDYFYNQGKEEFFRSRIQKYKSTVFKTNMPPGNFISSNPNVVVLLDGKSFPTLFDVSKVEKKDLFTGTFMPSTELTGGYRVLSYLDPSEPTHEKLKKLLFFLLSSRRDYIIPQFHESYTELFKTLEKEMEKNGKADLNSANDQAAFNFLARSLYGANPVETKLGTDGPTLIGKWVLFQLHPLLTLGLPKVLDDFLLHNFRLPPALVKKDYQRLYDFFYESSTAVLNEAGNFGISRDEACHNLLFATCFNSFGGMKIFFPNMLKWIARAGVELHIRLANEIRSAVKSAGGKITMSAMEKMPVMKSVVYEALRIDPPVASQYGRAKRDLMIESHDGVFEVKKGEMLFGYQPFATRDPKIFDRPDEFVPDRFVGEEGEKLLKHVLWSNGPETESPTVENKQCAGKDFVVLVSRLLVTEFFLRYDTLDIDVGTSPLGAKITITSLKRA

SEQ ID NO: 9876 - protein, 592 aa, Arabidopsis thaliana
MEDPDIKRCKLSCVATVDDVIEQVMTYITDPKDRDSASLVCRRWFKIDSETREHVTMALCYTATPDRLSRRFPNLRSLKLKGKPRAAMFNLIPENWGGYVTPWVTEISNNLRQLKSVHFRRMIVSDLDLDRLAKARADDLETLKLDKCSGFTTDGLLSIVTHCRKIKTLLMEESSFSEKDGKWLHELAQHNTSLEVLNFYMTEFAKISPKDLETIARNCRSLVSVKVGDFEILELVGFFKAAANLEEFCGGSLNEDIGMPEKYMNLVFPRKLCRLGLSYMGPNEMPILFPFAAQIRKLDLLYALLETEDHCTLIQKCPNLEVLETRNVIGDRGLEVLAQYCKQLKRLRIERGADEQGMEDEEGLVSQRGLIALAQGCQELEYMAVYVSDITNESLESIGTYLKNLCDFRLVLLDREERITDLPLDNGVRSLLIGCKKLRRFAFYLRQGGLTDLGLSYIGQYSPNVRWMLLGYVGESDEGLMEFSRGCPNLQKLEMRGCCFSERAIAAAVTKLPSLRYLWVQGYRASMTGQDLMQMARPYWNIELIPSRRVPEVNQQGEIREMEHPAHILAYYSLAGQRTDCPTTVRVLKEPI

SEQ ID NO: 9877 - protein, 604 aa, Glycine max
  unsure (1)..(604): unsure at all Xaa locations
HLFFSLSVSDPIXRRNXNVRKTRVVDVVLDCVIPYIDDPKDRDAVSQVCRRWYELDSLTRKHVTIALCYTTTPARLXARRFPHLESLKLKGKPRAAMFNLIPEDWGGHVTPWVKEISQYFDCLKSLHFRRMIVKDSDLQNLARDRGHVLHALKLDKCSGFTTDGLFHIGRFCKSLRVLFLEESSILEKDGEWLHELALNNTVLETLNFYLTDIAVVKIEDLELLAKNCPNLVSVKLTDCEILDLVNFFKHASALEEFCGGTYNEXXPERYSAISLPAKLCRLGLTYIGKNELPIVFMFAAVLKKLDLLYAMLDTEDHCMLIQRCPNLEVLETRNVIGDRGLEVLGRCCKRLKRLRIERGDDDQGMEDEEGTVSHRGLIALSQGCSELEYMAVYVSDITNASLEHIGTHLKNLCDFRLVLLDHEEKITDLPLDNGVRALLRGCDKLRRFALYLRRGGLTDVGLGYIGQYSPNVRWMLLGYVGESDAGLLEFAKGCPSLQKLEMRGCLFFSERALAVAATQLTSLRYLWVQGYGVSPSGRDLLVMARPFWNIELIPSRKVATNTNPDETVVVEHPAHILAYYSLAGQRSDFPDTVVPLDTATCVDT

SEQ ID NO: 9878 - protein, 638 aa, Glycine max
  unsure (1)..(638): unsure at all Xaa locations
THRFWRLYLPFPHSHTHHHHNPFPFRHLNQNLFHLYLFLHSPLQYYDGGSERAEDTCXVDLVLDCVIPYIDDPKDRDXAVSQVCRRWYELDSLTRKHVTIALCYTTTPARLRRRFPHLESLKLKGKPRAAMFNLIPEDWGGHVTPWVKEISQYFDCLKSLHFRRMIVKDSDLRNLARDRGHVLHSLKLDKCSGFTTDGLFHIGRFCKSLRVLFLEESSIVEKDGEWLHELALNNTVLETLNFYLTDIAVVKIQDLELLAKNCPNLVSVKRTDSFLLDLVNFFKHASALEEFCGGTYNEXXPEKYSAISLPAKLCRLGLTYIGKNELPIVFMFAAVLKKLDLLYAMLDTEDHCMLIQKCPNLEVLETRNVIGDRGLEVLGRCCKRLKRLRIERGDDDQGMEDEEGTVSHRGLIALSQGCSELEYMAVYVSDITNASLEHIGTHLKNLCDFRLVLLDHEEKITDLPLDNGVRALLRGCNKLRRFALYLRRGGLTDVGLGYIGQYSPNVRWMLLGYVGESDAGLLEFSKGCPSLQKLEMRGCSFFSERALAVAATQLTSLRYLWVQGYGVSPSGRDLLAMARPFWNIELIPSRKVAMNTNSDETVVVEHPAHILAYYSLAGQRSDFPDTVVPLDTATCVDT

SEQ ID NO: 9879 - protein, 427 aa, Glycine max
  unsure (1)..(427): unsure at all Xaa locations
NSSLIAFRIFLSCYPATGLAARLFTRVSQFVHVFVFFVFWITRILDLLNAPFLAVIEDRDARRMTARRLSDVVLDCVMPYIHDSKDRDAVSQVCRRWYELDSLTRKHVTIALCYTTTPDRLRRRFPHLESLKLKGKPRAAMFNLIPEDWGGFVTPWVRVISQYFDCLKSLHFRRMIVRDSDLQVLARSRGHVLQALKLDKCSGFSTDGLYYIGRYCRNLRVLFLEESSLVENDGDWLHELALNNTVLETLNFYLTDIANVRIQDLELIARNCPNLNSVKITDCEVLDLVNFFRYASALEEFCGGSYNEXXSEKYSAISLPAKLSRLGLTYITKNEMPMVFPYAALLKKLDLLYAMLDTEDHCTLIQRCPNLEVLESRNVIGDRGLEVLARCCRRLKRIRIERGDDDQGMEDEEGVVSQRGLIALSHX

SEQ ID NO: 9880 - protein, 242 aa, Glycine max
  unsure (1)..(242): unsure at all Xaa locations
MEDEEGVVSQRGLIALSHGCPELEYLAVYVSDITNASLEHIGTHLKNLCDFRLVLLDREEKITDLPLDNGVRALLRGCDKLRRFALYLRPGGLTDVGLGYIGXQYSPXNVRWMLLGYVGETDAGLLEFSKGCPSLQKLEMRGCSFFSEYALAIAATQLNSLRYLWVQGYGASPSGRDLLAMARPYWNIELIPSRRVVVSNQQEEPVVVEHPAHILAYYSLAGPRTDFPDTVIPLDPATYVDT

SEQ ID NO: 9881 - protein, 589 aa, Oryza sativa (japonica cultivar-group)
MGGEAGERRLGRAMSFGIPDVALGLVMGFVEDPWDRDAISLVCRHWCRVDALSRKHVTVAMAYSTTPDRLFRRFPCLESLKLKAKPRAAMFNLIPEDWGGSASPWIRQLSASFHFLKALHLRRMIVSDDDLDVLVRAKAHMLSSFKLDRCSGFSTSSLALVARTCKKLETLFLEDSIIAEKENDEWIRELATNNSVLETLNFFLTDLRASPAYLTLLVRNCRRLKVLKISECFMLDLVDLFRTAEILQDFAGGSFDDQGQVEESRNYENYYFPPSLLRLSLLYMGTKEMQVLFPYGAALKKLDLQFTFLSTEDHCQLVQRCPNLEILEVRDVIGDRGLEVVAQTCKKLQRLRVERGDDDQGGLEDEHGMVTQVGLMAVAQGCPHLEYWAVHVTDITNAALEAIGTYSSSLNDFRLVLLDREANITESPLDNGVRALLRGCTKLRRFAFYVRPGALSDVGLGYIGEFSKTIRYMLLGNVGESDQGLLQLSTGCPSLQKLELRGCFFSERALAVAVLQLKSLRYLWVQGYKASPNGTDLMAMVRPFWNIEIIAPNQDEVCPDGQAQILAYYSLAGMRSDYPHSVIPLYPSV

SEQ ID NO: 9882 - protein, 154 aa, Lycopersicon esculentum
MGCPKLQSVLYFCRQMTNDALVSIARNRSNMIRFCLCIIEPQTPDYLILEPLDTGFGAIVQHCKEVQRLSLSGLLTDRVFEYIGVHAKKLEMLSLAFAGDSDIGLLYVLSGFESLRKLETRDCPFGDEALLANAAKLETMRSLWMSNCSVSFEA

SEQ ID NO: 9883 - protein, 589 aa, Oryza sativa
  unsure (1)..(589): unsure at all Xaa locations
MGGEAGERRLGRAMSFGIPDVALGLVMGFVXEDPWDRDAISLVCRHWCRVDALSRKHVTVAMAYSTTPDRLFRRFPCLESLKLKAKPRAAMFNLIPEDWGGSASPWIRQLSASFHFLKALHLRRMIVSDDDLDVLVRAKAHMLSSFKLDRCSGFSTSSLALVARTCKKLETLFLEDSIIAEKDDEWIRELATNNSVLETLNFFLTDLRASPAYLTLLVRNCRRLKVLKISECFMLDLVDLFRTAEILQDFAGGSFDDQGQVEESRNYENYYFPPSLLRLSLLYMGTKEMQVLFPYGAALKKLDLQFTFLSTEDHCQLVQRCPNLEILEVRDVIGDRGLEVVAQTCKKLQRLRVERGDDDQGGLEDEHGMVTQVGLMAVAQGCPHLEYWAVHVTDITNAALEAIGTYSSSLNDFRLVLLDREANITESPLDNGVRALLRGCTKLRRFAFYVRPGALSDVGLGYIGEFSKTIRYMLLGNVGESDQGLLQLSTGCPSLQKLELRGCFFSERALAVAVLQLKSLRYLWVQGYKASPNGTDLMAMVRPFWNIEIIAPNQDEVCPDGQAQILAYYSLAGMRSDYPHSVIPLYPSV

SEQ ID NO: 9884 - protein, 618 aa, Oryza sativa
MTRNHCEKTLTTDNVRDFSHRITNSQEMEGNPDRDRDGSAAAAAMGGEAGERRLGRAMSFGIPDVALGLVMGFVEDPWDRDAISLVCRHWCRVDALSRKHVTVAMAYSTTPDRLFRRFPCLESLKLKAKPRAAMFNLIPEDWGGSASPWIRQLSASFHFLKALHLRRMIVSDDDLDVLVRAKAHMLSSFKLDRCSGFSTSSLALVARTCKKLETLFLEDSIIAEKDDEWIRELATNNSVLETLNFFLTDLRASPAYLTLLVRNCRRLKVLKITEILQDFAGGSFDDQGQVEESRNYENYYFPPSLLRLSLLYMGTKEMQVLFPYGAALKKLDLQFTFLSTEDHCQLVQRCPNLEILEVRDVIGDRGLEVVAQTCKKLQRLRVERGDDDQGGLEDEHGMVTQVGLMAVAQGCPHLEYWAVHVTDITNAALEAIGTYSSSLNDFRLVLLDREANITESPLDNGVRALLRGCTKLRRFAFYVRPGALSDVGLGYIGEFSKTIRYMLLGNVGESDQGLLQLSTGCPSLQKLELRGCFFSERALAVAVLQLKSLRYLWVQGYKASPNGTDLMAMVRPFWNIEIIAPNQDEVCPDGQAQILAYYSLAGMRSDYPHSVIPLYPSV

SEQ ID NO: 9885 - protein, 664 aa, Triticum aestivum
  unsure (1)..(664): unsure at all Xaa locations
PRVRPRVRPRVRPRVRSLPPSHDSLLSSPPPHHHRRESQREGGENQSPCPHPSPDQIPGGPARSLRRGPARPMGGEAPEPRRLSRALSLDGSGVPEEALHLVLGYVDDPRDREAASLACRRWHHIDALTRKHVTVPFCYAVSPARLLARFPRLESLGVKGKPRAAMYGLIPDDWGAYARPWVAELAAPLECLKALHLRRMVVTDDDLAALVRARGHMLQELKLDKCSGFSTDALRLVARSCRSLRTLFLEECTITDNGTVWLHDLAANNPVLVTLNFYLTYLRVEPADLELLAKNCKSLISLKISDCDLSDLIGFFQIATSLQEFAGAEISEQKYGNVKLPSKLCSFGLTFMGTNEMHIIFPFSAVLKKLDLLYSFLTTEDHCQLIAKCPNLLVLAVRNVIGDRGLGVVVXTSKKLLTLIVERGEDDPGMQEEEGGVSQVGLTAIAVGCRELENIAAYVSDITNGALESIGTFCKNLHDFRLVLLDRQETITDLPLDNGARALLRGCTKLRRFALYLRPGGLSDVGLGYIGQHSGTIQYMLLGNVGQTDGGLISFAAGCRNLRKLELRSCCFSERALALAIRQMPSLRYVWVQGYRASQTGRDLMLMARPFWNIEFTPPSTETAGRLMEDGEPCVDRQAQVLAYYSLSGKRSDYPQSVVPLYPA

SEQ ID NO: 9886 - protein, 454 aa, Triticum aestivum
  unsure (1)..(454): unsure at all Xaa locations
XMLQELKLDKCSGFSTDALRLVARSCRSLRTLFLEECVITDEGGEWLHELAVNNSVLVTLNFYMTELKVVPADLELLAKNCKSLLSLKISECDLSDLIGFFEAANALQDFAGGSFNEVGELTKYEKVKFPPRVCFLGLTFMGKNEMPVIFPFSASLKKLDLQYTFLTTEDHCQLISKCPNLFVLEVRNVIGDRGLEVVGDTCKKLRRLRIERGDDDPGLQEEQGGVSQLGLTAVAVGCRDLEYIAAYVSDITNGALESIGTFCKNLYDFRLVLLDRQKQVTDLPLDNGVRALLRSCTKLRRFALYLRPGGLSDIGLDYIGQYSGNIQYMLLGNVGESDHGLIRFAIGCTNLRKLELRSCCFSEQALSLAVLHMPSLRYIWVQGYKASPAGLELLLMARRFWNIEFTPPSPEGLFRMTLEGEPCVDKQAQVLAYYSLAGQRQDCPDWVTPLHPAA

SEQ ID NO: 9887 - protein, 474 aa, Triticum aestivum
  unsure (1)..(474): unsure at all Xaa locations
XAXPPRRDGGPHPDPAARCPARPPMPQGRKLDPWSPSAPDALPSIACACTSLKTLFLEECRITDNGTEWLHDLAANNPVLVTLNFYLTYLRVEPADLELLAKNCKSLISLKISDCDVSDLIGFFQIATSLQEFAGAEXSREQKYGNVKLPSKLCSFGLTFMGTNEMHIIFPFSAVLKKLDLQYSFLTTEDHCQLIAKCXPNLLVLALRNVIADYSRGVVRXTWSNCKSVTGVRGDAESGMREEEGALGQVGLSAIAVGSSVVGDLAAYVSDITNGALESIGTFCKNLHDFRLVLLDKQETITDLPLDNGARALLRGCTKLRRFALYLRPGGLSDVGLGYIGQHSGTIQYMLLGNVGQTDGGLISFAAGCRNLRKLELRSCCFSERALALAIRQMPSLRYVWVQGYRASQTGRDLMLMARPFWNIEFTPPSTETAGRLMEDGEPCVDRQAQVLAYYSLSGKRSDYPQSVVPLYPA

SEQ ID NO: 9888 - protein, 165 aa, Triticum aestivum
  unsure (1)..(165): unsure at all Xaa locations
FFLTDLRASPAYLFLLVRNCRRLKTLKISDCFMSDLVDLFRTAETLQDFAGGSFDDQDQGGNYANYYFPPSVQRLSLLYMGTNEMQILFPYGATLKKLDLQFTFLTTEDHCQLVQRCPNLEVLEVRDVIGDRGLEVVARTCKKLQRLRVERGDDDQGGLEDXQGX

SEQ ID NO: 9889 - protein, 189 aa, Triticum aestivum
  unsure (1)..(189): unsure at all Xaa locations
ARDFPIPIPYPLSFSHSTPRRTRPPALPQPPSSQPHPPPHTPVEIRGGTDRGADRGSAPXXMGGDXXRHLGRTMSFXXIPDVALGLVMGCVEDPWDRDAISLVCRHWCKVDALSRKHVTVAMAYSTTPDRLFRRFPCLEALKLKAKPRASMFNLIPQDWGGSASPWIRELSASFHFLKGLLLRRMIVSD

SEQ ID NO: 9890 - protein, 630 aa, Oryza sativa (japonica cultivar-group)
MPPYETARAEPASNNKQRPISGETAAGSSRSGPDPMGGEVPEPRRLNRALSFDDWVPDEALHLVMGHVEDPRDREAASRVCRRWHRIDALTRKHVTVAFCYAARPARLRERFPRLESLSLKGKPRAAMYGLIPDDWGAYAAPWIDELAAPLECLKALHLRRMTVTDADIAALVRARGHMLQELKLDKCIGFSTDALRLVARSCRSLRTLFLEECHITDKGGEWLHELAVNNSVLVTLNFYMTELKVAPADLELLAKNCKSLISLKMSECDLSDLISFFQTANALQDFAGGAFYEVGELTKYEKVKFPPRLCFLGLTYMGTNEMPVIFPFSMKLKKLDLQYTFLTTEDHCQIIAKCPNLLILEVRNVIGDRGLEVVGDTCKKLRRLRIERGDDDPGLQEEQGGVSQLGLTAVAVGCRELEYIAAYVSDITNGALESIGTFCKNLYDFRLVLLDRERQVTDLPLDNGVCALLRNCTKLRRFALYLRPGGLSDDGLSYIGQYSGNIQYMLLGNVGESDHGLIRFAVGCTNLQKLELRSCCFSERALSLAVLQMPSLRYIWVQGYRASQTGLDLLLMARPFWNIEFTPPSPESFNHMTEDGEPCVDSHAQVLAYYSLAGRRSDCPQWVIPLHPA

SEQ ID NO: 9891 - protein, 598 aa, Oryza sativa
  unsure (1)..(598): unsure at all Xaa locations
MGGEVPEPRRLNRALSFDDWVPDEALHLVMGHVEDPRDREAASRVCRRWHRIDALTRKHVTVAFCYAARPARLRERFPRLESLSLKGKPRAAMYGLIPDDWGAYAAPWIDELAAPLECLKALHLRRMTVTDADIAALVRARGHMLQELKLDKCIGFSTDALRLVARSCRSLRTLFLEECHITDKGGEWLHELAVNNSVLVTLNFYMTELKVAPADLELLAKNCKSLISLKMSECDLSDLISFFQTANALQDFAGGAFYEVGELTKYEKVKFPPRLCFLGLTYMGTNEMPVIFPFSMKLKKLDLQYTFLTTEDHCQIIAKCPNLLILEVRNVIGDRGLEVVGDTCKKLRRLRIERGDDDPGLQEEQGGVSQLGLTAVAVGCRELEYIAAYVSDITNGALESIGTFCKNLYDFRLVLLDRERQVTDLPLDNGVCALLRNCTKLRRFALYLRPGGLSDDGLSYIGQYSGNIQYMLLGNVGESDHGLIRFAVGCTNLQKLELRSCCFSEXRALSLAVLXQMPSLRYIWVQGYRASQTGLDLLLMARPFWNIEFTPPRRVLIIXQKMENPXVDSHAQVLAYYSLAGRRSDCPQWVIPLHPAXL

SEQ ID NO: 9892 - protein, 422 aa, Mus musculus
MFSNSDEAVINKKLPKELLLRIFSFLDVVTLCRCAQVSRAWNVLALDGSNWQRIDLFDFQRDIEGRVVENISKRCGGFLRKLSLRGCLGVGDNALRTFAQNCRNIEVLSLNGCTKTTDATCTSLSKFCSKLRHLDLASCTSITNMSLKALSEGCPLLEQLNISWCDQVTKDGIQALVRGCGGLKALFLKGCTQLEDEALKYIGAHCPELVTLNLQTCLQITDEGLITICRGCHKLQSLCASGCSNITDAILNALGQNCPRLRILEVARCSQLTDVGFTTLARNCHELEKMDLEECVQITDSTLIQLSIHCPRLQVLSLSHCELITDDGIRHLGNGACAHDQLEVIELDNCPLITDASLEHLKSCHSLERIELYDCQQITRAGIKRLRTHLPNIKVHAYFAPVTPPPSVGGSRQRFCRCCIIL

SEQ ID NO: 9893 - protein, 423 aa, Mus musculus
MVFSNSDDGLINKKLPKELLLRIFSFLDIVTLCRCAQISKAWNILALDGSNWQRVDLFNFQTDVEGRVVENISKRCGGFLRKLSLRGCIGVGDSSLKTFAQNCRNIEHLNLNGCTKITDSTCYSLSRFCSKLKHLDLTSCVSVTNSSLKGISEGCRNLEYLNLSWCDQITKEGIEALVRGCRGLKALLLRGCTQLEDEALKHIQNHCHELVSLNLQSCSRITDDGVVQICRGCHRLQALCLSGCSNLTDASLTALGLNCPRLQVLEAARCSHLTDAGFTLLARNCHELEKMDLEECVLITDSTLVQLSIHCPKLQALSLSHCELITDEGILHLSSSTCGHERLRVLELDNCLLVTDASLEHLENCRGLERLELYDCQQVTRAGIKRMRAQLPHVKVHAYFAPVTPPPAVAGSGHRLCRCCVIL

SEQ ID NO: 9894 - protein, 422 aa, Mus musculus
MFSNSDEAVINKKLPKELLLRIFSFPDVVTLCRCAQVSRAWNVLALDGSNWQRIDLFDFQRDIEGRVVENISKRCGGFLRKLSLRGCLGVGDNALRTFAQNCRNIEVLSLNGCTKTTDATCTSLSKFCSKLRHLDLASCTSITNMSLKALSEGCPLLEQLNISWCDQVTKDGIQALVRGCGGLKALFLKGCTQLEDEALKYIGAHCPELVTLNLQTCLQITDEGLITICRGCHKLQSLCASGCSNITDAILNALGQNCPRLRILEVARCSQLTDVGFTTLARNCHELEKMDLEECVQITDSTLIQLSIHCPRLQVLSLSHCELITDDGIRHLGNGACAHDQLEVIELDNCPLITDASLEHLKSCPSFERIELYDCQQITRAGIKRLRTHLPNIKVHAYFAPVTPPPSVGGSRQRFCRCCIIL

SEQ ID NO: 9895 - protein, 423 aa, Mus musculus
MVFSNSDDGLINKKLPKELLLRIFSFLDIVTLCRCAQISKAWNILALDGSNWQRVDLFNFQTDVEGRVVENISKRCGGFLRKLSLRGCIGVGDSSLKTFAQNCRNIEHLNLNGCTKITDSTCYSLSRFCSKLKHLDLTSCVSVTNSSLKGISEGCRNLEYLNLSWCDQITKEGIEALVRGCRGLKALLLRGCTQLEDEALKHIQNHCHELVSLNLQSCSRITDDGVVQICRGCHRLQALCLSGCSNLTDASLTALGLNCPRLQVLEAARCSHLTDASFTLLARNCHELEKMDLEECVLITDSTLVQLSIHCPKLQALSLSHCELITDEGILHLSSSTCGHERLRVLELDNCLLVTDASLEHLENCRGLERLELYDCQQVTRAGIKRMRAQLPHVKVHAYFAPVTPPPAVAGSGHRLCRCCVIL

SEQ ID NO: 9896 - protein, 431 aa, Mus musculus
MPTDFARISEWKGFVHIFILHHRGDSGYGSLPAPDPPHSPTHSARLQTPERASQHRQAPGPLHGADLLLPAHQPAMSLCTCVPPLVQPGLGPAPLEDYPSHWRDHQCGPCPESTDPQALPGHPQCVSHAGDCHCQWLPAAHRPGALYHCTVLSRTEAPGSLRMLQYLERGCIEWVTLPNLEHLDVSGCSKVTCISLTREASIKLSPLHGKQISIRYLDMTDCFVLEDEGLHTIAAHCTQLTHLYLRRCVRLTDEGLRYLVIYCTSIKELSVSDCRFVSDFGLREIAKLESRLRYLSIAHCGRITDVGIRYVAKYCSKLRYLNARGCEGITDHGVEYLAKNCTKLKSLDIGKCPLVSDTGLESLALNCFNLKRLSLKSCESITGQGLQIVAANCFDLQMLNVQDCEVSVEALRFVKRHCKRCVIEHTNPAFF

SEQ ID NO: 9897 - protein, 400 aa, Mus musculus
METHISCLFPELLAMIFGYLDFRDKGRAAQVCTAWRDAAYHKSVWRGVEAKLHLRRANPSLFPSLQARGIRRVQILSLRRSLSYVIQGMANIESLNLSGCYNLTDNGLGHAFVQEIGSLRALNLSLCKQITDSSLGRIAQYLKGLEVLELGGCSNITNTGLLLIAWGLQRLKSLNLRSCRHLSDVGIGHLAGMTRSAAEGCLGLEQLTLQDCQKLTDLSLKHISRGLTGLRLLNLSFCGGISDAGLLHLSHMGSLRSLNLRSCDNISDTGIMHLAMGSLRLSGLDVSFCDKVGDQSLAYIAQGLDGLKSLSLCSCHISDDGINRMVRQMHGLRTLNIGQCVRITDKGLELIAEHLSQLTGIDLYGCTRITKRGLERITQLPCLKVLNLGLWQMTDSEKVR

SEQ ID NO: 9898 - protein, 327 aa, Mus musculus
QILSLRRSLSYVIQGMANIESLNLSGCYNLTDNGLGHAFVQEIGSLRALNLSLCKQITDSSLGRIAQYLKGLEVLELGGCSNITNTGLLLIAWGLQRLKSLNLRSCRHLSDVGIGHLAGMTRSAAEGCLGLEQLTLQDCQKLTDLSLKHISRGLTGLRLLNLSFCGGISDAGLLHLSHMGSLRSLNLRSCDNISDTGIMHLAMGSLRLSGLDVSFCDKVGDQSLAYIAQGLDGLKSLSLCSCHISDDGINRMVRQMHGLRTLNIGQCVRITDKGLELIAEHLSQLTGIDLYGCTRITKRGLERITQLPCLKVLNLGLWQMTDSEKVR

SEQ ID NO: 9899 - protein, 400 aa, Mus musculus
METHISCLFPELLAMIFGYLDVRDKGRAAQVCTAWRDAAYHKSVWRGVEAKLHLRRANPSLFPSLQARGIRRVQILSLRRSLSYVIQGMANIESLNLSGCYNLTDNGLGHAFVQEIGSLRALNLSLCKQITDSSLGRIAQYLKGLEVLELGGCSNITNTGLLLIAWGLQRLKSLNLRSCRHLSDVGIGHLAGMTRSAAEGCLGLEQLTLQDCQKLTDLSLKHISRGLTGLRLLNLSFCGGISDAGLLHLSHMGSLRSLNLRSCDNISDTGIMHLAMGSLRLSGLDVSFCDKVGDQSLAYIAQGLDGLKSLSLCSCHISDDGINRMVRQMHGLRTLNIGQCVRITDKGLELIAEHLSQLTGIDLYGCTRITKRGLERITQLPCLKVLNLGLWQMTDSEKVR

SEQ ID NO: 9900 - protein, 745 aa, Mus musculus
MILAIIKRGLENLLWDTCIHPSLKSRVRRLSETYLDELFGLDDQLVTPELMIKACTFYTGHLVKTHFSGWKKVAIPRANQEEIMAEKMDKAIAHDNFRCQKYIFNRWFAYTVMSRERLITTLLRLRHLFYMQRQRIILAKWKERARHKSKTREDDLISKHELQLKKWKFKLGKPISLEGSLSDIAVENRRIAFDISVLPEQAILQIFLYLTFKDMMACSRVNRSWMAMIQRGSLWNSIDFSTVKNIADKCVVTTLQKWRLNVLRLNFRGCDFRTKTLKAVSHCKNLQELNVSDCQSFTDESMRHISEGCPGVLYLNLSNTTITNRTMRLLPKYFHNLQNLSLAYCEKFTDKGLQYLNLGNGCHKLIYLDLSGCTQVLVEKCPRISSVVLIGSPHISDSAFKALSSCDLKKIRFEGNKRISDACFKSIDRNYPGINHIYMVDCKGLTDSSLKSLSLLKQLTVLNLTNCIRIGDIGLKHFFDGPASIRLRELNLTNCSLLGDSSVIRLSERCPNLHYLNLRNCEHLTDLAIEYIASMLSLISVDLSGTLISNEGMTILSRHRKLREVSVSDCVNITDFGIRAYCKTSLLLEHLDVSYCSQLTDDIIKTIAIFCTRITSLNIAGCPKITDAGMEILSARCHYLHILDISGCIQLTDQIIQDLQIGCKQLRILKMQFCKSISPAAAQKMSSVVQHQEYNSDNPPHWFGYDSEGNPLDKIHSRVQLRTYSKLIVKEPFSIDEEDPDSKHQ

SEQ ID NO: 9901 - protein, 745 aa, Mus musculus
MILAIIKRGLENLLWDTCIHPSLKSRVRRLSETYLDELFGLDDQLVTPELMIKACTFYTGHLVKTHFSGWKKVAIPRANQEEIMAEKMDKAIAHDNFRCQKYIFNRWFAYTVMSRERLITTLLRLRHLFYMQRQRIILAKWKERARHKSKTREDDLISKHELQLKKWKFKLGKPISLEGSLSDIAVENRRIAFDISVLPEQAILQIFLYLTFKDMMACSRVNRSWMAMIQRGSLWNSIDFSTVKNIADKCVVTTLQKWRLNVLRLNFRGCDFRTKTLKAVSHCKNLQELNVSDCQSFTDESMRHISEGCPGVLYLNLSNTTITNRTMRLLPRYFHNLQNLSLAYCRKFTDKGLQYLNLGNGCHKLIYLDLSGCTQVLVEKCPRISSVVLIGSPHISDSAFKALSSCDLKKIRFEGNKRISDACFKSIDRNYPGINHIYMVDCKGLTDSSLKSLSLLKQLTVLNLTNCIRIGDIGLKHFFDGPASIRLRELNLTNCSLLGDSSVIRLSERCPNLHYLNLRNCEHLTDLAIEYIASMLSLISVDLSGTLISNEGMTILSRHRKLREVSVSDCVNITDFGIRAYCKTSLLLEHLDVSYCSQLTDDIIKTIAIFCTRITSLNIAGCPKITDAGMEILSARCHYLHILDISGCIQLTDQIIQDLQIGCKQLRILKMQFCKSISPAAAQKMSSVVQHQEYNSDNPPHWFGYDSEGNPLDKIHSRVQLRTYSKLIVKEPFSIDEEDPDSKHQ

SEQ ID NO: 9902 - protein, 435 aa, Mus musculus
RPPDAGCCQAPEQPPPPLCPAPASPASECAPIVAAAGDTVRAGGTAPSSAQQQPESGDADCQEPPENPCDCHREPPPEIPDINQLPPSILLKIFSNLSLNERCLSASLVCKYWRDLCLDFQFWKQLDLSSRQQVTDELLEKIASRSQNIIEINISDCRSLSDSGVCVLAFKCPGLLRYTAYRCKQLSDTSIIAVASHCPLLQKVHVGNQDKLTDEGLKQLGSRCRELKDIHFGQCYKISDEGMIVIAKSCLKLQRIYMQENKLVTDQSVKAFAEHCPELQYVGFMGCSVTSKGVIHLTKLRNLSSLDLRHITELDNETVMEIVKRCKNLSSLNLCLNWIINDRCVEVIAKEGQNLKELYLVSCKITDYALIAIGRYSVTIETVDVGWCKEITDQGATLIAQSSKSLRYLGLMRCDKVNELTVEQLVQQYPHITFS

SEQ ID NO: 9903 - protein, 621 aa, Mus musculus
MSPVFPMLTVLTMFYYMCLRRRARTATRGDMMNSHRTIVSNSRTSPLNAEVVQYAKEVVDFSSHYGSENSMSYTMWNLAGVPNVFPSSGDFTQTAVFRTYGTWWDQCPSASLPFRRTPSSFQSQDYVELTFEQQVYPTAVHVLETYHPGAVIRILACSANPYSPNPPAEVRWEILWSERPMKVNASQARQFKPCIKQINFPTNLIRLEVNSSLLDYYTELDAVVLHGTKDKPLLSLKTALVDMNDLEDDDYEEKDGCEMDALNKKFSSAALGDGPHNGYFDKLPYELIQLILNHLSLPDLCRLAQTCRLLHQHCCDPLQYIHLNLQPYWARLDDTSLEFLQARCVLVQWLNLSWTGNRGFISVSGFSRFLKVCGSELVRLELSCSHFLNDTCLEVISEMCPNLQDLNLSSCDKLPPQAFGHIAKLCSLKRLVLYRTKVEQTALLSILNFCAELQHLSLGSCVMIEDYDVIASMIGAKCKNLRTLDLWRCKNITENGIAELASGCVLLEELDLGWCPTLQSSTGCFVRLARQLPNLQKLFLTANRSVCDTDIEELASNCTRLQQLDILGTRMVSPASLRKLLESCKDLSLLDVSFCSQIDNKAVLELNASFPKVFIKKSFTQ

SEQ ID NO: 9904 - protein, 276 aa, Rattus norvegicus
MRRDVNGVTKSRFEMFSNSDEAVINKKLPKELLLRIFSFLDVVTLCRCAQVSRAWNVLALDGSNWQRIDLFDFQRDIEGRVVENISKRCGGFLRKLSLRGCLGVGDNALRTFAQNCRNIEVLSLNGCTKTTDATCTSLSKFCSKLRHLDLASCTSITNMSLKALSEGCPLLEQLNISWCDQVTKDGIQALVRGCGGLKALFLKGCTQLEDEALKYIGAHCPELVTLNLQTCLQITDEGLITICRGCHKLQSLCASGCSNITDAILNALGQNCPRLR

SEQ ID NO: 9905 - protein, 1056 aa, Rattus norvegicus
MGAPLSSAKGVGAPLSSAKGTGAPLSSAKGTGASLSSAKGTGAPLSGAKGMGAPLSSAKGTGAPLSSAKGTGAPLSSAKGVGAPLSSAKGVGASLSGAKGMGALLSSAKGTGAPLSSAKGTGAPLSSAKGMGAPLSSAKGTGAPLSGAKGMGAPLSSAKGTGAPLSSAKGTGAPLSSAKGGRARFPGKRLRQFRRRGRVPLSRGAGAEDAKGAARLADSWGAGPITPILSLRRSLSYVIQGMANIESLNLSGCYNLTDNGLGHAFVQEIGSLRALNLSLCKQITDSSLGRIAQYLKGLEVLELGGCSNITNTGLLLIAWGLQRLKSLNLRSCRHLSDVGIGHLAGMTRSAAEGCLGLEQLTLQDCQKLTDLSLKHISRGLTGLRLLNLSFCGGISDAGLLHLSHMGSLRSLNLRSCDNISDTGIMHLAMGSLRLSGLDVSFCDKVGDQSLAYIAQGLDGLKSLSLCSCHISDDGINRMVRQMHGLRTLNIGQCVRITDKGLELIAEHLSQLTGIDLYGCTRITKRGLERITQLPCLKVLNLGLWQMTDSEKPSRPRTHYMATAAPDRQGITVCTAHPADTRRMGITCSVEQPVMSCCLSVMAAHIMGPGCGSWTRRTLTTDGTVLSTGTESGSGPPTWESVSSNSRQVSTMRILVTHVQPGEVMVTDGKVEPSRLGGIATLVRMEKSENPHCLQSLSAPQTDSGEGPEQATPTQSDEPAAELSAKGKKPPKKKNHPKRANKAGASFPLGREGIKQTRLLPTPSTSSGTARRKAGEAQPGEATRSARGASPAPGHAPNERRAPGRSRPTCPRQAPARGPSFVRSGPRCRSPRAPFPPPGHTAPSAGAGPTPELTCRGCGVGSSAGPDSLCSARGPLAQPPRTPHRRPEPARPECRICPEGRRLRGLGSGETRRPYRPFRRRCGRRRPRPGSRDPGKFRPRLSGASLEASRSRFLTTLDNIDSRKPKMLLFSHSRTPEISTSGWDRRDVFLPPFLPAYGPAASPGKSLVQLSAQVQAKGRELGQGVGTASIGSGSVAGAALPPFLLLLLRLLQDIELD

SEQ ID NO: 9906 - protein, 421 aa, Anopheles gambiae str. PEST
SCIIPDDEISRKLPKEILLRILSYLDVTSLCRCGQVSRYWNILALDGSNWQKIDLFDFQRDIEGPVIENISQRCGGFLKYLRLRGCQSVGSHSIRTLANYCHNIEHLDLSECKKISDVAIQQLSKNCAKLTAINLESCSQISDSSLKALSDGCPNLSEINVSWCNLITENGVEALARGCNKIKKFSSKGCKQVNDRAVIALALYCPGIEVLNLHSCDSITDASISKIAEKCCNLKQLCVSKCTELTDQSLTALAMNNQYLNTLEVAGCAQFTDSGFIALAKNCKYLERMDLEECSLITDATLQNLALGCPSLEKLTLSHCELITDEGIRQLAGGGCAAESLSVLELDNCPLITDATLEHLISCHNLQRIELYDCQLISRNAIRRLRNHLPNIKVHAYFAPVTPPPTINGPRPRYCRCCEIL

SEQ ID NO: 9907 - protein, 836 aa, Anopheles gambiae str. PEST
RRVAPVECPLASLGRNTPSMDTRQYHHPLSSSPLDPQAYQMSRSSPILTLDSDLYPSDCGKPDQGPPDGLVPDGGGGGSGGGANGNGSLLSRSSSSSLDQTGSFLRQALPLPLHPPPTNGHHGHRRDYRPVRPRTYTPIDALLTNTYQQHHQRLSPVLRGPPGGSGGGGGGGGGGGGGGYHHPDEPQSALGGLSEADRYFLEEKMDALYIQGAIRRNANATPSSLTRNQSSSSNNTERYYLENENIDAIYNFCRRNGGGGGGGGIGPPPGTVAAHNAHNAASKASSAAQSQVDCLDSSSPHLLRRASSPETSGSDRYLLDRIRGSPAFQSPRGTHLKAVGSADFIDGRIPLTKSQHYTDGLSRYGRFSPNLDQGYHTLVSPSPSGQQQSTIPASWTTGGTHGSGGGGTNSTSSSHGSPAQTNTPVGGNGSANGNGPCGRSIDGATILTSLGNGHGTSLYRAGPLFDRMPDELMVRIFEWLDSSELCNIARVCRRFESVIWNPALWKIIKIKGEENSGDRAIKTILRRLCGQTRNGACPGVERVLLADGCRLTDRGLQLLSRRCPEITHLQIQNSVTITNQALSDLVTKCTNLQHLDITGCAQITCININPGLEPPRRLLLQYLDLTDCASICDAGIKVIARNCPLLVYLYLRRCIQVTDAGLKFIPNFCIALRELSVSDCTSVTDFGLYELAKLGATLRYLSVAKCDQVSDAGLKVIARRCYKLRYLNARGCEAVSDDSINVLARSCPRLRALDIGKCDVSDAGLRALAESCPNLKKLSLRNCDMITDRGIQCIAYYCRGLQQLNIQDCQISIEGYRAVKKYCKRCIIEHTNPGFC

SEQ ID NO: 9908 - protein, 435 aa, Anopheles gambiae str. PEST
EIPGGFISHRPHTITGGHHHRYAPYSVVLHQPHLQQTAASPTIYTIPSHHFPHRAHPHLPHPGHHAAHHHHNLHGTIHSTNRPKSPNTPPPQPVEEEGTHIGHLYPEILAMIFAKLNVKDRGRAAQVCTVWRDAAYAKSCWRGVEASLHLRRPSPTLFGSLVKRGIKRVQVLSVRRALKDIVTGVPNLESLNLSGCYNITDMAIGHAFAADFPNLKVLNLSLCKQVTDSSLGRITQHLKNIEVLELGGCSNITNTGLLLISWGLKKLRRLNLRSCWHISDHGIGHLAGLSKETADGTPALEYLGLQDCQRLSDEALRHIAQGLTSLRSINLSFCVSVTDSGLKHLARMSRLEELNLRACDNISDIGMAYLTEGCNSISTLDVSFCDKVADQAMVHISQGLFQLRSLSLSACQITDEGLSRIAKSLHDLETLNIGH

SEQ ID NO: 9909 - protein, 573 aa, Anopheles gambiae str. PEST
LLIKLFQYLNPSDRSAAALVCRSWYDAFRYIEFQRAVRLHIHDIEFVDNGHPLNKLMTSFRYFTDVRITKVVFGNKSEFWSEFGDGIEELTFDNCVIWKHKLVSILKYMPRLRRLHVLNCPDLFKAWKLIENTTVTWNLVMPELRHLSLARNNRFQDFHFDQLVQLAPRLDSLDVSECFSSIEARQRVLMLNHILEFVRTTCDRLRHLFLAGTPIDNVFLRGLADIRALSLRSLALMVCEKIPTNEPGIIDLLRAQTGLTHLDLSKSLALNDYALIQISRSIPQLETLILNRCWMITDYGITAIKSLVRLRHIDLTNCERITDAGLVGGLFTHNRRNVRKLYLGLLTNMSDAALTKVSFEFCDLVVLDLGGCSNSINDLSIQYIFYHMTKLQELNLDCCAKISDAGITGVNLEEKAFAIWDIELSFSIADLIGLRSLKLAGCYKITDYSFERCFNFKELKEISLARLLQISDHGIERLALGCPSLEVVDFSECRTITDRCIEIITKCEPRLTTLKLQNCTQITDKAIRHIVENCRVLRVLNIRGCINISSYAEKKLSAVKSLRYLHGTTPEVI

SEQ ID NO: 9910 - protein, 1117 aa, Anopheles gambiae str. PEST
MELLLKVMKQISVDDRLACGQTCHRWMEAAHYYLPFSDRIIYRFTNVNFTDYEPPIKSFLGAFRIFPRIAIKACTFYGNSQFWPLFGEHVIELTIKNCLIKDTELLYILEHVPNLRQLKIEQCDELFRSWYFEKRQSCCESHFVLPDLLDVSLTNNDFLDELHFNKLMTLAPNIAHLDLSNCFKMIASHRRVAMVEHIMRFINMHQFQLHTLKFNGTLAIDDICLSTLSMIEGLSLETFSMTFCDKIPAAIIDLLRRQPDLNITQDLEWKVGRHPIKAPGFISFLVRQTNLVHLDLTSSLGITDEVMELITTCLPKLKTLKLRRCILVTDEGIMNIVNLVNLEVLDLSNCYRISDHAMYRGVIGRKVKNLHELYLCELPTLSDYSLIQVTLNYEMLQVLDLSNSPNAATDATMQYVNYYLVSLKQLHLYCCTKLTDSGLTGIDLPVKPMITWDQEETFPLDRLFKLRVLNLIGCYRITDLSLENAFKLAELKELHLARCYQISEKGIAVLSQVATALEFIDLSECPLVNDNCIEMLTANLKRLRTLKVNKCPQLTNACLEIIGRNCSYLKMEMSIESWFNLHYYGFGHGVDGGGYDDDEEEEDESEEEKPTPKEPIVEVDDREFPFHDDVFYINLKGPRVRTGFDNLPMEILLNIFRFLNGVDRDAAALTCKRWFDAMGYREFLDEVCFHFEEVSICDGTPPIALFLRSFRHFSNIKLTRVQFNGYCEFWDVFGEYLREITFCNCITLTKSKLTMILKRLPFLECLALEEADEFFKTWTPVELKRIEPVCRCLRKLALRKSNAFTVDHLYYLVAMGPNISALEISKCLKQIDAPTRVKILTTILTIMKMRKKKLQAVDFSYTMYDDLFLKQFAEIENMSLSQISLSFFERAPIKDPGIIDILRCQSAIVHLDLSSFLNLTDFALIEISTSLRMLKTLKLNGCWLLTDFGVESIYKLDRLQVLDLSDCDKISDRGFMKAIVDRRRDCMSQLYLSMLPGLTDSVILKICLTLLNLTVIDFCGSDCMNDTSVQFLFCYLKCLRILRLNGCVKISDAGLTGENLPVAVIEIWDTQTTFAICELRSLQELQLSGCFKVTDFTLTHAFRFRELRELNLAHCVQ

SEQ ID NO: 9911 - protein, 656 aa, Anopheles gambiae str. PEST
LPQQLLLKVMKQISVDDRLACGQTCHRWMEAAHYYLPFSDRIIYRFTNVNFTDYEPPIKSFLGAFRIFPRIAIKACTFYGNSQFWPLFGEHVIELTIKNCLIKDTELLYILEHVPNLRQLKIEQCDELFRSWYFEKRQSCCESHFVLPDLLDVSLTNNDFLDELHFNKLMTLAPNIAHLDLSNCFKMIASHRRVAMVEHIMRFINMHQFQLHTLKFNGTLAIDDICLSTLSMIEGLSLETFSMTFCDKIPAAIIDLLRRQPDLNITQDLEWKVGRHPIKAPGFISFLVRQTNLVHLDLTSSLGITDEVMELITTCLPKLKTLKLRRCILVTDEGIMNIVNLVNLEVLDLSNCYRISDHAMYRGVIGRKVKNLHELYLCELPTLSDYSLIQVTLNYEMLQVLDLSNSPNAATDATMQYVNYYLVSLKQLHLYCCTKLTDSGLTGIDLPVKPMITWDQEETFPLDRLFKLRVLNLIGCYRITDLSLENAFKLAELKELHLARCYQVESFAIWDIELSFSIADLIGLRSLKLAGCYKITDYSFERCFNFKELKEISLARLLQISDHGIERLALGCPSLEVVDFSECRTITDRCIEIITKCEPRLTTLKLQNCTQITDKAIRHIVENCRVLRVLNIRGCINISSYAEKKLSAVKSLRYLH

SEQ ID NO: 9912 - protein, 567 aa, Anopheles gambiae str. PEST
MLKMSSISAQGVVERASAELSKRINGLGLRSKHHHGSGGGGGGGGGKSGEKASVMERVTNVLCGGSSSSNSSNAANLSIQTAGQSQSGGGGGITGGGGGGGHAPEKPSRVSNTTGGGNSAGGKGSMLGMGAGPGGKSQSNTPQSLRKIGHQQHGGGMNHHHLGGAGKMGQSQLALPQILTIEQLLQDERFLARFFLYFTSYERCTLAQVCQKWRDLLYRSPRYWSGLVPVLQCRELRQTTNQDRVKLYNSLIRRSFHAVCLMGATDEDALDLVHSFPLASKHVHSLSLRCSSISDRGLEALLDHLQSLFELELAGCNEITEAGLWACLTPRIVSLSLADCINVADEAVGAVAQLLPSLYEFSLQAYHVTDAALGYFSPKQSHSLSILRLQSCWELTNHGVVNIVHSLPHLTVLSLSGCSKVTDDGVELIAENLQKLRALDLSWCPRITDAALEYIACDLNQLEELTLDRCVHITDIGVGYISTMLSLSALFLRWCTQIRDFGLQHLCSMRNLQVLSLAGCPLLTSSGLSSLIQLRHLQELELTNCPGASQELFGYLREHLPRCLLIE

SEQ ID NO: 9913 - protein, 257 aa, Takifugu rubripes
MQVCKRKCSEVQRCTPCKQPRCTFAAPDVGLEDRGVLSHLTVKERCLCASLVCKYWRDLCLDFQFWKQIDLSGLQQVNDDLLVKIASRRQNITEINISDCRGVHDHGVSSLASHCPSLQKYTAYRCKQLGDASLSALGTHCPLLVKVHVGNQDKLTDEALKKLGEHCSELKDIHLGQCYSITDEGMVALSKGCRKLQRLYLQENKLITKGGKMRICMKFWVQLFGVILLHPPPPNTSAVSIIQPQLHKFNIGGNECV

SEQ ID NO: 9914 - protein, 642 aa, Arabidopsis thaliana
MSTSPSILSVLSEDLLVRVYECLDPPCRKTWRLISKDFLRVDSLTRTTIRILRVEFLPTLLFKYPNLSSLDLSVCPKLDDDVVLRLALDGAISTLGIKSLNLSRSTAVRARGLETLARMCHALERVDVSHCWGFGDREAAALSSATGLRELKMDKCLSLSDVGLARIVVGCSNLNKISLKWCMEISDLGIDLLCKICKGLKSLDVSYLKITNDSIRSIALLVKLEVLDMVSCPLIDDGGLQFLENGSPSLQEVDVTRCDRVSLSGLISIVRGHPDIQLLKASHCVSEVSGSFLKYIKGLKHLKTIWIDGAHVSDSSLVSLSSSCRSLMEIGLSRCVDVTDIGMISLARNCLNLKTLNLACCGFVTDVAISAVAQSCRNLGTLKLESCHLITEKGLQSLGCYSMLVQELDLTDCYGVNDRGLEYISKCSNLQRLKLGLCTNISDKGIFHIGSKCSKLLELDLYRCAGFGDDGLAALSRGCKSLNRLILSYCCELTDTGVEQIRQLELLSHLELRGLKNITGVGLAAIASGCKKLGYLDVKLCENIDDSGFWALAYFSKNLRQINLCNCSVSDTALCMLMSNLSRVQDVDLVHLSRVTVEGFEFALRACCNRLKKLKLLAPLRFLLSSELLETLHARGCRIRWD

SEQ ID NO: 9915 - protein, 562 aa, Glycine max
VVLVVLSQGSASWTRGLRRLVLSRATGLGHVGLEMLIRACPMLEAVDVSHCWGYGDREAAALSCAARLRELNMDKCLGVTDIGLAKIAVGCGKLERLSLKWCLEISDLGIDLLCKKCLDLKFLDVSYLKVASESLRSIASLLKLEVFVMVGCSLVDDVGLRFLEKGCPLLKAIDVPRCDCVSSSGLISVISGHGGLEQLDAGYCLSELSAPLVKCLENLKQLRIIRIDGGRVSDFILQTIGTNCKSLVELGLSKCVGVTNKGIMQLVSGCGNLKILDLTCCQFISDTAISTIADSCPDLVCLKLESCDMVTENCLYQLGLNCSLLKELDLTDCSGIDDIALRYLSRCSELVRLKLGLCTNISDIGLAHIACNCPKMTELDLYRCVRIGDDGLAALTSGCKGLTKLNLSYCNRITDRGLEYISHLGELSDLELRGLSNITSIGIKAVAISCKRLADLDLKHCEKIDDSGFWALAFYSQNLRQINMSYCIVSDMVLCMLMGNLKRLQDAKLVCLSKVSVKGLEVALRACCGRIKKVKLQRSLRFSLSSEMLETMHARGCKIRWD

SEQ ID NO: 9916 - protein, 174 aa, Glycine max
  unsure (1)..(174): unsure at all Xaa locations
PRVRPRVRNDAALRPLAKCSELLVLKLGLCSSISDKGLAFISSSCGKLIELDLYRCNSITDDGLAALANGCKKIKMLNLCYCNKITDTGLGHLGSLEELTNLELRCLVRITGIGISSVAIGCKNLIEIDLKRCYSVDDAGLWALARYALNLRQLTISYCQVTGLGLCHLLSSLX

SEQ ID NO: 9917 - protein, 2159 aa, Dictyostelium discoideum
MSNNNYNKIQSPSSGKRRFLQEIPKGEEDELYSEHFIEIDKLIKQEQEKEENGGFSLPKWPASSTINNNSTQNLFSNFMSDSSSSINSDINSNYTRDNNGMFIVRTDLNTDIPSSHKSTIYSKQQQSPRHQDINSNHYSMTYDSSLLSVSGSNASSNCNTSASSSVNSCNNSIGNLSKVFNLNSSTKSLNNNNNNNNNNNNNMETISGFNNIMKIDNLINHDTNNNNNNNNMITSPSLTTNTTTTTTMTSNNSTPIRSPSPPKTPQHQSVLISPMTPYDVYNSYKFDKLKTTPTSPTSPTKSTRFKEPLLPRSNNNFNNNNNKNSTMSLSGMMSGTFSTSHLSSWVWVKNKHSIVIIGPTGIGKSFLLNTLLHSTFTPSLNSIRPILGNHRLSLKPQHDTTSTSTTSTTNTISTDHIMSNNEYFLLDKLKTKLMNISKSQIDQKMILDQSFYQSINWDKERDNEFERVYTTSQYLTKKIPQVNDSHAFILPQGRLGPNQQFKFTYGAICELNVEFLQESEVRVILWELHQYSEDKTIPMNPNRLQSLQWVYSSVVDGATFDYSNQSSSSSTSSINSGTSGSNRMVRVVEDINSYWDIPIKEKFKKLFGKRIQFKGLGKDHNIDRIYVREKVKEVLSVYGCILNLLHIKLPSSVLFNKREITMISDDSKRGNISKFTITRILDDADQILLSIDYRGLSADLADLLLASKFTQKFSADDGSIQFLELGEHRQFQLQQQLQQKLQQQQVSSPQPQPQQQQQQQQVQQCQSQQSPQQCQSQQSPQQCQSQQSPQQCQSQQSPLQQQQQQQQSPQQLQSPQQLPDIHSFVINQLRKLFKDARNISNIHRILDSFKIIKIKPLLFSSIHLNKSVPPEYKLKGYSSIRQLKEISNVPVLIRLMHVSNNSTWTTQHNLLDKFKQGIAKKPSILNHLVEQQQQQYQQQDALNSTGSKPIPTDKELNDLQEQLTNSFKDTLNVNNNQNNNNNNNNNNNNNNNNNNNNNNNNNNNNNNYNNNNYNNNNYNNYNYNNNNVITKNNNNVINNNNNYNNNINNNNWRNNYNRGVINPPSGIDRITTSFRTRFAGWKRKLLANVSSEASESLFQNKSNECEQMARMEWIKFKMVSPDAVVNINDFCNLVYSTFGGTNAKPDTLSNVNGNNPVILLCKTLLQWTPNFWRENIVERLPTLQEEISSFSKTLLFETNKLLLNRITLPNDEKNYLMKVLHYCQAATDRNISSKISGVQTLFNQNMNLIIYNTCLDTFCSEVTNIKFQQSSVNYHLIMESCFSIIPYAVSTKIQQKLIEILRQGLSYLDSIEKHIEYTIQYLLNSPFRIKRQQQLKPSIDVSDSVIENYVNLVNPITKQSPLKSQSQQTTTTTTTTTTTTTTTTTSSPSNSPKLSTDEMDIETPNKKIKSDNSVNNINNTTETTPTETSPNNSSNVIPTPMIINNQTTTTTTTTSSTISNNNNTNNNNNNNKPMFDNGSCNYIPKQILPPQTADSLIQICVGKIVQNIHSLTSVKGTTIPEEILQKIITLLISQDKIKGGSNDPITNQLDDSLLARLLSPFMQSLDLEGAKFLSTISLKTIGSTCSQLKKLSLANCINIPSDALNSISMSCKNLEVIILKGCYQLSNPGIVSLARGCPNLYVVDLSGCMKITDFAIHELLQNCKQLHTLDLRKCVNLTDGAFQSFNITTLANIDLLECNYISDQTIFNICSTSRNLLSIKLSGKGITDQSLKKISENCQSLTNLDLVLCENITDQGVQLLGKNCLKLSSINLFSSKNLTSSVFDETINNNNNNNNNVNNNNNNNNIVNNNNNNNNNLNNNNNNNNNNMIINIFNQQSWSSLTSLNLNRCITINDTSILTITNQSPLLETLILAMCTDISDESVITIAQRLKNLKNIDLTKCTQISDRGVIEIAKQCKQNLNRLILVSCTQVTDASIIEVANQCSSLIHLDLSQCEKITDQSLLKVSQGLRQLRILCMEECIITDVGVSSLGEISEGYGCQYLEVIKFGYCRFISDSSLIKLAFGCPFVSNLDLSQCSNLITPRAIRSAIKAWPRLHTLRLRGYQSLTNESIVESTPLKLKTVNLSWCANMEDSALIGFLKQCTAIETLDISKCPKITDNSLESILDSCPSIRVINVYGCKEISSFTVQKLSSLGKAIYR

SEQ ID NO: 9918 - protein, 638 aa, Dictyostelium discoideum
MKMDAFSCFGVRNKKKSVLLKQMQAEEKEAQLNRNYFNLLSTELILYILKYMGTHDLCILARISKRFRECCYDSTLWRTLGFSSEMAKKKIDSALKNMELTSRLASVRLINLNNLNIKQKTIDYIVTHTPQLKEIRLHNLRLTEKTSKLLVAKCPNLEQVYMDGGRTSDECLELLANGAVKLKSINLHKVENITTTGICHIIKNTNLSFLNFNGISGWDIRTLAPYCAHFTSMDLGSSNNLSDDDLKALTRQCKKLKFISLKSCKLITDHGVLELIHDCPQLMDLNLASCSKVTRTSVQHVLQNLHNLTTLNLSSFKNIHPITFPKNPYRLLNTLTTIDLSFTDVKDEDIFQLTEYAANLKSLRLVACVEVTDESMLMIATHCKKLFCVDLSRDQQQSSNYSTSKGPMKITFATVEALFLTCQDLQKVALSYSSKNNITKRSVMEVHDRRVSSGLKNINFTLNEESVNNSAIINNSNQGSSNSIINNNNSSNNSIINNNSNNSINNNNNNNNNNNNNNNNNNNNNNNNNNNNNHNNINNNYNPPIPIPFNNNNNNYNNNNNNHNNNNNNNNNQNNNNNNQNNNNQNNSNQNNNNNNNNNNNNNNNNNNNNNNINNINNPNFYNPIIPNNNIPITTNNP

SEQ ID NO: 9919 - protein, 389 aa, Oryza sativa
  unsure (1)..(389): unsure at all Xaa locations
XGTPGLQVLARGDQLAMVCCSCIDDDGLELLGKGSNSLQSVDVSRCDHVTCQGLASLIDGHNFLQKLNAADRMAEMRQSLLSNLPKLKDTLTVPIDGPXEVSSSVLLAIGGCNNLVEIGLSKCNGVTDEGISSLVTQCSHLRVIDLTCCNLLTNNALDSIAENCKMVEHLRLESCSSISEKGLEQIATSCPNLKEIDLTDCGVNDAALQHLAKCSELLVLKLGLCSSISDKGLAFISSSCGKLIELDLYRCNSITDDGLAALANGCKKIKMLNLCYCNKITDTGLGHLGSLEELTNLELRCLVRITGIGISSVAIGCKNLIEIDLKRCYSVDDAGLWALARYALNLRQLTISYCQVTGLGLCHLLSSLRCLQDVKMVHLSWVSIERFEM

SEQ ID NO: 9920 - protein, 296 aa, Oryza sativa
  unsure (1)..(296): unsure at all Xaa locations
HPHLRCAWAIRHEETISSAENCKMVERLRXQYCCSISEKGLEQIATSCPTSKEIDLTDCGVNDAALRPLAKCSELLVLKLGLCSSISDKGLAFISSSCGKLIELDLYRCNSITDDGLAALANGCKKIKMLNLCYCNKITDTGLGHLGSLEELTNLELRCLVRITGIGISSVAIGCKNLIEIDLKRCYSVDDAGLWALARYALNLKQLTISYCQVTGPGXLCHLLSSLRCLQDVKMVHLSWVSIEGFEMALRAACGRLKKLKMLSGLKSVLSPELLQMLQACGCRIRWVNKPLVYKD

SEQ ID NO: 9921 - protein, 659 aa, Triticum aestivum
  unsure (1)..(659): unsure at all Xaa locations
MSEEEAXRYGGGTGGGGVGALSVDLLGQVHRVLERRDRKACRLVSRAFARAEAAHRRALRVLRREPLPRLLRAFPALERLDLSACASLDDASLAAALAGADLGTVRQVCLARASGVGWRGLEALVAACPRLEAVDLSHCVGAGDREAAALAAASGLRELNLEKCLGVTDMGLAKVAVGCPRLENLSFKWCREISDIGVDLLVKKCRELRSLDISYLKVSNESLRSISTLEKLEELAMVACSCIDDEGLELLSRGSNSLQSVDVSRCDHVTSQGLASLIDGHSFLQKLYAADSLHEIGQDFLSKLVTLKATLTVLIDGFEVSSSLLSAIGEGCTNLVEIGLSKCNGVTDEGISSLVACCSYLRTIDLTCCNLVTNNSLDSIADNCKLLECLRLESCSSINEKGLERIASCCPNLKEIDLTDCGVNDEALHHLAKCSELLILKLGLSSSISDKGLGFISSKCGKLIELDLYRCSSITDDGLAALANGCKKIKLLNLCYCNKITDSGLSHLGALEELTNLELRCLVRITGIGISSVVIGCKSLVELDLKRCYSVDDSGLWALARYALNLRQLTISYCQVTGLGLCHLLSSLRCLQDVKMVHLSWVSIEGFEMALRAACGRLKKLKILSGLKTVLSPDLLQLLQACGCRIRWVNKPLVYKDAI

SEQ ID NO: 9922 - protein, 205 aa, Triticum aestivum
  unsure (1)..(205): unsure at all Xaa locations
MSEEEAXRYGGGTGGGGVGALSVDLLGQVHRVLERRDRKACRLVSRAFARAEAAHRRALRVLRREPLPRLLRAFPALERLDLSACASLDDASLAAALAGADLGTVRQVCLARASGVGWRGLEALVAACPRLEAVDLSHCVGAGDREAAALAAASGLRELNLEKCLGVTDMGLAKVAVGCPKLENLSFKWCREISDIGVDLLXKKX

SEQ ID NO: 9923 - protein, 191 aa, Triticum aestivum
  unsure (1)..(191): unsure at all Xaa locations
XILTSKLLPTQGISLVPSKILEITSFCELYIXFNXFSFSXLQVSNESLRSISTLEKLEELAMVACSCIDDEGLELLSRGSNSLQSVDVSRCDHVTSQGLASLIDGHSFLQKLYAADSLHEIGQDFLSKLVTLKATLTVLIDGFEVSSSLLSAIGEGCTNLVEIGLSKCNGVTDEGISSLVACCSYLRTIDX

SEQ ID NO: 9924 - protein, 92 aa, Triticum aestivum
QLTISYCQVTGLGLCHLLSSLRCLQDVKMVHLSWVSIEGFEMALRAACGRLKKLKILSGLKTVLSPDLLQLLQACGCRIRWVNKPLVYKDAI

SEQ ID NO: 9925 - protein, 635 aa, Populus tremula x Populus tremuloides
MITNKKPRSSETDSNYMRDDRTEMSEDDDRSPPSNSITHDSSPTRTCTPGPGSGSSSVPEYLAPYPDQVLENVLENVLWFLTSRKDRNAASLVCRSWYRVEALTRSDLFIGNCYAVSPKRAMSRFTRIRSVTLKGKPRFADFNLMPPYWGAHFAPWVSAMAMTYPWLEKVHLKRMSVTDDDLALLAESFSGFKELVLVCCEGFGTSGLAIVVSRCRQLKVLDLIESDVSDDEVDWISCFPDTETCLESLIFDCVDCPIDFDELERLVARSPSLKKLRLNRYVSIGQLYRLMIRAPHLTHLGTGSFSPSEDVSQVEQGPDYASAFAACKSLVCLSGFREIIPDYLPAINPVCANLTSLNFSFADVSAEQLKPIISNCHKLQIFWVLDSICDEGLQAVAATCKELRELRVFPVDPREDIEGPVSEVGLQAISEGCRKLQSILYFCHRMTNAAVVAMSKNCPDLVVFRLCIMGRHQPDHVTGEPMDEGFGAIVKNCKKLTRLAVSGLLTDRAFAYIGKYGKIVRTLSVAFAGDSDMGLKYVLEGCPRLQKLEIRDSPFGDAALLSGLHHYYNMRFLWMSACKLSRQGCQQITQALPRLVVEVIKHDDNVDMDEYVDTLYMYRSLEGPRDDAPRFVSIL

SEQ ID NO: 9926 - protein, 463 aa, Schizosaccharomyces pombe
MRVPNEVCFNILSYLEADELRCKSTVCTSWRNFIIPTLWEKVVFQNEAQLNNFFDTLQYSKDVSYYFRYLRKLNCSRVRKFLTDKHLMLMTLATGISRLNLSGCTRISEPLIGKLLYQNLNLVTINFSNIFSLPANILEYISDNCPNLKALNIGNCGLVEDTGMVQIIKRCPYLNRLIIPNCRKLTDVSLQILSEKEDLIELDISGCEGFHNADTLSRLVSRNRGLKELSMDGCTELSHFITFLNLNCELDAMRALSLNNLPDLKDSDIELITCKFSKLNSLFLSKCIGLTDSSLLSLTKLSQSLTTLHLGHCYEITDIGVQCLLKSCKNITYIDFGGCLRLSDIAVSAIAKLPYLQRVGLVKCICLTDLSVILLSGSFSRNLERVHLSYCIGLTAKSVSYLMYNCKTLKHLSVTGINSILCTELRSFSRPIPDGINPSQVPVFCAFTKVEIDLFREFIRNRI

SEQ ID NO: 9927 - protein, 1151 aa, Saccharomyces cerevisiae
MDQDNNNHNDSNRLHPPDIHPNLGPQLWLNSSGDFDDNNNNNNNNNNNNSTRPQMPSRTRETATSERNASEVRDATLNNIFRFDSIQRETLLPTNNGQPLNQNFSLTFQPQQQTNALNGIDINTVNTNLMNGVNVQIDQLNRLLPNLPEEERKQIHEFKLIVGKKIQEFLVVIEKRRKKILNEIELDNLKLKELRIDNSPQAISYLHKLQRMRLRALETENMEIRNLRLKILTIIEEYKKSLYAYCHSKLRGQQVENPTDNFIIWINSIDTTESSDLKEGLQDLSRYSRQFINNVLSNPSNQNICTSVTRRSPVFALNMLPSEILHLILDKLNQKYDIVKFLTVSKLWAEIIVKILYYRPHINKKSQLDLFLRTMKLTSEETVFNYRLMIKRLNFSFVGDYMHDTELNYFVGCKNLERLTLVFCKHITSVPISAVLRGCKFLQSVDITGIRDVSDDVFDTLATYCPRVQGFYVPQARNVTFDSLRNFIVHSPMLKRIKITANNNMNDELVELLANKCPLLVEVDITLSPNVTDSSLLKLLTRLVQLREFRITHNTNITDNLFQELSKVVDDMPSLRLIDLSGCENITDKTIESIVNLAPKLRNVFLGKCSRITDASLFQLSKLGKNLQTVHFGHCFNITDNGVRALFHSCTRIQYVDFACCTNLTNRTLYELADLPKLKRIGLVKCTQMTDEGLLNMVSLRGRNDTLERVHLSYCSNLTIYPIYELLMSCPRLSHLSLTAVPSFLRPDITMYCRPAPSDFSENQRQIFCVFSGKGVHKLRHYLVNLTSPAFGPHVDVNDVLTKYIRSKNLIFNGETLEDALRRIITDLNQDSAAIIAATGLNQINGLNNDFLFQNINFERIDEVFSWYLNTFDGIRMSSEEVNSLLLQVNKTFCEDPFSDVDDDQDYVVAPGVNREINSEMCHIVRKFHELNDHIDDFEVNVASLVRVQFQFTGFLLHEMTQTYMQMIELNRQICLVQKTVQESGNIDYQKGLLIWRLLFIDKFIMVVQKYKLSTVVLRLYLKDNITLLTRQRELLIAHQRSAWNNNNDNDANRNANNIVNIVSDAGANDTSNNETNNGNDDNETENPNFWRQFGNRMQISPDQMRNLQMGLRNQNMVRNNNNNTIDESMPDTAIDSQMDEASGTPDEDML

SEQ ID NO: 9928 - protein, 783 aa, Neurospora crassa
MAHGDAAPEAHSEAAQQQAQDDSRSTSSSSTPPPVDNEESDFFLAANDSQSSLGVPNIENMQVADEECRVAPINRLPNELLIAIFVKLTTSSDILHVMLTCKSWARNAVEILWHRPACSSWERHTIICQTLSAPRPYFAYRHFIRRLNLSALAPELNDGSVESLEMCSRVERLTMTGCKRITDAGLLKLLRNNTGLLALDISGMEDITETSINAVAEKCSRLQGLNISNCTKISIASLVQLAQSCRFIKRLKLNECAQVTDEAVIAFAENCPNILEIDLHQCRLIGNDPVTALMSKGKALRELRLASCDLIDDSAFLSLPPNKTYEQLRILDLTSCSRLTDRAVEKIIDVAPRLRNLVLAKCRNITDAAVFAIARLGKNLHYVHLGHCGNITDEAVKRLVQCCNRIRYIDLGCCVHLTDDSVVRLATLPKLKRIGLVKCSNITDESVYALARANQRRPRRDADGNLVPGDCYNNMHHSSLERVHLSYCTNLTLRSVLRLLNACPRLTHLSVTGVQAFLREDLESFCREAPAEFTEHQRAVFCVFSGQGVTNLRRYLNSEHNLTEIARGARPIDEGVPNRVGPVFPGTAVNPMQVTPPGHHGAAAAFIDDGEPDAVDDDDGLEDGSEMVIDTQPMLHNHHAVMGGTAFPIQGVASTEQLLPPPPPAIQPQQHLVTNPFHFVPGQPFAIPPHGLQFYEAVRATESGAVSGTPTHVPLVGQATGLESTIAEGSHHSGVARNSPGTATSQNPDASQAVPPNPMGNIELAILTGNRNPDLGGSGGASV

SEQ ID NO: 9929 - protein, 366 aa, Neurospora crassa
MRLRASLDIIADDRRTPMAHGDAAPEAHSEAAQQQAQDDSRSTSSSSTPPPVDNEESDFFLAANDSQSSLGVPNIENMQVADEECRVAPINRLPNELLIAIFVKLTTSSDILHVMLTCKSWARNAVEILWHRPACSSWERHTIICQTLSAPRPYFAYRHFIRRLNLSALAPELNDGSVESLEMCSRVERLTMTGCKRITDAGLLKLLRNNTGLLALDISGMEDITETSINAVAEKCSRLQGLNISNCTKISIASLVQLAQSCRFIKRLKLNECAQVTDEAVIAFAENCPNILEIDLHQCRLIGNDPVTALMSKGKALRELRLASCDLIDDSAFLSLPPNKTYEQLRILDLTSCSRLTDRAVEKIID

SEQ ID NO: 9930 - protein, 364 aa, Neurospora crassa
MRLRASLDIIADDRRTPMAHGDAAPEAHSEAAQQQAQDDSRSTSSSSTPPPVDNEESDFFLAANDSQSSLGVPNIENMQVADEECRVAPINRLPNELLIAIFVKLTTSSDILHVMLTCKSWARNAVEILWHRPACSSWERHTIICQTLSAPRPYFAYRHFIRRLNLSALAPELNDGSVESLEMCSRVERLTMTGCKRITDAGLLKLLRNNTGLLALDISGMEDITETSINAVAEKCSRLQGLNISNCTKISIASLVQLAQSCRFIKRLKLNECAQVTDEAVIAFAENCPNILEIDLHQCRLIGNDPVTALMSKGKALRELRLASCDLIDDSAFLSLPPNKTYEQLRILDLTSCSRLTDRAVEKI

SEQ ID NO: 9931 - protein, 994 aa, Neurospora crassa
MRRSRTPPPSPYRVLAHHGGPQPPQDSGALIRSFNVETNPTRPIRPSPLTASTIPDMPLDLVDRIRSFPLFVSAPEGFLVAIGTHLKPQVHAAQDHILTEGDEAKAMYWLVRGVVAVTSRDGEAVYAELKPGAFFGEIGVLMDVPRTATIISRTKCLLVVLKKEDLHAELPKYPDMEKAIRQEAQERLTILKKKRQEGRQMANSSSNNLAREAVPGEVSTGESGSIKEGAVVRSKKRKSPSPGVIDDPTISGSALGSGYVNVRKTLKELPLFSTLPPDILHFLGLSAQPKSYSPFTDIVRQGSPGNDIFFIVRGEAEVVHESEKTFSRPRLKQGQYFGEVASLGLSEGRTATVRSITAVECLMIGGDALEELWKRCPPEIRSQVEETARRRIKGTDEDVEMVDAQPEVTFTTPSKPTSPAKDKTQQPTDPDPFLSVDMENIRNRRRNSIVPPTPQTDASAIVNGMKAMTPESSPLRHSVADGSPIPSKRARTLPWRPSTIEDEAKKLSLPDDILVCIFKHMDLLELIRLRIVCRDWRRLLTTSPNLCTHVDLSLINRKVTDWSLVHILAPFIGLRPVEVDISNCFHITDEGFQALWKQCGKNIKVWKMRSVWDVSASQILEMSENAKNLEELDWSNCRKVGDNLLARVVGWVVPEPPPSRSSENGKVVIASSNSRSRRSKPTTANGSATAPAQPPPGTVIGCPNLARLNLSYCKHITDRSMHHLALHASSRLQSLSLTRCTSVTDQGFQTWSPHRFPNLTTLCLADCTHLTDTSIIALVNSCKSLTHLDLSFCCALSDTATEVIALGLPGLRELRMAFCGSAVSDASLGCVALHLNELRGLSVRGCVRVTGVGVENVLEGCGRLEWVDVSQCRNLGGWLVGGGVGRWGFDERVAKKKGGDDALRIMESKAQGGKMGAGGVGGGVQRPRGNNGGLRQSKVLGPGPVMRPIIPPKGVTNHRTRKPIRFVVEKCGLELRLASVSHKRGKVELFASTG

SEQ ID NO: 9932 - protein, 751 aa, Neurospora crassa
MDSQPSRPSTPISASNGMPENGEVMRARSKGREKLLRGLQRISSSPALAPFQRQRSSSSPYHGHSNLSCVSLATPNAPSPFGQTSISSSYFSHGASTASSSVPSTAPTTPGFESPACNVSDPMLAVRKVGHPIHATTSIALPHHKKKLTTFNLWANMPHEIRIHVLSFLTPKELVRTSRVSKDLYNMCYDGQLWTRCDASEFYQQIPAEALAQIIVSAGSFIKDLNLRGCVQLEHHRRAEMVVKASRNLVNATLEGCRNLQRQTLHDLIKRNNRLVNLNLTGLPAVCNTTLRLIAESCPQLEMLNVSWCKHMDAKAIQTVLEGCPKLKDLRVGEVKGFKDLEVAKSIFTTNNLERLVLAGCEDLSDAALQVMMHGVDPEIDVLTNTPMVPPRKLRHLDLSRCNRLTSQGIQALGHLVPDLEGLILSGITTLTDSALEPILASAPRLTHLELEDLGELTNSLLSEHLAKAPCASKLEHLSIGYCGNLGDTGMLPVFRACTSLRSVIMDNTRISDLVLAEAASMVRQRAMDARRRAISVSPQQVSGLPNVTLHLTVYDCGNVTWTGIREVLSRNTEPMKISVPTTDTPSITLTEEPSSSDLTTSMFDTDNKSGTATTTPINPSPTTSTTVGTTTYSCPPTETIALKCYYGWQQTVDEHTKRVLRGSFPSARRLEAKWAQYMQAEEEERAGGDGAGRRRRRRRAREAAMVHANEEGLGHLGEDGEDVWGAGGGDEGMGVAGGRRRARTAVCVVM

SEQ ID NO: 9933 - protein, 846 aa, Trypanosoma brucei
MADPIAVNFRRARFPNTPPAQLLTVIVSYRRGCAPLALLAVSPTARRAVEETGCAIGGLRVIHKNNDVKKCDDVRFVAPEELELAASNKQSLQSAVFGLWWYKRYPFTSLVVDHAGKENMPLIIRLKKALNIKKMVILKSAVTNEMMHIVSMARDLESLTVRNCFSESEASLCSVTSILNSRATNRRDARTFYLSGVTSLGVLRCLRSLTLFATPLSNQIMSYFCECTNLERVVVDSCCGLVSLECFAALQRLTHLSVLNCTITDEGLPPISKCFSLQYVMLDNCMKLRSLNCLGSLRNLRTLIVSRNRIPEEGVQGLRKLRDLEVLRFSVFNRPTAVEFISSLGSLVELDLRDNWVGDAGCASFVHCRQLQQLKLSCCRRVSDVRWLAALTCLRTLDLSHTNVRSRWLESLRACRYLVELNVAYCRDVVEVSFLSELRLLKHLDLSGTDIGEQNLDPIGQCEGLTFLLLKDCSSVKDLHFLETLRELVKLDTERTGIMDANVCQVVACKKLEFLSFRYCHLLTDVKCLEGLRNLKTLDLAGTNVTNEGISSLPKCVSLEYVDVSECCLITHLEFLRPLPNLQQVVADQMNLTDIGGLTGAPSLRRVTLNESKRLGTVGEVRLPYLQELSLRKSTISNAGIRSLLASCRSLQHLDMQHCHSVTELSALSQLPNLRELLLRNIRVTGEFMTHIASCVNLRKLQMTECADITDVNCLSALQSLEDIDLSRTSVTTEGIKGLSKCYALRKLNLSECRYVTNVNCLGKLPFLRELHLEKTNVTDKGIAGLSNCIQLETLALTKCSRITNVERLHSSLPHLEEFDVYGTSVDKFHRCLGGSQRTQHACSVL

SEQ ID NO: 9934 - protein, 1449 aa, Trypanosoma brucei
MKVRITDHNTFWHAPQLLPYNTSPPRLIHRLALLLKKKKHFLNTQHLKESETGTTMSGNQGRKRQRSSSPEQSEALKEPSTTEQNKLTTITITEETRDASNDETVVSLLNEHEKLIKQTTRLESSVKALRCFMSNLTAMSGERQGGVCDDTECIHRVTLYNAADNAFSDEGLYEGALSSLCGRIQAKKLTITLSKGWKFNLEGVSKLKQLEELRIEYPRGKLVNMISLNNLDMLKRLCLRSNNIDNNDIHCIFSVGTLEELAITDTMQLTNIRGISRLTNLKCLELNSTDIDDSCIGEISACVKLSKLSVSECNNITDATPISQLAALEELNVNSCYHITKGIGTLGMLLRLRMLDLSGVPVEDNCLKDLCDCGSLERLNLSYCIQLTDINPLSSATAIEELNLNGCRRITRGIGVVWALPKLRVLHMKDVQLEDSVIGSLGNGNSFVRLSLENCAGFGDMTLLSSIVTLEELNIQKCADIISGVGCLGTLPYLRVLNVKEVHISSLDFTGIGASKSLLQLTLESITGLIDVEALANILTLEKLSLHGCTGIDAGIGCLGNLPQLKMLDLSGTNTDNESLRSLCLSQTMVSLNLSHCWKMTNVSHISSLEALNELNLNNCFGINAGWEAIEKLQQLHVAILSNTHITDRDISHFSKCKNLVTLDLSFCNKLLDVTTLSNITTLEELNLDSCSNIRKGLSVLGELPRLCVLNIKGVELEDSVIGSLGNGNSFVRLSLEHCKGFGDVTPLSNLVTLEELNLHYCDKVTSGMGTLGRLLQLRVLDLGRTQVDNNSLENICTSSIPLVLLNLSHCKKITSISAIASLTALEELNIDNCCNVTSGWNVFGTLHQLRVATLSNTRINDENVRYVSECKSLNTLNLAFCKDITDVTALSKITMLEELNLDCCHNIRKGIETLGKLPKARILSMKECYMGDSDAQQCSILGNSKSLVKLNLERSMGFISVKALSNIATLEELVLDHAREVCCIPSFSCLPRLRVLNLKYTDINGDVTKNISESKSLRLLNLSHCKWVTDISVLSSLSTLEELNVSSCYGIKKGWESLGKLPLLRVAILSDTNITAKDIACLSSCKTLVKLQFSWCEELSDVTVVYEIQSLEELIVKKYSDGLKGLNALGTLPRLRFLHLRNVRGSDISVESIGTSKSLVRLNIEMRGELTDITPLSNITSLEELSLWECRDTLEGAWTLERLPRLRSLDLGLSDISDSTLYYICLSRFITSLNLTSSWKLTDISGISKLTALEELNLRGCHRITSGWEALSELPRLRVLNLESTSVTTRDGGYYISRCKSLVTLNIQLSDMTDASCLANIKTLEELHIGECDELTQGFSALFTLPRLRILNLMGSLITDEDLREIQPPHTIEELNLSYCKNLNDITPLGRIKSIKKLHLSQSHDVRRLREGFRSLLELPCLSWVDLRNVYGWFDVYVELRKRRVHIR

SEQ ID NO: 9935 - protein, 630 aa, Trypanosoma equiperdum
MTGRSTYGMCAVCREPWAEGALELFPCRHVFCTVCVVERWRCPSCQRRIGGRRKANPHLLREIAEVTMELKRYRKGRSGIDVTQMARKLGGGGVTTSSEIFRRLEGSKNGRWKILNLSGCGSELQDLTALRDLEALEDLDLSECANLELRELMVVLTLRNLRKLRMKRTMVNDMWCSSIGLLKFLVHLEVDGSRGVTDITGLCRLKTLEALSLDSCINITKGFDKICALPQLTSLSLCQTNVTDKDLRCIHPDGKLKVLRYSSCHEITDLTAIGGMRSLEKLSLSGCWNVTKGLEELCKFSNLRELDISGCLVLGSAVVLKNLINLKVLSVSNCKNFKDLNGLERLVNLDKLNLSGCHGVSSLGFVANLSNLKELDISGCESLVCFDGLQDLNNLEVLYLRDVKSFTNVGAIKNLSKMRELDLSGCERITSLSGLETLKGLEELSLEGCGEIMSFDPIWSLHHLRVLYVSECGNLEDLSGLEGITGLEELYLHGCRKCTNFGPIWNLRNVCVVELSCCENLEDLSGLQCLTGLEELYLIGCEEITPIGVVGNLRNLKCLSTCWCANLKELGGLDRLVNLEKLDLSGCCGLSSSVFMELMSLPKLQWFYGFGSRVPDIVLEELKRRGVHIF

SEQ ID NO: 9936 - protein, 630 aa, Trypanosoma brucei brucei
MTGRSTYGMCAVCREPWAEGAVELLPCRHVFCTACVVQRWRCPSCQRRIGGRRKANPHLLREIADVTMELKRYRKGRSGIDVTQMARKLGGGGVTTSSEIFRRLEGSKNGRWKILNLSGCGSELQDLTALRDLEALEDLDLSECANLELRELMVVLTLRNLRKLRMKRTMVNDMWCSSIGLLKFLVHLEVDGSRGVTDITGLFRLKTLEALSLDNCINITKGFDKICALPQLTSLSLCQTNVTDKDLRCIHPDGKLKMLDISSCHEITDLTAIGGVRSLEKLSLSGCWNVTKGLEELCKFSNLRELDISGCLVLGSAVVLKNLINLKVLSVSNCKNFKDLNGLERLVNLEKLNLSGCHGVSSLGFVANLSNLKELDISGCESLVCFDGLQDLNNLEVLYLRDVKSFTNVGAIKNLSKMRELDLSGCERITSLSGLETLKGLEELSLEGCGEIMSFDPIWSLYHLRVLYVSECGNLEDLSGLQCLTGLEEMYLHGCRKCTNFGPIWNLRNVCVLELSCCENLDDLSGLQCLTGLEELYLIGCEEITTIGVVGNLRNLKCLSTCWCANLKELGGLERLVNLEKLDLSGCCGLSSSVFMELMSLPKLQWFYGFGSRVPDIVLKELKRRGVHIF

SEQ ID NO: 9937 - protein, 489 aa, Caenorhabditis elegans
METAERISAAASAASSRRAKRLAQQAHKTHPVIQAKQNQMYLITTLSPAQVDNSLINRVLPKEVLLKVFSFLDTKALCRSAQVCRSWSILALDGSNWQRVDLFTFQRDVKTAVVENLARRCGGFLKELSLKGCENVHDSALRTFTSRCPNLEHLSLYRCKRVTDASCENLGRYCHKLNYLNLENCSSITDRAMKYIGDGCPNLSYLNISWCDAIQDRGVQIILSNCKSLDTLILRGCEGLTENVFGSVEAHMGAIKKLNLLQCFQLTDITVQNIANGATALEYLCMSNCNQISDRSLVSLGQHSHNLKVLELSGCTLLGDNGFIPLARGCRQLERLDMEDCSLISDHTINSLANNCTALRELSLSHCELITDESIQNLASKHRETLNVLELDNCPQLTDSTLSHLRHCKALKRIDLYDCQNVSKEAIVRFQVYVDAVLSYDCIYVPCSTRSTENWYKLTKLTKSDINRAPCAHRVEAQLWYSIKNVLKF

SEQ ID NO: 9938 - protein, 461 aa, Caenorhabditis elegans
METAERISAAASAASSRRAKRLAQQAHKTHPVIQAKQNQMYLITTLSPAQVDNSLINRVLPKEVLLKVFSFLDTKALCRSAQVCRSWSILALDGSNWQRVDLFTFQRDVKTAVVENLARRCGGFLKELSLKGCENVHDSALRTFTSRCPNLEHLSLYRCKRVTDASCENLGRYCHKLNYLNLENCSSITDRAMKYIGDGCPNLSYLNISWCDAIQDRGVQIILSNCKSLDTLILRGCEGLTENVFGSVEAHMGAIKKLNLLQCFQLTDITVQNIANGATALEYLCMSNCNQISDRSLVSLGQHSHNLKVLELSGCTLLGDNGFIPLARGCRQLERLDMEDCSLISDHTINSLANNCTALRELSLSHCELITDESIQNLASKHRETLNVLELDNCPQLTDSTLSHLRHCKALKRIDLYDCQNVSKEAIVRFQHHRPNIEIHAYFAPVTPPTDQVVNRGGMLF

SEQ ID NO: 9939 - protein, 466 aa, Caenorhabditis elegans
METAERISAAASAASSRRAKRLAQQAHKTHPVIQAKQNQMYLITTLSPAQVDNSLINRVLPKEVLLKVFSFLDTKALCRSAQVCRSWSILALDGSNWQRVDLFTFQRDVKTAVVENLARRCGGFLKELSLKGCENVHDSALRTFTSRCPNLEHLSLYRCKRVTDASCENLGRYCHKLNYLNLENCSSITDRAMKYIGDGCPNLSYLNISWCDAIQDRGVQIILSNCKSLDTLILRGCEGLTENVFGSVEAHMGAIKKLNLLQCFQLTDITVQNIANGATALEYLCMSNCNQISDRSLVSLGQHSHNLKVLELSGCTLLGDNGFIPLARGCRQLERLDMEDCSLISDHTINSLANNCTALRELSLSHCELITDESIQNLASKHRETLNVLELDNCPQLTDSTLSHLRHCKALKRIDLYDCQNVSKEAIVRFQHHRPNIEIHAYFAPVTPPTDQVVNRGGICRCCVIL

SEQ ID NO: 9940 - protein, 464 aa, Drosophila melanogaster
MESSSDSCSLSSSTTPDVGLADQQRNMAGSAQDQSEDQSQTFLGATELDDELIKQLPKEVLLRVFSYLDVVSLCRCAQVCKYWNVLALDGSSWQKINLFDFQRDIEGPVIENISQRCRGFLKSLSLRGCQSVGDQSVRTLANHCHNIEHLDLSDCKKITDISTQSISRYCSKLTAINLHSCSNITDNSLKYLSDGCPNLMEINVSWCHLISENGVEALARGCVKLRKFSSKGCKQINDNAIMCLAKYCPDLMVLNLHSCETITDSSIRQLAANCHKLQKLCVSKCADLTDLTLLSLSQHNHLLNTLEVSGCRNFTDIGFQALGRNCKYLERMDLEECSQITDLTLAHLATGCPSLEKLTLSHCELITDDGIRHLTTGSCAAEILSVLELDNCPLITDRTLEHLVSCHNLQRIELFDCQLITRTAIRKLKNHLPNIKVHAYFAPGTPPAVTSGHRPRYCRCCEIL

SEQ ID NO: 9941 - protein, 772 aa, Drosophila melanogaster
MSHKTSNRRSSDLECPLASLGRNSNAVRDHYHHPHPLSSSPLDPQAYKMMSRKSPNPGLEVAEALASRSSTPPSDQAGASSTAAAAAVLHMVQQKAATFELRGRHSRPTEQQTSYGAHSTASVGRHAKKSPELPAPASRNVAPVPQPRNFLTLEHVLQFGTQRPSWMHGNSADTEDSSDNNAGGGGAGSGSGGAGGRRRAQGGRCSVPTVLSSNGSGGNGAQYLLDKKMESLYLGNALRTLPLGAEASQFQNERYYLEDYSSGSGNERLPERLHHPRTSSPSETSGSDRYLLNRSSNSNHLHSKGQSLSDGLCNLGRFSPSLDQGYATLVSPSPTGHHSSGGAGNVTNSTTASGAGIMASSTPTTTPRRGASSNGLGGGAASAIGPPPWNRKGPFRCGPLFDRLPDEAVVRIFSWLDSCELCNVARVCRRFEHLAWRPILWKVISLRGEHLNGDKTLKMIFRQLCGQSCNGACPEVERVMLADGCRISDKGLQLLTRRCPELTHLQLQTCVDITNQALVEALTKCSNLQHLDVTGCSQVSSISPNPHMEPPRRLLLQYLDLTDCMAIDDMGLKIVVKNCPQLVYLYLRRCIQVTDAGLKFVPSFCVSLKELSVSDCLNITDFGLYELAKLGAALRYLSVAKCERVSDAGLKVIARRCYKLRYLNARGCEAVSDDSITVLARSCPRLRALDIGKCDVSDAGLRALAESCPNLKKLSLRSCDMITDRGVQCIAYYCRGLQQLNIQDCPVSIEGYRAVKKYCKRCIIEHTNPGFC

SEQ ID NO: 9942 - protein, 538 aa, Drosophila melanogaster
MATNTELLPFHHQTIAVLNNLNSHCGGSGSNGAATSGGAAIGGAGAGGAPSWAMDELYQQTELPGLTRTGATTTHHHLLRFTPYALHHRPPHHQLQTLPPALYLQHAAAAAAAAAAAAAHAQHHHHHHHHLPHRPASPESPPPVEGTHISNLFPELLEQIFEHLPVRDLGRAAQVCTAWRDAAYAKSVWKGVEAKLHLKRSSPSLFNCLVKRGIKKVQILSLRRSLKDLVLGVPALTSLNLSGCFNVADMNLGHAFSVDLPNLKTLDLSLCKQITDTSLGRIAQHLRNLETLELGGCCNITNTGLLLIAWGLKKLKHLNLRSCWHISDQGIGHLAGFSRETAEGNLQLEYLGLQDCQRLSDEALGHIAQGLTSLKSINLSFCVSVTDSGLKHLARMPKLEQLNLRSCDNISDIGMAYLTEGGSGINSLDVSFCDKISDQALTHIAQGLYRLRSLSLNQCQITDHGMLKIAKALHELENLNIGQCSRITDKGLQTLAEDLTNLKTIDLYGCTQLSSKGIDIIMKLPKLQKLNLGLWLVR

SEQ ID NO: 9943 - protein, 666 aa, Drosophila melanogaster
MSSISAQGVVERASAELSKRINGLGLRSKHHHSSTSSGAGGAGDAASPAGATPTPAAPSGKTSVMERVTNALCGGGNSNSNSGSNSSNSNTSSASATAATSPASNANPPQTPDKPSRGSSPSPGGITMPGGQSQVQNSTHHLLQQQQQQQQHMQLQQSQQQHLQLQASTLINSNHHVMVGPAPPTGMPLGAPPTPTVKSIAKQMNITIPGGGVNPGSPTFSTMGMVAAQKAAASAGGTPLQLRKQLPNPHLHHPYGSMGINAASPLIMQHQLHPPPIHSIEQLMLDDRFLSRFFQYFSPYERRILAQVCIKWRDTLYRSPRYWSGLLPTLQCRELRQMPGCDRGKLYNSLIRRGFHALGLVGASDEDALDVVHSFPLASKHVHSLSLRCSSISDRGLETLLDHLQSLFELELAGCNEVTEAGLWACLTPRIVSLSLADCINIADEAVGAVAQLLPSLYEFSLQAYHVTDAALGYFSPKQSHSLSILRLQSCWELTNHGIVNIVHSLPHLTVLSLSGCSKLTDDGVELIAENLQKLRALDLSWCPRITDASLEYIACDLNQLEELTLDRCVHITDIGVGYISTMLSLTALFLRWCSQVRDFGLQHLCSMRNLQVLSLAGCPLLTSSGLSSLIQLRHLQELELTNCPGASHELFDYLKEHLPRCLIIE

SEQ ID NO: 9944 - protein, 666 aa, Drosophila melanogaster
MSSISAQGVVERASAELSKRINGLGLRSKHHHSSTSSGAGGAGDAASPAGATPTPAAPSGKTSVMERVTNALCGGGNSNSNSGSNSSNSNTSSASATAATSPASNANPPQTPDKPSRGSSPSPGGITMPGGQSQVQNSTHHLLQQQQQQQQHMQLQQSQQQHLQLQASTLINSNHHVMVGPAPPTGMPLGAPPTPTVKSIAKQMNITIPGGGVNPGSPTFSTMSMVAAQKAAASAGGTPLQLRKQLPNPHLHHPYGSMGINAASPLIMQHQLHPPPIHSIEQLMLDDRFLSRFFQYFSPYERRILAQVCIKWRDTLYRSPRYWSGLLPTLQCRELRQMPGCDRGKLYNSLIRRGFHALGLVGASDEDALDVVHSFPLASKHVHSLSLRCSSISDRGLETLLDHLQSLFELELAGCNEVTEAGLWACLTPRIVSLSLADCINIADEAVGAVAQLLPSLYEFSLQAYHVTDAALGYFSPKQSHSLSILRLQSCWELTNHGIVNIVHSLPHLTVLSLSGCSKLTDDGVELIAENLQKLRALDLSWCPRITDASLEYIACDLNQLEELTLDRCVHITDIGVGYISTMLSLTALFLRWCSQVRDFGLQHLCSMRNLQVLSLAGCPLLTSSGLSSLIQLRHLQELELTNCPGASHELFDYLKEHLPRCLIIE

SEQ ID NO: 9945 - protein, 689 aa, Drosophila melanogaster
MSGLEYGLHRYDDLPLEIVLKIFSYLGYSDLQAAGSTCQRWHAALDQAEFNQRTRVCFSKVVLSDQLSPGVDLMRCERRFQHFLFEDVTLGQVKELMRFMGRTAQSLALDNVDLNDKQFYGMLGVLPHLHSLSLKRCLPLFMSGSFLDSYNNSCPDLNDLASNLAGIKELTLCENQYLTDAILMRLTSFMPSLEAINMSGCHIAFHNAIHRRFYPATSSSDHVLPSESVLTFKFILTILNLQRRTLRVLNFSHTLIGQALLALCDLNLQLQRLYLAGCRQLNCTTILNFLATQPQLCALDLSATMCVNDENLAALVQTNPQLEHLKVNGCLSITNAGAIHLAKLKCLKSLDISNCDNLTSSGIIEGIASEENPVIQELNVSYLQICEECIKAIASNLRCLRSLHLNHCVNGATDEAIQSVIGQLRWLRELSLEHCSGLTDAALTGINISKLEMSRKQSGSQVSSMDNFYPPYSNTLAERDSLAGSLQSIKISLRSKAEDEIVRDARRKQAMLAAYEMNLIREDDFEGHNIQQLRGLRSLNLRGCNKISDVSLKYGLKHIELRRLMLSNCQQISLLGMEAMASSCPSIEELDLSDCYNITDKTIQVVTSKLPRLKALHISGCSQLTEHTLDAIITNCSCLQTLSIYRCRSMYTDLEERLSGVKTLRNLNMDNLTSIDNAEFFRLKKRLDY

SEQ ID NO: 9946 - protein, 386 aa, Danio rerio
WCLFPEFLAMIFNYLDVKGKGRVAQVCTAWRDASYHKSVWRGVEAKLHLRRANPSLFPSLQTRGIKKVQILSLRRSLSYVIQGMPNIESLNLSGCYNLTDNGLGHAFVQDIPSLRILNLSLCKQITDSSLGRIAQYLKNLELLDLGGCSNITNTGLLLIAWGLHNLKSLNLRSCRHVSDVGIGHLAGMTRSAAEGCLTLEHLTLQDCQKLTDLSLKHISKGLNKLKGLNLSFCGGISDAGMIHLSHMTQLWTLNLRSCDNISDTGIMHLSMGALRLYGLDVSFCDKVGDQSLAYIAQGLYQLKSLSLCSCHISDDGINRMVRQMHELKTLNIGQCVRITDKGLELIADHLTQLTGIDLYGCTKITKRGLERITQLPCLKVFNLGLW

SEQ ID NO: 9947 - protein, 392 aa, Danio rerio
PEFCCLFPELLAMIFSYLDVRDKGRVAQVCTAWRDASYHKSVWRGVEAKLHLRRANPSLFPSLQARGIRRVQTLSLRRSLSYVIQGMPNIESLNLSGCYNLTDNGLGHAFVQEIPSLRVLNLSLCKQITDSSLGRIAQYLKNLEVLELGGCSNITNTGLLLIAWGLHRLKSLNLRSCRHVSDVGIGHLAGMTRSAAEGCLSLEYLTLQDCQKLTDLSLKHISKGLTKLKVLNLSFCGGISDAGMIHLSHMTSLWSLNLRSCDNISDTGIMHLAMGTLRLSGLDVSFCDKIGDQSLACIAQGLYQLKSLSLCSCHISDDGINRMVRQMHELRTLNIGQCVRITDKGLELIADHLTQLTGIDLYGCTKITKRGLERITQLPCLKVFNLGLWQMT

SEQ ID NO: 9948 - protein, 188 aa, Gallus gallus
LTLQDCQKLSDLSLKHLARGLGRLRQLNLSFCGGISDAGLLHLSHMSSLRSLNLRSCDNISDTGIMHLAMGSLRLSGLDVSFCDKVGDQSLAYIAQGLDGLRSLSLCSCHISDEGINRMVRQMHGLRTLNIGQCVRITDKGLELIAEHLSQLTGIDLYGCTRITKRGLERITQLPCPKVLNLGLWQMT

SEQ ID NO: 9949 - protein, 423 aa, Homo sapiens
MVFSNNDEGLINKKLPKELLLRIFSFLDIVTLCRCAQISKAWNILALDGSNWQRIDLFNFQTDVEGRVVENISKRCGGFLKKLSLRGCIGVGDSSLKTFAQNCRNIEHLNLNGCTKITDSTCYSLSRFCSKLKHLDLTSCVSITNSSLKGISEGCRNLEYLNLSWCDQITKDGIEALVRGCRGLKALLLRGCTQLEDEALKHIQNYCHELVSLNLQSCSRITDEGVVQICRGCHRLQALCLSGCSNLTDASLTALGLNCPRLQILEAARCSHLTDAGFTLLARNCHELEKMDLEECILITDSTLIQLSIHCPKLQALSLSHCELITDDGILHLSNSTCGHERLRVLELDNCLLITDVALEHLENCRGLERLELYDCQQVTRAGIKRMRAQLPHVKVHAYFAPVTPPTAVAGSGQRLCRCCVIL

SEQ ID NO: 9950 - protein, 423 aa, Homo sapiens
MVFSNNDEGLINKKLPKELLLRIFSFLDIVTLCRCAQISKAWNILALDGSNWQRIDLFNFQTDVEGRVVENISKRCGGFLRKLSLRGCIGVGDSSLKTFAQNCRNIEHLNLNGCTKITDSTCYSLSRFCSKLKHLDLTSCVSITNSSLKGISEGCRNLEYLNLSWCDQITKDGIEALVRGCRGLKALLLRGCTQLEDEALKHIQNYCHELVSLNLQSCSRITDEGVVQICRGCHRLQALCLSGCSNLTDASLTALGLNCPRLQILEAARCSHLTDAGFTLLARNCHELEKMDLEECILITDSTLIQLSIHCPKLQALSLSHCELITDDGILHLSNSTCGHERLRVLELDNCLLITDVALEHLENCRGLERLELYDCQQVTRAGIKRMRAQLPHVKVHAYFAPVTPPTAVAGSGQRLCRCCVIL

SEQ ID NO: 9951 - protein, 423 aa, Homo sapiens
MVFSNNDEGLINKKLPKELLLRIFSFLDIVTLCRCAQISKAWNILALDGSNWQRIDLFNFQIDVEGRVVENISKRCGGFLRKLSLRGCIGVGDSSLKTFAQNCRNIEHLNLNGCTKITDSTCYSLSRFCSKLKHLDLTSCVSITNSSLKGISEGCRNLEYLNLSWCDQITKDGIEALVRGCRGLKALLLRGCTQLEDEALKHIQNYCHELVSLNLQSCSRITDEGVVQICRGCHRLQALCLSGCSNLTDASLTALGLNCPRLQILEAARCSHLTDAGFTLLARNCHELEKMDLEECILITDSTLIQLSIHCPKLQALSLSHCELITDDGILHLSNSTCGHERLRVLELDNCLLITDVALEHLENCRGLERLELYDCQQVTRAGIKRMRAQLPHVKVHAYFAPVTPPTAVAGSGQRLCRCCVIL

SEQ ID NO: 9952 - protein, 425 aa, Homo sapiens
SAMVFSNNDEGLINKKLPKELLLRIFSFLDIVTLCRCAQISKAWNILALDGSNWQRIDLFNFQIDVEGRVVENISKRCGGFLRKLSLRGCIGVGDSSLKTFAQNCRNIEHLNLNGCTKITDSTCYSLSRFCSKLKHLDLTSCVSITNSSLKGISEGCRNLEYLNLSWCDQITKDGIEALVRGCRGLKALLLRGCTQLEDEALKHIQNYCHELVSLNLQSCSRITDEGVVQICRGCHRLQALCLSGCSNLTDASLTALGLNCPRLQILEAARCSHLTDAGFTLLARNCHELEKMDLEECILITDSTLIQLSIHCPKLQALSLSHCELITDDGILHLSNSTCGHERLRVLELDNCLLITDVALEHLENCRGLERLELYDCQQVTRAGIKRMRAQLPHVKVHAYFAPVTPPTAVAGSGQRLCRCCVIL

SEQ ID NO: 9953 - protein, 423 aa, Homo sapiens
  unsure (1)..(423): unsure at all Xaa locations
MVFSNNDEGLINKKLPKELLLRIFSFLDIVTLCRCAQISKAWNILALDGSNWQRIDLFNFQIDVEGRVVENISKRCVGFLRKLSLRGCIGVGDSSLKTFAQNCRNIEHLNLNGCTKITDSTCYSLSRFCSKLKHLXLTSCVSITNSSLKGISEGCRNLEYLNLSWCDQITKDGIEALVRGCRGLKALLLRGCTQLEDEALKHIQNYCHELVSLNLQSCSRITDEGVVQICRGCHRLQALCLSGCSNLTDASLTALGLNCPRLQILEAARCSHLTDAGFTLLARNCHELEKMDLEXCILITDSTLIQLSIHCPKLQALSLSHCELIXDDGILHLSNSTCGHERLRVLELDNCLLITDVALXHLENCRGLERLELYDCQQVTRAGIKRMRAQLPHVKVHAYFAPVTPPTAVAGSGQRLCRCCVIL

SEQ ID NO: 9954 - protein, 436 aa, Homo sapiens
MRRDVNGVTKSRFEMFSNSDEAVINKKLPKELLLRIFSFLDVVTLCRCAQVSRAWNVLALDGSNWQRIDLFDFQRDIEGRVVENISKRCGGFLRKLSLRGCLGVGDNALRTFAQNCRNIEVLNLNGCTKTTDATCTSLSKFCSKLRHLDLASCTSITNMSLKALSEGCPLLEQLNISWCDQVTKDGIQALVRGCGGLKALFLKGCTQLEDEALKYIGAHCPELVTLNLQTCLQITDEGLITICRGCHKLQSLCASGCSNITDAILNALGQNCPRLRILEVARCSQLTDVGFTTLARNCHELEKMDLEECVQITDSTLIQLSIHCPRLQVLSLSHCELITDDGIRHLGNGACAHDQLEVIELDNCPLITDASLEHLKSCHSLERIELYDCQQITRAGIKRLRTHLPNIKVHAYFAPVTPPPSVGGSRQRFCRCCIIL

SEQ ID NO: 9955 - protein, 483 aa, Homo sapiens
YGSEGKGSSSISSDVSSSTDHTPTKAQKNVATSEDSDLSMRTLSTPSPALICPPNLPGFQNGRGSSTSSSSITGETVAMVHSPPPTRLTHPLIRLASRPQKEQASIDRLPDHSMVQIFSFLPTNQLCRCARVCRRWYNLAWDPRLWRTIRLTGETINVDRALKVLTRRLCQDTPNVCLMLETVTVSGCRRLTDRGLYTIAQCCPELRRLEVSGCYNISNEAVFDVVSLCPNLEHLDVSGCSKVTCISLTREASIKLSPLHGKQISIRYLDMTDCFVLEDEGLHTIAAHCTQLTHLYLRRCVRLTDEGLRYLVIYCASIKELSVSDCRFVSDFGLREIAKLESRLRYLSIAHCGRVTDVGIRYVAKYCSKLRYLNARGCEGITDHGVEYLAKNCTKLKSLDIGKCPLVSDTGLECLALNCFNLKRLSLKSCESITGQGLQIVAANCFDLQTLNVQDCEVSVEALRFVKRHCKRCVIEHTNPAFF

SEQ ID NO: 9956 - protein, 491 aa, Homo sapiens
MGANNGKQYGSEGKGSSSISSDVSSSTDHTPTKAQKNVATSEDSDLSMRTLSTPSPALICPPNLPGFQNGRGSSTSSSSITGETVAMVHSPPPTRLTHPLIRLASRPQKEQASIDRLPDHSMVQIFSFLPTNQLCRCARVCRRWYNLAWDPRLWRTIRLTGETINVDRALKVLTRRLCQDTPNVCLMLETVTVSGCRRLTDRGLYTIAQCCPELRRLEVSGCYNISNEAVFDVVSLCPNLEHLDVSGCSKVTCISLTREASIKLSPLHGKQISIRYLDMTDCFVLEDEGLHTIAAHCTQLTHLYLRRCVRLTDEGLRYLVIYCASIKELSVSDCRFVSDFGLREIAKLESRLRYLSIAHCGRVTDVGIRYVAKYCSKLRYLNARGCEGITDHGVEYLAKNCTKLKSLDIGKCPLVSDTGLECLALNCFNLKRLSLKSCESITGQGLQIVAANCFDLQTLNVQDCEVSVEALRFVKRHCKRCVIEHTNPAFF

SEQ ID NO: 9957 - protein, 523 aa, Homo sapiens
RSRRAGFPRAERAGRAPQLWSVPGDGGHDGYRMGANNGKQYGSEGKGSSSISSDVSSSTDHTPTKAQKNVATSEDSDLSMRTLSTPSPALICPPNLPGFQNGRGSSTSSSSITGETVAMVHSPPPTRLTHPLIRLASRPQKEQASIDRLPDHSMVQIFSFLPTNQLCRCARVCRRWYNLAWDPRLWRTIRLTGETINVDRALKVLTRRLCQDTPNVCLMLETVTVSGCRRLTDRGLYTIAQCCPELRRLEVSGCYNISNEAVFDVVSLCPNLEHLDVSGCSKVTCISLTREASIKLSPLHGKQISIRYLDMTDCFVLEDEGLHTIAAHCTQLTHLYLRRCVRLTDEGLRYLVIYCASIKELSVSDCRFVSDFGLREIAKLESRLRYLSIAHCGRVTDVGIRYVAKYCSKLRYLNARGCEGITDHGVEYLAKNCTKLKSLDIGKCPLVSDTGLECLALNCFNLKRLSLKSCESITGQGLQIVAANCFDLQTLNVQDCEVSVEALRFVKRHCKRCVIEHTNPAFF

SEQ ID NO: 9958 - protein, 418 aa, Homo sapiens
METHISCLFPELLAMIFGYLDVRDKGRAAQVCTAWRDAAYHKSVWRGVEAKLHLRRANPSLFPSLQARGIRRVQILSLRRSLSYVIQGMANIESLNLSGCYNLTDNGLGHAFVQEIGSLRALNLSLCKQITDSSLGRIAQYLKGLEVLELGGCSNITNTGLLLIAWGLQRLKSLNLRSCRHLSDVGIGHLAGMTRSAAEGCLGLEQLTLQDCQKLTDLSLKHISRGLTGLRLLNLSFCGGISDAGLLHLSHMGSLRSLNLRSCDNISDTGIMHLAMGSLRLSGLDVSFCDKVGDQSLAYIAQGLDGLKSLSLCSCHISDDGINRMVRQMHGLRTLNIGQCVRITDKGLELIAEHLSQLTGIDLYGCTRITKRGLERITQLPCLKVLNLGLWQMTDSEKEARGDFSPLFTVRTRGSSRR

SEQ ID NO: 9959 - protein, 707 aa, Homo sapiens
MTPELMIKACSFYTGHLVKTHFCTWRDIARTNENVVLAEKMNRAVTCYNFRLQKSVFHHWHSYMEDQKEKLKNMLLRIQQIIYCHKLTIILTKWRNTARHKSKKKEDELILKHELQLKKWKNRLILKRAAAEESNFPERSSSEVFLVDETLKCDISLLPERAILQIFFYLSLKDVIICGQVNHAWMLMTQLNSLWNAIDFSSVKNVIPDKYIVSTLQRWRLNVLRLNFRGCLLRPKTFRSVSHCRNLQELNVSDCPTFTDESMRHISEGCPGVLCLNLSNTTITNRTMRLLPRHFHNLQNLSLAYCRRFTDKGLQYLNLGNGCHKLIYLDLSGCTQISVQGFRYIANSCTGIMHLTINDMPTLTDNCVKALVEKCSRITSLVFTGAPHISDCTFRALSACKLRKIRFEGNKRVTDASFKFIDKNYPNLSHIYMADCKGITDSSLRSLSPLKQLTVLNLANCVRIGDMGLKQFLDGPASMRIRELNLSNCVRLSDASVMKLSERCPNLNYLSLRNCEHLTAQGIGYIVNIFSLVSIDLSGTDISNEAFCKSSLILEHLDVSYCSQLSDMIIKALAIYCINLTSLSIAGCPKITDSAMEMLSAKCHYLHILDISGCVLLTDQILEDLQIGCKQLRILKMQYCTNISKKAAQRMSSKVQQQEYNTNGPPRWFGYDREGNPVTELDNITSSKGALELTVKKSTYSSEDQAA

SEQ ID NO: 9960 - protein, 381 aa, Homo sapiens
IFSNLSLDERCLSASLVCKYWRDLCLDFQFWKQLDLSSRQQVTDELLEKIASRSQNIIEINISDCRSMSDNGVCVLAFKCPGLLRYTAYRCKQLSDTSIIAVASHCPLLQKVHVGNQDKLTDEGLKQLGSKCRELKDIHFGQCYKISDEGMIVIAKGCLKLQRIYMQENKLVTDQSVKAFAEHCPELQYVGFMGCSVTSKGVIHLTKLRNLSSLDLRHITELDNETVMEIVKRCKNLSSLNLCLNWIINDRCVEVIAKEGQNLKELYLVSCKITDYALIAIGRYSMTIETVDVGWCKEITDQGATLIAQSSKSLRYLGLMRCDKVRVDYQVVCFLHISIVNSLMSYPLSFSISTPVYYILYIHFICIYAIIAMHCLPAFVN

SEQ ID NO: 9961 - protein, 250 aa, Homo sapiens
WEALVRGCRGLKALLLRGCTQLEDEALKHIQNYCHELVSLNLQSCSRITDEGVVQICRGCHRLQALCLSGCSNLTDASLTALGLNCPRLQILEAARCSHLTDAGFTLLARNCHELEKMDLEECILITDSTLIQLSIHCPKLQALSLPHCELITDDGILHLSNSTCGHERLRVLELDNCLLITDVALEHLENCRGLERLELYDCQQVTRAGIKRMRAQLPHVKVHAYFAPVTPPTAVAGSGQRLCRCCVIL

SEQ ID NO: 9962 - protein, 319 aa, Prunus mume
MENFPIINLEGLNGEGRKATMEKIKDACENWGFFELVSHGIPTEFLDTVERLTKEHYRQCLEQRFKELVASKGLEAVKTEVNDMDWESTFYLRHLPKSNISEVPDLEDQYRNVMKEFALKLEKLAEQLLDLLCENLGLEKGYLKKAFYGTNGPTFGTKVSNYPPCPNPELIKGLRAHTDAGGLILLFQDDKVSGLQLLKDGQWIDVPPMRHSIVINLGDQLEVITNGKYRSVEHRVIAQTDGTRMSIASFYNPGSDAVIYPAPTLVEKEAEEKNQVYPKFVFEDYMKLYAGLKFQPKEPRFEAMKAVETNISLVPIATA

SEQ ID NO: 9963 - protein, 319 aa, Populus euramericana
MEFPVISMEKLNGEERAATMEKIKDACENWGFFELLNHGISHEFLDTVERMTKEHYKKCMEQRFKELVASKALDGVQTEIKDLDWESTFQLRHLPKSNIAEIPDLDDEYRKVMKEFALKLEKLAEELLDLLCENLGLEKGYLKRAFYGSNGSPTFGTKVSNYPPCPKPDLVKGLRAHTDAGGIILLFQDDKVSGLQLLKDGQWIDVPPMRHSIVVNLGDQLEVITNGKYKSVEHRVIAQTDGTRMSVASFYNPGSEAVIYPAPALVEKEAEEKKKVYPKFVFDDYMKLYAGLKFQAKEPRFEAMKAVETTVNLGPIATA

SEQ ID NO: 9964 - protein, 412 aa, Rhodopseudomonas palustris
MRQPRPPTTDNSVGKTNSERPQQRNNSSRPTLINSTTDAIFDEASTACRPVRIIRSSRHSWSQSMTASPSQLPVLDLSRFRSDTAERAEFLRDVRDAAFGPGFFYLVGHGISDRLIRDVLFASRNFFALPEADKLDIEMINSPHFRGYTRAGREFTRGQPDWREQLDVGAEREAFPLSRSAPPWTRLQGPNQWPDALPELKPLLLRYQQEVTELAIKVLRVFAAALGQAEDVFEPIYVPSPNQLIKIIRYPGRAADESDQGVGTHKDSGFVTILLQDTVAGLQVETADGWIDAPPLPGSFVVNIGEILELASNGALRANVHRVVSPPPDTDRLSVAFFLGARLDATVPVLTLPPELADYARGVTQDPQNPLFRDVGRNYLKGRLRSHPDVAERHHADLLDEYAIKPGLAAAY

SEQ ID NO: 9965 - protein, 345 aa, Rhodospirillum rubrum
MTMGWDGARQGPPVLSLKAGEGEAARRDEFLATLRQAARDPGAFYLEGHGIDPSVIDQVEALSRRFFALPEDEKRAIDMVNSPHFHGYTRVGAELTRGAPDWREQLDIGSERPLLPQGPDTPAWARLQGPNQWPAALPDLRAAVLRLQAELTAVALALLERIALALGERADFFADLYEGGPDQLLKIIRYPGRAAGEGDQGVGPHKDSGLLTFVLQRDRGGLQIEREGHWVDVPPRPGTFAVNIGELLELATNGYLKATVHRVVSPPADSDRLSIAFFLGARLGSKVPLLDLPPDLAALATGPERDPDNPLFLDVGENRLKGRLRSHPDVARRHYADLLGPDGPS

SEQ ID NO: 9966 - protein, 339 aa, Hordeum vulgare subsp. vulgare
MENILHATPAHVSLPESFVFASDKVPPATKAVVSLPIIDLSCGRDEVRRSILEAGKELGFFQVVNHGVSKQVMRDMEGMCEQFFHLPAADKASLYSEERHKPNRLFSGATYDTGGERYWRDCLRLACPFPVDDSINEWPDTPKGLRDVIEKFTSQTRDVGKELLRLLCEGMGIRADYFEGDLSGGNVILNINHYPSCPNPDKALGQPPHCDRNLITLLLPGAVNGLEVSYKGDWIKVDPAPNAFVVNFGQQLEVVTNGLLRSIEHRAMTNSVLARTSVATFIMPTQECLIGPAKEFLSEENPPCYRTIMFRDFMRIYNVVKLGSSLNLTTNLKNVQKEI

SEQ ID NO: 9967 - protein, 339 aa, Hordeum vulgare subsp. vulgare
MENILHATPAPVSLPESFVFASDKVPPATKAVVSLPIIDLSCGRDEVRRSILEAGKELGFFQVVNHGVSKQVMRDMEGMCEQFFHLPAADKASLYSEERHKPNRLFSGATYDTGGEKYWRDCLRLACPFPVDDSINEWPDTPKGLRDVIEKFTSQTRDVGKELLRLLCEGMGIRADYFEGDLSGGNVILNINHYPSCPNPDKALGQPPHCDRNLITLLLPGAVNGLEVSYKGDWIKVDPAPNAFVVNFGQQLEVVTNGLLKSIEHRAMTNSALARTSVATFIMPTQECLIGPAKEFLSKENPPCYRTTMFRDFMRIYNVVKLGSSLNLTTNLKNVQKEI

SEQ ID NO: 9968 - protein, 261 aa, Psidium guajava
NWGFFELVNHGIPPEMMDTIERMTKGHYKKCMEQRFRELVVSKGLEYVQKEVHDLDWESTFHLKHLPESNISQISDLDDDYRKVMKEFAVKLEKLAEQLLDLLCENLGLEKGYLKKAFYGSNGPTFGTKVSNYPPCPKPDLIKGLRAHTDAGGIILLFQDDKVSGLQLLKDGQWVDVPPMHHSIVVNLGDQLEVITNGKYKSVLHRVVAQTDGNRMSIASFYNPSTDAVIYPAPALVEREEEEAGKGTYPKFVFEDYMKLR

SEQ ID NO: 9969 - protein, 277 aa, Rosa hybrid cultivar
ACENWGFFELVNHGISHELMDKVEKLTKEHYRKCVEQRFKEMVASKGLESVNSEIEDLDWESTFFLRHLPFSNISQIPDLDEDYREAMKEFAVELEKLAEKLLDLLCENLGLDKGYLKKAFYGSEGPNFGTKVSNYPPCPKPDLIKGLRAHTDAGGIILLFQDDKVSGLQLLKDDQWIDVPPMHHSIVINLGDQLEVITNGKYKSVMHRVIAQPDGNRMSIASFYNPGNDAFISPAPAMLEKQTEECPTYPKFVFDDYMKLYAGLKFQAKEPRFEAM

SEQ ID NO: 9970 - protein, 187 aa, Thujopsis dolabrata
ICTYFAQPLHQRDYSRWPLKPEGWREIVDKYSEALMGLASKMLAIVSEALGLEPDAVTKACVEMDQKVVINYYPKCPEPDMTLGLKRHTDPGTITLLLQDQVGGLQATKDDGLNWITVQPVQGAFVVNLGDHMHFLSNGKFKTADHQAVVNSNYSRLSIATFQNPSQDAIVYPLKLEEGEECFMEEP

SEQ ID NO: 9971 - protein, 187 aa, Thujopsis dolabrata
ICTYFAQPLHQRDYSRWPLKPEGWREIVDKYSEALMDLASKMLTIVSEALGLEPDAVTKACVEMDQKVVINYYPKCPEPDMTLGLKRHTDPGTITLLLQDQVGGLQATKDNGLNWITVQPVQGAFVVNLGDHMHYLSNGKFKTADHQAVVNSNYSRLSIATFQNPSQEAIVYPLKLEEGEECFMEEP

SEQ ID NO: 9972 - protein, 317 aa, Vigna radiata
MANFPVVDMGKLNTEERGTAMEMIKDACENWGFFELVNHGISIELMDTVEKLTKEHYKKTMEQRFKEMVANKGLESVQSEINDLDWESTFFLRHLPVSNVSENTDLDQDYRKIMKQFAEELEKLAEHLLDLLCENLGLEKGYLKKVFYGSKGPNFGTKVSNYPPCPTPDLIKGLRAHTDAGGIILLFQDDKVSGLQLLKDDQWIDVPPMRHSIVINLGDQLEVITNGKYKSVMHRVIAQTDGTRMSLASFYNPGDDAVISPAPALVKESDETSQVYPKFVFNDYMKLYAGLKFQAKEPRFEAMKAVSSVDVGAIATV

SEQ ID NO: 9973 - protein, 308 aa, Vigna radiata
PVVDMKNLNNEERGATMEKIKDACENWGFFEVVNHGISIELMDSVDRLTKEHYKRCMEERFKEMVASKGLECAESEINDLDWESTFFLRHLPVSNISEIPDLADDYRKVMKDFAVELEKLAELVLELVCENLGLEKGYLKKAFYGSKGPNFGTKVSNYPPCPKPELIKGLRAHTDAGGIILLFQDHKVSGLQLFKDGHWIDVPPMRHSIVVNLGDQLEVITNGKYKSVMHRVITQTDGNRMSIASFYNPGNDAVIAPAEALVKEDESSKVYPKFVFDDYMKLYAGLKFQAKEPRFEAMKAIDGPIATV

SEQ ID NO: 9974 - protein, 272 aa, Juglans nigra
EDERPKVAYNQFSTEIPIISLAGIDEVHGRRTEICQKIVEACEDWGIFQVVDHGVDASLISDMTRLARDFFAMPPEEKLRFDMSGGKKGGFIVSSHLQGEAVQDWREIVTYFSYPIRTRDYSRWPDKPEGWRKVTEEYSDKLMGLACKLLEVLSEAMGLEKEALTKACVDMDQKVVVNYYPKCPQPDLTLGLKRHTDPGTITLLLQDQVGGLQATRDGGKTWITVQPVEGAFVVNLGDHGHFLSNGRFKNADHQAVVNSNYSRLSIATFQNP

SEQ ID NO: 9975 - protein, 164 aa, Datura ferox
FSSKLPWKETLSFRYSAQKDSSHIVEEYFQRTLGESFNHLGNTYQEYCNSMSTLSLGIMELLGMSLGVEKNHFKEFFEENESIMRLNYYPPCQKPELTLGTGPHCDPTSLTILHQDCVGGLQVFVDNEWRSISPNFNAFVVNIGDTFMALSNGRYKSCLHRAVV

SEQ ID NO: 9976 - protein, 94 aa, Vaccinium myrtillus
QMKINYYPKCPQPELALGVEAHTDVSALTFILHNVVPGLQLFYEGKWVTAKCVPNSIIMHIGDTVEILSNGKCKSILHRGLVNKEKVRISWAVF

SEQ ID NO: 9977 - protein, 309 aa, Yersinia pestis KIM
MRHAARDVGFFYLTGHGIDTSLLRQIQILSRQFFALSDEEKLSIAMIRSPHFRGYNRAASEFTRGQPDWREQFDIGAERTPLPQIAGAPSWTRLQGPNQWPTALPELKPVLLQWQEEMTRMSLRLLRAFALALDLDEQAFDALYGDKPNEHIKLIRYPGREATQSGQGVGAHKDSGFLSFLLQDTQRGLQVEVEEGQWIDAVPREGTFVVNIGELLELASNGYLRATVHRVETPPAGIDRLSIAFFLGARLDAVVPLYPLSAALAAEARGPASDPHNPLFRDVGLNYLKGRLRSHPDVAERYYSDALCS

SEQ ID NO: 9978 - protein, 342 aa, Magnetospirillum magnetotacticum
DLRYGCELPVLDLRRFDGGDAERAAFLDDLRVAARDVGFFYLTGHGLPDTELAAIQALARRFFALPLPEKRAVAMVHSPHFRGYTEAGREITRGRPDWREQFDAGAERTVLPWHPGLPAWTRLQGPNLWPDSLPDLRTGVLAWQEAVTGIGIRLLRAFALSLGQPADAFEPIYAGAPNQHLKIIRYPGRDEAEDAQGVGAHKDSGFLTLLLQDGEGGLEVEGEDGGWIAAAPVEGAFVVNVGELLELASNGFLRATVHRVVAPAAGRDRLSVAFFLGARHDATVPLLSLPPDLAAQARGPASDPDNPLFREVGRNYLKGRLRSHPDVAARHYADLVEDVRAA

SEQ ID NO: 9979 - protein, 321 aa, Stellaria longipes
MENFPIINMENIERKNTRDMIKDACENWGFFELVNHGIPHSLLDKMEKLTKDHVRKCLEERFKEMVASKGLEAVEAEVTDLDWESIFFLKHLPVSSISELPDLDEEYREVMIDFSKRKEKKAETKKDKKCENKGKEKSYLKNTFYGSKGPNFGTSVSNYPPLPKPDLIKGLSAHTDAGGIILLSEDDKVSGLELLKDGDWIDVPPMRHSIVVNLGDELEVITNGKYWSVEHRVQIDTNITRMSTASFYVPGNDRVIAPAEALPKEFKKDEVYPKFVFKSYMKAYAKLIRQSGLKFEAKEPRFEAMKAHRIGSSCNSHLEHD

SEQ ID NO: 9980 - protein, 324 aa, Stellaria longipes
MENFPIINMENIERKNTRDMIKDACENWGFFECVNHGIPHSLLDKMEKMEKLTKDHVRECLEERFKEMVASKGLEGVESEVTDLDWESIFFLKHLPVSSISELPDLDEEYREVMIDFSKRKEKKAETKKDKKCENKGKEKSYLKNTFYGSKRPNFGTSVSNYPPLPKPDLIKGLSAHTDAGGIKLLSEDDKVSGLELLKDSDWIDVPPMRHSIVVNLGDELEVITNGKYWSVMHRVQIDTNITRMSTASFYVPGNDRVIAPAEALPKEFKDDEVYPKFVFKSYMKAYAKLIRQSGLKFEAKEPRFEAMKAHRIGSSCNSHLEHD

SEQ ID NO: 9981 - protein, 160 aa, Stellaria longipes
VSNYPPLPKPDLIKGLSAHTDAGGIILLSEDDKVSGLELLKDSDWIDVPPMRHSIVVNLGDELEVITNGKYWSVMHRVQIDTNITRMSTASFYVPGNDRVIAPAEALPKEFKDDEVYPKFVFKSYMKAYAKLIRQSGLKFEAKEPRFEAMKAHRIGSSCN

SEQ ID NO: 9982 - protein, 345 aa, Streptomyces avermitilis MA-4680
MTNTATTPSYQRYQQLPIIDLSAADRGPQARALLHAQLHSAAHDVGFFQLVGHGVTQAETDELLRAMHAFFALPEADRLAIDNVNSPHFRGYTRTGDERTGGSRDWRDQLDIGAERPVRTPGPGEPAYWWLEGPNQWPAALPELRTAALAWIDKLSAVAQRLLHELLTAIGAPAGFYDPVFGEHAHPHLKLVRYPGSAGDGADQGVGAHKDYGFLTLLLQDQVGGLQVQREDGLFHEVPPLPGAFVVNLGELLEVATNGYLLATNHRVVSPPGATERFSVPFFYNPRLDARVEPLPFPHASTAPGVTDDPANPLFAEYGLNELKGKLRAHPLVAARHHAELLTPA

SEQ ID NO: 9983 - protein, 324 aa, Streptomyces avermitilis MA-4680
MSDARTPRIPTVDLRPWLSGDPDARARIARTVDDALRTAGFLLVTGHGVDPSLRTRIRVAARAFFTLPAETKQRYAARVGGRGWLGPGAEANGYSEGTETPPDLKESLTFATHEPFEDPETNAEWYAPNVWPAEAPELREPCEEYLAEMAGLEDRLLTLLGEALGLEPDFFTKHMTHPTYGFNINWYPGTEVTGDPAPGQFRIGPHTDFGTVTILDRQAGKGGLQVYTDDGGWADAPFDPAAFTINIGDLMARWTGDRWRSGRHRVLPPPADAPAEELMSLVYFGECTPGTLVESVPAPVGRVAYEPVDSHTYLREKLNSITVD

SEQ ID NO: 9984 - protein, 313 aa, Pyrus communis
MATFPVVDLSLVNGEERVATLEKINDACENWGFFELVNHGMSTELLDTVEKMTKDHYKKTMEQRFKEMVAAKGLDAVQSDIHDLDWESTFFLRHLPSNISEVPDLEEDYRKTMKEFAVELEKLAEKLLDLLCENLGLEKGYLKKVFYGSKGPNFGTKVSNYPPCPKPDLIKGLRAHSDAGGIILLFQDDKVSGLQLLKDGDWVDVPPMHHSIVINLGDQIEVITNGKYKSVMHRVIAQSDRDRMSIASFYNPGDDAFISPAPAVLEKKTEDAPTYPKFVFDDYMKLYSGLKFQAKEPRFEAMKAKESTLVATT

SEQ ID NO: 9985 - protein, 319 aa, Citrus sinensis
MENFPVISLENINGAERAAILEKINEACEKWGFFELVNHGIEPEFMDTVERLTKAHYRKCMEQRFKELVASRALEGIQTEVNDMDWESTFYVRHLPQSTINEVPDLDEEYRKVMKEFALKLEKLAEELLDLLCENLGIEKGYLKKVFHGANGPTFGTKVSNYPPCPKPDLIKGLRAHTDAGGIILLFQDDKVSGLQLLKDGQWIDVPPLRHSIVVNLGDQIEVITNGKYKSVEHRVVSQTDGEGRMSLASFYNPGSDAVIYPAPALLEKEAEKKQVYPKFVFEDYMKLYVPLKFQAKEPRFEAMKAVETNVNLGPIATA

SEQ ID NO: 9986 - protein, 130 aa, Citrus sinensis
LRAHTDAGGIILLFQDDKVSGLQLLKDGQWIDVPPLRHSIVVNLGDQIEVITNGKYKSVEHRVVSQTDGEGRMSLASSYNPGSDAVIYPAPALLEKEAEKKQVYPKFVFEDYMKLYVPLKFQAKEPRFEA

SEQ ID NO: 9987 - protein, 319 aa, Fagus sylvatica
MENFPVINLEKLNGEERGTTMEKIKDACENWGFFELVNHGLPHELLDTVERLAKEHYKKCMEQRFKELVTAQGLEGVQTEVNDLDWESTFHVRHLPQSNISEIPDLEDEYRKVMKEFALKLEKLAEELLDLLCENLGLEKGYLKKAFHGSKGPNFGTKVSNYPPCPKPDLIKGLRAHTDAGGIILLFQDDKVSGLQLLKDGQWIDVPPMRHSIVINLGDQLEVITNGKYKSVLHRVIAQTNGNRMSIASFYNPGGDAVIYPATALVEKEAEEKNNVYPKFVFEDYMKLYAGLKFQAKEPRFEAMKAVESNVTVGPIATA

SEQ ID NO: 9988 - protein, 280 aa, Fagus sylvatica
DACENWGFFELVNHGLPHELLDTVERLTKEHYKKCMEQRFKELVTAKGLEGVQTEVNDLDWESTFHVRHLPQSNISEIPDLEDEFRKVMKEFALKLEKLAEELLDLLCENLGLEKGYLKKAFHGSKGPNFSTKVSNYLPCPKPDLNKGLRAHTDAGGIILLFQDDKVSGLQLLKDGQWIDVPPMRHSIVINLGDQLEVITNGKYKSVLHRVIAQTNGNRMSIASFYNPGGDAVIYPATALVEKEAEEKNNVYPKFVFEDYMKLYAGLKFQAKEPRFEAMK

SEQ ID NO: 9989 - protein, 187 aa, Glyptostrobus lineatus
ICTYFAQPLHQRDYTRWPEKPEGWREIVDKYSEALMGLASKLLGIVSEALGLEPEAVTKACVEMDQKVVINYYPKCPQPDMTLGLKRHTDPGTITLLLQDQVGGLQATKDDGLNWITVEPVQGAFVVNLGDHMHFLSNGKFKTADHQAVVNSNYSRLSIATFQNPSQEAIVYPLKLEEGEQSFMEEP

SEQ ID NO: 9990 - protein, 187 aa, Glyptostrobus lineatus
ICTYFAQPLHQRDYTRWPEKPEGWREIVDKYSEALMGLASKLLAIISEALGLEPEAVTKACVEMDQKVVINYYPKCPQPDMTLGLKRHTDPGTITLLLQDQVGGLQATKDDGLNWITVEPVQGAFVVNLGDHMHYLSNGKFKTADHQAVVNSNYSRLSIATFQNPSQEAIVYPLKLEEGEQSFMEEP

SEQ ID NO: 9991 - protein, 187 aa, Sequoia sempervirens
ICTYFAQPLHQRDYTRWPEKPEGWREIVDKYSETLMGLATKLLAIVSEALGLEPEAVTKACVEMDQKVVINYYPKCPQPDMTLGLKRHTDPGTITLLLQDQVGGLQATKDNGVNWITVEPVQGAFVVNLGDHMHYLSNGKFKSADHQAVVNSNSSRLSIATFQNPSQEAIVYPLKLEEGEQSFMEEP

SEQ ID NO: 9992 - protein, 187 aa, Taxodium distichum
ICTYFAQPLHQRDYTRWPEKPEGWREIVDKYSEALMGLASKLLAIISEALGLDPEAVTKACVEMDQKVVINYYPTCPQPDMTLGLKRHTDPGTITLLLQDQVGGLQATKDDGLNWITVQPVQGAFVVNLGDHMHYLSNGKFKTADHQAVVNSNCSRLSIATFQNPSQEAIVYPLKLEEGEQSFMEEP

SEQ ID NO: 9993 - protein, 293 aa, Vitis vinifera
DACENWGFFELVNHGISHELMDTVEKLTKEHYKKCMEQRFKEMVASKGLEAVQSEINDLDWESTFFLRHLPTSNMSEIPDLEEDYRKAMKEFTAHLEKLAELLLDLLCENLGLEKGYLKKAFYGSQGPSFGTKVSNYPPCPQPELIKGLRAHTDAGGIILLFQDDKVSGLQLLKDGQWIDVPPMRHSIVISLGDQLEVITNGKYKGVMHRVIAQTDGNGMSLASFYNPGSDAVIYPAPALVEKEKETSEVYPKFVFEDYMKLYAGLKFQAKEPRFEAMKAMEPTVNLGPIATV

SEQ ID NO: 9994 - protein, 323 aa, Mangifera indica
MESLSFPVINLEKLNGEERAATMEKIKDACENWGFFELVNHGIPIEELDTLERKTKEHYRKCMEQRFKELVASKALEGVQTEIKDMDWESTFYVRHLPQTNLKCTPDLDDEYRKVMKEFASKLEKLAEELLDLLCENLGLEKGYLKKTFYGSKGPTFGTKVSHYPPCPQPDLIKGLRAHTDADGIILLFQDDKVSGLPASERWAVDIDVPPMRHSIVVNLGDQLEVITNGKYKSVEHRVVAQRDGNGRMSIASFYNPGSDAVIYPAPPLLEPEAEEKKQVYPKFVCEDYMKLYARLKFQAKEPRFEAMKAVETTVNLGPIATA

SEQ ID NO: 9995 - protein, 343 aa, Atropa belladonna
MATLVSNWSTNNVSESFVAPLEKRAENDVPLGNDVPIIDLQQDHLVVVQQITKACQDFGLFQVINHGLPEKLMAETMDVCKEFFALPAEEKEKLQPKGEPAKFELPLEQKAKLYVEGEQLSDEAFLYWKDTLAHGCHPLDEELVNSWPEKPATYREVVAKYSVEVRKLTMRILDYICEGLGLKLGYFDNELSQIQMMLTNYYPPCPDPSSTLGSGGHYDGNLITLLQQNLPGLQQLIEDAKWIAVEPIPTAFVVNLGLTLKVITNEKFEGSIHRVVTNPTRDRVSIATLIGPDYSCTIEPAKELLSQDNPPLYKPYSYAEFGEIYLSDKSDYDAGVKPYKINA

SEQ ID NO: 9996 - protein, 187 aa, Cryptomeria japonica
ICTYFAQPLHQRDYTRWPDKPEGWREIVDKYSEALMGLASKLLQIVSEALGLEPEAVTKACVEMDQKVVINYYPKCPQPDMTLGLKRHTDPGTITLLLQDQVGGLQATKDDGLNWITVEPVQGAFVVNLGDHMHFLSNGKFKTADHQAVVNSNYSRLSIATFQNPSQEAIVYPLKLEEGEQSFMEEP

SEQ ID NO: 9997 - protein, 187 aa, Cryptomeria japonica
ICTYFAQPLHQRDYTRWPEKPEGWREIVDKYSEVLMGLASKLLAIISEALGLEPEAVTKACVEMDQKVVINYYPKCPQPDMTLGLKRHTDPGTITLLLQDQVGGLQATKDDGLNWITVEPVQGAFVVNLGDHMHYLSNGKFKTADHQAVVNSNYSRLSIATFQNPSQGAIVYPLKLEEGEQSFMEEP

SEQ ID NO: 9998 - protein, 320 aa, Persea americana
MDSFPVINMEKLEGQERAATMKLINDACENWGFFELVNHSIPVELMDEVERLTKEHYKKCMEQRFKELMASKVEGAVVDANDMDWESTFFIRHLPVSNLSEIPDLTDEHRKVMKEFAEKLEKLAEQVLDLLCENLGLEKGYLKMAFAGTTTGLPTFGTKVSNYPPCPRPELFKGLRAHTDAGGLILLFQDDRVAGLQLLKDGEWVDVPPMNHSIVINLGDQVEVITNGKYKSVMHRVVAQTDGNRMSLASFYNPGSDAVIFPAPALVEKEAEEKKEVYPKFVFEDYMNLYAGLKFQAKEPRFEVMKMKAVETANLSPITT

SEQ ID NO: 9999 - protein, 318 aa, Betula pendula
MATFPVIDMEKLNGEERGATMELIEDACENWGFFELVNHGISHDLLDTVEKLNKEHYRKCMEERFKDMVASKGLEAAQSEVRDMDWESTFFLRHLPASNMSEIPDLDEDYRKAMKEFAGNLEKLAEQLLDLLCENLGLEKGYLKKSFYGSKGPNFGTKVSNYPPCPKPELIQGLRAHTDAGGLILLFQDDKVSGLQLLKDGKWVDVPPMRHSIVINLGDQLEVITNGKYKSVLHRVLAQPDGNRMSLASFYNPGSDALIYPAPVLVEKEAEKGQVYPKFVFEDYMKLYAGLKFQAKEPRFEAMKAMESTVKLGPIATA

SEQ ID NO: 10000 - protein, 59 aa, Betula pendula
KPELIQGLRAHTDAGGLILLFQDDKVSGLQLLKDGKWVDVPPMRHSIVINLGDQLEVIT

SEQ ID NO: 10001 - protein, 148 aa, Mesembryanthemum crystallinum
GTAPFYLRHLPSSNIAEVPDLDDEYRSVMKEFALRLEKLAEEILDLFCENLGLEKGYLKKVFYGDKAPNFGTKVSNYPPCPKPDLIKGLRAHTDAGGVILLFQDDRVSGLQLLKDGEWIDVPPMRHSIVVNLGDQLEVITNGKYKSVM

SEQ ID NO: 10002 - protein, 138 aa, Artemisia annua
EERAATLSLINDACENWGFFEIVNHGISTELLDTVEKMTKGHYKKCMEERFKEMVASKGLEAVQSEIEDLDWESTFYLRHLPQSNISEVPDLEDEYRKVMKLFAEELEKLAENLLDIFCENLGLEKGYLKKAFYGAGK

SEQ ID NO: 10003 - protein, 382 aa, Spinacia oleracea
MPSRPSRVVKEQHPTKKSFLDLESLNELPDSFAWGSFEDPCSIDNPSGYGPDSVPVINLQDPQAQQLVGLACRSWGVFQVTNHGIQKSLLDDIEAAGKSLFALPVNQKLKAARSSCGVTGYGPAGISSFFPKRMWSEGFTILGSPLDHARQLWPNNYNKFCDIIEKYQKEMNQLAKKLMQLVVGSLGISNQDIMNWADLLEGANGAMQLNSYPIRPDPNRAMGLAAHTDSTLLTILHQSNTTGLQVFRERSGWVTVPPISGGLVINIGDLLHILSNGRYPSVYHRAMVNRVQHRLSVAYLYGPASGVRVQPLPKLIDATHPPLYRPVTWSEYLGIKSEHLTKALSLIRINHNTNPSLTGLIGNDEPKSINVDSDKTILAVFG

SEQ ID NO: 10004 - protein, 321 aa, Dianthus caryophyllus
MANIVNFPIIDMEKLNNYNGVERSLVLDQIKDACHNWGFFQVVNHSLSHELMDKVERMTKEHYKKFREQKFKDMVQTKGLVSAESQVNDIDWESTFYLRHRPTSNISEVPDLDDQYRKLMKEFAAQIERLSEQLLDLLCENLGLEKGYLKNAFYGANGPTFGTKVSNYPPCPKPDLIKGLRAHTDAGGIILLFQDDKVSGLQLLKDGHWVDVPPMKHSIVVNLGDQLEVITNGKYKSVMHRVIAQTDGNRMSIASFYNPGSDAVIYPAPTLVEKEEEKCRAYPKFVFEDYMNLYLKLKFQEKEPRFEAMKAMETTGPIPTA

SEQ ID NO: 10005 - protein, 321 aa, Dianthus caryophyllus
MANIVNFPIIDMEKLNNYNGVERSLVLDQIKDACHNWGFFQVVNHSLSHELMDKVERMTKEHYKKFREQKFKDMVQTKGLVSAESQVNDIDWESTFYLRHRPTSNISEVPDLDDQYRKLMKEFAAQIERLSEQLLDLLCENLGLEKAYLKNAFYGANGPTFGTKVSNYPPCPKPDLIKGLRAHTDAGGIILLFQDDKVSGLQLLKDGHWVDVPPMKHSIVVNLGDQLEVITNGKYKSVMHRVIAQTDGNRMSIASFYNPGSDAVIYPAPTLVEKEEEKCRAYPKFVFEDYMNLYLKLKFQEKEPRFEAMKAMETTGPIPTA

SEQ ID NO: 10006 - protein, 320 aa, Nicotiana glutinosa
MENFPIINLEKLNGSERADTMEMIKDACENWGFFELVNHGIPHEVMDTVEKLTKGHYKKCMEQRFKELVANKGLEAVQAEVTDLDWESTFFLRHLPVSNISEVPDLDDQYREVMRDFAKRLEKLAEELLDLLCENLGLEKGYLKNVFYGSKGPNFGTKVSNYPPCPKPNLNKGLRAHTDAGGIILLFQDDKVSGLQLLKDGQWIDVPPMRHSIVVNLGDQLEVITNGKYKSVMHRVIAQTDGTRMSLASFYNPGSDAVIFPAPALVEKEAEESKAIYPKFVFDDYMKLYALLKFQAKEPRFEAMIKAMETDVKCDPVATA

SEQ ID NO: 10007 - protein, 320 aa, Nicotiana glutinosa
MESFPIVDMEMLNTEQRAVIMEKLKDACENWGFLELVNHGISHELMDTVEKLTKEHYNKSMEQRFKEMVTNKGLEVVQTEIDDLDWESAFFLKHLPVSNISDIPDLDHDYRKVMKEFAQKLEKLAEDLLDLLCENLGLEQGYQKKAFYGTFGPTFGTKVANYPPCPKPELIKGLRAHTDAGGIILLFQDDKVSGLQLLKDGKWIDVPPMSHSIVVNIGDQLEVITNGKYKSVEHRVIAQPDGNRMSIASFYNPGSDAVIFPAPELAEKEEKENKLKYPKFVFEDYMKLYAALKFQAKEPRFEAMNKAMKTTVNLGPIATA

SEQ ID NO: 10008 - protein, 316 aa, Nicotiana glutinosa
MESFPVVNMELLNSEQRAATMETIKDACENWGFFEVVNHGISHELLDTVEKFTKGHYNECMERRFKEMVASKGLEAVQTEIKDLDWESTFYLKHLPVSTISQVPDLEDEYRKIMKEFAEKLEKLAEQLLDLLCENLGLEQGYLKKAFYGSNGPTFGTKVSNYPPCPKPDLIKGLRAHTDAGGIILLFQDDKVSGLQLLKDDKWIGVPPMRHSIVINLGDQLEVITNGKYKSMEHRVIAQPDGNRMSIASFYNPGSDAGISPAPELLEKENKVIYPKFVFEDYMKLYAGLKFQAKEPRFEAMKAVETAVNSAPIATV

SEQ ID NO: 10009 - protein, 320 aa, Diospyros kaki
MEAFPVINMEILNGEGREAAMEKLRNACENWGFFEVVNHGISHELMDSVERLTKEHYKKFMEQRFKEMVASKGLEVVQSEINDLDWESTFFLRHLPSSNLSELPDLEDDYKKAMKEFAEDLEKLAEQLLDYLCENLGLEKGYLKKAFYGSKGPTFGTKVSNYPPCPRPELIKGLRAHTDAGGIILLFQDDKVSGLQLLKDGQWIDVPPLKHSIVINIGDQLEVITNGKYKSVMHRVIAQTDGNRMSIASFYNPGSDAVIYPAPALVEKEADHEQKQVYPKFVFEDYMKLYAGLKFQAKEPRFEAMKAMETPLNLGPIATV

SEQ ID NO: 10010 - protein, 318 aa, Diospyros kaki
MESFPVINMEKMNGEERAATMGLINDACENWGFFELVNHGIPPELMDTVERVTKAHYKKCMEQRFKELVASKALEGIQAEVTDMDWESTYFLRHLPQSNISEVPDLDEEYRRVMKDFAERLEKLAEYLLDLLCENLGLEKGYLKKAFYGTKGPNFGTKVANYPPCPKADLIKGLRAHTDAGGIILLFQDDKVSGLQLLKDDQWIDVPPMKHSIVINLGDQLEVITNGKYKSVLHRVVAQTDGTRMSIASFYNPGNDAVIYPAPALVEKEVEEKEVYPKFVFDDYMKLYAALKFQAKEPRFEAMKAVEANVNLGPIATV

SEQ ID NO: 10011 - protein, 270 aa, Diospyros kaki
NWGLFELVNHGIPPELMDTVERLTKEHYKKCMEQRFKELVASKALEGVQAEVTDMDWESTYFLRHLPQSNISELPDLDEEYRRVMKDFAERLEKLAEYLLDLLCENLGLEKGYLKKAFYGTKGPNFGTKVANYPPCPKADLIKGLRAHTDAGGIILLFQDDKVSGLQLLKDDQWIDVPPMKHSIVINLGDQLEVITNGKYKSVLHRVVAQTDGTRMSIASFYNPGNDAVIYPAPALVEKEIQEKEIYPKFVFDDYMKLYAALKFQAKEPR

SEQ ID NO: 10012 - protein, 319 aa, Actinidia chinensis
MEAFPVIDMEKLNGEERAPTMEKIKDACENWGFFELVNHGISHELMDTVERLTKEHYNKCMEQRFKEMVATKGLEAVQSEINDLDWESTFFLRHLPVSNISEIPDLEQDHRKAMKEFAEKLEKLAEQLLDLLCENVGLEKGYLKKAFYGSKGPTFGTKVSNYPPCPRPELIKGLRAHTDAGGIILLFQDNKVSGLQLLKDGEWIDVPPMKHSIVINIGDQLEVITNGKYKSVMHRVIAQPDGNRMSIASFYNPGSDAVMYPAPALVDKEEDQQKQVYPKFVFEDYMKLYAGLKFQAKEPRFEAMKAMENAVNLGPIATI

SEQ ID NO: 10013 - protein, 317 aa, Actinidia deliciosa
TFPVIDMEKLTGKERSPTMEKINDACENWGFFELMNHGISHELMDTVERLTKEHYKKCMEQRFKEMVATKGLEAVQSEIDDLDWESTFFLRHLPVSNISEIPDLEQDHRKAMKEFAEKLEKLAEQLLDLLCENLGLEKGYLKKAFSGSKGPTFGTKVSNYPPCPLPELIKGLRAHTDAGGIILLFQDNKVSGLQLLKEGEWIDVPPMKHSIVINIGDQLEVITNGKYKSVMHRVIAQTDGNRMSIASFYNPGSDAVIYPAPALVDKEEDQQKQVYPKFVFEDYMKLYAGLKFQAKEPRFEAMKAMESAVKLGPISTI

SEQ ID NO: 10014 - protein, 318 aa, Carica papaya
MENFPVIDLSKLNGEERASTMELIHDACENWGFFELVNHGISHDLMDTVERLTKEHYKKCMEQRFKEMVESNGLEAVQSEINDMDWESTFFLRHLPASNMHEIPDLEDDYRKAMKEFAVGLQKLAEQMLDLLCENLGLEKGYLKKVFYGSKGPNFGTKVSNYPPCPKPDLIKGLRAHTDAGGIILLFQDDKVSGLQLLKDDQWVDVPPMKHSIVINLGDQLEVITNGKYKSVMHRVIAQTDGNRMSLASFYNPGDDAVIYPAPSLVEKEAEKNQIYPKFVFDDYMKLYVGLKFQAKEPRFEAMKAMESTVTPGAIATV

SEQ ID NO: 10015 - protein, 310 aa, Carica papaya
MENFPVINMEGLNGEERAATMKKIEDACENWGFFELVNHGIPIELLDTVERLTKGHYRKCMEQRFKEIMASKGLDGIQTEVTDMDWESTFFIRHLPEPNIAEIPDLDDEYRKVMKEFALKLEKIAEELLDLLCENLGLEKGYLKKAFYGSRGPTFGTKVSNYPPCPKPNLIKGLRAHTDAGGIILLFQDDKVSGLQLLKDGKWVDVPPMRHSIVVNLGDQLEVITNGKYKSVEHRVVAQTDGTRMSIASFYNPGSDAVIYPAPILVEKETEEKKTAYPKFVFEDYMKLYAGLKFQAKEPRFDAMKAAAKA

SEQ ID NO: 10016 - protein, 318 aa, Carica papaya
MENFPVIDLSKLNGEERALTMELIHDACENWGFFELVNHGISHDLMDTVERLTKEHYMKCMEQRFKEMVESNGLEAVQSEINDMDWESTFFLRHLPASNMHEIPDLEDDYRKAMKEFAVGLQKLAEQMLDLLCENLGLEKGYLKKVFYGSKGPNFGTKVSNYPPCPKPDLIKGLRAHTDAGGIILLFQDDKVSGLQLLKDDQWVDVPPMKHSIVINLGDQLEVITNGKYKSVMHRVIAQTDGNRMSLASFYNPGDDAVIYPAPSLVEKEAEKNQIYPKFVFDDYMKLYVGLKFQAKEPRFEAMKAMESTVTPGAIATV

SEQ ID NO: 10017 - protein, 318 aa, Carica papaya
MENFPVIDLSKLNGEERASTMELIHDACENWGFFELVNHGISHDLMDTVERLTKEHYKKCMEQRFKEMVESNGLEAVQSEINDMDWESTFFLRHLPASNMHEIPDLEDDYRKAMKEFAVGLQKLAEQMLDLLCENLGLEKGYLKKVFYGSKGPNFGTKVRNYPPCPKPDLIKGLRAHTDAGGIILVFQDDKVSGLQLLKDDQWVDVPPMKHSIVINLGDQLEVITNGKYKSVMHRVIAQTDGNRMSLASFYNPGDDAVIYPAPSLVEKEAEKNQIYPKFVFDDYMKLYVGLKFQAKEPRFEAMKAMESTVTPGAIATV

SEQ ID NO: 10018 - protein, 318 aa, Carica papaya
MENFPVIDLSKLNGEERALTMELIHDACENWGFFELVNHGISHDLMDTVERLTKEHYMKCMEQRFKEMVESNGLEAVQSEINDMDWESTFFLRHLPASNMHEIPDLEDDYRKAMKEFAVGLQKLAEQMLDLLCENLGLQKGYLKKVFYGSKGPNFGTKVSNYPPCPKPDLIEGLRAHTDAGGIILLFQDGKVSGLQLLKDDQWVDVPPMKHSIVINLGDQLEVITNGKYKSVMHRVIAQTDGNRMSLASFYNPGDDAVIYPAPSLVEKEAEKNQIYPKFVFDDYMKLYVGLKFQAKEPRFEAMKAMESTVTPGAIATV

SEQ ID NO: 10019 - protein, 310 aa, Carica papaya
MENFPVINMEGLNGEERAATMKKIEDACENWGFFELVNHGIPIELLDTVERLTKGHYRKCMEQRFKEIMASKGLDGIQTEVTDMDWESTFFNCHLPEPNIAEIPDLDDEYRKVMKEFALKLEKIAEELLDLLCENLGLEKGYLKKAFTWSRGPTFGTKVSNYPPCPKPNLIKGLRAHTDAGGIILLFQDDKVSGLQLLKDGKWVDVPPMRHSIVVNLGDQLEVITNGKYKSVEHRVVAQTDGTRMSIASFYNPGSDAVISPAELLVEKETEEKKTAYPKFVFEDYMKLYAGLKFQAKEPRFDAMKAAAKA

SEQ ID NO: 10020 - protein, 349 aa, Citrullus lanatus
MADQELPPPSQLVPLDFNSIQTVPESHLWPNSIELSPAIKLDERISLPIIDFLDDGASELLGRACEQWGMFQLINHGVPKTLIDEAEEETRRLFSLPARQKMKTLRTDSLTATGYGMAGISKYHQKLMWHEGFTMSGSPVDDAKKLWPNDYKRFCDVMEEYQSQMKGLGERIIRLIFKFLDISEEEMMKLLTSTDESAGKPYMALRLNSYPPCPDPSRVMGLAAHTDTSLFTIVHQARHDGLQVFKDGTGWVPLSPMSGTLIVNVGDILHILSNGRFPSILHRVMIHENKEHRFSLAYFYDPPGDLYISPYCKPLSESPQIPLYRCVNVKEYFTIKAKKEGKGLSAIKI

SEQ ID NO: 10021 - protein, 318 aa, Cucumis melo
MAVFPIINLENINDDGRAKILEQIEDACQNWGFFELVNHGIPHEFLDMVEKMTRDHYKKCMEERFKETVLSKGLEAAQAEVNDMDWESTFFLRHLPESNISQMSDLDEEYKKIMKEFAKKLENLAEELLDLLCENLGLEKGYLKKAFYGSKGPTFGTKVSNYPPCPKPDLIKGLRAHTDAGGIILLFQDDKVSGLQLLKDGNWIDVPPMRHAIVVNLGDQLEVITNGRYKSVMHRVLTQTSGTGRMSIASFYNPGSDAVIYPAPALVEKDQDEEKKEVYPKFVFEDYMKLYLGVKFQAKEPRFEAMKANANLGPMATA

SEQ ID NO: 10022 - protein, 320 aa, Cucumis melo
MEMDFPVINMNNLNGESRVSVLNQINDACENWGFFELVNHGISHELMDKVEKLTKEHYRKCMEQRFKEMVASKGLDSVETEINDTDWESTFFLRHLPVSNMSEIGDLDEEYKKVMKEFADELEKLAEEVLDLLCENLGLEKGYLKKVFYGSKGPNFGTKVSNYPPCPKPELIKGLRAHTDAGGLILLFQDDKVSGLHVLKDGKWVDVPPMHHSIVINLGDQLEVITNGKYKSVMHRVIAQEDGNRMSIASFYNPGNDAVIYPAPALVEGEQEKTKLYPKFVFDDYMKLYVGLKFQAKEPRFEAMKAMESTNLNMGPIATV

SEQ ID NO: 10023 - protein, 318 aa, Cucumis sativus
  unsure (1)..(318): unsure at all Xaa locations
MDFPVINMNNLNGESRVSFLNQINDVCENWGFFELVNHGIPHELMDKVEKMTKEHYRKCMEQRFKEMVASKGLDSVETEINDTDWESTFFLRHLPVSNMSEIGDLDEEYKKVMKEFAAELEKLAXEILNLLCENLGLEKGYLKKVFYGSKGPNFGTKVSNYPPCPKPELIKGLRAHTDAGGLILLFQDDKVSGLQLLKDGKWVDVPPMHHSIVINLGDQLEVITNGKYKSVMHRVIAQEDGNRMSIASFYNPGNDAVIYPAPALVEGEQEKTKLYPKFVFDDYMKLYMGLKFQAKEPRFEAMKAMESTNINMGPIATV

SEQ ID NO: 10024 - protein, 317 aa, Cucumis sativus
MAVFPIINLENINGDGRAKILEQIEDACQNWGFFELVNHGIPHEFLDMVEKMTRDHDKKCMEERFKETVLSKGLEAAQAEVNDMDWESTFFLRHLPESNISQMSDLDEEYKKIMKEFAKKLENLAEELLDLLCENLGLEKGYLKNAFYGSKGPTFGTKVSKYPPCPKPDLIKGLRAHTDAGGIILLFQDDKVGGLQLLKDGDWIDVPPMRHAIVVNLGDQLEVITNGRYKSVMHRVLITQTSGTGRMSIASFYNPGSDAVIYPAPALVEKDEEKKEVYPKFVFEDYMKLYLGVKFQAKEPRFEAMKANANLGPMATA

SEQ ID NO: 10025 - protein, 314 aa, Cucumis sativus
MEFPIINLEKLNGEERSSILAKIKDACENWGFFEVLNHGIDTEFLDKVEKLTKEHYKKCMEERFKEHIASKGLNDVVTEVNDVDWESTFFLRHLPVSNIADLPELSDDYKSVMKQFASKLQVLAELLLDLLCENLNLPKSYLKNAFHGSNGPTFGTKVSNYPPCPNPDLIKGLRAHTDAGGIILLFQDDKVSGLQLLKEGEWVDVPPVRHSIVVNIGDRLEVITNGKYKSVLHRAIAHREGEGRMSLASFYNPGSDAVIFPAPSLVAEEKNEIYPKFVFEDYMKLYAGLKFEAKEPRFEAMKGNNVKLDPIATV

SEQ ID NO: 10026 - protein, 317 aa, Cucumis sativus
MAVFPIINLENINGDGRAKILEQIEDACQNWGFFELVNHGIPHEFLDMVEKMTRDHDKKCMEERFKETVLSKGLEAAQAEVNDMDWESTFFLRHLPESNISQMSDLDEEYKKIMKEFAKKLENLAEELLDLLCENLGLEKGYLKNAFYGSKGPTFGTKVSKYPPCPKPDLIKGLRAHTDAGGIILLFQDDKVGGLQLLKDGDWIDVPPMRHAIVVNLGDQLEVITNGRYKSVMHRVLITQNSGTGRMSIASFYNPGSDAVIYPAPALVEKDEEKKEVYPKFVFEDYMKLYLGVKFQAKEPRFEAMKANANLGPMATA

SEQ ID NO: 10027 - protein, 282 aa, Cucumis sativus
MEFPIINLEKLNGEERSSILAKIKDACENWGFFEVLNHGIDTEFLDKVEKLTKEHYKKCMEERFKEHIASKGLNDVVTEVNDVDWESTFFLRHLPVSNIADLPELSDDYKSVMKQFASKLQVLAELLLDLLCENLNLPKSYLKNAFHGSNGPTFGTKVSNYPPCPNPDLIKGLRAHTDAGGIILLFQDDKVSGLQLLKEGEWVDVPPVRHSIVVNIGDQLEVITNGKYKSVLHRVIAHPEGEGRMSLASFYNPGSDAVIFPAPSLVAEEKNEYTQNLYLRII

SEQ ID NO: 10028 - protein, 317 aa, Phalaenopsis sp.
MELLQGSQRPAAMALLRDACENWGLYELLNHGISHELMNRVETVNKEHYRRFREQRFKEFASKTLDTVENVEPENLDWESTFFLRHLPTSNISQIPDLDDDCRSTMKEFALELENLAERLLDLLCEDLGLEKGYLKKVFCGGSDGLPTFGTKVSNYPPCPKPELIKGLRAHTDAGGIILLFQDDKVSGLQLLKDGEWIDVPPVRHSIVVNIGDQLEVITNGKYKSVLHRVVAQTDGNRMSIASFYNPGSDAVIFPAPALVEKEAEEKEEKKKEIYPKFVFQDYMNLYIRKKFEAKEPRFEAMKSMEIVMSSQPIPTA

SEQ ID NO: 10029 - protein, 385 aa, Populus nigra
MAIDCIKTMPSITTPHHHPKDQDQCKDDGKSFVFDAQVLRHQTNIPQQFIWPDHEKPNINAPELQVPLVDLGDFLSGNPVAAVEASRLVGEACQKHGFFLVVNHGVDKTLIAHAHNYMDTFFELPLSEKQKAQRKIGESCGYASSFTGRFSSKLPWKETLSFRYTAEKNSSKHIEEYFHNRMGEDFAEFGRVYQDYCEAMSTLSLGIMELLGMSLGVSREHFREFFNENDSIMRLNYYPPCQKPDLTLGTGPHCDPTSLTILHQDQVGGLQVFVDNEWRSISPNFDAFVVNIGDTFMALSNGIYKSCLHRAVVNSQTPRKSLAFFLCPKNDKMVTPPHELVDTCNPRIYPDFTWPMLLEFTQKHYRADMKTLEVFTNWLHQQSFS

SEQ ID NO: 10030 - protein, 323 aa, Arabidopsis thaliana
MESFPIINLEKLNGEERAITMEKIKDACENWGFFECVNHGISLELLDKVEKMTKEHYKKCMEERFKESIKNRGLDSLRSEVNDVDWESTFYLKHLPVSNISDVPDLDDDYRTLMKDFAGKIEKLSEELLDLLCENLGLEKGYLKKVFYGSKRPTFGTKVSNYPPCPNPDLVKGLRAHTDAGGIILLFQDDKVSGLQLLKDGEWVDVPPVKHSIVVNLGDQLEVITNGKYKSVEHRVLSQTDGEGRMSIASFYNPGSDSVIFPAPELIGKEAEKEKKENYPRFVFEDYMKLYSAVKFQAKEPRFEAMKAMETTVANNVGPLATA

SEQ ID NO: 10031 - protein, 323 aa, Arabidopsis thaliana
MESFPIINLEKLNGEERAITMEKIKDACENWGFFECVNHGISLELLDKVEKMTKEHYKKCMEERFKESIKNRGLDSLRSEVNDVDWESTFYLKHLPVSNISDVPDLDDDYRTLMKDFAGKIEKLSEELLDLLCENLGLEKGYLKKVFYGSKRPTFGTKVSNYPPCPNPDLVKGLRAHTDAGGIILLFQDDKVSGLQLLKDGEWVDVPPVKHSIVVNLGDQLEVITNGKYKSVEHRVLSQTDGEGRMSIASFYNPGSDSVIFPVPELIGKEAEKEKKENYPRFVFEDYMKLYSAVKFQAKEPRFEAMKAMETTVANNVGPLATA

SEQ ID NO: 10032 - protein, 323 aa, Arabidopsis thaliana
MESFPIINLEKLNGEERAITMEKIKDACENWGFFECVNHGISLELLDKVEKMTKEHYKKCMEERFKESIKNRGLDSLRSEVNDVDWESTFYLKHLPVSNISDVPDLDDDYRTLMKDFAGKIEKLSEELLDLLCENLGLEKGYLKKVFYGSKRPTFGTKVSNYPPCPNPDLVKGLRAHTDAGGIILLFQDDKVSGLQLLKDGEWVDVPPVKHSIVVNLGDQLEVITNGKYKSVEHRVLSQTDGEGRMSIASFYNPGSDSVIFPAPELIGKEAEKEKKENYPRFVFEDYMKLCSAVKFQAKEPRFEAMKAMETTVANNVGPLATA

SEQ ID NO: 10033 - protein, 320 aa, Arabidopsis thaliana
MEKNMKFPVVDLSKLNGEERDQTMALINEACENWGFFEIVNHGLPHDLMDKIEKMTKDHYKTCQEQKFNDMLKSKGLDNLETEVEDVDWESTFYVRHLPQSNLNDISDVSDEYRTAMKDFGKRLENLAEDLLDLLCENLGLEKGYLKKVFHGTKGPTFGTKVSNYPPCPKPEMIKGLRAHTDAGGIILLFQDDKVSGLQLLKDGDWIDVPPLNHSIVINLGDQLEVITNGKYKSVLHRVVTQQEGNRMSVASFYNPGSDAEISPATSLVEKDSEYPSFVFDDYMKLYAGVKFQPKEPRFAAMKNASAVTELNPTAAVETF

SEQ ID NO: 10034 - protein, 320 aa, Arabidopsis thaliana
MEKNMKFPVVDLSKLNGEERDQTMALINEACENWGFFEIVNHGLPHDLMDKIEKMTKDHYKTCQEQKFNDMLKSKGLDNLETEVEDVDWESTFYVRHLPQSNLNDISDVSDEYRTAMKDFGKRLENLAEDLLDLLCENLGLEKGYLKKVFHGTKGPTFGTKVSNYPPCPKPEMIKGLRAHTDAGGIILLFQDDKVSGLQLLKDGDWIDVPPLNHSIVINLGDQLEVITNGKYKSVLHRVVTQQEGNRMSVASFYNPGSDADISPATSLVEKDSEYPSFVFDDYMKLYAGVKFQPKEPRFAAMKNASAVTELNPTAAVETF

SEQ ID NO: 10035 - protein, 320 aa, Arabidopsis thaliana
MEMNIKFPVIDLSKLNGEERDQTMALIDDACQNWGFFELVNHGLPYDLMDNIERMTKEHYKKHMEQKFKEMLRSKGLDTLETEVEDVDWESTFYLHHLPQSNLYDIPDMSNEYRLAMKDFGKRLEILAEELLDLLCENLGLEKGYLKKVFHGTTGPTFATKLSNYPPCPKPEMIKGLRAHTDAGGLILLFQDDKVSGLQLLKDGDWVDVPPLKHSIVINLGDQLEVITNGKYKSVMHRVMTQKEGNRMSIASFYNPGSDAEISPATSLVDKDSKYPSFVFDDYMKLYAGLKFQAKEPRFEAMKNAEAAADLNPVAVVETF

SEQ ID NO: 10036 - protein, 310 aa, Arabidopsis thaliana
MVLIKEREMEIPVIDFAELDGEKRSKTMSLLDHACDKWGFFMVDNHGIDKELMEKVKKMINSHYEEHLKEKFYQSEMVKALSEGKTSDADWESSFFISHKPTSNICQIPNISEELSKTMDEYVCQLHKFAERLSKLMCENLGLDQEDIMNAFSGPKGPAFGTKVAKYPECPRPELMRGLREHTDAGGIILLLQDDQVPGLEFFKDGKWVPIPPSKNNTIFVNTGDQLEILSNGRYKSVVHRVMTVKHGSRLSIATFYNPAGDAIISPAPKLLYPSGYRFQDYLKLYSTTKFGDKGPRLETMKKMGNADSA

SEQ ID NO: 10037 - protein, 320 aa, Brassica juncea
MEKNIKFPVVDLSKLIGEERDQTMALINDACENWGFFEIVNHGLPHDLMDNAEKMTKEHYKISMEQKFNDMLKSKGLENLEREVEDVDWESTFYLRHLPQSNLYDIPDMSDEYRTAMKDFGKRLENLAEDLLDLLCENLGLEKGYLKKVFHGTKGPTFGTKVSNYPACPKPEMIKGLRAHTDAGGIILLFQDDKVTGLQLLKDGDWIDVPPLNHSIVINLGDQLEVITNGRYKSMMHRVVTQKEGNRMSIASFYNPGSDAEISPASSLACKETEYPSFVFDDYMKLYAGVKFQPKEPRFEAMKNANAVTELNPTAAVETF

SEQ ID NO: 10038 - protein, 321 aa, Brassica juncea
MEKNIKFPVVDLSKLIGEERDQTMAWINDACENWGFFEIVNHGLPHDLMDNAPKKMTKEHYKKSMEQKFNDMLKSKGLEILEREVEDVDWESTFYLRYLPQSNLYDVPDMSDEYRTAMKDFGKRLENLAEDLLDLLCENLGLEKGYLKKVFHGTKGPTFGTKVSNYPACPKPEMIKGLRAHTDAGGIILLFQDDKVSGLQLLKDGDWIDVPPLNHSIVINLGDQLEVITNGRYKSVMHRVVTQKEGNRMSIASFYNPGSDAEISPASSLACKETEYPSFVFYDYMKLYAGVKFQPKEPRFEAMKNANAVTELNPTAAVETF

SEQ ID NO: 10039 - protein, 321 aa, Brassica napus
MEKNIKFPVIDLSKLNGEERDQTMALIDDACQNWGFFELLNHGIPYDLMDNIERMTKEHYKQFMEHKFKEMLRSKGLDTLETEVEDIDWESTFFLHHLPQTNLYDIPNMSEQYRTAMKDFGKRLEKLAEELLDLLCENLGLEKGYLKKVFRGTKGPTFGTKVSNYPPCPNPEMIKGLRAHTDAGGLILLFQDDKVSGLQLLKDGDWVDVPPLKHSIVINLGDQLEVITNGWYKSIMHRVMTQKEGNRMSIASFYNPGSDAEISPAHSLVDKESEYPSFVFDDYMKLYSGVKFQPKEPRFEAMKNAAAVTTDVNPVATEETF

SEQ ID NO: 10040 - protein, 321 aa, Brassica oleracea
MESFPIINLEKLNGEERGLTMEKIKDACENWGFFECVNHGIPHELLDRVEKMTKEHYKKCMEDRFKESIKNRGLDSVRSEVNDVDWESTFYLKHLPASNISHVPDLDDDYRTLMKEFAGKIEKLSEELLDLLCENLGLEKGYLKKVFYGSKSPTFGTKVSNYPPCPKPDLIKGLRAHTDAGGIILLFQDDKVSGLQLLKDGEWVDVPPVKHSIVVNLGDQLEVITNGKYKSVEHRVIAQTDGEGRMSIASFYNPGSDSVIFPAPELIGKENEKKDNYPKFVFEDYMRLYSAVKFQAKEPRFETMKAMETTVANNVGPLATA

SEQ ID NO: 10041 - protein, 321 aa, Brassica oleracea
MEKNIKFPVVDLSKLNGEERDQTMALVDDACQNWGFFELLNHGIPYDLMDNIERMTKEHYKKFMEQKFKEMLRSKNLDTLETEVENVDWESTFFLHHLPQTNLYDIPDMSDEYRAAMKDFGKRLENLAEELLDLLCENLGLEKGYLKKVFSGTKGPTFGTKVSNYPPCPKPEMIKGLRAHTDAGGLILLFQDDKVSGLQLLKDGVWVDVPPLKHSIVINLGDQLEVITNGKYKSIMHRVMTQKEGNRMSIASFYNPGSDAEISPAPSLVEKDSDEYPSFVFDDYMKLYAGVKFQPKEPRFEAMKNVAATTDLNPVATVETF

SEQ ID NO: 10042 - protein, 320 aa, Brassica oleracea
MEKNIKFPVVDLSKLIGEERDQTMALINDACENWGFFEIVNHGLPHDLMDNVEKMTKEHYKISMEQKFNDMLKSKGLENLEREVEDVDWESTFYLRHLPQSNLYDIPDMSDEYRTAMKDFGKRLENLAEDLLDLLCENLGLEKGYLKKVFHGTKGPTFGTKVSNYPACPKPEMIKGLRAHTDAGGIILLFQDDKVSGLQLLKDGDWIDVPPLNHSIVINLGDQLEVITNGRYKSVMHRVVTQKEGNRMSIASFYNPGSDAEISPASSLACKETEYPSFVFDDYMKLYAGVKFQPKEPRFEAMKNANAVTELNPTAAVETF

SEQ ID NO: 10043 - protein, 357 aa, Matthiola incana
APGTLTELAGESKLNSKFVRDEDERPKVAYNEFSDEIPVISLAGIDDVDGKRGEICREIVEACENWGIFQVVDHGVDTSLVADMTRLARDFFALPPEEKLRFDMSGGKKGGFIVSSHLQGEAVQDWREIVTYFSYPVRNRDYSRWPDKPQGWAKVTEEYSEKLMGLACKLLEVLSEAMGLEKESLTNACVDMDQKIVVNYYPKCPQPDLTLGLKRHTDPGTITLLLQDQVGGLQATRDDGNTWITVQPVEGAFVVNLGDHGHFLSNGRFKNADHQAVVNSNSSRLSIATFQNPAPEATVYPLKVREGEKAIMEEPITFAEMYKRKMGRDLELARLKKLAKEEHNHKEAAKPLDQILA

SEQ ID NO: 10044 - protein, 183 aa, Raphanus sativus
KGKIQGYGSKLANNASGQLEWEDYFFHLVYPEDKRDLSLWPKTPTDYIEATSEYAKCLRLLATKVFKALSIGLGLEPDRIEKEVGGLEELLLQMKINYYPKCPQPELALGVEAHTDVSALTFILHNMVPGLQLFYEGKWVIAKCVPDSIVMHIGDTLEILSNGKFKSILHRGLVNKEKVRVSW

SEQ ID NO: 10045 - protein, 191 aa, Raphanus sativus
VDTSLVADMTRLARDFFALAPEEKLKFDMSGGKKGGFIVSSHLQGESVQDWREIVTYFSYPVRNRDYSRWPTKPEGWVKVTEEYSEKLMSLACKLLEVLSEAMGLEKEALTNACVDMDQKIVVNYYPKCPQPDLTLGLKRHTDPGTITLLLQDQVGGLQATRDDGKTWITVQPVEGAFVVNLGDHGHYLSN

SEQ ID NO: 10046 - protein, 322 aa, Malus x domestica
MENFPVINLESLNGEGRKATMEKIKDACENWGFFELVSHGIPTEFLDTVERLTKEHYKQCLEQRFKELVASKGLEGVQTEVKDMDWESTFHLRHLPQSNISEVPDLKDEYRNVMKEFALKLEKLAEQLLDLLCENLGLEQGYLKKAFYGTKGPTFGTKVSNYPPCPNPDLIKGLRAHTDAGGLILLFQDDKVSGLQLLKDGEWVDVPPMRHSIVINLGDQLEVITNGKYKSVEHRVIAQTDGTRMSIASFYNPGSDAVIYPAPTLVEKEAEEKNQVYPKSVFEDYMKLYAGVKFEAKEPRFEAMKAVEIKASFGLGPVISTA

SEQ ID NO: 10047 - protein, 330 aa, Malus x domestica
MATFPVVDMDLINGEERAATLEKINDACENWGFFELVNHGISTELLDTVEKMNKDHYKKTMEQRFKEMVAAKGLEAVQSEIHYLDWESTFFLRHLPSSNISEIPDLEEDYRKTMKEFAVELEKLAEKLLDLLCENLGLEKGYLKKAFYGSKGPNFGTKVSNYPPCPKPDLIKGLRAHTDAGGIILLFQDDKVSGLQLLKDGEWMDVPPVHHSIVINLGDQIEVITNGKYKSIMHRVIAQSDGTRMSIASFYNPGDDAFISPAPALLEEKSEVSPTYPKFLFDDYMKLYSGLKFQAKEPRFEAMKARETTPVETARGLRAVRWNTTKRNQN

SEQ ID NO: 10048 - protein, 314 aa, Malus x domestica
MATFPVVDLSLVNGEERAATLEKINDACENWGFFELVNHGMSTELLDTVEKMTKDHYKKTMEQRFKEMVAAKGLDDVQSEIHDLDWESTFFLRHLPSSNISEIPDLEEEYRKTMKEFAVELEKLAEKLLDLLCENLGLEKGYLKKVFYGSKGPNFGTKVSNYPPCPKPDLIKGLRAHSDAGGIILLFQDDKVSGLQLLKDGEWVDVPPMHHSIVINLGDQIEVITNGKYKSVMHRVIAQSDGTRMSIASFYNPGNDSFISPAPAVLEKKTEDAPTYPKFVFDDYMKLYSGLKFQAKEPRFEAMKAKESTPVATA

SEQ ID NO: 10049 - protein, 314 aa, Malus x domestica
MATFPVVDLSLVNGEERAATLEKINDACENWGFFELVNHGMSTELLDTVEKMTKDHYKKTMEQRFKEMVAAKGLDDVQSEIHDLDWESTFFLRHLPSSNISEIPDLEEDYRKTMKEFAVELEKLAEKLLDLLCENLGLEKGYLKKVFYGSKGPNFGTKVSNYPPCPKPDLIKGLRAHSDAGGIILLFQDDKVSGLQLLKDGEWVDVPPMHHSIVINLGDQIEVITNGKYKSVMHRVIAQSDGTRMSIASFYNPGNDAFISPAPAVLEKKTGDAPTYPKFVFDDYMKLYSGLKFQAKEPRFEAMKAKEPTPVATA

SEQ ID NO: 10050 - protein, 318 aa, Prunus persica
METFPVVDLSQITGEKREAAMEKMNDACENWGFFELVNHGISHELMDTVEKLTKEHYKKCMEQRFKEMVASKGLEAVQSEIHDLDWESTFFLRHLPVSNISQIPDLDEDYRKVMKEFAVELEKLAEQLLDLLCENLGLEKGYLKKAFYGSKGPNFGTKVSNYPPCPKPDLIKGLRAHTDAGGIILLFQDDKVSGLQLLKDGQWIDVPPMHHSIVINLGDQLEVITNGKYKSVMHRVIAQPDGTRMSIASFYNPGDDAFICPAPALLEKETENISAYPKFVFDDYMKLYSGLKFHAKEPRFEAMKAMESTVNLDPVATV

SEQ ID NO: 10051 - protein, 319 aa, Prunus persica
MENFPIINLEGLNGEGRKATMEKIKDACENWGFFELVSHGIPTEFLDTVERLTKEHYRQCLEQRFKELVASKGLEAVKTEVNDMDWESTFYLRHLPKSNISEVPDLEDQYRNVMKEFALKLEKLAEQLLDLLCENLGLEQGYLKKAFYGTNGPTFGTKVSNYPPCPKPELIKGLRAHTDAGGLILLFQDDKVSGLQLLKDGQWIDVPPMRHSIVINLGDQLEVITNGKYKSVEHRVIAQTDGTRMSIASFYNPGSDAVIYPAPTLVEKEAEEKNQVYPKFVFEDYMKLYAGLKFQPKEPRFEAMKAVETNISLGPIATA

SEQ ID NO: 10052 - protein, 319 aa, Prunus persica
MENFPIINLEGLNGEGRKATMEKIKDACENWGFFELVSHGIPTEFLDTVERLTKEHYRQCLEQRFKELVASKGLEAVKTEVNDMDWESTFYLRHLPKSNISEVPDLEDQYRNVMKEFALKLEKLAEQLLDLLCENLGLEQGYLKKAFYGTNGPTFGTKVSNYPPCPNPELIKGLRAHTDAGGLILLFQDDKVSGLQLLKDGQWIDVPPMRHSIVINLGDQLEVITNGKYKSVEHRVIAQTDGTRMSIASFYNPGSDAVIYPAPTLVEKEAEEKNQVYPKFVFEDYMKLYAGLKFQPKEPRFEAMKAVETNISLGPIATA

SEQ ID NO: 10053 - protein, 270 aa, Prunus persica
CENWGFFELVNHGISHELMDTVEKLTKEHYKKCMEQRFKEMVASKGLEAVQSEIHDLDWESTFFLRHLPVSNISQIPDLDEDYRKVMKEFAVELEKLAEQLLDLLCENLGLEKGYLKKAFYGSKGPNFGTKVSNYPPCPKPDLIKGLRAHTDAGGIILLFQDDKVSGLQLLKDGQWIDVPPMHHSIVINLGDQIEVITNGKYKSVMHRVVAQPDGTRMSIASFYNPGDDAFICPATALLEKETENISAYPKFVFDDYMKLYSGLKFQAKE

SEQ ID NO: 10054 - protein, 268 aa, Prunus persica
ELVSHGIPTEFLDTVERLTKEHYRQCLEQRFKELVASKGLEAVKTEVNDMDWESTFYLRHLPKSNISEAPDLEDQYRNVMKEFALKLEKLAEQLLDLLCENLGLEQGYLKKAFYGTNGPTFGTKVSNYPPCPNPELIKGLRAHTDAGGLILLFQDDKVSGLQLLKDGQWVDVPPMRHSIVINLGDQLEVITNGKYKSVEHRVIAQTDGTRMSIASFYNPGSDAVIYPAPTLVEKEAEEKNQVYPKFVFEDYMKLYAGLKFQAKEPLQF

SEQ ID NO: 10055 - protein, 314 aa, Pyrus pyrifolia
MATFPVVDLSLVNGEERVATLEKINDACENWGFFELVNHGISTELLDTVEKMTKDHYKKTMEQRFKEMVAAKGLDAVQSEIHDLDWESTFFLRHLPSSNISEVPDLEEDYRKTMKEFAVELEKLAEKLLDLLCENLGLEKGYLKKVFYGSKGPNFGTKVSNYPPCPKPDLIKGLRAHSDAGGIILLFQDDKVSGLQLLKDGEWVDVPPMHHSIVINLGDQIEVITNGKYKSVMHRVIAQSDGTRMSIASFYNPGDDAFISPAPAVLEKKTEDAPTYPKFVFDDYMKLYSGLKFQAKEPRFEAMKAKESTPVATT

SEQ ID NO: 10056 - protein, 366 aa, Mesorhizobium loti
MPACSIGWVFRTEISSNIRKALGKELDMPRIVPVLDLSRLEQGASERRTFLADLRSASRDIGFFYLAGHGISWAEISEVLTASRQFFALPEADKLAIEMVKSSQFRGYTRAGGELTKGREDWREQLDIGVERQAIAQGPGTPAWTRLQGPNQWPAALPDLKPALLAWQSKVTAVAIRLLKAFAQSLDQPEDAFDPIYSSEPNHRMKIVRYPGRDTTGGDQGVGAHKDGGFLTLLLQDDNKGLQVDYDGSWVDVDPIPGTLVVNIGELLELASNGYLRATVHRVVTPPAGVERISVPFFFSARLDATIPLLGLSEELAAQARGPASDPDNPLFRDVGTNVLKSRLRSHPDVARRHYADLLKGESRVG

SEQ ID NO: 10057 - protein, 308 aa, Cicer arietinum
MAVPVIDFSKLNGEERAKTMAQIANGCEEWGFFQLINHGIPEELLERVKKVSSEFYKLEREENFKNSTTVKLLNDIAEKKSSEKLENVDWEDVITLLDNNEWPENTPCFRETMLEYRSELKKLAENIMEVMDENLGLPKGYIKKALNDGDEDNAFFGTKVSHYPPCPYPELVNGLRAHTDAGGVILLFQDDKVGGLQMLKDGEWIDVQPLPNAIVINTGDQIEVLTNGRYKSCWHRVLTSTDGNRRSIASFYNPPLKATISPAPQLAEKENQQVDDTYPKFVFGDYMSVYAEQKFLPKEPRFKAVKAI

SEQ ID NO: 10058 - protein, 318 aa, Glycine max
MEKFPVVDMGNLNNEERSATMEIIKDACENWGFFELVNHGISIELMDTVERMTKEHYKKCMEQRFKEMVASKGLESAQSEINDLDWESTFFLRHLPASNISEIPDLDEDYRKVMKDFAVELEELAELVLDLLCENLGLEKGYLKKVFYGSKGPNFGTKVSNYPPCPKPELIKGLRAHTDAGGIILLFQDHKVSGLQLLKDGHWIDVPPMRHSIVINLGDQLEVITNGKYKSVMHRVITQTDGNRMSIASFYNPGNDALIAPAPALVKEDETSQVYPKFVFDDYMKLYAGLKFQAKEPRFQAMKATESSNINLGPIATV

SEQ ID NO: 10059 - protein, 318 aa, Glycine max
MENFPVVDMGNLNNEERSATMEIIKDACENWGFFELVNHGISIELMDTVERMTKEHYKKCMEQRFKEMVASKGLESAQSEINDLDWESTFFLRHLPVSNISEIPDLDEDYRKVMKDFAVELEKLAELLLDLLCENLGLEKGYLKKVFYGSKGPNFGTKVSNYPPCPTPDLIKGLRAHTDAGGIILLFQDDKVSGLQLLKDDQWIDVPPMRHSIVINLGDQLEVITNGKYKSVMHRVIAQTDGTRMSIASFYNPGDDAVISPAPALVKELDETSQVYPKFVFDDYMKLYAGLKFQAKEPRFEAMKANASVVDVGAIATV

SEQ ID NO: 10060 - protein, 316 aa, Glycine max
  unsure (1)..(316): unsure at all Xaa locations
MTNFPLINLEKLSGEERNDTMXEKIKDACENWGFFELVNHGIPHDILDTVERLTKEHYRKCMEERFKEFMASKGLDAVQTEVKDMDWESTFHLRHLPESNISEIPDLIDEYRKVMKDFALRLEKLAEQLLDLLCENLGLEKGYLKKAFYGSRGPTFGTKVANYPPCPNPDLVKGLRPHTDAGGIVLLFQDDKVSGLQLLKDGQWVDVPPMRHSIVVNIGDQLEVITNGKYRSVEHRVIAQTDGTRMSIASFYNPGSDAVIYPAPELLEKEAEEKSQLYPKFVFEDYMKLYAKLKFQAKEPRFEAFKASNFGPIATA

SEQ ID NO: 10061 - protein, 315 aa, Glycine max
MTNFPLINLEKLSGEERNDTMEKIKDACENWGFFELVNHGIPHDILDTVERLTKEHYRKCMEERFKELVASKGLDAVQTEVKDMDWESTFHLRHLPESNISEIPDLIDEYRKVMKDFALRLEKLAEQLLDLLCENLGLEKGYLKKAFYGSRGPTFGTKVANYPPCPNPELVKGLRPHTDAGGIILLFQDDKVSGLQLLKDGQWVDVPPMRHSIVVNIGDQLEVITNGKYKSVEHRVIAQTDGTRMSIASFYNPGSDAVIYPAPELLEKEAEEKNQLYPKFVFEDYMKLYAKLKFQAKEPRFEAFKASNFGPIATV

SEQ ID NO: 10062 - protein, 320 aa, Glycine max
  unsure (1)..(320): unsure at all Xaa locations
MANFPVVDMGKLNTEERSAAMEIIKDACENWGFFELVNHGISIELMDTVERLTKEHYKKTMEQRFKEMVASKGLESXVQSEINDLDWESTFFLRHLPVSNVSDNSDLDEDYRKTMKKFALELEKLAEQLLDLLCENLGLEKGYLKKVFYGSKGPNFGXTKVSNYPPCPTPDLIKGLRAHTDAGGIILLFQDDKVSGMQLLKDDQWIDVPPMRHSIVINLGDQLEVITNGKYKSVMHRVIAQADDTRMSIASFYNPGDDAVISPAPALVKELDETSQVYPKFVFDDYMKLYAGLKFQAKEPRFEAMKANASVVDVGAIATV

SEQ ID NO: 10063 - protein, 307 aa, Glycine max
MENFPVINLENLNGEARKATLHQIEDACQNWGFFELVNHGIPLELLDTVERLTKEHYRKCMEKRFKEAVSSKGLEDEVKDMDWESTFFLRHLPTSNISEIPDLSQEYRDAMKEFAQKLEKLAEELLDLLCENLGLEKGYLKNAFYGSRGPNFGTKVANYPACPKPELVKGLRAHTDAGGIILLLQDDKVSGLQLLKNGQWVDVPPMRHSIVVNLGDQIEVITNGRYKSVEHRVIAQTNGTRMSVASFYNPASDALIYPAPALLEQKAEDTEQVYPKFVFEDYMKLYATLKFQPKEPRFEAMKAVNSF

SEQ ID NO: 10064 - protein, 308 aa, Glycine max
  unsure (1)..(308): unsure at all Xaa locations
MENFPVINLENLNGEERKATLNQIEDACQNWGFFELVSHGIPLELLDTVERLTKEHYRKCMEKRFKEAVSSKGLEAEVKDMDWESTFFLRHLPTSNISEIPDLSQEYRDAMKEFAQKLEKLAEELLDLLCENLGLEKGYLKNAFYGSRGPNFGTKVANYPACPKPELVKGLRAHTDAGGIILLLXQDDKVSGLQLLKNGQWVDVPPMRHSIVVNLGDQIEVITNGRYKSVEHRVIAQTNGTRMSVASFYNPASDALIYPAPALLEQKAEDTEQVYPKFVFEDYMKLYATLKFQPKEPRFEAMKAVNSF

SEQ ID NO: 10065 - protein, 317 aa, Glycine max
  unsure (1)..(317): unsure at all Xaa locations
MTNFPLINLEKLSGEERNDTMEKIKDACENWGFFELVNHGIPHDILDTVERLTKEHYRKCMEERFKELVASKGLDAVQTEVKDMDWESTFHLRHLPESNISEIPDLIDEYRKVMKDFALRLEKLAEQLLDLLCENLGLEKGXYLKKALYGSRGPTFGTQVANYPACPTPETVNGXMDHTDASGIMLVXDDDKVSGLQXLLRDGQWSDVPPMRHSIAVTIGDQLEVITNGKHKSVEHRVIAQTDGTRMSIASFYNPGSDAVIYPAPELLEKEAEEKNQLYPKFVFEDYMKLYAKLKFQAKEPRFEAFKASNFGPIATV

SEQ ID NO: 10066 - protein, 357 aa, Medicago sativa
MAQAKTITSLSEENTFESGFIRDEDERPKVAYNQFSNEIPVISIAGIDEVNGRREEICKKIVEACEEWGIFQIVDHGVDTKLISEMTHLSREFFALPPEEKLRFDMSGGKKGGFVVSSHLQGEVVQDWREMVIYFSYPIKDRDYSRWPDKPEEWKKVIEEYSENLMNLGCKLLEVLSEAMDLEKDALTKACVDMDQKIVVNLYPKCPKPDLTLGNKRHTDPGTITLLLQDQVGGLQATKDNGKTWITIQPIEGAFVVNLGDHGHVLSNGRFKNADHQAVVNSNHDRLSIATFQNPAQDATVYPLKIREGEKSLLEEPITFAEMYRRKMSKDIETAKLKKLAKEKQLQDMEINAKVED

SEQ ID NO: 10067 - protein, 357 aa, Medicago sativa
MAQAKTITSLSEENTFESGFIRDEDERPKVAYNQFSNEIPVISIAGIDEVNGRREEICKKIVEACEEWGIFQIVDHGVDTKLISEMTHLSREFFALPPEEKLRFDMSGGKKGGFVVSSHLQGEVVQDWREMVIYFSYPIKDRDYSRWPDKPEEWKKVIEEYSENLMNLGCKLLEVLSEAMDLEKDALTKACVDMDQKIVVNLYPKCPKPDLTLGNKRHTDPGTITLLLQDQVGGLQATKDDGKTWITIQPIEGAFVVNLGDHGHVLSNGRFKNADHQAVVNSNHDRLSIATFQNPSQDATVYPLKIREGEKSLLEEPITFAEMYKRKMSKDIETAKLKKLAKEKQLQDLEINAKVED

SEQ ID NO: 10068 - protein, 313 aa, Medicago truncatula
MDSFPIINLENLNGDERKATMEKIKDACENWGFFELVNHGIPHDLMDTVERLTKEHYRKCMEQRFKELVSSKGLEAVQTEVKDMDWESTFHLRHLPESNISEIPDLSDEYRKSMKEFALKLETLAEELLDLLCENLGLEKGYLKKALYGSKGPTFGTKVANYPPCPKPDLVKGLRAHTDAGGIILLFQDDKVSGLQLLKDGNWVDVPPMHHSIVINLGDQLEVITNGKYKSVEHRVVAQTDGTRMSIASFYNPGSDAVIYPAPTLIEENNEIYPKFVFEDYMNLYARLKFQAKEPRFEAFKESNVNLGPIATV

SEQ ID NO: 10069 - protein, 315 aa, Phaseolus lunatus
MSNFPVINFERLNGEERKDTMEKIKDACENWGFFELVNHGIPHDLLDTVERLTKEHYQKCMEERFKELMASKGLEAIQTEVKDMDWESTFHLRHLPESNISEVPDLVDEYRKVMKDFALRLEKLAEQLLDLLCENLGLEKGYLKKAFYGSRGPTFGTKVANYPPCPNPELVKGLRPHTDAGGIILLFQDDKVSGLQLLKDDQWVDVPPMRHSIVVNIGDQLEVITNGKYKSVEHRVIAQTDGTRMSIASFYNPGSDAVIYPAPELLEKEAEEKAQLYPKFVFEDYMKLYAKLKFQAKEPRFEAFKASNFDPIATA

SEQ ID NO: 10070 - protein, 315 aa, Phaseolus vulgaris
MSNFPVINFEKLNGEERKDIMEKIKDACENWGFFELVDHGIPHDLLDTVERLTKEHYEKCMEEKFKESMASKGLEAIQTEVKDMDWESTFHLRHLPESNISEVPDLVDEYRKVMKDFALRLEKLAEQLMDLLCENLGLEKGYLKKAFYGSRGPTLPTKVANYPPCPNPRVVKGLRAHTDAGGIILLFQDDKVSGLQLLKDDQWVDVPPMRHSIVVNIGDQLEVITNGKYKSVEHRVIAQTDGARMSIASFYNPGSDAVIYPAPELLEKEAEEKAQLYPKFVFEDYMKLYADLKFQAKEPRFEAFKESNFDPIATA

SEQ ID NO: 10071 - protein, 332 aa, Phaseolus coccineus
MVVLSQPALNQFFLLKPFKSTPLFTGIPVVDLTHPDAKNLIVNACRDFGFFKLVNHGVPLELMANLENEALRFFKKSQSEKDRAGPPDPFGYGSKRIGPNGDVGWVEYLLLNTNPDVISPKSLCIFRENPHHFRAVVENYITAVKNMCYAVLELMAEGLGIRQRNTLSRLLKDEKSDSCFRLNHYPPCPEVQALNRNLVGFGEHTDPQIISVLRSNSTSGLQICLTDGTWVSVPPDQTSFFINVGDALQVMTNGRFKSVKHRVLADTTKSRLSMIYFGGPALSENIAPLPSVMLKGEECLYKEFTWCEYKKAAYTSRLADNRLAPFQKSAAD

SEQ ID NO: 10072 - protein, 317 aa, Pisum sativum
MENFPIVDMGKLNTEDRKSTMELIKDACENWGFFECVNHGISIEMMDTVEKLTKEHYKKCMEQRFKEMVATKGLECVQSEIDDLDWESTFFLRHLPVSSISEIPDLDDDYRKVMKEFALKLEELAEELLDLLCENLGLEKGYLKKAFYGSKGPNFGTKVSNYPPCPKPELIKGLRAHTDAGGIILLFQDDKVSGLQLLKDDQWIDVPPMRHSIVINLGDQLEVITNGKYKSVMHRVIAQTDGARMSIASFYNPGDDAVISPASTLLKENETSEVYPKFVFDDYMKLYMGLKFQAKEPRFEAMMKAMSSVKVGPVVSI

SEQ ID NO: 10073 - protein, 288 aa, Trifolium repens
ACENWGFFELVNHGISHDLMDTVERLTKEHYRICMEQRFKDLVANKGLEAVQTEVKDMDWESTFHLRHLPESNISEVPDLTDEYRKAMKEFALKLEKLAEELLDLLCENLGLEKGYLKKAFYGSKGPTFGTKVANYPPCPKPDLVKGLRAHTDAGGIILLFQDDKVSGLQLLKDGKWVDVPPMHHSIVINLGDQLEVITNGKYKSVEHRVIAQSDGTRMSIASFYNPGSDAVIYPATTLIEENNEVYPKFVFEDYMNLYAGLKFQAKEPRFEAFKESSNVKLGPIATV

SEQ ID NO: 10074 - protein, 292 aa, Trifolium repens
ACENWGFFELVNHGISIEMMDKVEKLTKDHYKKCMEQRFKEMVSSKGLECVQSEINDLDWESTFFLRHLPFSNISEIPDLDDDYRKIMKEFAQKLENLAEELLDLLCENLGLEKGYLKKVFYGSKGPNFGTKVSNYPPCPKPDLIKGLRAHTDAGGIILLFQDDKVSGLQLLKDDQWIDVPPMRHSIVINLGDQLEVITNGKYKSVMHRVIAQTDGARMSLASFYNPSDDAIISPAPTLLKENETTSEIYPKFVFDDYMKLYMGLKFQAKEPRFEAMMKAMSSVDVGPVVSI

SEQ ID NO: 10075 - protein, 280 aa, Trifolium repens
ACQNWGFFELVNHGIPHDLMDTLERLTKEHYRKCMEQRFKELVSSKGLDAVQTEVKDMDWESTFHVRHLPESNISELPDLSDEYRKVMKEFSLRLEKLAEELLDLLCENLGLEKGYLKKAFYGSRGPTFGTKVANYPQCPNPELVKGLRAHTDAGGIILLFQDDKVSGLQLLKDDEWIDVPPMRHSIVVNLGDQLEVITNGKYKSVEHRVIAQTNGTRMSIASFYNPGSDAVIYPAPELLEKETEEKTNVYPKFVFEEYMKIYAALKFQAKEPRFEALKA

SEQ ID NO: 10076 - protein, 310 aa, Vigna angularis
MENFPVINLENINGEERKAVLEKIEDACENWGFFELVNHGIPLELLDTVERLTKEHYRKCMEQRFKEAVASKGLEGVQGEIKDMDWESTFFLRHLPHSNISEIPDLSEEYRKAMKDFAQKLEKLAEELLDLLCENLGLEKGYLKKAFYGSKGPNFGTKVANYPPCPKPELVKGLRAHTDAGGIILLLQDDKVSGLQLLKDGQWVDVPPMRHSIVVNLGDQLEVITNGKYKSVEHRVIARTDGTRMSIASFYNPAGDAVIYPAPALLERKTQVIDKVYPKFVFEDYMRLYATLKFQPKEPRFEAMKGVNTV

SEQ ID NO: 10077 - protein, 329 aa, Euphorbia esula
MTTDFKTIPIIDISSLVSKCDEPGMAQDPTVCEVVKQLDQACREAGFFYVRGHGIPDSLIKEVKSLAHKFFHLPYEEKLKIKMTPAAGYRGYQRVGENVTKGTPDMHEAIDCYKEVTPGMYGALGKPMEGCNQWPLNLPNFKSLMEEYVSLCTDLSRKILRGIALTLCGSADALEGEIGGNPFWVLRIIGYPDVSSVKGHDSNENDIGCGAHPDYGLLTLVNQDDDITALEVRNMSGEWIAAPPIPGTFVCNIGDMLKIWSNGLYDSTLHRVVNNSPKYRVCVAYFHEPNFDAAIEPSEFCVKKTGGTRRSGKAVYGEHLVSKVQTNFG

SEQ ID NO: 10078 - protein, 312 aa, Oryza sativa (japonica cultivar-group)
MEIPVIDLKGLAGGDEERERTMAQLHEACKDWGFFWVENHGVEAALMEEVKSFVYRHYDEHLEKKFYASDLAKNLHLNKDDGDVLVDGGDLADQADWEATYFIQHRPKNTAADFPDIPPAARESLDAYIAQAVSLAELLAGCISTNLGLAGAAGVVDAFAPPFVGTKFAMYPPCPRPDLVWGLRAHTDAGGIILLLQDDAVGGLEFHRGGREWVPVGPTRRGRLFVNIGDQVEVLSGGAYKSVVHRVAAGAEGRRLSVATFYNPGPDAVIAPATAAAPYPGPYRYGDYLDYYQGTKFGDKTARFQAVKKLFS

SEQ ID NO: 10079 - protein, 323 aa, Pelargonium x hortorum
MENFPVIDMEMLNGEERSAAMNMIKDACENWGFFEIKNHGISHELMDKVERLTKEHYAKFMEQRFKEMVASKGLDATQSEIDDLDWESTFFLRHLPTSNISEIPDLEHDYRLAMKEFAERLEKLAEELLDLLCENLGLEKGYLKKAFYGSKGPTFGTKVSNYPPCPKPELIKGLRAHTDAGGLILLFQDDKVSGLQLLKDGRWIDVPPMRHSIVINLGDQLEVITNGKYKSVMHRVIAQTDGNRMSLASFYNPGSDAVIYPAPALIEEENQNPIYPKFVFEDYMKLYAGLKFQAKEPRFEAMKAMPLPMAMDTTPLQGPVATA

SEQ ID NO: 10080 - protein, 318 aa, Pelargonium x hortorum
MESFPVINMEKLNGEERAATMEKIKDACENWGFFELLNHGIPYELLDTVEKMTKEHYRKCMEQRFKEMVASKGLEGVEVEVEDLDWESTFFLKHLPESNISQVPDLQDEYRKVMKEFAAKLEKLAEELLDLLSENLGLEKGYLKKAFYGSKGPTFGTKVSNYPPCPKPDLIKGLRAHTDAGGLILLFQDDKVSGLQLLKDGKWVDVPPMHHSIVINLGDQLEVITNGKYKSIEHRVIAQSDGTRMSIASFYNPGSDAVIYPAPALLEKETEEKQVYPKFVFEDYMKLYSGLKFQAKEPRFEAMKAVEANVTLDPIRTA

SEQ ID NO: 10081 - protein, 320 aa, Pelargonium x hortorum
MEKFPVINLEKLNGEGRAETMDKIKDACENWGFFEVLNHGIPYELLDTVEKMTKEHYKKCMEQRFKEMVTSKGLDGVEAEVEDMDWESTFFLKHLPESNISQVPDLQDNYRKVMKEFALKLENLAEELLDLLCENLGLEKGYLKKAFYGSKGPTFGTKVSNYPPCPKPDLIKGLRAHTDAGGLILLFQDDKVSGLQLLKDGNWVDVPPMHHSIVINLGDQLEVITNGKYKSVEHRVIAQSDGTRMSIASFYNPGSDAVIYPAPALLAKETEEKQVYPKFVFEDYMKLYSGLKFKAKEPRFEVMKAREDNINVTLDPIATS

SEQ ID NO: 10082 - protein, 386 aa, Catharanthus roseus
FLPNSEQERKMKDLNFHAATLSEEESLRELKAFDETKAGVKGIVDTGITKIPRIFIDQPKNLDRISVCRGKSDIKIPVINLNGLSSNSEIRREIVEKIGEASEKYGFFQIVNHGIPQDVMDKMVDGVRKFHEQDDQIKRQYYSRDRFNKNFLYSSNYVLIPGIACNWRDTMECIMNSNQPDPQEFPDVCRDILMKYSNYVRNLGLILFELLSEALGLKPNHLEEMDCAEGLILLGHYYPACPQPELTFGTSKHSDSGFLTILMQDQIGGLQILLENQWIDVPFIPGALVINIADLLQLITNDKFKSVEHRVLANKVGPRISVAVAFGIKTQTQEGVSPRLYGPIKELISEENPPIYKEVTVKDFITIRFAKRFDDSSSLSPFRLNN

SEQ ID NO: 10083 - protein, 382 aa, Catharanthus roseus
SEQERKMKDLNFHAATLSEEESLRELKAFDETKAGVKGIVDTGITKIPRIFIDQPKNLDRISVCRGKSDIKIPVINLNGLSSNSEIRREIVEKIGEASEKYGFFQIVNHGIPQDVMDKMVDGVRKFHEQDDQIKRQYYSRDRFNKNFLYSSNYVLIPGIACNWRDTMECIMNSNQPDPQEFPDVCRDILMKYSNYVRNLGLILFELLSEALGLKPNHLEEMDCAEGLILLGHYYPACPQPELTFGTSKHSDSGFLTILMQDQIGGLQILLENQWIDVPFIPGALVINIADLLQLITNDKFKSVEHRVLANKVGPRISVAVAFGIKTQTQEGVSPRLYGPIKELISEENPPIYKEVTVKDFITIRFAKRFDDSSSLSPFRLNN

SEQ ID NO: 10084 - protein, 401 aa, Catharanthus roseus
MPKSWPIVISSHSFCFLPNSEQERKMKDLNFHAATLSEEESLRELKAFDETKAGVKGIVDTGITKIPRIFIDQPKNLDRISVCRGKSDIKIPVINLNGLSSNSEIRREIVEKIGEASEKYGFFQIVNHGIPQDVMDKMVDGVRKFHEQDDQIKRQYYSRDRFNKNFLYSSNYVLIPGIACNWRDTMECIMNSNQPDPQEFPDVCRDILMKYSNYVRNLGLILFELLSEALGLKPNHLEEMDCAEGLILLGHYYPACPQPELTFGTSKHSDSGFLTILMQDQIGGLQILLENQWIDVPFIPGALVINIADLLQLITNDKFKSVEHRVLANKVGPRISVAVAFGIKTQTQEGVSPRLYGPIKELISEENPPIYKEVTVKDFITIRFAKRFDDSSSLSPFRLNN

SEQ ID NO: 10085 - protein, 344 aa, Hyoscyamus niger
MATFVSNWSTKSVSESFIAPLQKRAEKDVPVGNDVPIIDLQQHHHLLVQQITKACQDFGLFQVINHGFPEELMLETMEVCKEFFALPAEEKEKFKPKGEAAKFELPLEQKAKLYVEGEQLSNEEFLYWKDTLAHGCHPLDQDLVNSWPEKPAKYREVVAKYSVEVRKLTMRMLDYICEGLGLKLGYFDNELSQIQMMLTNYYPPCPDPSSTLGSGGHYDGNLITLLQQDLPGLQQLIVKDATWIAVQPIPTAFVVNLGLTLKVITNEKFEGSIHRVVTDPTRDRVSIATLIGPDYSCTIEPAKELLNQDNPPLYKPYSYSEFADIYLSDKSDYDSGVKPYKINV

SEQ ID NO: 10086 - protein, 320 aa, Lycopersicon esculentum
MESNFPVVDMGLLQTEKRPEAMDKIKDACENWGFFELVNHGISHELLDAVENLTKGHYKKCMEQRFKEMVASKGLEAVQTEIDDLDWESTFFLKHLPVSNVYEVPDLDDEYRKVMKDFALKLEKLAENLLDLLCENLGLEKGYLKKAFYGSKGPTFGTKVSNYPPCPKPDLIKGLRAHTDAGGIILLFQDDKVSGLQLLKDGNWIDVPPMKHSIVINLGDQLEVITNGRYKSIEHRVIAQQDGTRMSIASFYNPGSDAVIFPAPELIEKTEEDIKLKYPKFVFEDYMKLYAGLKFQAKEPRFEAMKAVETTVNLGPIETV

SEQ ID NO: 10087 - protein, 315 aa, Lycopersicon esculentum
MENFPIINLEKLNGDERANTMEMIKDACENWGFFELVNHGIPHEVMDTVEKMTKGHYKKCMEQRFKELVASKGLEAVQAEVTDLDWESTFFLRHLPTSNISQVPDLDEEYREVMRDFAKRLEKLAEELLDLLCENLGLEKGYLKNAFYGSKGPNFGTKVSNYPPCPKPDLIKGLRAHTDAGGIILLFQDDKVSGLQLLKDEQWIDVPPMRHSIVVNLGDQLEVITNGKYKSVLHRVIAQTDGTRMSLASFYNPGSDAVIYPAKTLVEKEAEESTQVYPKFVFDDYMKLYAGLKFQAKEPRFEAMKAMESDPIASA

SEQ ID NO: 10088 - protein, 316 aa, Lycopersicon esculentum
MENFPIINLEKLNGAERVATMEKINDACENWGFFELVNHGIPHEVMDTVEKLTKGHYKKCMEQRFKELVAKKGLEGVEVEVTDMDWESTFFLRHLPSSNISQLPDLDDVYREVMRDFRKRLEKLAEELLDLLCENLGLEKSYLKNTFYGSKGPNFGTKVSNYPPCPKPDLIKGLRAHTDAGGIILLFQDDKVSGLQLLKDGRWIDVPPMRHSIVVNLGDQLEVITNGKYKSVMHRVIAQKDGTRMSLASFYNPGNDALIYPAPALVDKEAEEHNKQVYPKFMFDDYMKLYANLKFQAKEPRFEAMKAMESDPIAIA

SEQ ID NO: 10089 - protein, 316 aa, Lycopersicon esculentum
MENFPIINLENLNGDERAKTMEMIKDACENWGFFELVNHGIPHEVMDTVEKLTKGHYKKCMEQRFKELVASKGLEAVQAEVTDLDWESTFFLRHLPTSNISQVPDLDEEYREVMRDFAKRLEKLAEELLDLLCENLGLEKGYLKNAFYGSKGPNFGTKVSNYPPCPKPDLIKGLRAHTDAGGIILLFQDDKVSGLQLLKDEQWIDVPPMRHSIVVNLGDQLEVITNGKYKSVMHRVIAQTDGTRMSLASFYNPGNDAVIYPAPSLIEESKQVYPKFVFDDYMKLYAGLKFQPKEPRFEAMKAMEANVELVDQIASA

SEQ ID NO: 10090 - protein, 295 aa, Lycopersicon esculentum
MEMIKDACENWGFFELVNHGIPHEVMDTVEKMTKGHYKKCMEQRFKELVASKGLEAVQAEVTDLDWESTFFLRHLPTSNISQVPDLDEEYREVMRDFAKRLEKLAEELLDLLCENLGLEKGYLKNAFYGSKGPNFGTKVSNYPPCPKPDLIKGLRAHTDAGGIILLFQDDKVSGLQLLKDEQWIDVPPMRHSIVVNLGDQLEVITNGKYKSVLHRVIAQTDGTRMSLASFYNPGSDAVIYPAKTLVEKEAEESTQVYPKFVFDDYMKLYAGLKFQAKEPRFEAMKAMESDPIASA

SEQ ID NO: 10091 - protein, 360 aa, Nicotiana sylvestris
  unsure (1)..(360): unsure at all Xaa locations
MPSRISDDVHQKQLDLYTIKELPESHAWRSSLDHDYQCNDSLESIPVIDLNDEKFAIENIGHACKTWGAFQIINHNISQRLLDNMEEAGKRLFSLPMQQKLKAARSADGIAGYGVARISSFFSKLMWSEGFTIVGSPFDHARQLWPHDYKKFCDVIEEYEKEMEKLAGRLMWLMLGSLGISKDDMKWACCGPRXECSALQLNSYPACPDPDRAMGLAAHTDSTILTILHQNNTSGLQVFKEGNGWVTVPPLSGALVINVGDLLHILSNGLYPSVLHRAVVNRTRHRLSVAYLYGPPSGVKISPLSKLVDQGHPPLYRSVTWSEYLGTKAKHFDKALSSFQLCAPRIGFANPKDRNSVQVG

SEQ ID NO: 10092 - protein, 370 aa, Nicotiana sylvestris
MPFRISDSFRTHSQKHLDLNSIKELPESHAWTSSNDYPSENSCNFESIPVIDLNNNNHNNINVLEHIGQACKKWGAFQIINHNISERLLQDIELAGKNLFSLPMQQKLKAARSPDGVTGYGVARISSFFSKLMWSEGFTIVGSPLEHARQIWPQDYKKFCDAIEEYEREMEKLAGRLMWLMLGSLGITKEDVNWAVGPKGESKGGSAALQLNSYPACPDPDRAMGLAAHTDSTILTILHQNNTSGLQVFKEGSGWVTVPPFLGALVVNVGDLLHILSNGSYPSVLHRAVVNRTRHRLSVAYLYGPPSGVKISPLAKLVDQRHPPLYRAITWSEYLGTKAKHFDKALSSVRLCAPLTGFADAKDHNGVQVG

SEQ ID NO: 10093 - protein, 319 aa, Nicotiana tabacum
MENFPIINLEKLNGSERADTMEMIKDACENWGFFELVNHGIPHEVMDTVEKMTKGHYKKCMEQRFKELVASKGLEAVQAEVTDLDWESTFFLRHLPVSNICEVPDLDDQYREVMRDFAQRLEKLAEELLDLLCENLGLEKGYLKKIFYGTQGPNFGAKVSNYPPCPQPDLIKGLRAHTDAGGIILLFQDDKVSGLQLLKDGQWIDVPPMRHSIVVNLGDQLEVITNGKYKSVMHRVITQTDGTRMSLASFYNPGSDAVIFPAPTLVEKEAEESKAIYPKFVFDDNMKLYAGLKFQAKEPRFEAMIKAMETVKSDPVATA

SEQ ID NO: 10094 - protein, 319 aa, Nicotiana tabacum
MENFPIINLEKLNGSERADTMEMIKDACENWGFFELVNHGIPHEVMDTVEKMTKGHYKKCMEQRFKELVASKGLEAVQAEVTDLDWESTFFLRHLPVSNICEVPDLDDQYREVMRDFAKRLEKLAEELLDLLCENLGLEKGYLKKIFYGTKGPNFGSKVSNYPPCPKPDLIKGLRAHTDAGGIILLFQDDKVTGLQLLKDGQWIDVPPMRLSIVVNLGDQLEVITNGKYKSVMHRVITQTDGTRMSLASFYNPGSDAVIFPAPTLVEKEAEESKAIYPKFVFDDYMKLYAGLKFQAKEPRFEAMIKAMETVKSDPVATA

SEQ ID NO: 10095 - protein, 308 aa, Nicotiana tabacum
MELLNTEQRAATMETIKDACENWGFFEVVNHGISHELLDTVEKLTKGHYKKCMEERFKEMVASKGLEAVQTEIKDLDWESTFFLKHLPISNISEVPDLEDEYRKIMKEFAEKLEKLAEQLLDLLCENLGLEQGYLKKAFYGSKGPTFGTKVSNYPPCPKPDLIKGLRAHTDAGGIILLFQDDKVSGLQLLKDDKWIDVPPMRHSIVINLGDQLEVITNGKYKSVEHRVIAQPDGNRMSIASFYNPGSDAVIYPAPELLEKENKVIYPKFVFEDYMKLYAGLKFQAKEPRFEAMKAVETTVNSAPIATV

SEQ ID NO: 10096 - protein, 319 aa, Nicotiana tabacum
MENFPIINLEKLNGSEKAATMEMIKDACENWGFFELVNHGIPHEVMDTVEKLTKGHYKKCMEQRFKELVASKGLEGVQAEVTDMDWVCTFFLRHLPVSNISEVPDLDDQYREVMRDFAKRLENLAEELLYLLCENLGLEKGYLKNVFYGSKGPNFGTKVSNYSPCPKPDLIKGLRAHTDAGGIILLFQDDKVSGLQLLKDGQWIDVPPMRHSIVVNLGDQLEVITNGKYKSVMHRVVAQKDGTRMSLASFYNPGSDAVIYPAPALVEKEAAESKQVYPKFVFDDYMKLYAGLKFQAKEPRFEAMKSIESDVKMDPIVTA

SEQ ID NO: 10097 - protein, 299 aa, Nicotiana tabacum
MEMIKDACENWGFFELVNHGIPHEVMDTVEKLTKGHYKKCMEQRFKELVASKGLEGVQAEVTDMDWESTFFLRHLPVSNISEVPDLDDQYREVMKDFAKRLENLAEELLDLLCENLGLEKGYLKNVFYGSKGPNFGTKVSNYPPCPKPDLIKGLRAHTDAGGIILLFQDDKVSGLQLLKDGQWIDVPPMRHSIVVNLGDQLEVITNGKYKSVMHRVIAQKDGTRMSLASFYNPGSDAVIYPAPALVEKEAAESKQVYPKFVFDDYMKLYAGLKFQAKEPRFEAMKSIESDVKMDPIATA

SEQ ID NO: 10098 - protein, 320 aa, Petunia x hybrida
MENFPIINLEKLNGSERDATMEMIKDACENWGFFELVNHGIPHEVMDTVEKLTKGHYKKCMEQRFKELVASKGLEAVQAEVTDLDWESTFFLRHLPVSNISEVPDLDDEYREVMRDFAKRLEKLAEELLDLLCENLGLEKGYLKKAFYGSKGPNFGTKVSNYPPCPKPDLIKGLRAHTDAGGIILLFQDDKVSGLQLLKDGQWIDVPPMRHSIVVNLGDQLEVITNGKYKSVLHRVIAQTDGTRMSLASFYNPGSDAVIYPAPTLVEKEADQECKQVYPKFVFDDYMKLYAGLKFQAKEPRFEAMKAREADVKSDPIATA

SEQ ID NO: 10099 - protein, 319 aa, Petunia x hybrida
MENFPIINLENLCGAERDATMEMIKDACENWGFFELVNHGIPHEVMDTVEKFTKGHYKKCMEQRFKELVASKGLEAVQAEVTDLDWESTFFLRHLPVSNISEVPDLDDEYREVMRDFAKRLEKLAEELLDLLCENLGLEKGYLKKAFYGSKGPNFGTKVSNYPPCPKPDLIKGLRAHTDAGGIILLFQDDKVSGLQLLKDDQWIDVPPMRHSIVINLGDQLEVITNGKYKSVPHRVIAQTDGTRMSLASFYNPASDAVIYPAPALVERDAEENKQIYPKFVFDDYMKLYARLKFQAKEPRFEAMKAMEADVKIDPVATV

SEQ ID NO: 10100 - protein, 319 aa, Petunia x hybrida
MENFPIISLDKVNGVERAATMEMIKDACENWGFFELVNHGIPREVMDTVEKMTKGHYKKCMEQRFKELVASKALEGVQAEVTDMDWESTFFLKHLPISNISEVPDLDEEYREVMRDFAKRLEKLAEELLDLLCENLGLEKGYLKNAFYGSKGPNFGTKVSNYPPCPKPDLIKGLRAHTDAGGIILLFQDDKVSGLQLLKDGQWIDVPPMRHSIVVNLGDQLEVITNGKYKSVMHRVIAQKDGARMSLASFYNPGSDAVIYPAPALVEKEAEENKQVYPKFVFDDYMKLYAGLKFQAKEPRFEAMKAMETDVKMDPIATV

SEQ ID NO: 10101 - protein, 320 aa, Petunia x hybrida
MENFPIISLDKVNGVERAATMEMIKDACENWGFFELVNHGIPREVMDTVEKMTKGHYKKCMEQRFKELVASKALEGVQAEVTDMDWESTFFLKHLPISNISEVPDLDEEYREVMRDFAKRLEKLAEELLDLLCENLGLEKGYLKNAFYGSKGPNFGTKVSNLPPCPKPDLIKGLRAHTDAGGIILLFQDVKVSGLQLLKDGQWIDVPPMRHSIVVNLGDQLEVITNGKYKSVMHRVIAQKDGARMSLASFYNPGSDAVIYPAPALVEKEEAEKNKQVYPKFVFDDYMKLYAGLKFQAKEPRFEAMKAMETDVKMDPIATV

SEQ ID NO: 10102 - protein, 341 aa, Solanum chacoense
MAELLSNWSSTLEAVPPSHCIPVHERPSDPVEIVDSIPVIDLGKANGEERSAVVKDLLKAFEEYGFFQIINHGVPVDLMDEAMKVYKEFFSLPAEEKAEYAKDAANDTNRGAATLYSSSAKHYDSEEHRYWRDVLEHSCNLDGKDKKTWPSNPPRYREVIGAYGDELRRVSKVILGLLAEGLGLEAGFFDKELGQRMLVNHYPACPDPSLTLGVGGHCDPNLITIIQQEVYGLQILKDDKWIGVQPIRNAFVVNSGLPITVVSNGKLTSVAHRVVTNTTHSRTSIGTFICPHDIVEPAKALVGPENPPQFKSFNWGIDFMPHYLSKKSVYHASLEPFKIDA

SEQ ID NO: 10103 - protein, 341 aa, Solanum melongena
MADLLSNYSSKLEAVPPSHCLPLHERPVDPVEIVNTIPVIDLGKAKGDERPAVVQQLMKAFEEYGFFQIINHGVPEKLMEEAMKVYKEFFSLPAEEKERYAKDAANNTATGAAKMYSSSAKHYDSEEHRYWRDVLEHSANLDGKDRETWPDKPSRYREVIGEYSDELRRVSKVILGMVAEGLGLEPGFFDKGLGQRMLVNHYPACPDPSLTLGVGGHCDPNLITIIQQEVYGLQILKDDKWIGVEPKPNAFVVNSGLPITVISNGKLASVAHRVVTNTTHSRTSIGTFICPENIVEPAKALVGPGNPPQFKSFNWGIDFMPHYLSKKSVYHAALEPFKIDA

SEQ ID NO: 10104 - protein, 319 aa, Solanum tuberosum
METFPVVNMEMLNTEKRAAILEKIKDACENWGFFEVIYHGISHDLMDTVEKFTKEHYKKCMEQRFKEMVASKGLEAVQTEIDDLDWESTFFLKHLPVSNISEVPDLEDDYRKIMKEFADKLEKLAEQLLDLLCENLGLEQGYLKKVFYGSKGPTFGTKVSNYPPCPKPDLIKGLRAHTDAGGIILLFQDDKVSGLQLLKDGKWIDVPPMRHSIVINLGDQLEVITNGKYKSVEHRVIAQPDGNRMSLASFYNPGSDAVIYPAPELLEKEEKENTVMYPKFVFEDYMKLYAGLKFQAKEPRFEAMKAVETAVNLGPIATV

SEQ ID NO: 10105 - protein, 315 aa, Solanum tuberosum
MENFPIINLEKLNGDERANTMEMIKDACENWGFFELVNHGIPHEVMDTVDKMTKGHYKKCMEQRFKELVASKGLEAVQAEVTDLDWESTFFLRHLPTSNISQVPDLDGEYREVMRDFAKRLEKLAEELLDLLCENLGLEKGYLKNAFFGSKGPNFGTKVSNYPPCPKPDLIKGLRAHTDAGGIILLFQDDKVSGLQLLKDEQWIDVPPMRHSIVVNLGDQLEVITNGKYKSVMHRVIAQTDGTRMSLASFYNPGSDAVIYPAKTLVEKEAEESTQVYPKFVFDDYMKLYAGLKFQAKEPRFEAMKAMESDPIASA

SEQ ID NO: 10106 - protein, 312 aa, Solanum tuberosum
MQARAEFGTSGTRIPVIDFSKLEGEERSATMSLLHQACEKWGFFMIENHGIDTYLMDNVKQLVNQHYEANMKKRFYESELPMSLEKKGNISNTDWESTFFVWHRPTSNIYEIQGLSKELCKAVDDYIDQLIELAENLSELMCENLGLEKSCIKEHFQAARVPSVGTKVAIYPQCPRPDLVRGLREHTDAGGIILLLQDEQVPGLEFFKDGHWVNIPPSKNNRLFVNIGDQIEILSNGMYKSIRHRVMAEKDGNRLSIATFYNPAGEAIISPAPKLLYPCHLRFQDYLNLYSKTKFAEKGPRFESAKTLANGH

SEQ ID NO: 10107 - protein, 368 aa, Ipomoea batatas
MAATLSTLTALAGEKALQSSFVRDEDERPKVGYNEFSDEIPVISLKGIDDVNGRRVQIRNDIVKACEDWGIFQVVDHGVDAGLIGEMTRLSKDFFALPPEEKLRFDMSGGKKGGFIVSSHLQGEAVKDWREIVTYFSYPVRARDYSRWPDKPEGWRAVTEKYSEKLMDLACKLLEVLSEAMGLEKEALTKACVDMDQKVVVNFYPKCPQPDLTLGLKRHTDPGTITLLLQDQVGGLQATKDGGKTWITVQPVDGAFVVNLGDHGHFLSNGRFKNADHQAVVNSERSRVSIATFQNPAPEATVYPLTVREGDKPIMEEPITFAEMYRRKMSKDLELARLKKFAKEQQQIVKAAAADKNLETKPIDQILA

SEQ ID NO: 10108 - protein, 368 aa, Ipomoea batatas
MAATLSTLTALAGEKSLQSSFVRDEDERPKVGYNEFSDEIPVISLKGIDDVNGRRVQIRNDIVKACEDWGIFQVVDHGVDAGLIGEMTRLSKDFFALPPEEKLRFDMSGGKKGGFIVSSHLQGEAVKDWREIVTYFSYPVRARDYSRWPDKPEGWRAVTEKYSEKLMDLACKLLEVLSEAMGLEKEALTKACVDMDQKVVVNFYPKCPQPDLTLGLKRHTDPGTITLLLQDQVGGLQATKDGGKTWITVQPVDGAFVVNLGDHGHFLSNGRFKNADHQAVVNSERSRVSIATFQNPAPEATVYPLTVREGDKPIMEEPITFAEMYRRKMSKDLELARLKKFAKEQQQIVKAAAADKNLETKPIDQILA

SEQ ID NO: 10109 - protein, 368 aa, Ipomoea batatas
MATTLSTLTALAGETALQSSFVRDEDERPKVGYNEFSDEIPVISLKGIDDVNGRRVQIRNDIVKACEDWGIFQVVDHGVDAGLIGEMTRLSKDFFALPPEEKLRFDMSGGKKGGFIVSSHLQGEAVKDWREIVTYFSYPVRARDYSRWPDKPEGWRAVTEKYSEKFMDLACKLLEVLSEAMGLEKEALTKACVDMDQKVVVNFYPKCPQPDLTLGLKRHTDPGTITLLLQDQVGGLQATKDGGKTWITVQPIDGAFVVNLGDHGHFLSNGRFKNADHQAVVNSERSRVSIATFQNPAPEAKVYPLKVREGEKPILEEPITFAEMYRRKMSKDLELARLKKFAKEQQQIINAATADKNLETKPIDQILA

SEQ ID NO: 10110 - protein, 374 aa, Bromheadia finlaysoniana
MAPVPFLPTAVTENTLRESFVRDEDERPKVAYNVFSHEIPVISLRGSTMREMEVEIEICWKIVAACEDWGIFQVVDHGVDAGLIADMTRLAREFFELPPEEKLRFDMSGGKKGGFIVSSHLQGEVVQDWREIVTYFSYPIRTRDYSRWPDKPEGWRAVVEEYSAKLMELACNLLGVLSEAMGLDREALAQACVDMDQKLVVNFYPKCPQPDLTLGLKRHTDPGTITLLLQDQVGGLQATKDGGETWITVQPVQNAFVVNLGDHGHYLSNGRFKNADHQAVVNSNCSRLSIATFQNPAPDGVVYPLAVREGEKPVMEEAITFAEMYRRKMSRDLELARLKKMGKMESKQKGAAGENAEAIGAAATKPKALNEILA

SEQ ID NO: 10111 - protein, 367 aa, Ipomoea purpurea
MTTVSTLTALAGETALRSSFVRDEDERPKVGYNEFSDEIPVISLKGIDDVLGRRVQIRKEIVKACEDWGIFQVVDHGVDAGLIGEMTRLSKDFFSLPPEEKLRFDMSGGKKGGFIVSSHLQGEAVKDWREIVTYFSYPVRARDYSRWPDKPEGLRAVTEKYSEKLMDLACKLLEVLSEAMGLEKEALTKACVEMDQKLVVNFYPKCPQPDLTLGLKRHTDPGTITLLLQDQVGGLQATKDGGKTWITVQPVDGAFVVNLGDHGHFLSNGRFKNADHQAVVNSEHSRMSIATFQNPAPEAKVYPLKVREGEKAILEEPITFAEMYRRKMSKDLELARIKKFAKEQQMIKAAAAADTNLETKPIDQILA

SEQ ID NO: 10112 - protein, 307 aa, Helianthus annuus
MANFPVINMENLNGSERGVTMEKINDACENWGFFELVNHGIPHDLLDKVEKMTKDHYKKCMEQRFKEMVAAKALEGVKAEVTDMDWESTFFLRHRPTSNISEIPDLVDEYRELMKDFAGKLEKLAEELLDLLCENLGLEKGYLKKAFYGSKGPNFGTKVSNYPPCPTPDLIKGLRAHTDAGGIILLFQDDKVSGLQLLKDGEWIDVPPMRHSIVINLGDQIEVITNGKYKSVMHRVIAQTDGTRMSIASFYNPGNDAVIYPAPTLLEKEPTEKEQSYPKFVFDDYMKLYAGLKFQAKEPRFEAHESS

SEQ ID NO: 10113 - protein, 295 aa, Helianthus annuus
NLNGSERGVTMEKINDACENWGFFELVNHGIPHDLLDKVEKMTKDHYKKCMEQRFKEMVAAKALEGVKAEVTDMDWESTFFLRHRPTSNISEIPDLVDEYRELMKDFAGKLEKLAEELLDLLCENLGLEKGYLKKAFYGSKGPNFGTKVSNYPPCPTPDLIKGLRAHTDAGGIILLFQDDKVSGLQLLKDGEWIDVPPMRHSIVINLGDQIEVITNGKYKSVMHRVIAQTDGTRMSIASFYNPGNDAVIYPAPTLLEKEPTEKEQSYPKFVFDDYMKLYAGLKFQAKEPRFEAHE

SEQ ID NO: 10114 - protein, 271 aa, Helianthus annuus
NWGFFEIVNHGISTELLDTVEKMTKGHYKKCMEDRFKDMVASKGLEAVQNQIDDLDWESTFYIRHLPESNISEIPDLEDEYRKVMREFAKELEKLAENILDIFCENLGLEKGYLKKAFYGAKGPTFGTKVSNYPPCPKPDLIEGLRAHTDAGGVILLFQDDKVSGLQLLKDDKWIDVPPMHHSIVINLGDQLEVITNGRYKSVMHRVIAQPDGTRMSIASFYNPGSDAVIYPAPQLVNKEEEKSNIYPKFVFEDYMKLYTAVKFQAKEPRF

SEQ ID NO: 10115 - protein, 144 aa, Helianthus annuus
NWGFFEIVHHGISTELLDRVQKMTKGHYKKCMEDRFKEMVAAKGLEAVQTEIDDLDWESTFYLRHLPKSNISEIPDLEHDYREVMKEFAKELEKLAEAILDILCENLGLEKGYLKEVFYGGKGPTFGTKVSNYPPCPKPDLIKV

SEQ ID NO: 10116 - protein, 117 aa, Helianthus annuus
MEEETFPVVNMEKLNGEQRAATMNLINDACENWGFFEIVHHGISTELLDRVQKMTKGHYKKCMEDRFKEMVAANASEAVQTEIDDLDWGSTFYLRHLPKSNISEIPDLEHDYREVIK

SEQ ID NO: 10117 - protein, 363 aa, Lactuca sativa
MHTRVADAFKAHPMVNQKHLDLKSMKELPESHAWLSQDGSPSYGSSSSEQVPVINLKDPNAMKLVGHACKTWGVFQVTNHGVPTNLLEEMEAAGRKLFALPIQQKLKAARAPDGVSGYGVARISSFFPKLMWSEGFTIIGSPYEHARKLWPNRYSRFCDVIEGYKHEMNNLAQRLMWLMLGSLGVTTEDVKWDGSQGSCPALQLNSYPACPDPDRAMGLAAHTDSTLLTILYQNNTSGLQAHREGAGWVTVPPIPGALVVNVGDLLHILSNGLYPSVLHRAMVNRTQHRLSVAYLYGPPSNVQISPLSKLTDHVHPPLYRPVTWSEYLGTKAKHFNKALSSVRLCVPLNGFVDANDHSGVPVG

SEQ ID NO: 10118 - protein, 362 aa, Lactuca sativa
MSLQQLDAFREKHLDLNSIKELPESYAWSSEDNCPSSSNSEPVPVINLKDSNAMKHVGYACKTWGVFQVTNHDIPITLLNNMEASGRKLFSLPFQQKLKAARSLDGVSGYGVARISSFFPKLMWSEGFTLIDSPHQHAQKLWPQGSGNFCDVIEEYNKEMNKLSNRVMWLILGSLGIKKGDIKWANQEGEIKEACAALQLNSYPSCPDPDRAMGLAAHTDSTLLTILHQSNTSGLQVQRGVGWVTVKPIAGALVVNIGDLIQILSNGLYSSVLHRAMVNRTQHRLSVAYLYGPPSNVRIAPLSKLTDNVHPPLYRPVTWSEYLGTKAKHFNKALLFVRLCAPITMSGFVDASTDNHNSVLVG

SEQ ID NO: 10119 - protein, 377 aa, Hordeum vulgare
MAPVSNETFLPTEAWGEATLRPSFVRDEDERPKVAHDRFSDAVPLISLHGIDGARRAQIRDRVAAACEDWGIFQVIDHGVDADLIADMTRLAREFFALPAEDKLRYDMSGGKKGGFIVSSHLQGEAVQDWREIVTYFSYPVKARDYGRWPEKPAGWCAVVERYSERLMGLSCNLMGVLSEAMGLETEALAKACVDMDQKVVVNFYPRCPQPDLTLGLKRHTDPGTITLLLQDLVGGLQATRDGGKNWITVQPISGAFVVNLGDHGHFMSNGRFKNADHQAVVNGESSRLSIATFQNPAPDARVWPLAVREGEEPILEEPITFTEMYRRKMERDLDLAKRKKQAKDQLMQQQLQLQQQQAVAAAPMPTATKPLNEILA

SEQ ID NO: 10120 - protein, 321 aa, Oryza sativa
MASVASFPVINMENLETEERGARMEVIRDACENWGFFEMLNHGIAHELMDEVERVSKAHYANCREEKFKEFARRMLEAGEKGADVKGIDWESTFFVRHRPVSNLADLPDVDDHYRQVMKQFASEIEKLSERVLDLLCENLGLEKGYLKKAFAGSNGPTFGTKVSSYPPCPRPDLVDGLRAHTDAGGIILLFQDDQVSGLQLLKDGEWVDVPPMRHAIVANIGDQLEVITNGRYKSVMHRVLTRPDGNRMSIASFYNPGADAVIFPAPALAGADAAAAAYPRFVFEDYMNLYVRHKFEAKEPRFEAMKSAAEVVHAAPIATA

SEQ ID NO: 10121 - protein, 321 aa, Oryza sativa
MASVASFPVINMENLETEERGARMEVIRDACENWGFFEMLNHGIAHELMDEVERVSKAHYANCREEKFKEFARRMLEAGEKGADVKGIDWESTFFVRHRPVSNLADLPDVDDHYRQVMKQFASEIEKLSERVLDLLCENLGLEKGYLKKAFAGSNGPTFGTKVSSYPPCPRPDLVDGLRAHTDAGGIILLFQDDQVSGLQLLKDGEWVDVPPMRHAIVANIGDQLEVITNGRYKSVMHRVLTRPDGNRMSIASFYNPGADAVIFPAPALAAADAAAAAYPRFVFEDYMNLYVRHKFEAKEPRFEAMKSAAEVVHAAPIATA

SEQ ID NO: 10122 - protein, 321 aa, Oryza sativa
  unsure (1)..(321): unsure at all Xaa locations
MASVASFPVINMENLETEERGAAMEVIRDACENWGFFEMLNHGIAHELMDEVERVSKAHYANCREEKFKEFARRMLEAGEKGADVKGIDWESTFFVRHRPVSNLADLPDVDDHYRQVMKQFASEIEKLSERVLDLLCENLGLEKGYLKKAFAGSNGPTFGTKVSSYPPCPRPDLVDGLRAHTDAGGIILLFQDDQVSGLQLLKDGEWVDVPPMRHAIVANIGDQLEVITNGRYKSVMHRVLTRPDGNRMSIASFYNPGADAVIFPAPALAAADAAGATXFGSKYPRFMTLXVRGKSRAQAPLFMALKSASQVVHLTPIAVA

SEQ ID NO: 10123 - protein, 279 aa, Saccharum officinarum
DACEKWGFFEILNHGISTELMDEVEKLTKDHYKRVREQRFLEFASKTLKDAQDVKAAENLDWESTFFVRHLPESNIAEIPDLDEDYRRAMRQFTGELEALAERLLDLLCENLGLDRGYLARAFAGPRTGAPTFGTKVSSYPPCPRPDLVSGLRAHTDAGGIILLFQDDALGGLQLLKDGAWVDVPPLRHSIVVNLGDQLEVITNGRYKSVMHRVVAQPDGNRMSIASFYNPGSDAVIFPAPALVKAEEAAAGAYPRFVFEDYMKQYVRHKFEAKEPRFE

SEQ ID NO: 10124 - protein, 194 aa, Sorghum bicolor
QKLSEKLLDLLCENLGLEPGYLKSAFAGSNGPTFGTKVSAYPPCPRPDLVDGLRAHTDAGGIILLFQDDQVSGLQLLKDGEWVDVPPMRHAIVVNIGDQLEVITNGRYKSVMHRVLTRPDGNRMSIASFYNPGADAVIFPAPALVGAAGAEEERAGQATYPRFVFEDYMNLYVRHKFEAKEPRFEAMKSAIATA

SEQ ID NO: 10125 - protein, 323 aa, Triticum aestivum
  unsure (1)..(323): unsure at all Xaa locations
MALPANAAVSLSFPVIHMEKLETGERGAAMGVIRDACENWGFFELLNHGISHKLMDEVERVSKAHYAACREDKFKEFAAKTLEAGEKGADVKDVDWESTFFVRHLPASNLADLPDLDHHYRQVMKEFASEIEKLAEKVLDLLCENLGLEQGYLKRAFAGSRGPTFGTKVSSYPPCPRPDMVDGLRAHTDAGGVILLFQDDQVSGLQLLKDGAWVDVPPMRHAIVVNIGDQLEVITNGRYKSVMHRVLTRPDGNRMSIASFYNPGADAIIFPAPALVGAADAAAVYPRFVFEDYMNLYVRYKFEAKEPRFKAMKAXXAAPIATA

SEQ ID NO: 10126 - protein, 323 aa, Triticum aestivum
  unsure (1)..(323): unsure at all Xaa locations
MAIPADAAVSLNFPVINMEKLETGERGAAMEVIRDACENWGFFELLNHGISHELMDEVERVSKANYTACREGQFKEFAARTLEAGDKGADVKDVDWESTFFVRHLPASNLADLPDLDHHYRQLIKEFASEIEKLAEKVLDLLCENLGLEQGYLKRAFAGSRGPTFGTKVSSYPPCPRPDLITGLRAHTDAGGVILLFQDDQVSGLQLLKDGAWVEVPPMRHAIVVNIGDQLEVITNGRYKSVMHRVLTRADGNRMSIASFYNPGADAVIFPAPALVAAAGASAVYPKFVFEDYMNLYVRHKFEAKEPRFKAMKAXXAAPIATA

SEQ ID NO: 10127 - protein, 328 aa, Triticum aestivum
  unsure (1)..(328): unsure at all Xaa locations
MALPANAAASLSFPVIHVEKLETGERGATMGVIRDACENWGFFELLNHGISAELMDEVERVSKAHYAACREEQFKEFAAKTLEAGEKGDDVKGXVDWEXSTFFVRHLPASNLADLPDLDHHYREVMKEFAAEIEKXLAEKVLDXLLCENLGLEQGYLKRAFAGSQGPXTFGTKVSSYPPCPRPDMVDGLRAHTDAGGVILLFQDDQVSGLQLLKDGAWVDVPPMRHAIVVNIGDQLEVITNGRYKSVMHRVLTRPDGNRMSIASFYNPGADAIIFPAPALVGAADAAAVYPRFVFEDYMNLYVRYKFEAKEPRFKGHEGXXAAPIATA

SEQ ID NO: 10128 - protein, 203 aa, Ananas comosus
ACENWGFFEILNHGITREMMDEVERLTKDHYRRSREQRFEEFANKALEDGTNGVDVSSNLDWESTFFVRHLPVSNISELSDLNDHYRNVMKEFAVELEKLAERLLDLLCENLGLEKGYLKKAFCGSNGPTFGTKVSSYPPCPRPDLIKGLRAHTDAGGIILLFQDDRVSGLQLLKDGEWVDVPPTPYSIVVNLGDQLEVITNG

SEQ ID NO: 10129 - protein, 318 aa, Musa acuminata
MDSFPVIDMEKLLGRERGAAMEILRDACEKWGFFEILNHGISHDLMDEVEKVNKEQYNKCREQKFNEFANKALENADSEIDHLDWESTFFLRHLPVSNISEIPDLDDQYRKAMKEFAAAIEKLAERLLDLLGENLELEKGYLKKAFSNGSKGPTFGTKVSSYPPCPRPDLVKGLRAHTDAGGIILLFQDDQVSGLQFLKDGEWLDVPPMRHAIVVNLGDQLEVITNGKYKSVVHRVVAQTDGNRMSIASFYNPGSDAVIFPAPALVEKEAEEKKEVYPRFVFEDYMKLYVGHKFQAKEPRFEAMKAMEAVATHPIATS

SEQ ID NO: 10130 - protein, 315 aa, Musa acuminata
MDCSFPVINMEKLQGGEREKAMELLRDACENWGFFELLNHGISPELMDEVERLTKEHYRKCREQKFKEFASKALENGSEVTDVDWESTFFLADLPVSNMSELVDMGADYRKVMKEFAAKLEMLADGLLDLLCENLGLEKGYLKKAFCGSKGPSFGTKVSAYPPCPRPELIKGLRAHTDAGGIILLFQDDRVSGLQLLKDGQWVDGPPMRHSIVVNLGDQLEVITNGKYKSVLHRVVALTDGNRMSIASFYNPGSDAVVFPAPTLVQKEAEKDDAAAVYPRFVFEDYMKLYVIQKFQAKEPRFEAMKATALPIPTS

SEQ ID NO: 10131 - protein, 318 aa, Musa acuminata
MDSFPVIDMEKLLGRERGAAMEILRDACEKWGFFEILNHGISHDLMDEVEKVNKEQYNKCREQKFNEFANKALENADSEIDHLDWESTFFLRHLPVSNISEIPDLDDQYRKAMKEFAAAIEKLAERLLDLLGENLELEKGYLKKAFSNGSKGPTFGTKVSSYPPCPRPDLVKGLRAHADAGGIILLFQDDQVSGLQFLKDGEWLDVPPMRHAIVVNLGDQLEVITNGKYKSVVHRVVAQTDGNRMSIASFYNPGSDAVIFPAPALVEKEAEEKKEVYPRFVFEDYMKLYVGHKFQAKEPRFEAMKAMEAVATHPIATS

SEQ ID NO: 10132 - protein, 277 aa, Asparagus officinalis
ACENWGFFELLNHGISIELLDKVEGMTKGHYKKCMEQKFKEFAKQALERGEELDMISNMDWESTFFLKHLPQSNITGIPDLEDEYREVMKEFALELEKLAERLLDLLCENLGLEQGYLKNRFGGSNGPTFGTKVTNYPPCPRPELFKGLRAHTDAGGLILLFQDDKVTGLQLLKDANWVDVPPMTHSIVVNLGDQLEVITNGKYKSVMHRVVAQTDGNRMSIASFYNPGGDAVIYPAPALIKEEEEEKENEVTTYPKFVFEDYMKLYVAQKFQAKEP

SEQ ID NO: 10133 - protein, 251 aa, Polygonum hydropiper
AYNQFSSDIPVISLAGIDDVGGKREEICGKIVAACEDWGVFQVVDHGVDTQLVSEMTRLAREFFALPAEEKLRFDMTGGKKGGFIVSSHLQGEAVQDWREIVTYFSYPIKNRDYSRWPDTPEGWLKATEHYSEQLMGLACKLLGVLSEAMGLEAEALTKACVDMDQKVVVNYYPKCPQPDLTLGLKRHTDPGTITLLLQDQVGGLQATRDDGKTWITVQPVEGAFVVNLGDHGHFLSNGRFKNADHQAVVN

SEQ ID NO: 10134 - protein, 106 aa, Lotus corniculatus
KEHTDPGTIILLLQDQLGGLQATRDNGKTWITVQPVEGAFVVNLGDHGHYLSNGRFKNADHQAAVNSNSSRLSIATFQNPAPDATVYPLKVREGEKSVMEEPITFA

SEQ ID NO: 10135 - protein, 325 aa, x Doritaenopsis sp.
MESGSFPVINMELLQGSQRPAAMALLRDACENWGFFELLNHGISHELMNRVEAVNKEHYRRFREQRFKEFASKTLDSVENVDPDNLDWESTFFLRHLPTSNISQIPDLDDDCRATMKEFARELEKLAERLLDLLCEDLGLEKGYLKRVFCGGSDGLPTFGTKVSNYPPCPKPDLIKGLRAHTDAGGIILLFQDDKVSGLQLLKDREWIEVPPLRYSIVVNIGDQLEVITNGKYKSVLHRVVAQTDGNRMSIASFYNPGSDAVIFPAPALVEKEAEEEEKKEIYPKFVFQDYMNLYIRKKFEAKEPRFEAMKSMEIVMSSQPIPTA

SEQ ID NO: 10136 - protein, 327 aa, x Doritaenopsis sp.
MESGSFPVINMELLQGSQRPAAMALLRDACENWGLYELLNHGISHELMNRVETVNKEHYRRFREQRFKEFASKTLDTVENVEPENLDWESTFFLRHLPTSNISQIPDLDDDCRSTMKEFALELENLAERLLDLLCEDLGLEKGYLKKVFCGGSDGLPTFGTKVSNYPPCPKPELIKGLRAHTDAGGIILLFQDDKVSGLQLLKDGEWIDVPPVRHSIVVNIGDQLEVITNGKYKSVLHRVVAQTDGNRMSIASFYNPGSDAVIFPAPALVEKEAEEKEEKKKEIYPKFVFQDYMNLYIRKKFEAKEPRFEAMKSMEIVMSSQPIPTA

SEQ ID NO: 10137 - protein, 310 aa, Populus tremula x Populus tremuloides
MAIPVIDFSKVNGTGEERAKTMAQIANGCEEWGFFQLMNHGIPEELLEKVKKVCSEYFKLEREEIFNNSTVANTLNALAEKNSGEKLENVDWEDVITLLDDNEWPSKTSGFKETMTEYRAELKKLAEKVMEVMDENLSLPKGYIKKAFNDGEGHSAFFGTKVSHYPPCPHPELVNGLRAHTDAGGVILLFQDDVVGGLQILKDGQWIDVQPMKNTIVINTGDQIEVLSNGRYKSTWHRVLASPDGNRRSIASFYNPSLKATIAPAPGLVEKDGEEIDQTYPKFLFGDYMSIYAKQKFLPKEPRFQAVRAL

SEQ ID NO: 10138 - protein, 372 aa, Perilla frutescens
MAQAVGVSLTTQAKESTLHPKFIRDEDERPKVAYDQFSSEIPVISLARIDESGDKRAEVCRRIVAACEDWGIFQVVDHGVHPMVVEGMTRLAREFFALPDHEKLRFDMSGGKKGGFIVSSHLQGEVVQDWREIVTYFSYPITARDYSRWPDKPVEWRAVTEGYSQLVMELGCKLLEILSEAMGLERDGLSKACVEMDQKIVVNFYPKCPQPDLTLGLKRHTDPGLITLLLQDQVGGLQATRDAGNTWITVQPIQGAFVVNLGDFAHYLSNGRFKNADHQAVVNSKCSRLSIATFQNPAPDAKVYPLKLREGEKAVMEEAITFSEMYKRKMSNDLELARLKKLANEKKLQEDSKNPKFENKVEPCKVLEEILA

SEQ ID NO: 10139 - protein, 314 aa, Rumex palustris
MEFPIINLEKVNGDERKATMDMIKDACENWGFFELVNHGIPVEVMDTVERLTKEHYKKSMEQRFKELVASNGLVDASAEVNDVDWECTFHLKHLPDSNISELPDLEDKYRKVMKDFALRLEKLAEDLLDLLCENLALEKGYLKEAFYGARGPTFGTKVANYPPCPKPELIKGLRAHTDAGGIILLFQDDRVSGLQLLKDDEWIDVPPMRHSIVVNLGDQLEVITNGKYKSVLHRVIAQTEGTRMSIASFYNPGSDAVIYPAPELVEDAQEKTQVYPKFVFEDYMKLYSALKFQAKEPRFEAMKADVSMGPIATA

SEQ ID NO: 10140 - protein, 314 aa, Rumex palustris
MEFPIINLEKVNGDERKATMDMIKDACENWGFFELVNHGIPVEVMDTVERLTKEHYKKSMEQRFKELVASNGLVNASAEVNDVDWECTFHLKHLPDSNISELPDLEEEYRKVMKDFALRLEKLAEDLLDLLCENLGLEKGYLKKAFYGARGPTFGTKVANYPPCPKPELIKGLRAHTDAGGIILLFQDDRVSGLQLLKDDEWIDVPPMPHSIVVNLGDQLEVITNGKYKSVLHRVIAQTDGTRMSIASFYNPGSDAVIYPAPELVEEAQEKTQVYPKFVFEDYMKLYSALKFQAKEPRFEAMKAVSTWDPIATA

SEQ ID NO: 10141 - protein, 318 aa, Dendrobium crumenatum
MELLEGSRRSDAMAVLRDACENWGFFELLNHGISHEPNEQSETVNKEHYREHYRRFREQRFKEFAAKTLDSGENVDGDNLDWESTFFLRHLPTSNISQVPDLDEDCGSTMKEFALGLEKLAERLLDLLCENLGLEKGYLKRVFCGGSDGLPTFGTKVSNYPPCPKPELIKGLRAHTDAGGIILLFQDDTVSGLQLLKDEEWIDVPPMRHSIVVNIGDQLEVITNGKYKSVMHRVVAQTNGNRMSIASFYNPGSDAVIFPAPELVEKEAAEKKKETYPKFVFEDYMKLYVRQKFEAKEPRFEAMKTMDAVISSQPIPTA

SEQ ID NO: 10142 - protein, 320 aa, Brassica rapa subsp. rapa
MEENIKPPVIDLSKLNDEERDQTMALIDDACQNWGFFELLNHGIPYDLMDNIERMTKEHYKKFMEQKFKEMLRSKGLDTLETEVEDIDWESTFFLHHLPQTNLYDIPNMSDEYRTAMKDFGKRLENLTEELLDLLCENLRLEKGYLKKVFRGTKGPTFGTKVSNYPPCPNPEMIKGLRAHTDAGGLILLFQDDKVSGLQLLKDGDWVDVPPLKHSIVINLGDQLEVITNGKYKSVMHRVMTQKEGNRMSIASFYNPGSDAEISPAQSLVDKESEYPSFVFDDYMKLYSGVKFQPKEPRFEAMKNAAVTTDVNPVATEETF

SEQ ID NO: 10143 - protein, 166 aa, Brassica rapa subsp. pekinensis
VEEYEEHMKKLASKLMWLALNSLGVSEEDIEWASLSSDLNWAQAALQLNHYPVCPEPDRAMGLAAHTDSTLLTILYQNNTAGLQVFRDDLGWVTVPPFPGSLVVNVGDLFHILSNGLFKSVLHRARVNQTRARLSVAFLWGPQSDIKISPVPKLVSPVESPLYQSV

SEQ ID NO: 10144 - protein, 374 aa, Neurospora crassa
MSTQDQQPATTTLRLASGNGPITRSILPHPPRDALPSELPIISLAPLFSPSSSLSSRLEVAKQIRQAATTNGFFYITSHGIPPSIIQEAQESAFQFFRSPVSEKEKASMHNSLYKYGWKPPRTQRLNPFESVDHRESFSWRYDPRYDPSVKNVEEEIPDEVKAMIKHDPDDYPWSAVPPEFKAAVIRYFQAVLHLGRVLQRAFALSLGLEETAFDEKSRWPDLGMAVNYYPPLSASGKEEGKGDETKVSIGSHTDFQLFTILGQDEVGGLQVLSRSGQWLNAKPIPGTFVVNFGDYMQRITNDKYVSTVHRVQNYSGKERLSMAFFFGFNLNETCEVLDSCVEEGEEPKYEAVSCWEWTQRRVRMMHDVKGNGS

SEQ ID NO: 10145 - protein, 297 aa, Elaeis guineensis
MAVPVINLRELDGDRRTETKSLLHEACEKWGFFWVENHGIKEALMEKVKGLVNSHYEEYLKQSFYESELAMGLGPQTQSSEADWESTYFIQHQPESNNIHDIPGHEIEFCEAMEDYIRQLIKLAETLAELMSENLGLDKCYLKEAFSPAFVGTKVAKYPQCPQPKLLMGLRARTDGGGIILLLQDDMVPGLEFFKHGKWVPITPKKDNRIFVNLGDQVEVMSNGLYKSILHRVAADKDGSRLSIATFYNPGADAIISPAPKLLYPGGYRFKDYLDYYTGTKFSDKGARFQTIKDMFK

SEQ ID NO: 10146 - protein, 334 aa, Eustoma grandiflorum
MEVQRVQEIASLSKVIDTIPAEYIRSENEQPVISTVHGVVLEVPVIDLSDSDEKKIVGLVSEASKEWGIFQVVNHGIPNEVIRKLQEVGKHFFELPQEEKELIAKPEGSQSIEGYGTRLQKEVDGKKGWVDHLFHKIWPPSAINYQFWPKNPPAYREANEEYAKRLQLVVDNLFKYLSLGLDLEPNSFKDGAGGDDLVYLMKINYYPPCPRPDLALGVAHTDMSAITVLVPNEVPGLQVYKDGHWYDCKYIPNALIVHIGDQVEIMSNGKYKSVYHRTTVNKEKTRMSWPVFLEPPPDHEVGPIPKLVNEENPAKFKTKKYKDYAYCKLNKLPQ

SEQ ID NO: 10147 - protein, 155 aa, Eustoma grandiflorum
GYGVARISSFFPKLMWSEGFTILGSPLEHARKIWPHDYTKFCELIETYEKEMKKLAWRLMWLTLGSLGINDDDVKWASPKGTFDGACAALQLNSYPACPEPDRAMGLAAHTDSSILTILHQNGTRGLEVLQEGLGWVTVPPLPGALVVNVRDLFQ

SEQ ID NO: 10148 - protein, 344 aa, Arabidopsis lyrata subsp. petraea
LNSKFVRDEDERPKVAYNEFSDEIPVISLAGIDDVDGKRGEICRQIVEACENWGIFQVVDHGVDTNLVADMTRLARDFFALPPEEKLRFDMSGGKKGGFIVSSHLQGEAVQDWREIVTYFSYPVRNRDYSRWPDKPEGWVKLTEEYSERLMSLACKLLEVLSEAMGLEKESLTNACVDMDQKIVVNYYPKCPQPDLTLGLKRHTDPGTITLLLQDQVGGLQATRDNGKTWITVQPVEGAFVVNLGDHGHFLSNGRFKNADHQAVVNSNSSRLSIATFQNPAPDATVYPLKVREGEKPILEEPITFAEMYKRKMGRDLELARLKKLAKEESDHKEVAKPVDQIFA

SEQ ID NO: 10149 - protein, 318 aa, Striga hermonthica
MATFPVINMAKLNGEGRPATMAQIEDACQNWGFFEVVNHGISAEFMDRVERLTKEHYKKCMEQRFKEMVAAKGLEAVQSEINDLDWESTFFLRHLPSSNISEIPDLHPEYREVMKEFAAHLEKLAEHLLDLLCENLGLEMGYLKKVFYGSKGPTFGTKVSNYPPCPKPDLIKGLRAHTDAGGIILLFQDDKVSGLQLLKDGQWVDVPPMRHSIVVNIGDQLEVITNGKYKSVMHRVIAQTDGTGRMSLASFYNPGSDAVIYPAPALVEKAENNELYPKFVFEDYMKLYAGLKFQAKEPRFEAFKNMDKAANLGPIATA

SEQ ID NO: 10150 - protein, 263 aa, Torenia fournieri
FFELLNHGISPEFMDTVERLTKDHYKKCMELRFKEMVASKGLEAVQSQADDIDWESTFYVKHLPESNISEIPDLDDDYRKVMKEFAAQIEKLAEELLDLLCENLGLEKGYLKKVFYGSKGPPFGTKVSNYPPCPKPDFIKGLRAHTDAGGIILLFQDDKVSGLQLLKDGEWVDVPPMKHSIVINLGDQLEVITNGKYKSVMHRVIAQTDGNRMSIASFYNPGTDAVIYSAPALVEKEEEKKDLYPKFVFDDYMKLYAGLKFQA

SEQ ID NO: 10151 - protein, 210 aa, Pinus pinaster
  unsure (1)..(210): unsure at all Xaa locations
TSTLDSLVSQIHAACRDWGFFQVINHGVSPHFLQTILSEAANFFSLPMQEKCKVRRDFENPLGYYDTELTKNVRDWKEVFDFXMPSEFRLPASFEGESAEILTATNQWPENPPGLREACEKYAEAVEKLSFRLLELISLSLGLPARYFHSKFEDPTSRLRLNHYSPCPAPELAXGVGRHKDGGALTVLAQDEVGGLQVRRKDGEWIGVKP

SEQ ID NO: 10152 - protein, 261 aa, Passiflora edulis
VLNHGIPNEFMDTVERMTKAHYNKCMEQRFNELVASKALEGVQVELKDMDWESTFYIRHLPESNIAEIPDLDDEYRKVMKDFAAKLEKLAEELLDLFCENLGLEKGYLKKALYGSRGPTFGSKVSNYPPCPKPELVKGLRPHTDAGGIVLLFQDGKVGGLQLLKDGQWVDVPPIPHAIVINIGDQLEVITNGKYKSVDHRVVAQTDGARMSLASFFNPGSDAVIYPAPALVEKEAEEKKQLYPKFVFEDYMKIYAGLKFHA

SEQ ID NO: 10153 - protein, 187 aa, Thuja standishii
ICTYFAQPLHQRDYSRWPVKPEGWREIVDKYSEALMGLAKKMLAIVSEALGLEPDAVTKACVEMDQKVVINYYPKCPEPDMTLGLKRHTDPGTITLLLQDQVGGLQATKDNGLNWITVQPVQGAFVVNLGDHMHYLSNGKFKTADHQAVVNSNYSRLSIATFQNPSQDAIVYPLKLEEGEECFMEEP

SEQ ID NO: 10154 - protein, 187 aa, Thuja standishii
ICTYFAQPLHQRDYSRWPLKPEGWREIVDKYSEALMGLAKKMLAIVSEALGLEPDAVTKACVEMDQKVVINYYPKCPEPDMTLGLKRHTDPGTITLLLQDQVGGLQATKDDGLNWITVQPVQGAFVVNLGDHMHYLSNGKFKTADHQAVVNSNYSRLSIATFQNPSQDAIVYPLKLEEGEESFMEEP

SEQ ID NO: 10155 - protein, 187 aa, Chamaecyparis pisifera
ICTYFAQPLYQRDYSRWPDKPEGWREIVDKYSEALMGLASKLLAIVSEALGLEADAVTKACVEMDQKVVINYYPKCPEPDMTLGLKRHTDPGTITLLLQDQVGGLQATKDDGLNWITVQPVQGAFVVNLGDHMHYLSNGKFKTADHQAVVNSNYSRLSIATFQNPSQEASVYPLELEEGEKSFMEEP

SEQ ID NO: 10156 - protein, 479 aa, Mus musculus
MDSGYGDGLQGECLRKPDQTQPKLYGVGDPTATFSSDSSCLSSRGRVIKWFWDSAEEGYRTYHMDEYDEDKNPSGIINLGTSENKLCFDLLSWRLTQGDMLHVEPSLLQYPDWRGHLFLREEVAKFLSFYCKSPAPLKPENVVVLNGCASLFSALATVLCEAGEALLIPTPYYGAITQHIYLYGNVRLAYVYLDSKVTGLNTRPFQLTVEKLEMVLQGVSSEGVKVKGLILINPQNPLGDVYSPEELQDFLRFAMRHKLHVIMDEVYMLSVFEESLGYRSVLSLERLPDPQRTHVMWATSKDFGMSGLRFGVLYTENQHVATAVASLCRYHGLSGLVQHQMAQLLRDHDWISQVYLPENHARLKAAHTYVSEELRALGIPFVSRGAGFFIWVDLRKYLCKGTFEEEALLWRQFLDNKVLLSSGKTFECKEPGWFRVVFSDKENRLRLGMQRMRQVLEGQSQVVEDASPCHAQEPQSQPR

SEQ ID NO: 10157 - protein, 217 aa, Mus musculus
MDEVYMLSVFEESLGYRSVLSLERLPDPQRTHVMWATSKDFGMSGLRFGVLYTENQHVATAVASLCRYHGLSGLVQHQMAQLLRDHDWISQVYLPENHARLKAAHTYVSEELRALGIPFVSRGAGFFIWVDLRKYLCKGTFEEEALLWRQFLDNKVLLSSGKTFECKEPGWFRVVFSDKENRLRLGMQRMRQVLEGQSQVVEDASPCHAQEPQSQPR

SEQ ID NO: 10158 - protein, 1207 aa, Rattus norvegicus
MEEELKSGGTGRLQAAGTFWREGVILKDRPCRGEEGGGGTSFCSLNDEDTPGGHKDLDFIDMSENGKEVSSQAAKTESSTQTPSHWESIHSKPRDQLKKRSSRKKAFKILQEKMLKLQCVFMDHFLQRTSQQMQCLPPGDQQCTRASRKQEKKMGFLLSQIINHIWSNTVKKLKFKVPPLPCSDSRCGIKAGHQALSSWQTGQPRPRLGDFEDAFADRTLSKRGTGIYEFYHLSFQGYEAYQTDKYHQDKNPSGYINLSTSENKLCLDLITARLTQCDMNFLDEAQLQYSDWKGEPSLREELASFLTHYCKAPTPLDPENVVVLNGCSSVFSSLVMVLCDPGDALLIPTPCYSGFTFSSYLYSKVELIPVYLESQVTETNKYSFQLTVDKLKLTLTQAKKKGKKVKGLVLINPQNPLGDVYTQGSLQEYLVFAKKHKLHVIMDEIYMLSVFEPTVTFHSILSIENLPDPNMIHMIWGTSKDFGMSGIRFGVLYTHNKEVASAMKAFGYHHSVSGIIQYKLRQLLQDKEWINKVYLPKNHSRLREAYSYVTKMLEDLKIPFCNCGSGLFVWINLKAYLNPCTFDQEQILHQRFQDKKLLLSSGKSFMCIEPGWFRLVFAEKHPQLQVAMGQFCQVLAEHKKGETTEQQEKPTGTDDVARGQATPVSRKYSPKNTARENPRSKVGAAIRHCTPKRPGSQPGSLNRFLPLGLEILSAVTLQTLWFRKTRAGPADHSVLVASFGLKDSTVPTTCTGSASTQDMESGYGDDLQGECLRKPDQKQPKLYGVGDPTATFSSDSFCLSSRGRVIKWFWDSAEEGYRTYHMDEYDEDKNPSGIINLGTSENKLCFDLLSWRLTQNDMLHVEPSLLQYPDWRGHRFLRKEVARFLSFYCKSPAPLKPENVVVLNGCASLFSALATVLCEPGEVLLIPTPYYGAITQHIYLYGNIRLAYVYLDSKGVKVKGLILINPQNPLGDIYSPEELQDFLGFAMRHKLHVIMDEVYMLSVFEESLGYRSVLSLERLPDPQRTHVMWATSKDFGMSGLRFGVLYTENQHVATAVASLCRYHGLSGLVQHQMAQLLQDHDWISQVYLPENHARLKAAHTYVSEELRALGIPFVSRGAGFFIWVDLRKYLREGTFEEEAMLWRRFLDNKVLLSSGKTFECKEPGWFRVVFSDKENRLRLGMQRMRQVLKGQSQMVEDASRCHTQELQ

SEQ ID NO: 10159 - protein, 467 aa, Vigna radiata
MRLLSTIATCNSHGQDSSYFLGWQEYEKNPYDELHNPKGIIQMGLAENQLSFDLLESWLAKNPDVAGFKRDGKSIFRELALFQDYHGLPSFKKALVDFMSEIRGNKVTFDPNHIVLTAGSTSANETLMFCLAEQGDAFLLPTPYYPGFDRDLKWRTGAEIVPIQCTSSNNFQITEPALKQAYEEARKRNLRVKGVLVTNPSNPLGTTMSRSELNLLVDFIKEKKDTHLISDEIYSGTVFSSPGFVSVMEILKERNDTEEIWNRVHVVYSLSKDLGLPGFRVGAIYSENDTVVAAATKMSSFGLVSSQTQYLLSAMLGDKKFARNYIVENQKRLKRRQRMMVSGLQKAGISCLESNAGLFCWVDMRHLLHSNTFEAEMELWKKIVYQVGLNISPGSSCHCTEPGWFRVCFANMSEETLTLAMKRLKNFVVESTCTQRSALFNGTSKRKSLTKWVFRLSSRDHREQEER

SEQ ID NO: 10160 - protein, 467 aa, Vigna radiata
MRLLSTIATCNSHGQDSSYFLGWQEYEKNPYDELHNPKGIIQMGLAENQLSFDLLESWLAKNPDVAGFKRDGKSIFRELALFQDYHGLPSFKKALVDFMSEIRGNKVTFDPNHIVLTAGSTSANETLMFCLAEQGDAFLLPTPYYPGFDRDLKWRTGAEIVPIQCTSSNNFQITEPALKQAYEEARKRNLRVKGLLVTNPSNPLGTTMSRSELNLLVDFIKEKKDTHLISDEIYSGTVFSSPGFVSVMEILKERNDTEEIWNRVHVVYSLSKDLGLPGFRVGAIYSENDTVVAAATKMSSFGLVSSQTQYLLSAMLGDKKFARNYIVENQKRLKRRQRMMVSGLQKAGISCLESNAGLFCWVDMRHLLHSNTFEAEMELWKKIVYQVGLNISPGSSCHCTEPGWFRVCFANMSEETLTLAMKRLKNFVVESTCTQRSALFNGTSKRKSLTKWVFRLSSRDHREQEER

SEQ ID NO: 10161 - protein, 472 aa, Vigna radiata
MKFLSTKATCNSHGQDSSYFLGWQEYEKNPYDEVLNPEGIIQMGLAENQLSFDLLESWLAKNPDVAGFKSDGKSIFRELALFQDYHGLPSFKKALVDFMAEIRGNKVTFDPNHIVLTAGSTSANQTLMFCLAELGDAFLLPTPYYPGFDRDLKWRTGVEIVPIQCTSSNNFQITEAALKQAYQEAKKRNLRVKGVLVTNPSNPLGTTMSRSELNLLVDFIKDKNMHLISDEIYSGTVYNSPGFVSIMEILKDRNDLKDCGANVWDRVHIVYSLSKDLGLPGFRVGAIYSENEVVVAAATKMSSFGLVSSQTQYLLSAMLGDKKFTKNYISENLKRLKRRQRNLVSGLQKAGISCLKTNNAGLFCWVDMRHLLHSNTFEAEMELWKKILYEVRLNISPGSSCHCTEPGWFRMCFANMSEETLNLAMKRLKTFVQESNHDNGCTAKRVQSSRRKSLSNWVFRLSSREHREQEQR

SEQ ID NO: 10162 - protein, 472 aa, Vigna radiata
MKFLSTKATCNSHGQDSSYFLGWQEYEKNPYDEVLNPQGIIQMGLAENQLSFDLLESWLAKNPDVAGFKSDGKSIFRELALFQDYHGLPSFKKALVDFMAEIRGNKVTFDPNHIVLTAGSTSANETLMFCLAELGDAFLLPTPYYPGFDRDLKWRTGVEIVPIQCTSSNNFQITEAALKQAYQEAKKRNLRVKGVLVTNPSNPLGTTMSRSELNLLVDFIKDKNMHLISDEIYSGTVYNSPGFVSIMEILKDRNDLKDCGANVWDRVHIVYSLSKDLGLPGFRVGAIYSENEVVVAAATKMSSFGLVSSQTQYLLSAMLGDKKFTKNYISENLKRLKRRQRNLVSGLQKAGISCLKTNNAGLFCWVDMRHLLHSNTFEAEMELWKKILYQERLNISPGSSCHCTEPGWFRMCFANMSEETLNLAMNGLKTFVQESNHDNGCTTKRVQSSRRKSLSNWVFRLSSREHREQEQR

SEQ ID NO: 10163 - protein, 359 aa, Annona cherimola x Annona squamosa
QMGFAENQVSFDLLEQYLEQHPEASGWGSRLSSFRDNALFQDYHGLKTFRQAMASFMEQIRGGRAKFDPERIVLTAGATAANELLTFILADPGDALLVPTPYYPGFDRDLRWRTGVKIVPIHCDSNNKFQVTPQALENAYAAAKSMDIKVRGVLITNPSNPLGAAISRPILEEILDFVSRKNIHLISDEIYSGSVFSAAEFTSVAEILAASNYKDSERVHIVYSLSKDLGLPGFRVGTIYSYNDKVVTTARRMSSFSLISSQTQNLLASMLSDVDFTKKYIETNRERLRRRYASTIRGLRNAGIECLKGNAGLFCWMNLSPLLEKPTREAELKLWDSMLHEVKLNISPGSSCHCLEPGW

SEQ ID NO: 10164 - protein, 395 aa, Anopheles gambiae str. PEST
MPKISNRAEHMPASPIRKLVPFSIAAKQKGIKVYHLNIGQPDIETPQSALDALKDIHLKVLEYSLSEGNIEYREQLAKYYNKIGFADITPKNFIVTNGGSEALNFAISVLCDQDDEIIIPEPYYANYNGFSNALGVVVKSIPSSIDTGFALPPIEEFEKKITDKTKAILICNPGNPTGYLYTREELAKLAEIALKHDIVVISDEVYREYVYDGKSQVSMLAFPELADNCIIIDSESKRYSMCGVRIGFMVTRSQKILDAAMKFAQARLSPVLIGQIIAAAAHVDDDAYIRSVREEYTKRRNLLVDLLNSIPGVICPNPKGAFYCMVELPVKDTDDFAQWLLESYNFNGETIMVAPAGGFYSDPALGKKQVRMAYVLNEEDLRKSVEVLRNALQVY

SEQ ID NO: 10165 - protein, 363 aa, Rosa hybrid cultivar 'Kardinal'
MGLAENQLSFDVIEEWIKKNPKASICTPEGVAEFKNVANFQDYHGFPDFRKAIANFMSKARGGRVKFDPDRVVMAGGATGANETVMFCLADPGDAFLVPSPYYPAFYRDLGWRTGVKIVPVDCDSSNNFQVTRAALEAAYEKARNNNINIKGLIITNPSNPLGTTVDRDTLTSLVKFINDKNIHLVCDEIYAGTVFSCPKFTCVTEVLQDVKNCNRDLIHIVYSLSKDMGVPGLRIGIVYSYNDAVVNCARKMSSFGLVSSQTQHMLSAMLLDDEFVSNFLETSSKRLARRHRFFTTGLEEVGINCLKGNAGLYCWMDLRKLLKDQTFEAEMVLWRMIINEVKLNVSPGSSFRCVEPGWFRVC

SEQ ID NO: 10166 - protein, 437 aa, Magnetospirillum magnetotacticum
MIPSGLPSILNRHRATVSRHAIGIPLMNSQHDFHRIKRLPPYVFAEVNAMKARARAAGEDIIDFGMGNPDQPTPTHIVDKLVEAARNPRAHRYSMSRGIPGLRKALSAYYQRRFAVDIDPEAECIVTLGSKEGLANLANAITSPGDIVLVPNPSYPIHPYGFIIAGGSCRFVPVTPDAEFLKALDRAVRHSVPKPIALVLNYPSNPTALLADLDFYGQVVEFCRHHGIWILSDLAYSEIYFDVAPPPSILQIPGAKDIAVEFTSMSKTYNMPGWRIGFAAGNKTLINALARIKSYLDYGAFTPIQVAATAALNGPQDCVDEIRALYKSRRDALIEGLAAAGWDIPSPPATMFAWAPIPKPFAHLGSLEFSKLLMREAQVAVAPGIGFGEYGDSHVRIGLVENVQRTRQAVRNIKTFLGSTGQVLEASEKQRAAGTEP

SEQ ID NO: 10167 - protein, 396 aa, Fusobacterium nucleatum subsp. nucleatum ATCC 25586
MRISDRVKNMKYSAVRKLAPLAAEAEKKGIKVYRLNIGQPNIETPKLFFEGLKNIPDHVIRYADSRGISILLEQVIEVYARDGHILKKEDIIVTEGGSEALTFAMLAICNPNDEVLIPEPFYSNYKSFLDIAGAKIIPIPTDIKNDFALPKKEEIQKLITSKTKAILYSNPCNPTGKVYTEEEVKLLANLAAENDLFVIADEPYREFIYDDNDKHYSLLDIEKAKENVIIIDSVSKHYSACGARVGFLISKNKDFMTYIMKLCQARLAAPTVEQYAVASLMKAPKEYFKEIKEIYKRRRDIIVNSLNKIEGVTCSTPKGAIYAFAKLPVESSEDFCKWLLTEFVYDNSTVMLAPGEGFYETEGLGKNEVRFSFCVGENDIEKAMRVLEEALKVYKK

SEQ ID NO: 10168 - protein, 404 aa, Chlorobium tepidum TLS
MFDEIEFDRIKRLPKYVFAAVNELKMAERRAGRDVIDFSMGNPDGPTPQHIVDKLVESVSKPKTHGYSVSKGIYKLRGAIGGWYRDKYNVDLDLDREVVVTMGSKEGYVHLVQAITNPGDLAIVPDPCYPIHSQAFILAGGNVHRMKLEMNEDYTLDEEAFFHNVETALRESSPKPKYLVVNFPNNPTTATVELPFYERLVELARRERFYIISDIAYAEITFDGYVTPSILQVSGAKDVAVESYTLSKTYNMAGWRMGFMVGNAKLVGALEKIKSWLDYGTFTPIQVAATIALTGDQSCVREIREVYRKRRDVLISSFANAGWDIVSPKASMFVWARIPEQMRAMGSLEFSKKLLIEGKVAVSPGIGFGTYGDEYVRVAMIENEERIRQAARNIKRFLKNNAGS

SEQ ID NO: 10169 - protein, 498 aa, Stellaria longipes
MVSQSKNNQDQVLSKIAVNEEHGEDSSYFLGWKAYEKDQNPFFHPYHEINQNSNGVIQMGLAENQLCFDLIEEWIKRNPDAAICTNDGIKSIFRALFQDYHGLQEFRQAVARFMEKTRGGRVRFDSNLVLTAGATSANETIIFCTANPGDAFLVPTPYYAAFDRDLKWRTGAEILPICHESSNNFKITSKAKEAYENAQSKYKAKKLDLNVKGLLMTNPSNPLGTTTLDRDTLKKISTFTNQKGIHLVCDEIYAATVFSPKFVSIADILLDDHVNQDLVHIVYSLSKDLGLPGFRVGIVYSKDEMVVSAATKMSSFGLVCFANMDDSSQTQLMIAALLSDKNFTEEFLIESSDRLRKYEMITEGLKSAGINCLQGNAGLFVWMDLRQLLKDNTFDSETELWNAILHEVKLNISPGSSCHSECSEPGWFRCFANMDIDETLDLDLGVKRLKDFAQRGRVDNSTMTTTKQPFKLPLKKTVRSNLRPAHSPMNSPLVRART

SEQ ID NO: 10170 - protein, 498 aa, Stellaria longipes
MVLPSKNNSEQVLSKMAVNFNSGEDSSYFLGWKAYNKDDNPHFHPYAEIEQNYNGVIQMGLAENQLSSDLIEEWIKRNPDAAICVEDGIKSIFRALFQDYHGLIEFRQLVARFMEKVRGGRVRFDSNLVLTAGATGANETIIFCTDNPGDAFLVPTPYYAAGDRDLKWRTRAEILPICHCSSNNFKITSKAKEAYEKAQSKYKAKKLDLNVKGLIMTNPSNPLGTTTLDRDTLKKISTFIDQKNIHLVCDEIYAATVFKAKTVSIADILLDDHVNQDLVHILYSLSKDLGLPGFRVVIVYSKDEMVVSAATKMSSFGLSSGLYIHTVIRLLQRLGECLVLPLSQTQNLLATMLSDKKFTWNYIKINRERLKRRYEMIINGLKKVGIECLKGNGGLFCWMNLSPFLEKPTKEGELDLWSSIVNEVKLNISPGSSCHCSNPGWFRVCFANMDESMAVQLAMQRLQNFVGEYVADNMEKKQQWKKSRLSLSFRRPSPLVRT

SEQ ID NO: 10171 - protein, 283 aa, Stellaria longipes
FQDYHGLPSFRKAMASFMEEICEGRAPFDYNRILLTAGATAANELLSFFILTDPGEAFVGHNQRSLKYRGVLITNPSNPLGAIYYWGAVPRNKFSDFVSRRNIHLVSDEIYSGSVFNPEEFTSVAEILQERNYKDAGRIHIVYSLSKDLGLPGFRVGTIYSYGDKVVTTARRMSSFTLVLCSSQTQNLLATMLSDKKFTWNYIKINRERLKRRYEMIINGLKKVGIECLKGNGGLFCWMNLSPFLEKPTKEGELDLWSSIVDEVKLNISPGSSCHCSNPGWFR

SEQ ID NO: 10172 - protein, 407 aa, Microbulbifer degradans 2-40
MNPDLSKLQPYPFEKLNALKATVSAPADKSHIALSIGEPKHQPPAFALKALTDNLARFANYPSTKGLPELRTAIANWANTRFNLQRATLDAEANVLPVNGTREALFAFAQACIDSSKADAKVLMPNPFYQIYEGAAFLAGAEPVFLNCLPENGFIPDFDAISEQTWQACQLLFICTPGNPTGAVMSRELLEKLIGLADKHNFIIASDECYSELYFDEANPPTGLLEACESLGKTDFKNCVVFHSLSKRSNLPGLRSGFVAGDAHIIDQFFQYRTYHGCAMSVPCQLASIAAWQDEAHVLENRNLYRQKFDAVIEILKDVLPVSTPDASFYLWPKTPIADTDFAQQLFAQQNVTVLPGRFLARDCDGVNPGENYVRLALVAELEECIEAAHRIKAFVQSLNQTLYTNS

SEQ ID NO: 10173 - protein, 400 aa, Fusobacterium nucleatum subsp. vincentii ATCC 49256
MEEKMKISDRVKNMKYSAVRKLAPLAAEAEKKGIKVYRLNIGQPNIETPKLFFEGLKNIPDQVIKYADSRGISVLLEQVIEVYARDGHILKKEDIIVTEGGSEALTFAMLAICNPDDEVLIPEPFYSNYKSFLDISGAKIIPIPTDIKNNFALPKKEEIQKLITSKTKAILYSNPCNPTGKVYTEVEVKLLADLAIENDLFIIADEPYREFIYDDKDKHHSLLDIEKAKENVIIIDSVSKHYSACGARVGFLISKNKDFMTYIMKLCQARLAAPTVEQYAVANLMKAPKEYFKEIKEIYRRRRDIIVDSLNKIEGVTCSTPKGAIYAFAKLPVESSEDFCKWLLTEFVYDNSTVMLAPGEGFYETEGLGKNEVRFSFCVGEDDIEKAMKVLEEALKVYKK

SEQ ID NO: 10174 - protein, 399 aa, Bacteroides thetaiotaomicron VPI-5482
MPTISIRGNEMPASPIRKLAPLADAAKQRGVHVFHLNIGQPDLPTPQAAIDAIRNIDRKVLEYSPSAGNRSYREKLVGYYAKFNINLTADDIIITSGGSEAVLFSFLSCLNPGDEIIVPEPAYANYMAFAISAGAKIRTIATTIEEGFSLPKVEKFEELINERTKAILICNPNNPTGYLYTRREMNQIRDLVKKYDLFLFSDEVYREFIYTGSPYISACHLEGIENNVVLIDSVSKRYSECGIRIGALITKNKEIRDAVMKFCQARLSPPLIGQIAAEASLDAPEEYSRETYDEYVERRKCLIDGLNRIPGVYSPIPMGAFYTVAKLPVDDSDKFCAWCLSDFEYEGQTVFMAPASGFYTTPGSGINEVRIAYVLKKEDLTRALFILQKALEVYPGRTE

SEQ ID NO: 10175 - protein, 473 aa, Pyrus communis
MCMLSRNATFNSHGQDSSYFLGWQEYEKTPYHEVHNTNGIIQMGLAENQLCFDLLESWLAKNPEAAAFKKNGESIFAELALFQDYHGLPAFKKAMVDFMAEIRGNKVTFDPNHLVLTAGATSANETFIFCLADPGEVLLIPTPYYPGFDRDSKWRTGVAIVPIHCTSSNGFQITETALEEAYQEAEKRNLRVKGVLVTNPSNPLGTTMTRNELYLLLSFVEDKGIHLISDEIYSGTAFSTPSFRSVMEVLKDRNCDENSEVWQRVHVVYSLSKDLGLPGFRVGAIYSNDDMVVAAATKMSSFGLVSSQTQHLLSAMLSDRKLTKNYIAENHKRLKQRQKNLVSGLQKAGISCLNGNAGLFCWVDMRHLLRSNTFEAEMELWKKIVYEVHLNISPGSSCHCTEPGWFRVCFANLPERTLDLAMQRLKAFVGEYYNVPEVNGRSQSSHLSHSRGQSLRKWVSRLSFDDRCPIHGR

SEQ ID NO: 10176 - protein, 241 aa, Fagus sylvatica
RAESARGIAEIIQEEIECNHDLIHIVYSLSKDLGFPGFRVGIVYSYNDAVVNCCRKMSSFGLVSSQTQYLIASMLSDDEFVNKFIAENAISLANRHKVFTEGLAQVDIGCLKSNAGLFVWMDLRHLLKEQTFKAEMELWKVIINKVKLNVSPGSSFHCSAPGWFRVCFANMDDKTMDVALTRIVAFVHQNKETTVPMKKKCWQTNLRLSFSSRRVDDIMMAQCMMSPHSPLPQSPLVRARN

SEQ ID NO: 10177 - protein, 106 aa, Fagus sylvatica
TNPSNPLGTVMDRTTLRTVVNFINQKRIHLISDEIYAATVFSHPSFISVAEIIEQDTDIECDRDLIHIIYSLSKDMGFPGFRVGIIYSYNDSVVNCARKMSSFGLG

SEQ ID NO: 10178 - protein, 105 aa, Fagus sylvatica
TNPSNPLGTILDKETLRMVVSFINEKSIHLVCDEIYAATVFSTQPDFISIAEIIQEEIECNHDLIHIVYSLSKDLGFPGFRVGIVYSYNDAVVNCCRKMSSFGLV

SEQ ID NO: 10179 - protein, 369 aa, Averrhoa carambola
PDQMGLAENQLCFDLIEDWVKNNPKASICTPQGVDKFKEIANFQDYHGLPEFRQAVAKFMGRVRGNKVTFDPNRIVMSGGATGANETIIFCLADPGDAFLVPSPYYPAFNRDLGWRTRVQLIPAECDVSNGFKITRSALEAAYQKAQEANVNVKGLIITNPSNPLGTTLDRDTLKSLVSFINDKNIHLVCDEIYVATVFSSPRFISVAEVIEEMDCNRDLIHIVYSLSKDMGFPGFRVGIVYSYNDAVVSCARKMSSFGLVSAQTQYMLASMLSDEIFVEKFLAESPKRLAKRYNKFTKGFEEVGINCLNSNAGLYFWMDLRWLLKEQSNKGEIDLWRIIVNDVKLNVSPGSSSHCNEPGWFRVCFAAE

SEQ ID NO: 10180 - protein, 431 aa, Rhizobium etli
MNVLRKETSQPPASVSIIGAGGICDLIGNSVLDFHRIQRLPPYVFEQVNRLKASARAGGADIIDLGMGNPDLPTPQSIVDKLCEVVQDPRTHRYSSSKGIPGLRRAQAAYYARRFGVKLNPDTQVVATLGSKEGFANMAQAITAPGDVILCPNPTYPIHAFGFLMAGGVIRSMSVEPDESFFPPLERAVRHSIPKPLALILNYPSNPTALVATLDFYKDVVAFAKKHDIIVLSDLAYSEIYFDGAPPPSVLEVPGAMDVTVEFTSMSKTFSMPGWRMGFAVGNERLIAALTRVKSYLDYGAFTPIQVAATHALNGDGSDIAEVRNVYKRRRDVMVESFGKAGFDVPPPAATMFAWAKIPEKFRHLGSLEFSKLLVEKADVAVAPGIGFGEMGDDYVRLALVENEHRIRQAARNIKRWLSGDEKFEINVMNQ

SEQ ID NO: 10181 - protein, 251 aa, Sinapis arvensis
ENQLCFDLIESWLAKNPDAASLKRNGQSIFRELALFQDYHGMPEFKKAMAEFMEEIRGNRVTFDPKKIVLAAGSTSANETLMFCLAEPGDAFLLPTPYYPGFDRDLKWRTGAEIVPIHCSSSNGFQITESALQQAYQQAHKLDLKVKGVLVTNPSNPLGTALTRRELNLLVDFIASKNIHLISDEIYSGTMFGFEQFISVMDVLKDKKLENTEVSKRVHVVYSLSKDLGLPGFRVGAIYSNDEMIVSAATK

SEQ ID NO: 10182 - protein, 251 aa, Sinapis arvensis
ENQLCFDLIETWLAKNPDAAELKKDGQSIFKELALFQDYHGLPEFKKALAEFMEEIRGNRVSFDPSKIVLAAGSTSANETLMFCLAEPGDAFLLPTPYYPGFDRDLKWRTGAEIVPIHCSSSNGFQITESALQQAYQQAQKLDLKVKGVLVTNPSNPLGTMLTRRELNLLVDFITSKNIHLISDEIYSGTVFGFEQFVSVMDVLKDKKLENSEVSKRVHVVYSLSKDLGLPGFRVGAIYSNDEMVVSAATK

SEQ ID NO: 10183 - protein, 251 aa, Sinapis arvensis
ENQLCFDLIESWLAKNQDAASLKRNGQSIFRELALFQDYHGMPEFKKAMAEFMEEIRGNRVTFDPKKIVLAAGSTSANETLMFCLAEPGDAFLLPTPYYPGFDRDLKWRTGAEIVPIHCSSSNGFQITESALQQAYQRAHKLDLKVKGVLVTNPSNPLGTALTRRELNLLVDFVNSKNIHLISDEIYSGTMFGFEQFISVMDVLKDKKLEDTEVSKRVHIVYSLSKDLGLPGFRVGAIYSNDEMIISAATK

SEQ ID NO: 10184 - protein, 248 aa, Sinapis arvensis
ENQLSFDLIESWLDDHPEVLGLKKNEESVFKHLALFQDYYGLPAFKDAMAKFMEKIRGSKVKFNTNKMVLTAGSTSANETLMFCLANPGDAFLIPAPYYPGFDRDLKWRTGVEIVPIHCVSSNGYKITREALEDAYERAHKLNLKVKGVLITNPSNPLGTSTTRAELDLLLTFTSAKKIHMVSDEIYSGTVFDSPEFTSVLEVAKDKNMDFDDKIHVVYSLSKDLGLPGFRVGLIYSDNEKVVSAATK

SEQ ID NO: 10185 - protein, 252 aa, Sinapis arvensis
ENQLCFDLLESWLIQNPDAAGFKRDGQSIFRELALFQDYHSLSSFKNALAVFMSENRQNRVSFDSNNLVLTAGATSANETLMFCLANPGDAFLLPTPYYPGFDRDLKWRTGVEIVPIQCSSSNGFRITKLALEEAYEQAKKLNLNVKGVLITNPSNPLGTTTTQTELNILFEFISKNKNIHLVSDEIYSGTAFSSSEFISVMEILKNNQLENTDVFNRVHIVYSLSKDLGLPGFRVGAMYSNDKDVISAATK

SEQ ID NO: 10186 - protein, 248 aa, Sinapis arvensis
ENQLCGDLMRKWVLEHPEASICTAEGVNQFSDIAIFQDYHGLPEFRQAVAKFMEKTRNNKVKFDPDRIVMSGGATGAHETVAFCLANPGEGFLVPTPYYPGFDRDLRWRTGVNLVPVTCHSSNGFKITVEALEAAYENARVSNIPVKGLLITNPSNPLGTTLDRDCLKSLVKFTNDKRIHLVADEIYAATTFGQSEFISVAEVIEEVPDCNPDLIHIVYSLSKDMGLPGLRVGIVYSYNDRVVQIARK

SEQ ID NO: 10187 - protein, 365 aa, Mangifera indica
QMGLAENQLCFDLIEDWIRKNPYASICTAEGVDEFKEIANFQDYHGLPEFRKAVAKFMGKVRGGRVTFDPDRIVMGGGVTGANEQIIFCLADPGDAFLVPSPYYPAFDRDLGWRTGGEIVPVPCDSSTNFQITRDALEEAYEKAREANINIKGLIITNPSNPLGITLDRDTLKSLVSFIDEKNIHFVCDEIYAATLFCPPKFVSVAEVIQEMDCNLDLIHIVYSLSKDMGLPGFRVGIVYSYNDAVVSCIRKMSSFGLVSSQTQYLLASMLSDDEFVEKFLAESSKRLAKRYHIFTKRLEKVGINCLKGNAGLFFWMDLRHLLQQETVDAEMKLWGTILNDVKLNVSPGSSFHCQEPGWFRVCFA

SEQ ID NO: 10188 - protein, 366 aa, Mangifera indica
QMGLAENPLCFDLVQEWVLSNPKASICTAEGISDFRDIAIFQDYHGLPEFKNAVANFMARVRGNRVKYDPDRIVMSGGATGAHETVAFCLADPGEAFLVPTPYYPGFDRDLRWRTGVQLFSVVCDNSYNFKNTKKKPWKQHMKKLKKTTSESRGLLLTNPSNPLGTRLDRETLRSLVSFINEKNIHLVCDEIYAATIFMGQPDFISISEIIEEDIHCNRNLIHLVYSLSKDMGLPGFRVGIIYSYNDTVVSCARKMSSFGLVSSQTQHLIASMLSDDEFVDRFITESAKRLAKRHRAFTWGLSQVGIGCLKSNAGLFFWMDLHHLLKEQTDEAEIELWKVIINEVKLNVSPGSSFHCANPGWFRVC

SEQ ID NO: 10189 - protein, 618 aa, Takifugu rubripes
MLTEALVAVRQGTQTPAAQTTCAPSTMSSSSRPPLETLQAQSVSADETPGSALPACAQPCETARSATPTGGETPNRSRYLSHRGNSIRQQQGILQEGFLLYSLDKFHETDKPDGIINLGTSENKLCHDLLHERLTRPDMLLLDPPLLQYPDWSGHQFLREEVAKFLTDYCCSPKPLKAENVVVMNGCASLFSCIASVICDPKDAILISTPFYGAITEHLGLYSDVKLYHIHLDCEASGEDGRLFHLTVDKLEEGLRRAEHEGFIVRGLVLMNPHNPLADIYTPKEMVGFLEFAKRNELHTIVDEVYMLSVFDESVTFDSVLSLESVPDPQRTHVMWGLGKDFAMAGIRVGTLYSESRDLVEAVAKLGAFHGIPGTTQRQVAQLLQDREWIDTQYLPRNRSRLKAARSYVTGELRGLDVPYLDRSAAMFVWADLRKFLAEPSFEEEMRLWRHFLKHKVVLSCGQAFSCSTPGWFRIVFSDQDRRLKLGMKRIKEALEEYKDQITVTDCYSIKDGGPRVRASGKDSDNAAIVGSTLPQGKSSDMLEEKDHTVQAGLGADELVLRDCQPSKPAEGLDSLIGTLRHQIRSSDWLEKNTPELSAGEDPEILDVFKALLERARK

SEQ ID NO: 10190 - protein, 471 aa, Diospyros kaki
MKLLSRKAACNTHGQDSSYFLGWQEYEKNPYDESHNPTGIIQMGLAENQLSFDLLESWLASNPDAAGFKRDGQSIFRELALFQDYHGLPDFKKALVEFMSEIRGNKVSFDPKKLVLTAGATSANETLMFCLADPGEAFLLPTPYYPGFDRDLKWRTGVEIVPIKCTSSNGFRITESALEEAYQAAGKRNLKVKGVLVTNPSNPLGTTLSRHELNLLLSFVTEKGIHLISDEIYSGTVFSSPGFLSVMEILMDKKYSMNTEVWKRVHIVYSLSKDLGLPGFRVGAIYSNDDVVVEAATKMSSFGLVSSQTQYLLSAMLSDKKFRKNYISENQKRLRHRQEMLISGLESAGIRCLKSNAGLFCWVDMRHLLSSETFDAEMELWKKIVYDVGLNISPGSSCHCDEPGWFRVCFANMSAATLNLAIQRIKLFVQSTAAGSKQNQSYHQSLNNSRRKSLTKWVFRLSFDGREPDER

SEQ ID NO: 10191 - protein, 247 aa, Actinidia chinensis
LCFDLLESWLANNPEPAGFMRDGQSIFRELALFQDYHGLPAFKNAMVDFMSEIRGNKVSFDPKKLVLTAGATSANETLMFCLAEPGEAFLLPTPYYPGFDRDLQWRTGVEIVPIHCTSANSFQITDSALEEAYQSAQKRNLRVKGVLVTNPSNPLGTTLTRPELNLLLTFITSKNIHLISDEIYSGTVFSSPDFVSIMEVLKDSSHSTEVWNRVHIVYSLSKDLGLPGFRVGAIYSNDDVVLAAAKK

SEQ ID NO: 10192 - protein, 467 aa, Actinidia deliciosa
MKLLSRKAACNSHGQDSSYFLGWQEYEKKPYDEVRNPTGIIQMGLAENQLSFDLLESWLANNPEPAGFMRDGQSIFRELALFQDYHGLPAFKNAMVDFMSEIRGNKVSFDPKKLVLTAGATSANETLMFCLAEPGEAFLLPTPYYPGFDRDLQWRTGVEIVPIHCTSANSFQITDSALEEAYQSAQKRNLRVKGVLVTNPSNPLGTTLTRPELNLLLTFITSKNIHLISDEIYSGTVFSSPDFVSIMEVLKDSSHSTEVWNRVHIVYSLSKDLGLPGFRVGAIYSNDDVVVAAATKMSSFGLVSSQTQYLLASMLSDKNFTKHYISENQKRLKKRQEMLISGLQSAGIGCLKSNAGLFCWVDMRHLLSSKSFDSEMELWKKIVYQVGLNISPGSSCHCSEPGWFRVCFANMSEDTLDIAIQRIKTFVQTTNNNHSQRIHPSVKKSKRKSLTKWVFRLSFDGREPDER

SEQ ID NO: 10193 - protein, 370 aa, Cucumis melo
QMGLAENQLSFDLLESWLTKNPDAASFKRDGKSIFRELALFQDYHGLPAFKKALVEFMAEIRGNKVTFEANNIVLTAGATSANETLMFCLAEAGDAFLLPTPYYPGFDRDLKWRTGVEIVPIHYTSSNGFQVTQPALEQAYKEAESRNLRVKGVLVTNPSNPLGTTMTRNELDLVFDFITSKGIHLISDEIYSGTVFGSPGFVSAMEVLKERSNEEEEVWKRVHIVYSLSKDLGLPGFRVGAIYSNDVMVVAAATKMSSFGLVSSQTQYLLSAMLSDKKFTRTYISENQKRLKQRQKMLVSGLEKAGIKCLESNAGLFCWVDMRHLLESDTFESELKLWKKIGYEVGLNISPGSSCHCTEPGWFRVCFAN

SEQ ID NO: 10194 - protein, 481 aa, Cucumis sativus
MKMLSTKATCNSHGQDSSYFLGWEAYEKNPFDETSNPNGIIQMGLAENQLSFDLLESWLTKNPDAASFKRDGKSIFRELALFQDYHGLPAFKKALVEFMAEIRGNKVTFEANNIVLTAGATSANETLMFCLAEAGDAFLLPTPYYPGFDRDLKWRTGVEIVPIHCTSSNGFQVTQPALEQAYQEAQARNLRVKGVLVTNPSNPLGTTMTRNELDLVFDFITSKGIHLISDEIYSGTVFGSPGFVSAMEVLKERSNEDEEVWKRVHIVYSLSKDLGLPGFRVGAIYSNDEMVVAAATKMSSFGLVSSQTHYLLSAMLSDKKFTRTYISENQKRLKQRQKMLVSGLEKAGIKCLESSAGLFCWVDMRHLLESDTFECELKLWKKIVYEVGLNISPGSSCHCTEPGWFRVCFANMSQSTLKLAIRRLKSFVQELRSVSTPNVSTTTTNIHDSKFSKNIKKNIFTKWVFRQSVQDQANRKLHYER

SEQ ID NO: 10195 - protein, 388 aa, Prunus armeniaca
YFDGWKAYDRNPFHPTKNPEGVIQMGLAENQLSFDLIEERIKKNPKASICTPEGVEEFKNVAIFQDYHGFPEFRKAVAMFMSKARGGRVTFDPNRVVMSGGATGANELVMFCLADPGDAFLVPSPYYPAFFRDLGWRTGVQIVPVDCHSSNNFKITKEALEAAYEKAQKNNIKVKGLIITNPSNPLGTTLDRDTLESLVEFINQKNIHLVCDEIYAATVFSSPTFTCISEVIQNMNCNPNLIHIVYSLSKDMGLPGLRVGIVYSYNDDVVNIGRKMSSFGLVSSQTQHMLASMLLDEEFVARFLETSSKRLANRHGVFTKGLEEVGINCLKSNAGLFCWMDLRRLLKDQTFDGEMVLWRVIVNEVGLNVSPGSSFKCVEPGWFRVCFA

SEQ ID NO: 10196 - protein, 368 aa, Prunus armeniaca
QMGLAENQVSFDLLEKYLELEKHSKSSNLGSKGVSGFKKNALFQNYHGLLSFKKAMAIFMDQIKGGRAKFDPDRVFLTAGATAANELLTFIIADPGDALLVPTPYYPGFDKNLRWRTGVNIVPIHTDSSNNFQVTPQALEAAYKEAEAKNMKVRGVLITNPSNPLGATIQRQVLERILGFVTQKNIHLVSDEIYSGSAFSSSEFISVAEILESQQYKNSERVHIVYSLSKDLGLPGFRVGTVYSYNDKVVTTARRMSSFTLISSQTQHLLASMLSDKEFTENYIKTNRERLRKRYDMIIEGLKKAGIECLRGNAGLFCWMNLSPLLEKPTRGGELALWDSMLHEVKLNISPGSSCHCSEPGWFRVCFA

SEQ ID NO: 10197 - protein, 475 aa, Cucurbita maxima
MKMLSTKATCNSHGQDSSYFLGWEAYENNPFHHTSNPNGIIQMGLAENQLSFDLLESWLSKNPDAASFKRDGKSIFRELALFQDYHGLPAFKKALVEFMAEIRGNKVSFEANNIVLTAGATSANETLMFCLAEAGDAFLLPTPYYPGFDRDLKWRTGVEIVPIHCTSSNGFQITQSALEQAYKDAQTRNLRVKGVLVTNPSNPLGTTMNRDELNLVFDFITSKGIHLISDEIYSGTVFGSPGFVSAMEVLKERSSEDEEVWKRVHIVYSLSKDLGLPGFRVGAIYSNDDMVVAAATKMSSFGLVSSQTQYLLSAMLSDKKFTISYISENQKRLKQRQKMLVSGLQKAGINCLDSNAGLFCWVDMRHLLESDKFESELELWKKIVYEVGLNISPGSSCHCTEPGWFRVCFANMSESTLKLAVRRLKSFVTELRSTTTSNHRNHDNKICKNIKKNIFTKWVFRQSAQEANRKMQAER

SEQ ID NO: 10198 - protein, 475 aa, Cucurbita maxima
MGILSRKATCNSHGQDSSYFLGWEEYDKNPYDEILNPKGIIQMGLAENQLCFDLLERWLKENPDAAGFKRDGKSIFRELALFQDYNGLPAFKKALAEFMSEIRGNRVTFNPDHIVLTAGATSANETLMFCLAEPGDAFLLPTPYYPGFDRDLKWRTGIEIVPIHCSSSNGFRITESALLEAYQSAQSRDLKVKGVLVTNPSNPLGTTITTQELNLLLQFIASKNLHLISDEIYSGTVFRNPGFVSVMDILNQNYKHNHQIRKQVHIVYSLSKDLGLPGFRVGAIYSNDDVVVAAATKMSSFGLVSSQTQYLLSAMLSDKKFTKNYIKENQKRLEKRQKMLVRGLQKAGIKCHKGNAGLFCWVDMRHLLGANTFESEMELWRKIVFEGAVERVARTVVPLLRTRLVPCLFCQHVRGNVGPCNAETKGFWVYSTELHSPTTTTTTNHLPTKRKNMVKWVFRLSFNDRVVDHTNDNLG

SEQ ID NO: 10199 - protein, 371 aa, Brassica oleracea var. italica
QMGQAENQVSFDLLESYLEKKNPEGSLWESKGSRGFRENALFQDYHGLKNFRQAMASFMEKNRGGKARFDPDRIVLTAGATAANELLTFILANPNDALLVPTPYYPGFDRDLRWRTGVRIVPIHCDSSNHFQITPEALEAAYKTARDANIRVRGVLITNPSNPLGATVQKKVLEDLLDFCVRKNIHLVSDEIYSGSVFHASEFTSVAEIVENIDDVSVKERVHIVYSLSKDLGLPGFRVGTIYSYNDNVVRTARRMSSFTLVSSQTQHMLASMLSDEEFTDKYIRINRERLRRRYETIVEGLKKEGIECLKGNAGLFCWMNLGFLLNTNTKEGELELWDVILKELELNISPGSSCHCSEFGWFRVCFANMD

SEQ ID NO: 10200 - protein, 369 aa, Brassica oleracea var. italica
QMGLAENQLCLDLIKEWIKENPKASVCTPEGVHQFSDIANFQDYHGLKEFRQAIAHFMGKARGGRVTFDPERIVMSGGATGANETIMFCLADPGDVFLVPSPYYAAFDRDLRWRTGVEIVPVHCSSSNNFKLTVEAVEWAYKKAVESNKNVKGLLFTNPSNPLGTILDKDTLKNLVRFVTKKNIHLVVDEIYAATVFAGENLVSVAEVVKDSEVNADLIHIVYSLSKDMGLPGFRVGIVYSYNDSVVSCARKMSSFGLVSSQTQFMLASMLSDDSFVGNFLMESSKRLGIRHGVFTLGLKKAGINCLISTAGLFVWMDLRHLLRVRNSFESEIELWHIIIDKVKLNVSPGSSFQCTEPGWFRVCFANMD

SEQ ID NO: 10201 - protein, 469 aa, Arabidopsis thaliana
MGLLSKKASCNTHGQDSSYFWGWEEYEKNPYDEIKNPDGIIQMGLAENQLSFDLIESWLAKNPDAANFQREGQSIFRELALFQDYHGLPSFKNAMADFMSENRGNRVSFNPNKLVLTAGATPANETLMFCLADPGDAFLLPTPYYPGFDRDLKWRTGAEIVPIQCKSANGFRITKVALEEAYEQAQKLNLKVKGVLITNPSNPLGTTTTRTELNHLLDFISRKKIHLISDEIYSGTVFTNPGFISVMEVLKDRKLENTDVFDRVHIVYSLSKDLGLPGFRVGVIYSNDDFVVSAATKMSSFGLISSQTQYLLSALLSDKTFTKNYLEENQIRLKNRHKKLVSGLEAAGIECLKSNAGLFCWVDMRHLLKSNTFEAEIELWKKIVYEVKLNISPGSSCHCNEPGWFRVCFANLSEETLKVALDRLKRFVDGPSPTRRSQSEHQRLKNLRKMKVSNWVFRLSFHDREPEER

SEQ ID NO: 10202 - protein, 470 aa, Arabidopsis thaliana
MKQLSRKVTSNAHGQDSSYFLGWEEYEKNPYDEIKNPNGIIQMGLAENQLCFDLIETWLAKNPDAAGLKKDGQSIFKELALFQDYHGLPEFKKALAEFMEEIRGNRVTFDPSKIVLAAGSTSANETLMFCLAEPGDAFLLPTPYYPGFDRDLKWRTGAEIVPIHCSSSNGFQITESALQQAYQQAQKLDLKVKGVLVTNPSNPLGTMLTRRELNLLVDFITSKNIHLISDEIYSGTVFGFEQFVSVMDVLKDKNLENSEVSKRVHIVYSLSKDLGLPGFRVGAIYSNDEMVVSAATKMSSFGLVSSQTQYLLSALLSDKKFTSTYLDENQKRLKIRQKKLVSGLEAAGITCLKSNAGLFCWVDMRHLLDTNTFEAELELWKKIVYDVKLNISPGSSCHCTEPGWFRVCFANMSEDTLDLAMKRLKEYVESTDSRRVISKSSHDRIKSLRKRTVSNWVFRVSWTDRVPDER

SEQ ID NO: 10203 - protein, 470 aa, Arabidopsis thaliana
MKQLSTKVTSNGHGQDSSYFLGWEEYEKNPYDEIKNPNGMIQMGLAENQLCFDLIESWLTKNPDAASLKRNGQSIFRELALFQDYHGMPEFKKAMAEFMEEIRGNRVTFDPKKIVLAAGSTSANETLMFCLAEPGDAFLLPTPYYPGFDRDLKWRTGAEIVPIHCSSSNGFQITESALQQAYQQAQKLDLKVKGVLVTNPSNPLGTALTRRELNLLVDFITSKNIHLISDEIYSGTMFGFEQFISVMDVLKDKKLEDTEVSKRVHVVYSLSKDLGLPGFRVGAIYSNDEMIVSAATKMSSFGLVSSQTQYLLSALLSDKKFTSQYLEENQKRLKSRQRRLVSGLESAGITCLRSNAGLFCWVDMRHLLDTNTFEAELDLWKKIVYNVKLNISPGSSCHCTEPGWFRVCFANMSEDTLDLALKRLKTFVESTDCGRMISRSSHERLKSLRKKTVSNWVFRVSWTDRVPDER

SEQ ID NO: 10204 - protein, 460 aa, Arabidopsis thaliana
MLSSKVVGDSHGQDSSYFLGWQEYEKNPFHESFNTSGIVQMGLAENQLSFDLIEKWLEEHPEVLGLKKNDESVFRQLALFQDYHGLPAFKDAMAKFMGKIRENKVKFDTNKMVLTAGSTSANETLMFCLANPGDAFLIPAPYYPGFDRDLKWRTGVEIVPIHCVSSNGYKITEDALEDAYERALKHNLNVKGVLITNPSNPLGTSTTREELDLLLTFTSTKKIHMVSDEIYSGTVFDSPEFTSVLEVAKDKNMGLDGKIHVVYSLSKDLGLPGFRVGLIYSNNEKVVSAATKMSSFGLISSQTQHLLANLLSDERFTTNYLEENKKRLRERKDRLVSGLKEAGISCLKSNAGLFCWVDLRHLLKSNTFEAEHSLWTKIVCEVGLNISPGSSCHCDEPGWFRVCFANMSDQTMEVAMDRVKGFVDNNNGGKQKRTMWDTRRRSLINKWVSKLSSVTCESER

SEQ ID NO: 10205 - protein, 474 aa, Arabidopsis thaliana
MVQLSRKATCNSHGQVSSYFLGWEEYEKNPYDVTKNPQGIIQMGLAENQLCFDLLESWLAQNTDAACFKRDGQSVFRELALFQDYHGLSSFKNAFADFMSENRGNRVSFDSNNLVLTAGATSANETLMFCLADPGDAFLLPTPYYPGFDRDLKWRTGVEIVPIQSSSTNGFRITKLALEEAYEQAKKLDLNVKGILITNPSNPLGTTTTQTELNILFDFITKNKNIHLVSDEIYSGTVFNSSEFISVMEILKNNQLENTDVLNRVHIVCSLSKDLGLPGFRVGAIYSNDKDVISAATKMSSFGLVSSQTQYLLSSLLSDKKFTKNYLRENQKRLKNRQRKLVLGLEAIGIKCLKSNAGLFCWVDMRPLLRSKTFEAEMDLWKKIVYEVKLNISPGSSCHCEEPGWFRVCFANMIDETLKLALKRLKMLVDDENSSRRCQKSKSERLNGSRKKTMSNVSNWVFRLSFHDREAEER

SEQ ID NO: 10206 - protein, 497 aa, Brassica juncea
MVALTAEKQDQNLLSRMAAGDGHGENSAYFDGWKAYEENPFHPINRPDGVIQMGLAENQLCGDLMRKWVLEHPEASICTAEGVNQFSDIAIFQDYHGLPEFRQAVAKFMEKTRNNKVRFDPDRIVMSGGATGAHETVAFCLANTGEGFLVPTPYYPGFDRDLRWRTGVNLVPVTCHSSNGFKITVEALEAAYENARVSNIPVKGLLITNPSNPLGTTLDRDCLKSLVNFTNNKGIHLIADEIYAATTFGQSEFISVAEVIEEVPHSNRDLIHIVYSLSKDMGLPGLRVGIVYSYNDRVVQIARKMSSFGLVSSQTQHLIAKMLSDEDFVDEFIRKSKLRLAARHAELTTGLDGLGIGWLKAGAGLFIWMDLRNLLKTATFDSEMELWRVIATNKVKLNVSPGGSCHCNEPGWFSMFANMDHKTMETALERIRVFTSQLEEESLKQTKPMAAPTVMAKKKMCWQSSLRLSFKDTRRFEEGFFSPHSPVPHSPLVRAQI

SEQ ID NO: 10207 - protein, 474 aa, Brassica oleracea
MDLLSRKATCNSHGQDSSYFLGWEEYEKNPHDVVKNPHGIIQMGLAENQLCFDLLESWLIQNPDAASFKRDGQSIFRELALFQDYNGLSSFKKALADFMSENRQNRVSFDSKNLVLTAGATSANETLMFCLANPGDAFLLPTPYYPGFDRDLKWRTGVEIVPIQCSSRNGFCITKLALEEAYEQAKKLNLNVKGVLITNPSNPLGTTATQTELNILFEFISKNKNIHLVSDEIYSGTAFSSSEFISVMEILKTNQLENTDVFKRVHIVYSLSKDLGLPGFRVGAIYSNDKDVISAATKMSSFGLVSSQTQYLLSSLLSDKKFTKNYLRENQRRLNNRQRMLVTGLEAIGIGCLKSNAGLFCWVDMRHLLSSKTFEAEMDLWKKIVYEVKLNISPGSSCHCEEPGWFRVCFANMSEETLKLAMKRLKKFVDNGTLSRSCQVGESQSLKSSRKKTTTTVSNWVFRLSFHDRDTEER

SEQ ID NO: 10208 - protein, 435 aa, Malus x domestica
MRMLSRNATFNSHGQDSSYFLGWQEYEKNPYHEVHNTNGIIQMGLAENQLCFDLLESWLAKNPEAAAFKKNGESIFAELALFQDYHGLPAFKKAMVDFMAEIRGNKVTFDPNHLVLTAGATSANETFIFCLADPGEAVLIPTPYYPGFDRDLKWRTGVEIVPIHCTSSNGFQITETALEEAYQEAEKRNLRVKGVLVTNPSNPLGTTMTRNELYLLLSFVEDKGIHLISDEIYSGTAFSSPSFISVMEVLKDRNCDENSEVWQRVHVVYSLSKDLGLPGFRVGAIYSNDDMVVAAATKMSSFGLVSSQTQHLLSAMLSDKKLTKNYIAENHKRLKQRQKKLVSGLQKSGISCLNGNAGLFCWVDMRHLLRSNTFEAEMELWKKIVYEVHLNISPGSSCHCTEPGWFRVCFANLPERTLDLAMQRLKAFVGEYYNV

SEQ ID NO: 10209 - protein, 473 aa, Malus x domestica
MRMLSRNATFNSHGQDSSYFLGWQEYEKNPYHEVHNTNGIIQMGLAENQLCFDLLESWLAKNPEAAAFKKNGESIFAELALFQDYHGLPAFKKAMVDFMAEIRGNKVTFDPNHLVLTAGATSANETFIFCLADPGEAVLIPTPYYPGFDRDLKWRTGVEIVPIHCTSSNGFQITETALEEAYQEAEKRNLRVKGVLVTNPSNPLGTTMTRNELYLLLSFVEDKGIHLISDEIYSGTAFSSPSFISVMEVLKDRNCDENSEVWQRVHVVYSLSKDLGLPGFRVGAIYSNDDMVVAAATKMSSFGLVSSQTQHLLSAMLSDKKLTKNYIAENHKRLKQRQKKLVSGLQKSGISCLNGNAGLFCWVDMRHLLRSNTFEAEMELWKKIVYEVHLNISPGSSCHCTEPGWFRVCFANLPERTLDLAMQRLKAFVGEYYNVPEVNGGSQSSHLSHSRRQSLTKWVSRLSFDDRSPIPGR

SEQ ID NO: 10210 - protein, 473 aa, Malus x domestica
MRMLSRNATFNSHGQDSSYFLGWQEYEKNPYHEVHNTNGIIQMGLAENQLCFDLLESWLAKNPEAAAFKKNGESIFAELALFQDYHGLPAFKKAMVDFMAEIRGNKVTFDPNHLVLTAGATSANETFIFCLADPGEAVLIPTPYYPGFDRDLKWRTGVEIVPIHCTSSNGFQITETALEEAYQEAEKRNLRVKGVLVTNPSNPLGTTMTRNELYLLLSFVEDKGIHLISDEIYSGTAFSSPSFISVMEVLKDRNCDENSEVWQRVHVVYSLSKDLGLPGFRVGAIYSNDDMVVAAATKMSSFGLVSSQTQHLLSAMLSDKKLTKNYIAENHKRLKQRQKKLVSGLQKSGISCLNGNAGLFCWVDMRHLLRSNTFEAEMELWKKIVYEVHLNISPGSSCHCTEPGWFRVCFANLPERTLDLAMQRLKAFVGEYYNVPEVNGGSQSSHLSHSRRQSLTKWVSRLSFDDRGPIPGR

SEQ ID NO: 10211 - protein, 429 aa, Malus x domestica
MLSRNATFNSHGQDSSYFLGWQEYEKNPYHEVHNTNGIIQMGLAENQLCFDLLESWLAKNPEAAAFKKNGESIFAELALFQDYHGLPAFKKAMVDFMAEIRGNKVTFDPNHLVLTAGATSANETFIFCLADPGEAVLIPTPYYPGFDRDLKWRTGVEIVPIHCTSSNGFQITETALEEAYQEAEKRNLRVKGVLVTNPSNPLGTTMTRNELYLLLSFVEDKGIHLISDEIYSGTAFSSPSFISVMEVLKDRNCDENSEVWQRVHVVYSLSKDLGLPGFRVGAIYSNDDMVVAAATKMSSFGLVSSQTQHLLSAMLSDKKLTKNYIAENHKRLKQRQKKLVSGLQKSGISCLNGNAGLFCWVDMRHLLRSNTFEAEMELWKKIVYEVHLNISPGSSCHCTEPGWFRVCFANLPERTLDLAMQRLKAFVGE

SEQ ID NO: 10212 - protein, 460 aa, Malus x domestica
GQDSSYFLGWQEYEKNPYHEVHNTNGIIQMGLAENQLCFDLLESWLAKNPEAAAFKKNGESIFAELALFQDYHGLPAFKKAMVDFMAEIRGNKVTFDPNHLVLTAGATSANETFIFCLADPGEAVLIPTPYYPGFDRDLKWRTGVEIVPIHCTSSNGFQITETALEEAYQEAEKRNLRVKGVLVTNPSNPLGTTMTRNELYLLLSFVEDKGIHLISDEIYSGTAFSSPSFISVMEVLKDRNCDENSEVWQRVHVVYSLSKDLGLPGFRVGAIYSNDDMVVAAATKMSSFGLVSSQTQHLLSAMLSDKKLTKNYIAENHKRLKQRQKKLVSGLQKSGISCLNGNAGLFCWVDMRHLLRSNTFEAEMELWKKIVYEVHLNISPGSSCHCTEPGWFRVCFANLPERTLDLAMQRLKAFVGEYYNVPEVNGGSQSSHLSHSRRQSLTKWVSRLSFDDRGPIPGR

SEQ ID NO: 10213 - protein, 403 aa, Malus x domestica
NTNGIIQMGLAENQLCFDLLESWLAKNPEAAAFKKNGESIFAELALFQDYHGLPAFKKAMVDFMAEIRGNKVTFDPNHLVLTAGATSANETFIFCLADPGEAVLIPTPYYPRFDRDLKWRTGVEIVPIHCTSSNGFQITETALEEAYQEAEKRNLRVKGVLVTNPSNPLGTTMTRNELYLLLSFVEDKGIHLISDEIYSGTAFSSPSFISVMEVLKDRNCDENSEVWQRVHVVYSLSKDLGLPGFRVGAIYSNDDMVVAAATKMSSFGLVSSQTQHLLSAMLSDKKLTKNYIAENHKRLKQRQKKLVSGLQKSGISCLNGNAGLFCWVDMRHLLRSNTFEAEMELWKKIVYEVHLNISPGSSCHCTEPGWFRVCFANLPERTLDLAMQRLKAFVGEYYNVPEV

SEQ ID NO: 10214 - protein, 464 aa, Malus sylvestris
FNSHGEDSSYFLGWQEYEKNPYHEVHNTNGIIQMGLAENQLCFDLLESWLAKNPEAAAFKKNGESIFAELALFQDYHGLPAFKKAMVDFMAKIRGNKVTFDPNHLVLTAGATSANETFIFCLADPGEAVLIPTPYYPGFDRDLKWRTGVEIVPIHCTSSNGFQITETALEEAYQEAEKRNLRVKGVLVTNPSNPLGTTMTRNELYLLLSFVEDKGIHLISDEIYSGTAFSSPSFISVMEVLKDRNCDENSEVWQRVHVVYSLSKDLGLPGFRVGAIYSNDDMVVAAATKMSSFGLVSSQTQHLLSAMLSDKKLTKNYIAENHKRLKQRQKKLVSGLQKSGISCLNGNAGLFCWVDMRHLLRSNTFEAEMELWKKIVYEVHLNISPGSSCHCTEPGWFRVCFANLPERTLDLAMQRLKAFVGEYYNVPEVNGGSQSSHLSHSRRQSLTKWVSRLSFDDRGPIPGR

SEQ ID NO: 10215 - protein, 454 aa, Malus sylvestris
FNSHGEDSSYFLGWQEYEKNPYHEVLNTNGIIQMGLAENQLCFDLLESWLAKNPEAAAFKKNGESIFAELALFQDYHGLPAFKKAMVDFMAKIRGNKVTFDPNHLVLTAGATSANETFIFCLADPGEAVLIPTPYYPGFDRDLKWRTGVEIVPIHCTSSNGFQITETALEEAYQEAEKRNLRVKGVLVTNPSNPLGTTMTRNELYLLLSFVEDKGIHLISDEIYSGTAFSSPSFISVMEVLKDRNCDENSEVWQRVHVVYSLSKDLGLPGFRVGAIYSNDDMVVAAATKMSSFGLVSSQTQHLLSAMLSDKKLTKNYIAENHKRLKQRQKKLVSGLQKSGISCLNGNAGLFCWVDMRHLLRSNTFEAEMELWKKIVYEVHLNISPGSSCHCTEPGWFRVCFANLPERTLDLAMQRLKAFVGEYYNVPEVNGGKQPFKPLKKTVAHKVGFPAILR

SEQ ID NO: 10216 - protein, 241 aa, Citrus x paradisi
QMGLAENLLCHELVEDWLMNNPKASICSAEGLNEFKGIAIFQDYHGLPEFRNAVAKFMGKVRGNRITFDPDRIVMSGGATGAHETVAFCLADPGDAFLVPTPYYPGFDRDLRWRTGVQLVPVVCDSSNDFKVTMEALEAAYEKAQESNIRIKGVLITNPSNPLGTFLDRETLKDIVSFINEKNIHLVCDEIYAATVFTKEPSFVSLAEIIDQDLHAIAISFTLYTVFLRTWDSLALGSVSF

SEQ ID NO: 10217 - protein, 473 aa, Pyrus pyrifolia
MRMLSRNATFNSHGQDSSYFLGWQEYEKNPYHEVHNTNGIIQMGLAENQLCFDLLESWLAKNPEAAAFKKNGESIFAELALFQDYHGLPAFKKAMVDFMAEIRGNKVTFDPNHLVLTAGATSANETFIFCLADPGEAFLIPTPYYPGFDRDLKWRTGVEIVPIHCTNSNGFQITETALEEAYQEAEKCNLRVKGVLVTNPSNPLGTTMTRNELYLLLSFVEDKGIHLISDEIYSGTAFSSPSFISVMEVLKDRNCDENFEVWQRVHVVYSLSKDLGLPGFRVGAIYSNDDMVVAAATKMSSFGLVSSQTQHLLSAMLSDKKLTKNYIAENHKRLKQRQKNLVSGLQKAGISCLNGNAGLFCWVDMRHLLRSNTFEAEMELWKKIVYEVHLNISPGSSCHCTEPGWFRVCFANLPERTLDLAMQRLKAFVGEYYNVPEVNGRSQSSHLSHSRGQSLTKWVSRLSFDDRCPIHGR

SEQ ID NO: 10218 - protein, 488 aa, Lupinus albus
MRLLSSKASCNTHGQDSSYFLGWEEYEKNPYDEAMNPEGIIQMGLAENQLSFDILESWLAKNQDVAGFKRDGKSIFRELALFQDYHGIPSFKKAMVDFMAEIRGNKVTFDPNHIVLTAGSTSANETLMFCLAEQGDAFLLPTPYYPGFDRDLKWRTGVEIVPIQCTSSNNFQITESALLQAHEDAKKRNLRVKGVLVTNPSNPLGTTMSRNELNLLIDFIKVNKDMHLISDEIYSGTVFSSPGFISIMEILKERNYLKDSSDAAQVWNRVHVIYSLSKDLGLPGFRVGAIYSDNDEVVAAATKMSSFGLVSSQTQYLLSAMLGDKKFTKNYLLENQKSLKRRHRMFIYGLQKTGISCLKSNAGLFCWVDMRHLLSSNTFEAEMELWKKIVYQVKLNISPGSSCHCTEPGWFRVCFANMSEDTLNLAMKRLTTFVATITGANESKKNSGTSRTMSLPNWVSGYLLVIIGTRRTIISRDDIAWSWLVCEV

SEQ ID NO: 10219 - protein, 482 aa, Phyllostachys edulis
MVSQVADEKPQLLSKKAGCNSHGQDSSYFLGWQEYEKNPFDPAANPGGIIQMGLAENQLSFNLLEDWLEANPDALGLRREGASVFREPALFQDYNGLPAFKNALARFMSEQRGYRAVFDPSNIVLTAGATSANEALMFCLADHGDAFLIPTPYYPGFDRDLKWRTGAEIVPVHCTSANGFRVTRAALDDAYRRAQKSRLRVKGVLITNPSNPLGTTVPRADLEMLVEFVAAKGIHLISDEIYSGTAFAEPGFVSVLEVVAARSPLAADVSGRVHIVYSLSKDLGLPGFRVGAIYSANAGVVSAATKMSSFGLVSSQTQYLLAMLLGDKDFTRRYVAENKKRIKERHDQLVEGPKEIGIGCLESNAGLFCWVDMSHLMRSRSFEGEMELWKKVVFEVGLNISAGLSCHCREPGWFRVCFANMSAKTLDVAMQRLSSFVHHASSFVDEAGRRRGSGPARSMSCPLAIKWAFRLPPASADRKAER

SEQ ID NO: 10220 - protein, 279 aa, Phaseolus vulgaris
QDYHGLPSFKKALVDFMAEIRGNKVTFDPNHIVLTAGATSANETLMFCLAEEGDAFLLPTPYYPGFDRDLTWRTGAEIVPIQCTSSNNFHITESALKQAYEEAGRRNLRVKGVLVTNPSNPLGTTMSRSELNLLVDFIKEKKDSHLISDEIYSGTVFSSPGFVSIMEILKERNDADGIWNRVHVVYSLSKDLGLPGFRVGAIYSENDTVVAAATKMSSFGLISSQTQYLLSAMLGDKKFTRNYIVENQKRLKRRQRMMVSGLQKAGISCLESNAGLFCW

SEQ ID NO: 10221 - protein, 480 aa, Pisum sativum
MKLLSTKATCNSHGQDSSYFLGWQEYEKNPYDHVQNPKGIIQMGLAENQLSFDLLESWLAKNQDVGGFKRDGKSIFRELALFQDYHGLPSFKKALVDFMAEIRGNKVTFDPNHIVLTAGATSANETLMFCLAEKGEAFLLPTPYYPGFDRDLKWRTGVEIVPIQCTSSNNFQMTESALQQAHEDAKKKNLKVKGVLVTNPSNPLGTTMSKNELNLLIDFIKDKNMHLISDEIYSGTVFTSPNFVSVMEILNERTDKDFLDANVSERVHIVYSLSKDLGLPGFRVGAIYSDNETVVAAATKMSSFGLVSSQTQYLLSAMLGDKKFTRNYLSENQKRLKKRQKMLVNGLQKAGISCLKTNNAGLFCWVDMRNLLTSDTFEAEMDLWKKILYEVGLNISPGSSCHCTEPGWFRVCFANMSEDTLNLAMKRLKDFVSNSNGEEGSNSDNKRTRSSQSSRSFTRKSISNWVFRLSSRDHHEQEER

SEQ ID NO: 10222 - protein, 368 aa, Vigna radiata var. radiata
QMGLAENQLTSDLVEDWILNNPEASICTPEGINDFRAIANFQDYHGLAEFRNAVAKFMARTRGNRITFDPDRIVMSGGATGAHEVTAFCLADPGEAFLVPIPYYPGFDRDLRWRTGVKLVPVMCDSSNNFVLTKEALEDAYEKAREDNIRVKGLLITNPSNPLGTIMDRKTLRTVVSFINEKRIHLVCDEIYAATVFSQPGFISIAEILEDETDIECDRNLVHIVYSLSKDMGFPGFRVGIIYSYNDAVVNCARKMSSFGLVSTQTQYLLASMLNDDEFVERFLAESAKRLAQRFRVFTGGLAKVGIKCLQSNAGLFVWMDLRQLLKKPTFDSETELWKVIIHEVKINVSPGYSFHCTEPGWFRVCFA

SEQ ID NO: 10223 - protein, 484 aa, Oryza sativa (indica cultivar-group)
MFGGGGGGRKPLDYEELNENVKKVQYAVRGELYLRASELQKEGKKIIFTNVGNPHALGQKPLTFPRQVVALCQAPFLLDDPNVGLIFPADAIARAKHYLAMAPGGLGAYSDSRGIPGIRKEVAEFIERRDGYPSDPELIYLTDGASKGVMQMLNTIIRNERDGILVPVPQYPLYSAAISPFGGSLVPYYLEEEANWGLDFVNLRQTVASARSKGITVRAMVIINPGNPTGQCLSEGNIKELLKFCFHENLVLLADEVYQQNIYQDERPFISARKVLFDMGPPMSREVQLVSFHTVSKGYWGECGQRGGYFEMTNLPPKTVDEIYKVASIALSPNVPGQIFMGLMVNPPKPGDISYLKFSAESKSILESLRRRARLMTDGFNSCRNVVCNFTEGAMYSFPQIRLPPKAIDAAKRAGKAADVFYCLKLLEATGISTVPGSGFGQKEGVFHLRTTILPAEEDMPAIMTSFKKFNDTFMDQYDGYSRM

SEQ ID NO: 10224 - protein, 363 aa, Capsicum annuum
MGLAENQLCFDLIQEWVVNNPKASICTAKGAEDFQEIAIFQDYHGLPEFRQAVARFMEKVRGDRVTFDPNRIVMSGGATGAHEMLAFCLADPGDAFLVPTPYYPGFDRDLRWRTGVQLFPVVCESSNDFKVTRKALEEAYEKAQESNIKIKRLLINNPSNPLGTLLDKDTLRDIVTFINSKNIHLVCDEIYAATVFDQPRFISVSEVVDEMIGCNQDLIHIVYSLSKDLGFPGFRVGIVYSYNDTVVDIARKMSSFGLVSTQTQHLLASMLSDEIFIEKFIAESSERLSKRQGMFTKGLAQVGISTLKSNAGLFFWMDLRRLLKEPTFDAELELWRIIIHEVKLNVSPGVSFHCSEPGWFRVC

SEQ ID NO: 10225 - protein, 469 aa, Lycopersicon esculentum
MKLLSEKATCNSHGQDSSYFLGWQEYEKNPYDEIQNPKGIIQMGLAENQLSFDLLESWLAQNPDAAGFKRNGESIFRELALFQDYHGLPAFKNAMTKFMSEIRGNRVSFDSNNLVLTAGATSANETLMFCLANQGDAFLLPTPYYPGFDRDLKWRTGAEIVPIHCSSSNGFRITESALEEAYLDAKKRNLKVKGVLVTNPSNPLGTTLNRNELELLLTFIDEKGIHLISDEIYSGTVFNSPGFVSVMEVLIEKNYMKTRVWERVHIVYSLSKDLGLPGFRIGAIYSNDEMVVSAATKMSSFGLVSSQTQYLLSCMLSDKKFTKKYISENQKRLKKRHAMLVKGLKSAGINCLESNAGLFCWVDMRHLLSSNNFDAEMDLWKKIVYDVGLNISPGSSCHCTEPGWFRVCFANMSEDTLDLAMRRIKDFVESTAPNATNHQNQQQSNANSKKKSFSKWVFRLSFNDRQRER

SEQ ID NO: 10226 - protein, 469 aa, Lycopersicon esculentum
MKLLSEKATCNSHGQDSSYFLGWQEYEKNPYDEIQNPKGIIQMGLAENQLSFDLLESWLAQNPDAAGFKRNGESIFRELALFQDYHGLPAFKNAMTKFMSEIRGNRVSFDSNNLVLTAGATSANETLMFCLANQGDAFLLPTPYYPGFDRDLKWRTGAEIVPIHCSSSNGFRITESALEEAYLDAKKRNLKVKGVLVTNPSNPLGTTLNRNELELLLTFIDEKGIHLISDEIYSGTVFNSPGLVSVMEVLIEKNYMKTRVWERVHIVYSLSKDLGLPGFRIGAIYSNDEMVVSAATKMSSFGLVSSQTQYLLSCMLSDKKFTKKYISENQKRLKRRHAMLVKGLKSAGINCLESNAGLFCWVDMRHLLSSNNFDAEMDLWKKIVYDVGLNISPGSSCHCTEPGWFRVCFANMSEDTLDLAMRRIKDFVESTAPNATNHQNQQQSNANSKKKSFSKWVFRLSFNDRQRER

SEQ ID NO: 10227 - protein, 467 aa, Lycopersicon esculentum
MKLLSKKAMCNSHGQDSSYFLGWEEYQKNPYDEIRNPKGIIQMGLAENQLSFDLLESWLTLNPDASAFKRNGHSIFRELSLFQDYHGLPAFKDALVQFMSEIRGNKVSFDSNKLVLTAGATSANETLMFCLADPGHAFLLPTPYYPGFDRDLKWRTGAEIVPIQCTSSNGFRITESALEEAYTEAERRNLRVKGVLVTNPSNPLGTTLTKKELQLLLTFVSTKQIHLISDEIYSGTVFNSPKFVSVMEVLIENNYMYTDVWDRVHIVYSLSKDLGLPGFRVGAIYSNDDRVVSAATKMSSFGLISSQTQYLLSALLSDKKFTKNYVSENQKRLKKRHEMLVGGLKQIGIRCLESNAGLFCWVDMRHLLSSNTFDGEMELWKKIVYEVGLNISAGSSCHCTEPGWFRACFANMSEDTLNIAIQRLKAFVDSRVNNKDDIQNQQQCSNKKKSFSKWVFRLSFNERQRER

SEQ ID NO: 10228 - protein, 471 aa, Lycopersicon esculentum
MKLLSDMASCNSHGQDSSYFLGWQEYEKNPYDEIQNPKGIIQMGLAENQLSFDLLESWLAQNPDTAGFKRNGESIFRELALFQDYHGLPDFKNALVQFMSEIRGNKVTFNPNKLVLTAGATSANETLMFCLANPGDAFLLPTPYYPGFDRDLKWRTGAEIVPIQCTSSNGFRITQSALEESYKLAKTRNLRVKGILVTNPSNPLGTTLTRNELELLVSFVAEKGIHLISDEIYSGTVFNSPKFVSVMEVLIENNYMYTEVWDRVHIVYSLSKDLGLPGFRIGAIYSNDAVIVSAATKMSSFGLISSQTQYLLSAMLTDKKFTKKYISENQKRLKKRHAMLVKGLESSGISCLESNAGLFCWVDMRHLLKTNTFEAEIELWKKIVYEVRLNISPGSSCHCTEPGWFRACFANMSEDTLNLAIQRIKSFVDSSDVIGINVDQSNQTNQNTSTSPKKKLFAKWGFRLSFNDRER

SEQ ID NO: 10229 - protein, 471 aa, Lycopersicon esculentum
MLKMLSKMAMCKSHGQDSSYFIGWQEYEKNPYDPLQNPSGIIQMGLAENQLSFDLIESWLTRNQDVIQFRENGGSMFRDLALFQDYHGLQAFKNVLVSLMAEIRRKKVKFDPKNLVLTAGSTSANETLIFCLAEPGEALLIPTPYYPGFDRDLKWRTGAEIVPIQCYSSNNFRITESALEEAYEQAQKRNLTVKGVFITNPSNPLGTTMSRNELNILITFAMTKNIHIVSDEIYAGTVFDSPKFVSIIEALIDRKLEKSKMWNQVHIVSSLSKDLGLPGFRVGMIYSNNETLIAAATKMSSFGLISSQTQYLLSKILGDRRFIKRYVKQNKKQLIHRREMLASGLANSGIECLDSNAGLFCFVDMRDLLNSNTFEAEMELWKKIISNVGLNVSPGSSCHCSEPGWFRVCFANMSKETLDLAMQRINNFVNFDRDIHRQQPLRFVTGAGSRRRRTIANWVVKFSSGDGRRDR

SEQ ID NO: 10230 - protein, 470 aa, Petunia x hybrida
MKLLSEKATCNSHGQDSSYFLGWQEYEKNPYDEIQNPKGIIQMGLAENQLSFDLLESWLSQNPDAAGFKRNGESIFRELALFQDYHGLPAFKNALVKFMAEIRGNKVTFDSNKLVLTAGATSANETLMFCLADRGDAFLLPTPYYPGFDRDLKWRTGAEIVPIQCTSSNGFRITESALEEAYQEAKSRNLRVKGVLVTNPSNPLGTTLTRNELELLLSFVDTKGIHLISDEIYSGTVFNSPNFVSVMEVLIENDYMYTEVWDRVHIVYSLSKDLGLPGFRVGAIYSNDELVVSAATKMSSFGLISSQTQYLLSAMLSDKKFRKKYVSENQKRLKKRHAMLVTGLQNAGISCLESNAGLFCWVDMRHLLKSNTFEAEIELWKEIVYQVGLNISPGSSCHCTEPGWFRVCFANMSEDTLTLAMARIKSFVDSSATSTDTHNNQTNQNTNTNSTKKKLFSKWGFRLSFNDRER

SEQ ID NO: 10231 - protein, 374 aa, Solanum melongena
LQEFDPDQMGLAENQLCFDLIQEWIVNNPKASICTYEGVQDFQDIAIFQDYHGLPEFRKAVARFMEKVRGDRVTFDPERIVMSGGATGAHESLAFCLADPGDAFLVPTPYYPGFDRDLRWRTGVQLFPVVCESSNNFKVTKEALEEAYKKAQESNIKVKGLLINNPSNPLGTILDKETLKDILRFINDKNIHLVCDEIYAATALCQPSFISISEVMNEVVGCNDDLVHIVYSLSKDLGFPGFRVGIIYSYNDVVVNIARKMSSFGLVSTQTQRLIASMLSDTIFVENFIAKSAMKLSQRHDLFTKGLGQVGITTLKSNAGLFIWMDLRRFLENSTFDDELKLWHIIINKVKLNVSPGCSFHCSEPGWFRVCFAA

SEQ ID NO: 10232 - protein, 465 aa, Solanum tuberosum
MKLLSKKAMCNSHGQDSSYFLGWEEYEKNPYDETRNPKGIIQMGLAENQLSFDLLESWLTQNPDAAAFKRNGDSIFRDLALFQDYHGLPAFKDALVQFMSEIRGNKVSFDSNKLVLTAGATSANETLMFCLADPGDAFLLPTPYYPGFDRDLKWRTGAEIVPIQCTSSNGFRITESALEEAYKEAERRNLRVKGVLVTNPSNPLGTTLTKKELQLLLTFVSTKQIHLISDEIYSGTVFNSPKFVSVMEVLIENNYMYTEVWDRVHIVYSLSKDLGLPGFRVGAIYSNDVMIVSAATKMSSFGLISSQTQYLLSALLSDKKFTKKYVSENQKRLKKRHEMLVGGLKQIGIRCLESNAGLFCWVDMRHLLSSNTFDGEMELWKKIVYEVGLNISPGSSCHCTEPGWFRACFANMSEDTLNIAIQRLKAFVDSRDNKDDIQNQKHSNKKKSFSKWVFRLSFNERQRER

SEQ ID NO: 10233 - protein, 465 aa, Solanum tuberosum
MKLLSKKAMCNSHGQDSSYFLGWEEYEKNPYDETRNPKGIIQMGLAENQLSFDLLESWLTQNPDAAAFKRNGNSIFRELALFQDYHGLPAFKDALVQFMSEIRGNKVSFDSNKLVLTAGATSANETLMFCLADPGDAFLLPTPYYPGFDRDLKWRTGAEIVPIQCTSSNGFRITESALEEAYKEAERRNLRVKGVLVTNPSNPLGSTLTKKELQLLLTFVSTKQIHLISDEIYSGTVFNSPKFVSVMEVLIENNYMYTEVWDRVHIVYSLSKDLGLPGFRVGAIYSNDDMIVSAATKMSSFGLISSQTQYLLSALLSDQKFMKNYVSENQKRLKKRHEMLVGGLKQIGIRCLESNAGLFCWVDMRHLLSSNTFDGEMELWKKIVYEVGLNISPGSSCHCTEPGWFRACFANMSEDTLNIAIQRLKAFVDSRDNKDDIQNQKHSNKKKSFSKWVFRLSFNERQRER

SEQ ID NO: 10234 - protein, 372 aa, Antirrhinum majus
RIQMGLAENQLSFDLLESWLSENPDAAGFKRNGESIFRELALFQDYHGLPAFKNAMVNFMSEIRGNKVNFDPNKLVLTAGATSANETLMFCLAEPGDAFLLPTPYYPGFDRDLKWRTGVEIVPIQCTSSNGFRITAPALEDAYELAQKRNLKVKGVLVTNPSNPLGITLTRQELNLLVKFIDKKGIHLISDEIYSGTVFNSRILSASWKFSRTENMLMIKSYWNRVHIEYSLSKDLGLPGFRVGCIYSNDPVVVAAATKMSSFGLVSSQTQYLLSAMLSNKKFARSYIVENQKRLRTVHAMLVRGLKSTGISCLESNAGLFCWVDMRHLLSSNTFEAEMDLWKKIVYEVGLNISPGSSCHCDEPGWFRVDLQ

SEQ ID NO: 10235 - protein, 363 aa, Antirrhinum majus
IQMGLAENQVSFDLLEEYLEKHSEATNCDSRNSGFRENALFQDYHGLLSFRKAMASFMEQIRGGRATFDPERVVITAGAPPANELLTFILANPGDALLIPTPYYPGFDRDLRWRTGVNIVPIHCDSSNNFEITPQALEAAYNEAESKNIKVKGVLITNPSNPLGATIKRAILEQILEFVTRKNIHLISDEIYSGSSFSPEEFVSIAEILEAQDYKNSERVHIVYSLSKDLGLPGFRVGTIYSYNDKVVTTARRMSSFTLISSQTQHLLASMLSDKEFTKEYININRSRLRKRYEMIVDGLKEAGIECLKGNAGLFCWMNLKPLLEKPTKEHEVELWKLIMYEVKLNISPGSSCHCSEPGWFRV

SEQ ID NO: 10236 - protein, 297 aa, Helianthus annuus
AISTALANFMNRVRGNRVKFDPDRIVMSGGATGAHETLAGCLANPGEAFLVPTPYYPAFDRDLRWRTGVELFPVVCESADNFKGHREALETAYKKAKLANVKVKGVLITNPSNPLGTFLDRDTLKDIVNFVNDKSIHLVCDEIYAGTVTNGDEFVSIAEVIEEVPKCNLDLIHLVYSLSKDMGFPGFRVGVVYSYNDNVVSIARKMSSFGLVSTQTQHMLASMLSDNEFVGTFISESRIRLAHRHDMFTRGLAQVGIGSLESKAGLFFWMDLRRFLKEPTFESEMTFWRTIINEIKL

SEQ ID NO: 10237 - protein, 471 aa, Dictyostelium discoideum
MDYNSEYEGFSDNAIRLLSAPKGNSKLAMAHFIAMSDLYNSKNNPNGYISLGIAENVLSYDILKEKLIFESDGNDGKEIMAAAAPLQSLTQYSEIGGIPQLRELIAKELLQNQIFKGYKPTNEKLLVKKEQILISGGATPLLENIFNLFCNQDEKCIIPSPFYPSFVYDAYQRFGVKVIAAKSEIFKDPLNKGTSEIIDFKLDLKEFESLYNQGGVKMVLLCNPNNPTGYIFKPSEIKELVKWCRNKKIHFVSDEIYALSVFGSEDGSDGGNEFKSIYEILEGDLGEYVHVLNGFSKDFCLNGYRIGYFYSQNETVFRYMLSTSAFYSCSNIAQYTAINILKDREYLERFIKTNQSNLKESYEFASNLLNQYSIPFIKSSSGVFLSLDLRACLKYLPNDTTTDDDQDNTDPFSKEIKLWEEIFKNKVFLNSGKLCYFEKPGFFRLVFTLPKDFIEQGIKRIAQVYNSLLNK

SEQ ID NO: 10238 - protein, 410 aa, Musa acuminata
MPQMLLSRKAACNTHGQDSSYFLGWQEYEKNPYDPRTNPTGIIQMGLAENQLSFDLIESWLERHPDAAGLRRDGALVFRELALFQDYHGLPAFKKALADFMGGLRGDKVKFEPHKLVLTAGSTSANETLMFCLAEAGEAFPSPTPYYPGFDRDLKWRTGAEIVPIHCSSSNGFRVTKAALEKAYQGPRKRHLRVKGVLVTNPSNPLGTAMTRCELDTLIDFVVAKDIHLISDEIYSGTSFDAPRFVSVMEAIEGGQHVSHRIHVVYSLSKDLGLPGFRVGAIYSNNGAVVAAATKMSSFGLVSSQTQYLLSVLLSDKEFTRNYHFENQKRIKERHDRLVQGLRRSGISCLQSNAGLFCWVDMRHLLNSDTFKGEMELWRKIVYQVGLNISPGSSCHCDEPGWFSVCFANM

SEQ ID NO: 10239 - protein, 363 aa, Musa acuminata
MGFAENHVSFDLIESWLEDHPDLTGFKKDGGLVFRELALFQDYHGLPAFKNALARYMGEVRGNKVSFEPSKLVLTAGATSANETLMFCLADPGEAFLLPTPYYPGFDRDLKWRTGVEIVPIHCSSSNGFRITRAALEAALRRAQKRRLRVKGVLVTNPSNPLGTTLTRQELDTLVDFAVANDIHLISDEIYSGTTFGSPGFVSIAEATKGRDDVSHRIHIVCSLSKDLGLPGFRVSAIYSDNEAVVSAATKMSSFGLISSQTQYLLAALLSDKEFTEKYVRESQKRLKERHDMLVEGLRRIGIGCLEGNAGLFCWVDMRHLLRSNTFEGEMELWKKIVYRVGLNVSPGSSCHCDEPGWFRVSF

SEQ ID NO: 10240 - protein, 366 aa, Musa acuminata
MGLAENQLSLDLIEGGLERHPDAVGLRRDGALVSRELALFQDYHGLPASKKALADFMGELRGNKVKFEPHKLVLTAGSTSANETLMFCLAEPGEAFLLPTPYYPGFDRDLKRRTGAEIVPIHCSSPNGFRVTKAALEKAYQGARKRHLRVKGVLVTNPSNPLGTTMTRCELDTLMTFVVAKDIHLISDEICSGTSFDAPGFVSVMEAIEGRQHVSHRIHVVYSLSKDLGLPGFRVGAIYSNNEAVVAAATKMSSFGLVSSQTQYLLSVLLSDKEFTRNYIAENQKRIKERHDRLVQGLRRSGISCLQSNAGLFCWVDMRHLLNSNTFEGEMELWKKIVYQVGLNISPGSSCHSHEPGWFRVCFANM

SEQ ID NO: 10241 - protein, 363 aa, Musa acuminata
MGFTENQLCFDLIESWLENHPDPAAFKKDGALLFRELALFQDYHGLPAFKRALTKYMGEVRGNKVAFDPNRLVLTAGATSANETLMFCLAEPGEAFLLPTPYYPGFDRDLKWRTGAEIVPIHCSSSNGFRITKPALEAAYQDAQKRSLRVKGVLVTNPSNPLGTTLTRHELDILVDFVVSKDIHLISDEIYSGTNFDSPGFISIAEATKDRNNVSHRIHIVCSLSKDLGLPGFRVGAIYSENEAVVSAATKMSSFGMVSSQTQYLLAALLSDKEFTDKYLLENQKRLKERHDMLVEGLRRIGIGCLKGSAALFCWVDVRHLLKSNTFKGAMELWKKIVYQVGLNISPGSSCHCDEPGWFSVTF

SEQ ID NO: 10242 - protein, 444 aa, x Doritaenopsis sp.
MSKMFGKEVPLSKMAVSKAHGEGSPYFAGWKAYEENRYDAVGNPDGVIQMGLAENQLSFDLLEEYLELHPEAFSWASDSSSFRENALFQDYHGLQTLRQALASFMEKIRGGRSKFDANRIVLTAGATAANEILTFILADRGDALLVPTPYYPGFLRDLQWRTGVTIFPVHCYSSNGFQLTLSSLEKAYAEAKASNFNVRGLLMTNPCNPLGTSASLSLLQDIIHFISDKTIHLISDEIYSGSVFSSTNLFSISDLITDAISEQVHIVYSLSKDLGLPGFRVGALYSYNDRVVKTARRMSSFSLVSSQTQRLLSFMLSDEEFTVRYIEKNRERLRERYELVVNGLKEAGIECLKGEAGLFCWVNMEKLMEEETKEGEAEPWKVIIDDLKLNISPGSSCCCAEPGWFRLCFANMSRETLEGVKRLKDFAQKKVAAKKKKMNNVYFC

SEQ ID NO: 10243 - protein, 425 aa, x Doritaenopsis sp.
MSKMFGKEVPLSKMAVSKAHGEGSPYFAGWKAYEENPYDVVGNPDGVIQMGLAENQLSFDLLEEYLELHPEAFSWASDSSSFRENALFQDYHGLQTLRQALASFMEKIRGGRSKFDANRIVLTAGATAANEILTFILADRGDALLVPTPYYPGSNGFQLTLSSLEKAYAEAKASNFNVRGLLMTNPCNPLGTSASLSLLQDIIHFISDKNIHLISDEIYSGSVFSSTNLFSISDLITDAISEQVHIVYSLSKDLGLPGFRVGALYSYNDRVVKTARRMSSFSLVSSQTQKLLSFMLSDEEFTVRYIEKNRERLRERYELVVNGLKEAGIECLKGEAGLFCWVNMEKLMEEETKEGEAELWKVIIDDLKLNISPGSSCCCAEPGWFRLCFANMSRETLEVALKRLKDFAQKKVAAKKKKMNNVYFC

SEQ ID NO: 10244 - protein, 366 aa, Populus tremula x Populus tremuloides
QMGLAENQLCFDLIQDWLKKNPKASICSPEGLNEFREIAIFQDYHGLPEFRSAVANFMEKVRGNRVTFDPDRIVMSGGATGAHETVAFCLADPGEAFLVPAPYYPGFDRDLRWRTGVKLIPVDSDSSNSFMVTREALENAYEKAQLDNIKVKGLLITNPSNPLGTILDRETLRSIVRFINEKNIHLVCDEIYAATVFSQPDFISVAEILQEDIECNLDLVHIVYSLSKDMGFPGLRVGIIYSYNDAVVSCARKMSSFGLVSTQTQYLIASMLSDNEFVEMFIRESKSRLAARYRVFTRGLDQVGIECLKTSNAGLFLWMDLSRLLKEQTFKAEMGLWRVIIHEVKLNVSPGCSFHCSKPGWFRVCF

SEQ ID NO: 10245 - protein, 365 aa, Populus tremula x Populus tremuloides
QMGLAENQLSVDSIIDWIEKHPEASICNPEGVHMFKDIANFQDYHGLPEFRQAIAKFMGRVRGGRVAFDPDRIVMSGGATGANELIMFCLADPGDAFLVPSPYYPAFYRDLGWRTGVQIVPVDCDSSNNFQITKGALEAAYDKAQQNGINVKGLIITNPSNPLGTTLDRETLKSLLSFINEKNIHIVCDEIYAATIFGSENFVSISEVVEEVMDCNRDLIHIVYSLSKDMGLPGFRVGIVYSYNDAVVNCGRKMSSFGLVSSQTQYLLASMLSDEEFVEDFLAGSSKRLKKRHGVFTKGLEQIGISCLESKAGLFVWMNLRHLLKEQTNDGEMALWRVIVNDVKLNVSPGSSFHCVEPGWFSVSS

SEQ ID NO: 10246 - protein, 372 aa, Annona cherimola
YETDPYHPITNPRGVIQMGLAENQLCSDLIEEWVRRNPSSSICTPEGASEFKEIAIFQDYHGLPAFRKAVANFMEKVRGGRAKFDPDRIVMSGGATGAHELIAFCLADPGDAFLVPTPYYPGFDRDLRWRTGVQLVPVECHSYNNFKVTRSALEAAYMKAQEENIRVKGLLITNPSNPLGTILDRETLESIISFINEKSIHLVCDEIYAATVFSSPPFVSIAEILTDVPHCNLDLVHIVYSLSKDLGLPGFRVGVVYSYNDHVVRIGRKMSSFGLVSTQTQHLIASLLSDDAFVNKFIVESARRLAERHSTFTRELARVRISCLKSNAGLFCWMDLRALLKEPTVEGEMELWHTIVNVIKLNVSPGASFHCS

SEQ ID NO: 10247 - protein, 431 aa, Penicillium citrinum
MTQSVLSRRAQDVVDAGSENPMWDVMKDTWHASTNPTGYVNVGVAENALMHDELLEFINKKLELPAKYLTYNDGGGGSSRLKAAIAAFLNHNLKPVIPLEPSHIMATNGVSSAIEHVAWSFADPGEGILLGRPYYGMFIPDMSLRTGSSVVPVSFGELDPLSVEGVDKYEEALLEFHRTTGKKVKALMLAHPHNPLGRCYSREVLVKLMRLCQKYQVHFISDEIYALSVFENTVDEHPPPVKFESALSIDLTGIIDPRLVHVLWGMSKDFGANGIRLGVIISQANRDIHMALTGPSLYSYASGITDHLTALILEDFDFTTRYIQQNQKLLSESYAYTANYLKEHGIEYATGCNAAFFVWMNLGKKYRELHPEDECENVGEQIMQRLLQKKVFLASGFLFGSEKDGWFRIVFTQGHDYLSVALERINAALEE

SEQ ID NO: 10248 - protein, 435 aa, Dendrobium crumenatum
MSKEFGIEAPLSKIAVSKAHGEDSPYFAGWKAYEENPYDAVDNPNGVIQMGLAENQLSFDLLEEYLEQHPEASSWGSGMSSFRENALFQDYHGLQTFRKAMASFMEKIRGGRSKFDPDRIVLTAGATAANELLTFILADPGDALLVPTPYYPGFLRDLQWRTGVTIFPVHCHSSNGFQLTLASLESAYADAKASNFNVKGLLITNPCNPLGTVASLSLLQDIILFISDKNIHLISDEIYFGCVFSSTNLFSISDLITNAVSYQIHIVYSLSKDLGLPGFRVGALFSYNDRVVKTARRMSSFSLVSSQTQKLLAFMLSDEEFTVNYIKKNRERLRERYELVVGGLKEAGIECLKGEAGLFCWVNMEELMEDKTEEGELRLWKVMVDELKLNISPGSSCCCSEPGWFRVCFANTSRETLEVALRRLKDFARKKTKNI

SEQ ID NO: 10249 - protein, 107 aa, Brassica rapa subsp. rapa
LVITNPSNPLGTTLDRDCLKSLVKFTNDKGIHLIADEIYAATTFGESEFISVAEVIEEIPDCNRDLIHIVYSLSKDMGLPGLRIGIIYSYNNRVVQIARKMSSFGLV

SEQ ID NO: 10250 - protein, 85 aa, Phalaenopsis sp. SM9108
RDLKWRTGAQIIPIRCSSTNSFRLTKTALDNAYRRATKLKLQVKGIVVTNPSNPLGTTMTSIELHTLVDFIEANNLHLICDEIYS

SEQ ID NO: 10251 - protein, 85 aa, Phalaenopsis sp. SM9108
RDLKWRTGVKIFPVHCHSSNGFQLTLPSLQSAYSIAEASNLRVKALLITNPSNPLGTTMPRSLLEDILNFISQKNIHLISDEIYS

SEQ ID NO: 10252 - protein, 3167 aa, Caenorhabditis elegans
MSPIAPPRKRLGREESLHYYRDDDEVIQEQSSTEKSRRVTVKSPEPGNTSVSMNDNVEGRNLTAGITSISMNDSCTDTSYESRFSTIPRARSSPPGNHRVNHIQVNVIGPIRVSEPESRHPVVGSVGEDVTMDIYIERRRSGSNPRRDSHVSFETLEAPPKPPRRSKYDEHIRIGDPIATSTPMTTIERKQTREERVSTESGQSSRKSTRSSRPPDINIIECETFLKETRSPARTPATPIVVINQTPSSRRSSQDLLGEPGQRRRKSTVTDIDWYAAFNMKVSWLNRLYRGLLTQFIRNSKKTVIILCHFRFSKFYIYKMVFDISKIVKIFKRKKKKKDPSSPTKIARPSFASHNEERKASRDLRRRASDSSMIGIPPADIDLNQIFLCTVPPEIKKDEKCQCNACRLIRMSEAERAETRSSTLPSRHRTAPVDIELEDIFNPKPFSHPSANSKPPTPPNRRRHPPSASVAHSQSSFVDESPSQHFVTTTIDRNQVTPVTTTTTNMRESGPLLHENSHNQLLSSSDNWVAQMMNDASEWENNVSSRKSSILSTSSTSARKASVARRISVDELTKPEKRKSRQAVPLPPSDVSIDDIFTALTPRKEEVQSERKTFIVTRKQRAQDVDAIDFEKDRETPIAPPRSGKRKSDATENQPEITLELDVEKHEIDSSKVSTSTINLNDESMETRNTNDSKDSFDDEVNPRNQRLVVEIPFSEPRVTSTATIQLESSDVAGENSENKRPVISMRSKSEIAKKEKDAQRSGFVIIPHSKEHILDESNISMDDVFNTTPHDQCRVPDIDADSSKHTSSDSREVSTVTINLDNVFPTEEPKLVAKDNCEIEAEEERIGKRIKQFERTTGEQEISKNSEPTEDEMPDEKDHRTSAVSIDLDKVFVQGTAKKPENDEFDEKIKRGIAEFERSKQEKEVQRSGVAETSHSGKHIFDESNISMDDVFNTSQKYKSDEKLSTPERTVEPEVSTATMNLDNIISASGIATREENTNVLEEEERIQKRVEEFKKTTENLEIQKEVVLTKEEVDNSDVKEHRTSAVNIDLEKVFIHGSSKKPKNDDEKIRRGIAEFERTKQEKEAQRSTVIETSQSNSRIFEESSISMDDVFNNSLHNESQVSEITEASDPSDLVLTSTTFHNVIEEKIDDDVTKTDSNVEEEKEQVRLRIDEFKRPTEEQNLQKEFELTKKEEEYSVKMENRTSAVSIDLDKVFDQSSKETTVSNETDEKIKRGIAEFERSKQEKEVQRSGVAETSHSGKHIFDESNISMDDVFNTSQKYKSDEKLSSPERTVEPEVSTATMNLDNIIFASGIATREENTDVLEEEERIQKRVEEFKKTTENLEIQKEVVLTKEEVDNSDVKEHRTSAVNIDLDDVFIQRSSKHPENDEDDEKIRRGIAEFERTKQEKEAQRSAVIETSQSNKHIFDKSNISMDEVFNESQNGQKDSSNIDMKETDMPEKERDDQRYVDVHRDKKPFENGEFEPTFNGSKISNEPKQISITTINLDNVFPTEEPKLVAEDNCEIEAEEERIRKRIKQFERTTGEQEILKNSEPAEDETSDEKKHRTAAVSIDLDKVFVQGTAKKPENDEFDEKIKRGIAEFERSKQEKEVQRSGVAETSHSSKHIFDESNISMDDVFNTSQKYKSDEKLSTPERTVEPEVSTATMNLDNIIFASGIATREKNTDVLEEEERIQKRVEEFKKTTENLEIQKEVVLTKEEGDNSDVKDHKASAVNIDLDDVFIQRSSKHPENDEDDEKIRRGIAEFERTKQEKEAQRSTVIETQYSSKDMFNESDISLDVVFNTSQKDKSDEKLSSPERTVEPEVSTATVNLDNMVALSKERRKENNETQEEEEQIQKRVEEFKESTEEQKIQKSIELTKEECTSDEKELKTYSGSIDLDKVFIQGSSKKPRNDESDERINRGIAEFERTKQEKEAQRSVVVETSPSNKHISDESSISMDEIFSRSQDNKSTSNFEKSGSIPIIVLPGEEKEVASASINLNGVFLEGKQKTSTDYGREKVNKVQENSGSYSTRHAMDGASISLDDIFNTSSTSQKTETDKIDNSQEFPQLSKPVLKSSISLDDLFNNTSGIEKTTSEKTTTTTTTRTETTTDTYSKRSTSTLVDRFGYETATPPAISIAAISFDQPSSSSPQAFPRSKHQNLSSLTVPGKWNESMMSNTSTISLDDSFNNSFSKSNTSQVYEPRMRKPLTLPVDNWIDNLVSEATNEATKEAPKTPKSDTLNYFRSPTRISQEIKYEWVADMIGDIDRKNKGGHQSEEEHLQKHDSTWVSSVVYRPTLETSAYTLRSSQLNTDCKMEIDLENVFDECLMGKKKDDEHCECSACRLTEQELEEIKKRKIELENMTSEQKIIISEPSDRRKSVDFSNPSQISLNEVFSPEVPLRIETEHAPAPSTSSPPLESTRIYYLSPKVSETVTTTHQWKDAGIPMDEIFSPVSSTADGNRRFSNFYEDRSGWDTIGSEDSGVMSGGDRGRRRSTRITDQVIDEAFQGIFDSQPSTSTAHPKPVRTETHYDDYYITSLQQEDLDATDSEVDGENLDVSTFVDDILGKSMDEAAFLSSTKSLREHTDTSIDRKKSGEKVHSYYRNRTDTSIDKRSKPEVITEDLETSELQDEIMKLVFVEPSVSKSDSSANIKASQNKSTTKPCDEELLEIEIKSEYFLIKGSYSLLIPKSDPLGKMLQKLREQNDSLATLDFSLTRKLKKLLVNCIREKAGSLDMVSMSSQYEGLSSRGQSLIESIDHASATFLKMNVDKYEPTRNPNGVVNFCTAENNICTPLLEDRFKHLELFFPNIEHLVRYPPAGGWPETRRVLVKYFKEFMGAGVTIDELVLTASTRTGYDVTSYCLFEQDDILLTNGPIYTGTISNVQEKAQCQVVCVETDLSNPRLDVKMYEAELNRQIALENTVSGVIIVNPHNPLGVTFPPEQVISLCNWASSKNLRVVIDEVFANSVFDKLNSKFRPFLSYRHRLHRPDSVAWLWSVSKDFGLPGLKFAVIHTTNEGLCQAATKLQMYYPCSPFVQDFAVNLLSDSEWLREFHREVNKRISIHYRYTSDNLKRLEIPFIPAQAGIFVFADFSKHLTSLDSVGELALFERLAEAGVMLTPGVHQKCHVFGWFRIVFACTKEELEEGFRRLYIHLGSQLQPVGTVEY

SEQ ID NO: 10253 - protein, 3147 aa, Caenorhabditis elegans
MSPIAPPRKRLGREESLHYYRDDDEVIQEQSSTEKSRRVTVKSPEPGNTSVSMNDNVEGRNLTAGITSISMNDSCTDTSYESRFSTIPRARSSPPGNHRVNHIQVNVIGPIRVSEPESRHPVVGSVGEDVTMDIYIERRRSGSNPRRDSHVSFETLEAPPKPPRRSKYDEHIRIGDPIATSTPMTTIERKQTREERVSTESGQSSRKSTRSSRPPDINIIECETFLKETRSPARTPATPIVVINQTPSSRRSSQDLLGEPGQRRRKSTVTDIDWYAAFNMKVSWLNRLYRGLLTQFIRNSKKTVIILCHFRFSKFYIYKMVFDISKIVKIFKRKKKKKDPSSPTKIARPSFASHNEERKASRDLRRRASDSSMIGIPPADIDLNQIFLCTVPPEIKKDEKCQCNACRLIRMSEAERAETRSSTLPSRHRTAPVDIELEDIFNPKPFSHPSANSKPPTPPNRRRHPPSASVAHSQSSFVDESPSQHFVTTTIDRNQVTPVTTTTTNMRESGPLLHENSHNQLLSSSDNWVAQMMNDASEWENNVSSRKSSILSTSSTSARKASVARRISVDELTKPEKRKSRQAVPLPPSDVSIDDIFTALTPRKEEVQSERKTFIVTRKQRAQDVDAIDFEKDRETPIAPPRSGKRKSDATENQPEITLELDVEKHEIDSSKVSTSTINLNDESMETRNTNDSKDSFDDEVNPRNQRLVVEIPFSEPRVTSTATIQLESSDVAGENSENKRPVISMRSKSEIAKKEKDAQRSGFVIIPHSKEHILDESNISMDDVFNTTPHDQCRVPDIDADSSKHTSSDSREVSTVTINLDNVFPTEEPKLVAKDNCEIEAEEERIGKRIKQFERTTGEQEISKNSEPTEDEMPDEKDHRTSAVSIDLDKVFVQGTAKKPENDEFDEKIKRGIAEFERSKQEKEVQRSGVAETSHSGKHIFDESNISMDDVFNTSQKYKSDEKLSTPERTVEPEVSTATMNLDNIISASGIATREENTNVLEEEERIQKRVEEFKKTTENLEIQKEVVLTKEEVDNSDVKEHRTSAVNIDLEKVFIHGSSKKPKNDDEKIRRGIAEFERTKQEKEAQRSTVIETSQSNSRIFEESSISMDDVFNNSLHNESQVSEITEASDPSDLVLTSTTFHNVIEEKIDDDVTKTDSNVEEEKEQVRLRIDEFKRPTEEQNLQKEFELTKKEEEYSVKMENRTSAVSIDLDKVFDQSSKETTVSNETDEKIKRGIAEFERSKQEKEVQRSGVAETSHSGKHIFDESNISMDDVFNTSQKYKSDEKLSSPERTVEPEVSTATMNLDNIIFASGIATREENTDVLEEEERIQKRVEEFKKTTENLEIQKEVVLTKEEVDNSDVKEHRTSAVNIDLDDVFIQRSSKHPENDEDDEKIRRGIAEFERTKQEKEAQRSAVIETSQSNKHIFDKSNISMDEVFNESQNGQKDSSNIDMKETDMPEKERDDQRYVDVHRDKKPFENGEFEPTFNGSKISNEPKQISITTINLDNVFPTEEPKLVAEDNCEIEAEEERIRKRIKQFERTTGEQEILKNSEPAEDETSDEKKHRTAAVSIDLDKVFVQGTAKKPENDEFDEKIKRGIAEFERSKQEKEVQRSGVAETSHSSKHIFDESNISMDDVFNTSQKYKSDEKLSTPERTVEPEVSTATMNLDNIIFASGIATREKNTDVLEEEERIQKRVEEFKKTTENLEIQKEVVLTKEEGDNSDVKDHKASAVNIDLDDVFIQRSSKHPENDEDDEKIRRGIAEFERTKQEKEAQRSTVIETQYSSKDMFNESDISLDVVFNTSQKDKSDEKLSSPERTVEPEVSTATVNLDNMVALSKERRKENNETQEEEEQIQKRVEEFKESTEEQKIQKSIELTKEECTSDEKELKTYSGSIDLDKVFIQGSSKKPRNDESDERINRGIAEFERTKQEKEAQRSVVVETSPSNKHISDESSISMDEIFSRSQDNKSTSNFEKSGSIPIIVLPGEEKEVASASINLNGVFLEGKQKTSTDYGREKVNKVQENSGSYSTRHAMDGASISLDDIFNTSSTSQKTETDKIDNSQEFPQLSKPVLKSSISLDDLFNNTSGIEKTTSEKTTTTTTTRTETTTDTYSKRSTSTLVDRFGYETATPPAISIAAISFDQPSSSSPQAFPRSKHQNLSSLTVPGKWNESMMSNTSTISLDDSFNNSFSKSNTSQVYEPRMRKPLTLPVDNWIDNLVSEATNEATKEAPKTPKSDTLNYFRSPTRISQEIKYEWVADMIGDIDRKNKGGHQSEEEHLQKHDSTWVSSVVYRPTLETSAYTLRSSQLNTDCKMEIDLENVFDECLMGKKKDDEHCECSACRLTEQELEEIKKRKIELENMTSEQKIIISEPSDRRKSVDFSNPSQISLNEVFSPEVPLRIETEHAPAPSTSSPPLESTRIYYLSPKVSETVTTTHQWKDAGIPMDEIFSPVSSTADGNRRFSNFYEDRSGWDTIGSEDSGVMSGGDRGRRRSTRITDQVIDEAFQGIFDSQPSTSTAHPKPVRTETHYDDYYITSLQQEDLDATDSEVDGENLDVSTFVDDILGKSMDEAAFLSSTKSLREHTDTSIDRKKSGEKVHSYYRNRTDTSIDKRSKPEVITEDLETSELQDEIMKLVFVEPSVSKSDSSANIKASQNKSTTKPCDEELLEIEIKSEYFLIKGSYSLLIPKSDPLGKMLQKLREQNDSLATLDFSLTRKLKKLLVNCIREKAGSLDMVSMSSQYEGLSSRGQSLIESIDHASATFLKMNVDKYEPTRNPNGVVNFCTAENNICTPLLEDRFKHLELFFPNIEHLVRYPPAGGWPETRRVLVKYFKEFMGAGVTIDELVLTASTRTGYDVTSYCLFEQDGKRECNKIITDLSNPRLDVKMYEAELNRQIALENTVSGVIIVNPHNPLGVTFPPEQVISLCNWASSKNLRVVIDEVFANSVFDKLNSKFRPFLSYRHRLHRPDSVAWLWSVSKDFGLPGLKFAVIHTTNEGLCQAATKLQMYYPCSPFVQDFAVNLLSDSEWLREFHREVNKRISIHYRYTSDNLKRLEIPFIPAQAGIFVFADFSKHLTSLDSVGELALFERLAEAGVMLTPGVHQKCHVFGWFRIVFACTKEELEEGFRRLYIHLGSQLQPVGTVEY

SEQ ID NO: 10254 - protein, 446 aa, Striga hermonthica
MGRMMMIEQEGRGQSVSLSRIAVSDTHGEDSPYFAGWKAYDEDPYDESLNPFGVIQMGLAENQVSFDLVEQYLEKHSDATNIGANSGFRENALFQDYHGLLSFRQAMASFMERIRGGRANFDPERIVITAGATAASELLTFILADPGDAVPVPTPYYPGFDRDLRWRTGVNIIPVHCHSANNFAITPEALDSALKHARASNTNVRALLITNPSNPLGATLSRATLDLALDFVSRHDLHLVSDEIYSGSAFSPDEFVSVSQVLESRGYKDAERVHVVYSLSKDLGLPGFRVGTIYSYNDRVVQTARRMSSFTLISSQTQKLLASMLSDKEFTEKYVRINRERLRGRYEATVEGLKRAGIRCLGGNAGLFCWMDLSGELREGSREDELELWGKLLREVKVNVSPGSSCHCSEAGWFRVCFANMSERTLEVALGRIQAFMERRRRRIAN

SEQ ID NO: 10255 - protein, 351 aa, Passiflora edulis
QVSFDLLEAYLEQHPEASTWGNGAPGFRDNALFQDYHGLKSFRQAMASFMEQIRGGRAKFDPDRIVLTAGATAANELLTFILADPGDALLVPTPYYPGFDRDLRWRTGVKIVPIHCDSSNNFQVTPQALEAAYKNAEAMNLKVRGVLLTNPSNPLGATIQRSVLEEIFDFVTRKNIHLVSDEIYSGSTFSSAEFVSIAEILEARGYTEAERVHIVYSLSKDLGLPGFRVGTIYSYNDKVVTTARRMSSFTLISSQTQHPLACMLSNKEFAENYIKTNRERLRKRYDMIIQGLKDAGIECLKGNAGLFCWMNLSPLLETPTKEGELALWESIVHEVKLNISPGSSCHCSEPG

SEQ ID NO: 10256 - protein, 354 aa, Passiflora edulis
QLCFDLVEEWLKNNPEASICTAEGLSEFRDIAIFQDYHGLPEFRNAVAKFMAKVRGDRVTFDPDRIVMSGGATGAHETIAFCLADPGERFLVPTPYYPGFDRDLRWRTGVKLIPVECESSNNFKVTRESLESAHEMAQLDGIRVKGLLITNPSNPLGTILDRDTLRSIVHFVNEKNIHLVCDEIYAATVFRQPDFVSISEILQEDDIECNLDLIHIVYSLSKDMGFPGFRVGIIYSYNDAVVSCARKMSSFGLVSAQTQHLIASMLSDDEFIEGFIKESRRRLAKRYQVFTRGLAQVGIKCLKTSNAGLFMWMDLRDPLKEKTFDGEMMLWRLIINEVKLNVSPGCSFHCPEPG

SEQ ID NO: 10257 - protein, 501 aa, Homo sapiens
MFTLPQKDFRAPTTCLGPTCMQDLGSSHGEDLEGECSRKLDQKLPELRGVGDPAMISSDTSYLSSRGRMIKWFWDSAEEGYRTYHMDEYDEDKNPSGIINLGTSENKLCFDLLSWRLSQRDMQRVEPSLLQYADWRGHLFLREEVAKFLSFYCKSPVPLRPENVVVLNGGASLFSALATVLCEAGEAFLIPTPYYGAITQHVCLYGNIRLAYVYLDSEVTGLDTRPFQLTVEKLEMALREAHSEGVKVKGLILISPQNPLGDVYSPEELQEYLVFAKRHRLHVIVDEVYMLSVFEKSVGYRSVLSLERLPDPQRTHVMWATSKDFGMSGLRFGTLYTENQDVATAVASLCRYHGLSGLVQYQMAQLLRDRDWINQVYLPENHARLKAAHTYVSEELRALGIPFLSRGAGFFIWVDLRKYLLKGTFEEEMLLWRRFLDNKVLLSFGKAFECKEPGWFRFVFSDQVHRLCLGMQRVQQVLAGKSQVAEDPRPSQSQEPSDQRR

SEQ ID NO: 10258 - protein, 501 aa, Homo sapiens
MFTLPQKDFRAPTTCLGPTCMQDLGSSHGEDLEGECSRKLDQKLPELRGVGDPAMISSDTSYLSSRGRMIKWFWDSAEEGYRTYHMDEYDEDKNPSGIINLGTSENKLCFDLLSWRLSQRDMQRVEPSLLQYADWRGHLFLREEVAKFLSFYCKSPVPLRPENVVVLNGGASLFSALATVLCEAGEAFLIPTPYYGAITQHVCLYGNIRLAYVYLDSEVTGLDTRPFQLTVEKLEMALREAHSEGVKVKGLILISPQNPLGDVYSPEELQEYLVFAKRHRLHVIVDEVYMLSVFEKSVGYRSVLSLERLPDPQRTHVMWATSKDFGMSGLRFGTLYTENQDVATAVASLCRYHGLSGLVQYQMAQLLRDRDWINQVYLPENHARLKAAHTYVSEELRALGIPFLSRGAGFFIWVDLRKYLPKGTFEEEMLLWRRFLDNKVLLSFGKAFECKEPGWFRFVFSDQVHRLCLGMQRVQQVLAGKSQVAEDPRPSQSQEPSDQRR

SEQ ID NO: 10259 - protein, 501 aa, Homo sapiens [sequence omitted]

SEQ ID NO: 10260 - protein, 652 aa, Homo sapiens
MRSHMWLWRGLSLSDILCFDLEFPHTTLGEVGFITAIFNKEKLKTRKASSCQKAASIYWADPGILVLAAREGPRVNGKVDGARQPSEASKDTRSISHRSDTLPVPSGQRRGRVPRDHSIYTQLLEITLHLQQAMTEHFVQLTSRQGLSLEERRHTEAICEHEALLSRLICRMINLLQSGAASGLELQVPLPSEDSRGDVRYGQRAQLSGQPDPVPQLSDCEAAFVNRDLSIRGIDISVFYQSSFQDYNAYQKDKYHKDKNTLGFINLGTSENKLCMDLMTERLQESDMNCIEDTLLQYPDWRGQPFLREEVARFLTYYCRAPTRLDPENVVVLNGCCSVFCALAMVLCDPGEAFLVPAPFYGGFAFSSRLYAKVELIPVHLESELTVDKLEEALLEARLEGKKVRGLVLINPQNPLGDIYSPDSLMKYLEFAKRYNLHVIIDEIYMLSVFDESITFHSILSMKSLPDSNRTHVIWGTSKDFGISGFRFGALYTHNKEVASAVSAFGYLHSISGITQHKLCQLLQNTEWIDKVYLPTNCYRLREAHKYITAELKALEIPFHNRSSGLYVWINLKKYLDPCTFEEERLLYCRFLDNKLLLSRGKTYMCKEPGWFRLIFADELPRLKLAMRRFCDVLQEQKEALIVKQLEDAMRE

SEQ ID NO: 10261 - protein, 357 aa, Streptomyces coelicolor A3(2)
MTSLFDSYRLGELTLPNRMVMAPMSRVRAAGGGLATPSMATYYAQRATAGLIVSEGVQPNEVGQSNPGTPGLHTDEQVAAWRPVTAAVHTNGGRIFAQIMHGGRVSHPDTTGMLPVGPSAVPAVGEVFTPTGPQPVPTPRALETAEVPEQARSYAEAARRAVDAGFDGVELHGANGYLISQFLSTNANLRTDRYGGPVAHRIRFAVEAVSATVEAVGADRTGIRLSPAGTFWGVEETDVLDLYTELLTELSRLGIAYVHIEATADEELLVALRRVWPGTLVMNPVLPMGPKQTGREDADHWLGLGADLISFGRGFIANPDLVERLRTGLPVAPVDESTYYQGGDAGYLTYPAYQHTV

SEQ ID NO: 10262 - protein, 376 aa, Streptomyces coelicolor A3(2)
MTVTPAEAATRAAQLLARPATINGLTVPNRIAMAPMTRMFSPGGVPGEDVVSYYSRRAAAGVGLIVTEGTYVGHDSAGQSDRVPRFHGEEQLAGWAKVAEAVHAAGGTIVPQLWHIGMVRKAGEQPFPDAPAVGPSGLRIGEDEPTGRAMTQRDLDDVIGAFAESAAAAERIGFDGVEIHGAHGYLVDQFLWSGTNRRTDAYGGDPVARTRFAAEIVAAVRETVSADFPVIFRYSQWKQEAYDARLAETPEELEAILTPLASAGVDAFHASTRRYWLPEFEDSDLNLAGWTKKLTGKAAITVGSVGLDGDFNRAFQGEGAPVGSLDNLLDRLERDEFDLVAVGRALLHDPRWAQKVLDGRFDELAPYDAASLKTLS

SEQ ID NO: 10263 - protein, 387 aa, Streptomyces coelicolor A3(2)
MHVPSTAPPPATAAPLFGPFTVGSLALENRIVMAPMTRELSPGGVPGPEVAAYYARRARNGVGLIITEGAAIGHPSSERRAAVPRIHSADALAGWTRVTQAVHAAGGRIAAQLMHVGLDPLLWGMTPAEMDAASPAGFELLSPSGVDPSQPAAATVGREMSDVDISSVIEAYARAAAEARQAGFDAIELHAAHGYLIDQFFWAVTNRRKDRYGGDLSARTRFGADVVRACRHAVGEDFPIFLRFSQWKVGHYAARLADSPDELAAVLGPLVQAGVDAFHCSTRRFWQPEFEGSDLNLAGWTKKVTGRPVIAVGSVGLKDSDFLSYLDGKGADVGDVSVVADRLAQGEFDLVAVGRALIADPAWPAKVRGGRSADLIPFDARMLTSLH

SEQ ID NO: 10264 - protein, 402 aa, Nostoc sp. PCC 7120
MSDEAERQRGNNLYKNSPLLPVSISQVSTSQLRETEIMSTNINLFSSYQLGELELPNRIVMAPLTRQRAGEGNVPHQLNAIYYGQRASAGLIIAEATQVTPQGQGYPHTPGIHSPEQVAGWKLVTDTVHQQGGRIFLQLWHVGRISHPDLQPDGGLPVAPSAIAPKGEVLTYEGKKPYVTPRALDTSEIPAIVEQYRQGAANALAAGFDGVEIHAANGYLIDQFLRDGTNQRTDEYGGAIENRARLLLEVTEAITSVWDSQRVGVRLSPSGTFNDIRDSHPLETFGYVAQALNRFNLSYLHIFEAIDADIRHGGTVVPTSHLRDRFTGTLIVNGGYTREKGDTVIANKAADLVAFGTLFISNPDLPERLEVNAPLNQADPTTFYGGGEKGYTDYPFLAVANK

SEQ ID NO: 10265 - protein, 362 aa, Rhodobacter sphaeroides
MTEKLFTPIAVGDLTLKNRVVMAPLTRNRAEPEGDLPTDLTVEYYRQRAGAGLIVTEGSQISPEGKGYAWTPGIHSEAQVAGWRKVTDAVHARGGHIAIQLWHVGRISHTSLLDGQKPVAPSALAAASRTFDGTGFVATSEPRALETDEIARVVEDYRKAARNAKAAGFDAVEIHAANGYLIDQFLRDTSNKRTDAYGGSQENRVRFLEEVVGAVVAEMGPGRTGIRFSPFSNANDVGIDSDTVGLFSRAIDVLNRHGIAFLHMVEGQTGGAREWPEGALETLRERFGGTYVANNGYDREMAVAAVESGKADMVAFGKLYISNPDLAERLAARAPLAPLPTEGLYGGGAEGYTDYPTLTPAA

SEQ ID NO: 10266 - protein, 366 aa, Rhodopseudomonas palustris
MSNSKLFEPTKLGPITLANRVVMAPLTRNRAVPEGLVPSPLAAEYYGQRASAGLLITEASQVSQQGQGYQDTPGIYSQAQVEGWRKVTGEVHKRGGKIFIQLWHVGRISHVDLQPNHGAPVAPSAIRANTKTFVGGQFADVSEPRALELSEIPGIIEDFRKAAANAIAAGFDGVEIHGANGYLLDQFARDSSNKRTDEYGGSIQNRARLMLEVAAAVAKEIGPERTGIRISPVTPANDVSDSNPQALFDYIVDELNKLKLVYIHVIEGATGGPRDIAPFDYASLRKRFSGSYIGNNAYDLALANKQLDAGAADLIAFGKPFISNPDLVERLKRNAPLNEPDKSTFYGGGAKGYTDYPTLESAQAAQ

SEQ ID NO: 10267 - protein, 190 aa, Rhodospirillum rubrum
VAGALTARYYAQRASGGLLISEGTQISPSGRGYPRTPGIHSPEQIAGWKGVTEAVHAAGGRIFAQLWHVGRISHRSLQPGGVLPVAPSAIRPKTKIFTESGLVALETPRALDTAEMADIVASFRAAAENARAAGFDGVEIHAANGYLLDQFLRDGTNHRDDAYGGSIDNRLRLVLEVVEAVLGVWDKARV

SEQ ID NO: 10268 - protein, 546 aa, Sulfolobus tokodaii
MRLLEPFYIRDVELKNRVVMSPMITNLGAPEGYPTEEHIRYFVRRASAGLLITEYTYVNKVDARGSPNQLGLYDDELIPKFARLTEAVHNMDSKIFVQLVHVGRKTRRSLIWNNDPIAPSNIPLLDPVREMTEDDINRVIMDFVKASERAEKSGFDGIELHGAHGYLIAQFLSPATNKREDKYKDGVIFLEELLKEIRRVVSIPVGMRISVTEFDPQGLTPELVAKIVKRVENLLDYIHLSAGRDGPLGGSSSFYYKRPSYVDEAKVVRKVTNLPLLLVGSVSTVEDAEKVLEVADAVVLGRQILADPDWVIKVKNNLPIRPCIRCNQLCRLLSTREVRCDVNPELGWEILNLEKGEGEVRIVGGGVMGLETARVLALRGFEVKIYEKKDKIGGQLNEIRDPWKREEFSRLIDYYEKELKRLGVKIYLSTEERKADIFALPKERQPEFKEYKGMRILVNSNLYAYQDYVFEWLKHNEVYITENVFKGLDRNRSYLLQQKYKELGVNIVKENVKADIVINDVRRNQPSIGQSIARGYWLGMTFKLKY

SEQ ID NO: 10269 - protein, 647 aa, Thermoanaerobacter tengcongensis
MSEFKFEKLLEPIQIGSMKLRNRIIMPPMVTNYAAEDGAVTERFKAYHQTRAKGGVGLIIVEATYIHPGGKGFQNQLGIYKDELISGLKELTEAVHKYGAKIAVQLYHAGRQTTLKVTGMQVVAPSPIPCPVKQEKPKELSVDEIKELIEAFGQAARRAKEAGFDAVEIHGAHGYLINQFLSPYSNKRTDEYGGSFENRMRFPLEVVRRVREEVGPDFPIIYRMSAEEYVPGGLTIEDTKIFAQKLVEEGIDALHISGGVYESSAMIIQPAAIPQGCFVENAAAIKKAINSKVPVIVVGRIKDPIMAEQIIREGKADLVSMGRALLADPELPRKVSEGKIEEIRKCIGCNQGCIDRLFQDIDIGCIANALTGHETEFDMESLAKTRKKVFIIGGGPGGLEAARVAALRGHEVILYEKQPELGGQMRIAAVPPHKGEINDLADYLINQVEKSGITIVKGKEADLNTIHEIKPDVVILATGSEPIIPEIPGINQKNVVTAHDVLKGTVTVGKKVAVIGGGLVGCETAEFLADQGKEVTVIEMLDDIAIDVGSLVRALLLNRMAEKKIKVLTKSKVKEISGDKVTIETVNGNQELSGIDTIVIAVGSKPKNDLLKLIEKEGIPVYAIGDCVKARKFMDAIHEGFRYAYSL

SEQ ID NO: 10270 - protein, 369 aa, Ralstonia metallidurans
MGAQTEAFLTEALFQPIKLGRIELANRMAMAPLTRSRADDDLVPTEMVVEYYRQRASVGLIIAEATQVSETAQGYTNTPGVYTPEQIAAWKTVTDAVHAQGGKIFLQIWHTGRMSHSHFQPDNQAPVAPSAIAANAKTYINGQGYVECSLPRALEASEIPEIVNDFRVAAANAIKAGFDGVEVHGAHGYLLDAFLRDGTNKRTDAYGGSIENRARFLLEVMAAVTAEIGADRVGVRLAPVSPVNDAVESNPQPLFEYVVRELEKLHPVYIHVVEGYTGGPRDNVPFDYEALHRLYSGVWMVNNGYSKEMAEEAIRAGRADMVSFGRKMITNPDLPRRFRENQPLNSPFEDASLYGGTGPHGYVDYPALA

SEQ ID NO: 10271 - protein, 361 aa, Ralstonia metallidurans
MHMSALFTPVRVGRYTLKNHLVMAPMTRSRASLDGTPGELAAEYYAQRASVGLIVTEGTQPSDDGQGYLATPGIYTEAHVDGWKNVTAAVHERGGRIFIQLMHAGRMSHPDNTPHHRQGVAPSAIAPGVPMFTLKGMQDIPAPRALTTAEVRQTVDDFRFAARQAIAAGADGVEIHGANGYLVQQFFAPNANTRTDKYGGSIDNRARFAIEVATAIAGEIGADRTAIRLSPGTPLWGIDEGAEGPALYRHLVTELDKLGLAYLHVSLQGNEPQLADIRERWRGTLILNRPGRTREAVGADVASGLADLEAYGQMVLANPDFVTRLKLGAPMNDALPNAFFGGDGRGYIDYPALALTDTVTS

SEQ ID NO: 10272 - protein, 285 aa, Ralstonia metallidurans
MKSALRAWLRFGTKEIMMTSTSNPLFQPYSLGPLSLPNRIVMPPMTRSRASQPGDVPNALMAEYYAQRASAGLIVSEGTWISPLGRGYAWTPGIHTPEQVAGWRKVTTAVHQAGGRIFAQLWHVGRLSHISLLDGHAPVSSSAIQAQGVNVFVAQSDGKPGFAQASQPRALSVEEIHAIVDDFRQAARNAMAAGFDGVELHAANGYLVNQFIDSGANDRTDEYGGSLENRLRFLGEVAQALIEGTGGKDRVGIRLAPLTTLNGCVDADPETTYTAAARLLGEIGG

SEQ ID NO: 10273 - protein, 371 aa, Burkholderia fungorum
MSTDSARIDSYLFEPVELGPLQLPNRIVMAPLTRSRAKEGDVPGELAIEYYAQRASAGLIIAEATQISPQGKGYVFTPGIYNDAQVQAWKRITGAVHEKGGRIFLQLWHVGRISHPSLQPGNALPVAPSAIKPEGQAYTNEGFVPLVTPRALETSEIAGIVEQYRVAAQNAKAAGFDGVEIHAANGYLLDQFLRDKTNRRTDQYGGSIGNRARLLLEVADAVTGVWGSDRVGVRISPLSSFGDIADSNPEPLFTYVVQQLSARKLVYLHVIEGDTGGPRDVPGGFDLQVLREAFDGLFMANNGYDMELAQRTLKAKRADLIAFGRPFISNPDLVARLRSGAPLNEPDKDTMYGGGAEGYIDYPTMEQEAKR

SEQ ID NO: 10274 - protein, 371 aa, Burkholderia fungorum
MNASSELKLLSPARVGPLSLAHRVVLAPMTRLRSDADDSPSAMMVEYYRQRASQGGLLITESAHPSYDSRGYIGAPGIYTNAHVEAWRKITDAVHARGARIFMQIAHDGRQSHVDLSWGNAPVAPSVVPYETTVFTQNGWVPNSPHRALELDEIPALIRSFRDAAARAKDSGFDGVELHNANGYLADTFLQDGTNKRTDAYGGSVEKRARFSLEAVEAFASVWGADRVGVRVSPSGRWGAISDNHPEATFGYFAQRLNEYGLAYLHVIEPRVMGTETLTEGEAPVASAFLRKVFTGPIIAAGGFDRDGAEQILQRGDADLVAFGRWFSSNPDLPERFRLGHALAPYNREAFWGGDERGYIDFPSLPEHAAA

SEQ ID NO: 10275 - protein, 353 aa, Burkholderia fungorum
MPTLFDPLQIGDITLPNRIIMAPLTRQRAGEIRVPNALMAKYYAERATAGLIISEATSVTPQGVGYADTPGIWSQEQVEGWKLVTSAVHAAGGRIFLQLWHVGRISDPLFLNGELPVAPSAIAAQGHVSLVRPERAYVTPRALELDEIAGVVEAFRKGAENAKAAGFDGVEVHGANGYLLDQFLQDSTNKRTDAYGGPIENRARLLLEVTDACIGVWGANRVGVHLAPRRDSHTMGDSDPAGTFGYVARELGKRKIAFIAAREALGDDRLGPQLKKAFGGPYIANEKFTTETAQQVLDAGEADAVAWGQLFIANPDLVRRFATNAPLNKPNPATYYARGETGYVDYPTLETVE

SEQ ID NO: 10276 - protein, 368 aa, Enterococcus faecium
MGGMTMSQFDQSITLPSGVQLKNRLMLSPMTTQLSFFNGVITEDEITYYKQRSKGLGAVITGAANVQDIGKGWPGELSIAHDEMIPRLSELAKAIQGEGAKAIIQIFHGGRMTSRATLSGEQPVSASAVAAKRPDAETPRAMSEEEIVETIQAFGKATRRAIESGFDGIELHGANTYLIQQFFSPHSNRREDQWGGSLENRYRFIEELLTTVFSAVEQYAKKPFIVGYRFSPEEYETPGIRFEDTIWLLERLRESKLDYLHVSLNMYDRIARSDKYNDKSILEVVHNTIQGKIPLVGVGGIRNREDVEQVLKYAELAAIGQQMIVDPDWAEKLLENREDEFVTKPFEEAYKELYLPSPLYNFLKARYQ

SEQ ID NO: 10277 - protein, 391 aa, Lactococcus lactis subsp. lactis
MPNQLTDHVTLRHGATLNNRIVMSPMQTHSGLKGGFASDDTIQYYSARSRAAGMLITEFHYVSENGGPAYVPGYPEQLGAYSDAHLEGLRKTVQALKKDGNKAILQIHHAGRAAVGRHVNGLDVVAPSAIDFSFLDYPVRELTITEIDDIILDFGKATKRAIDAGFDGVEIHGANHYLIQQFFSKLSNLRTDKWGGSLNKRMAFPLAVVKEVKAIVDEYAPKGFIIGYRISPEELHGKNVGYDYTEALTLISEVIKYELDYIHLSLWAGYNSKPENSEKSYAELFKEILDDKTKLLIVGGIFGEDTATDAIENYADLIAVARGTLIDPNFAKKVTEGKGDTILHKISPETVEYSHLTPGLLEAFSREDSLGLPPLPGGETIRHLHTGKYDI

SEQ ID NO: 10278 - protein, 351 aa, Clostridium acetobutylicum
MKKLFTEINIKNLKIKNRVCIPPMVVPVAEDGYVTSSNVERYKELAKGGPGLIIQEATCINEDGKLAEKQIGIWSDDQVEGLRKIVDAVHEEGCPIFVQIHHAGVVGISEEPLCPSPYEFNGYGRKVVGREMTLEDIKSVQNDYIEAARRAYEAGYDGIELHGCHGYLICQFLNKRVNKRNDEYGKNPENFVIEILEGIRKVTPKEFIVGIRLGGFEPAIEDGIHYAKIFEQQGIDFLDVSYGFSNGQEINVGEDYKYSNAVYAAERIKKEVSVPVFAVDGINSGDMAEAILNETNVDLVDIARGALINPNWANDAREGKDTGKCLRCSKCAWFGLSKACPGRAIFSRNNA

SEQ ID NO: 10279 - protein, 667 aa, Clostridium tyrobutyricum
MKNKSLFEPIKIGKVEVKNKISMAPMGAFGLVDNEGCYNQRAVDYYVERAKGGTGLIITSITKVENEIDKVVPGVIPIISINPGRFIMTSSEMTERVHAYGSKIFLQLTMGFGRSGAPGTLLTSQPVSASSVPNYWDPTVTCRELTTSEVEWIVAKFIQGAAIAQKAGFDGVEIHAVHEGYLLDQFTLSIFNRRTDKYGGDLRGRLQLPIEIVQGIKAQVGSDFPVGLRYSVKSCIKDWRQGGLPDEDYVEKGRDLEEGLESPQILEAAGYDELNTDVGTYDAWYWSHPPLYQKDGLYLPYTQELEKVVKIPVIVAGKLGVPQEAEKALDEGGADMIGLARPLLSDAYWPKKVLSGHPERIRPCIGCHVACLGRGFEGKPLSCAVNPAAGRERYYEIRPAAIPKKVLIAGGGVAGMEAARMAVLRGHKVTLYESTDQLGGEIVPGSVPDFKIDDRRLLDWYRNEMKELKINVIFNTEVTDKLVGKEQPDVVIVATGANDVKIKLPGMEKDKVSTAVDILNGTKKSGKNVLIVGGGLVGCETALYLAKAGKKVAIVEAKDKILDAGKPIPHMNKIMLEDLIKKYNIKVITGNSLLEVTDAGAVLIDSKFKQQEVSADTVVISIGFKSNRKLYNKLHGKVTDLYLIGDAYQAANIMDAIWSGNEIGLNC

SEQ ID NO: 10280 - protein, 667 aa, Moorella thermoacetica
MVAYTRLFEPIKIGKVEIKNKIAMTPMGVLGLATHDGCFSKRVVDYYVERAKGGTGLIITSVTKVDNEIERFKAGAVPVATANPLHFIATAGELTERVHAYGTKIFLQLGMGFGRVAAPILLESQPVAPSALPNFWDPSITCRELTTAEVETLVQRASEAAEIAVEAGFDGVEIHAMHEGYLLDQFTIALFNRRGDKYGGALEDRLTFPIEIVRAIKDRVGKDFPVVLRFSIKNYIKDWRQGGLPGENFQEKGRDVEEPLAAAKILEGAGYDGFDADAGSYDAWYWAHPPVYQKHGCYLPLTQRLKEVVKVPVIVAGRLEIPELAEEALVKGQADMIAIGRGLLTDPYWVNKVMTGRSKNIRPCIGCHDGCLGRGFLGRPLSCTVNPACGREEEYAIDRAPEAKQVMVIGGGVAGMEAARVPALRGHRVSLYEKSDRLGGHVVEAAVPDFKADDGRLLEWYKTELGELQVEIHLNQEVTPEFVEEKNPDVVVVATGSTPAIPDIPGVNKDKVTTVSDLLLGKKQAGDRVVIIGGGLVGCETALWLAQQGKDVTIIEILDDLMRAGIPVPYMNRMMLLDLLKMNGVKWLTETSVLEVTDDGVTLIGKNYQRSPLPADTVILAVGFGADQRLYNALRDKIPNLYLIGDSREPRNILAGIWEGYEVGRGI

SEQ ID NO: 10281 - protein, 365 aa, Escherichia coli O157:H7 EDL933
MSSEKLYSPLKVGAITAANRIFMAPLTRLRSIEPGDIPTPLMAEYYRQRASAGLIISEATQISAQAKGYAGAPGIHSPEQIAAWKKITAGVHAENGHMAVQLWHTGRISHASLQPGGQAPVAPSALSAGTRTSLRDENGQAIRVETSMPRALELEEIPSIVNDFRQAIANAREAGFDLVELHSAHGYLLHQFLSPSSNHRTDQYGGSVENRARLVLEVVDAGIEEWGADRIGIRVSPIGTFQNTDNGPNEEADALYLIEQLGKRGIAYLHMSEPDWAGGEPYTDAFREKVRARFHGPIIGAGAYTVEKAETLIGKGLIDAVAFGRDWIANPDLVARLQRKAELNPQRAESFYGGGAEGYTDYPTL

SEQ ID NO: 10282 - protein, 357 aa, Magnetococcus sp. MC-1
MNHLFKPLRIGDLELPNRLLMAPLTRCRADAQHVPTAMMVDYYAQRASAGLLITEATMVMQGYSAFWREPGIYSDAQIEGWKKITQAVHAKGGRIFMQIWHGGRACHPLLNDGREAVAPSPLAIAHDEVHTPQGKQPYTLPRALRDDELPAIVNGFARAARHARAAGFDGVEVHGANGYLLDQFLRDGSNHRSGAYGGSVENRARLLLEVIEAVSLAWGSERVGLRISPLNSFNDMIDSDPMGLAEWLAKRLNAYPLAYLHLMRRDFLGQQQGDVVPLVRQHYKGTLIGNMGYGGEEAEAAIAAGQLDGVAFGSAYLANPDLPERLRCGAPLNTPDPTTFYTQGAEGYTDYPTLAQG

SEQ ID NO: 10283 - protein, 375 aa, Staphylococcus aureus subsp. aureus Mu50
MKSKYEPLFDKVELPNGVELRNRFVLAPLTHISSNDDGTISDVELPYIEKRSQDVGITINAASNVSDVGKAFPGQPSIAHDSDIEGLKRLATAMKKNGAKALVQIHHGGAQALPELIPDGDVVAPSPISLKSFGQKQEHSAREMTNEEIEQAIKDFGEATRRAIEAGFDGVEIHGANHYLIHQFVSPYYNRRNDVWANQYKFPVAVIEEVLKAKEAYGNKDFIVGYRLSPEEAESPGITMEITEELVNKISHMPIDYIHVSMMDTHATTREGKYAGQERLPLIHKWINGRMPLIGIGSIFTADEALDAVENVGVDLVAIGRELLLDYQFVEKIKDGREDEIINYFDPEREDNHHLTPNLWHQFNEGFYPLPRKDK

SEQ ID NO: 10284 - protein, 399 aa, Staphylococcus aureus subsp. aureus Mu50
MYRYKPLLQSIHLPNGIKISNRFVLSPMTVNASTKEGYITKADLAYAARRSNSAGMQVTGAAYIEPYGKLFEYGFNIDHDACIPGLTNMASTMKQHGSLAIIQLAHAGRFSNQAILNFGKVYGPSPMTLHSPIEHVVIAMSHEKINSIIQQYRDATLRAIKAGFDGVEISIAQRLLIQTFFSTFSNRRTDHYGADSLKNRARLCLEVMRAVQEVIDKEAPDNFILGFRATPEETRGSDLGYTIDEFNQLIDWVMDVSNIQYLAIASWGRHIYQNTSRTPGDHFGRPVNQIVYEHLAGRIPLIASGGINSPESALDALQHADMVGMSSPFVTEPDFVHKLAEQRPHDINLEFSMADLEDLAIPHAAFKDIVKMMDYGEGLKKHTRDALRQLEQNYHDSSS

SEQ ID NO: 10285 - protein, 349 aa, Pseudomonas putida KT2440
MTTLFDPIKLGDLQLPNRIIMAPLTRCRADEGRVPNALMAEYYVQRASAGLILSEATSVSPMGVGYPDTPGIWNDEQVRGWNNVTKAVHAAGGRIFLQLWHVGRISHPSYLNGELPVAPSAIQPKGHVSLVRPLSDYPTPRALETEEINDIVEAYRSGAENAKAAGFDGVEIHGANGYLLDQFLQSSTNQRTDRYGGSLENRARLLLEVTDAAIEVWGAQRVGVHLAPRADAHDMGDADRAETFTYVARELGKRGIAFICSREREADDSIGPLIKEAFGGPYIVNERFDKASANAALASGKADAVAFGVPFIANPDLPARLAADAPLNEAHPETFYGKGPVGYIDYPRL

SEQ ID NO: 10286 - protein, 365 aa, Pseudomonas putida KT2440
MKLLQPLQIGPLTLPNRVFMAPLTRLRSLEPGDVPTALMAEYYRQRASAGLIITEATQISFQAKGYSGSPGIHSAEQIAAWKHINEGIHAEGGHSAVQVWHTGRVSHTSLQPGGKAPVAPSALPADARTTLRDAQGNLTRVETSAPRALSEAEIAGIVADFGQAAINACEAGFDFIELHAAHGYLLHQFLTPSANQREDRYGGSVENRARIVLEAVDAAIANWSADRVGIRVFPLGGFNGVDNGEDQEAAGLYLIRELAKRNLAYLHLSEPDWAGGKPLRDEFRQAIRAAYPGVIIAAGAYTAEKGEDLIGRGLIDAVAFGRAYIANPDLVERLRLQAPLNEHRAKFDYANGPEGYTDYPFLKQA

SEQ ID NO: 10287 - protein, 374 aa, Pseudomonas putida KT2440
MTQSELFKTTQLGPYTLKNRIVLPPLTRSRSSQPGNIANDLMATYYRQRSGAGFMVTEGTQIEPRGQGYAWTPGIHSPEQIQGWRKVTDAVHAEGGVIFAQLWHVGRVSHTSLQPGGEAPVAPSAIRADNVKVFIETGPGTGALADPSTPRALSTKEVKELVKLYAQAARNALDAGFDGVELHCANGYLVNQFISAHTNQRDDEYGGSLQNRLRFLREITLAVAGVVGKERMGVRFAPLFATTDEDRVYLGLVEEDPHQTYIEAVKILEEVGIAYLSLAEADWENAPELPETFREDVRKSFSGKILYAGKYTAERGNRVIKAGWGDLIAFGRPFIANPDLPARIANNWPLNPVDPSSMYGGTDKGYTDYPTYKS

SEQ ID NO: 10288 - protein, 368 aa, Xylella fastidiosa 9a5c
MADTSSMPSIVGLLEPTTFGAIPLNNRVVMAPMTRLRAQADGAPGDLMVEYYRQRAGMGLIVTEGTYPSLESQTGVGQPGIATEEQAGGWRKMTDAVHLAGGHIVLQIMHGGRTAHPGVNGGRRVIAPSAVTLGGEVYTANGKEAFTTPAPMAEADIRDVIAEHVAAAQRAVAAGFDGVEIHGANGYLGQQFLSPASNQRTDQYGGSPENRARFVVELVQAVAEAVGPGRVGLRISPEHNYQETFEPDRSDVLATYGALLDALRPLGLAYLSVLHQEPTGALVEELARRFAGKVAANSGFATFTSLEEAEQIVAAPFIDAVVVGRAALANPDLIERWKSEQPLTEPRYDLFYTHDAAGYTDYPTLAGR

SEQ ID NO: 10289 - protein, 1005 aa, Staphylococcus epidermidis ATCC 12228
MSKEIFDTFKFKCGAELKNRVLMAPMTIQAGYFDGSVTSEMIDYYQFRAGDASAIIVESCFVENHGRGFPGAIGIDNDDKIPGLKRLAEAIQAKGSKAILQLYHAGRMANPKFNEGEQPISASPIAALRPDAVPPREMTHAQINQMIDDFGEATRRAIEAGFDGVEIHGANTYLLQQFFSPHSNRRQDSWGGSREKRTRFPIEVLTKVQHVVAEKEASHFIIGYRFSPEEIEEPGIRFEDTMFLLNTLAEYEPDYFHISANSYQRTSIVNQEDTEPLINKYIKMQSAQLAKIPLIGVGSIAQRQDAEHALELGYDLLSVGKAYLVEPQWTDKISQNEEVEQFVDIHDQKVLHIPSPLWKVMDFMILDKEEEHRKYEKLKALQNKKVKFNKGTYHVYAKGHNGNLPMKVQLSEDKIVSIEVDDSGESEGIANPVFERLPQDIINGQTLNVDVISGATVTSEGIVQGIADAIEQAGEDPDILRARPKPVVQWSDEVVEETTDVVVIGTGGAGLSAAATVLDEGKEVIMLEKFAAIGGNTIRTGGQVNAAEPKWQNAFPALAGEKETLLQLLNHDENDIDEAYIEDFNTLKRQIKDYLENSSNEDEYLFDSVELHRIQTYLGGKRKDRNNVEISCDYDLVKTLTDNVLESVYWLKDKGVHFDRSFVDMPVGALWRRGHKPMKAQGLEYIENLGDYVKHNHGRIFTETTAEKLIKEGNQVVGIEARKANGAKVKIHTRHGVVLATGGFGANTKMLQQYNTYWDNIPDDIKTTNSPAITGDGIRLGVQAGADIVGMGFSQMMPISDPKTGALFTGLIVTPSNFVFVNKEGQRFVNEFESRDVLSKAALEQKDGIFYIIADANIKALAMNTTEDKINQELEDGTLVKADTLEALAQKLNIDTTTFVNTIERYNTFVEQGQDEDFNKNAFDLKIEKAPFYATPRKPAIHHTMGGLKINTHAQVIDVEGHIIEGLYAAGEVAGGIHAGNRLGGNALADIFTFGRIAGQSAVTK

SEQ ID NO: 10290 - protein, 375 aa, Staphylococcus epidermidis ATCC 12228
MNNKYEPLFKSLTLPNGVEVRNRFVLAPLTHTSSNDDGTISDIELPYIEKRSKDVGIAINAASNVNDVGKAFPGQPSVAHDSDIEGLKELAQVMKKNGAKAIVQIHHGGAQALPELTPDGDVVAPSAISLKSFGQQKEHDAREMTAEEIEQTIRDFGEATRRAIEAGFDGVEIHGANHYLIHQFVSPYYNRRNDVWADNYKFPVAVIDEVVKAKKAHAYDDFIIGYRLSPEEAESPGISMEITEELIHQIANKPLDYIHVSLMDVNSVTREGKYKGENRLELIHQWINGRMPLIGIGSVFTAEDALNAVENIGVEFVALGREILLDYDFVAKIKEGREDEIINAFDPNREDQHYLTPNLWEQFNQGFYPLPRKDK

SEQ ID NO: 10291 - protein, 370 aa, Agrobacterium tumefaciens str. C58 (Cereon)
MTSLFEPAQAGDIALANRIVMAPLTRNRSPGAIPNNLNATYYEQRATAGLIVTEGTPISQQGQGYADVPGLYKQEAIEGWKKITDGVHSAGGKIVAQIWHVGRISHTSLQPHGGQPVAPSAIPAKSKTYIINDDGTGAFAETSEPRALTIDDIGLILEDYRSGARAALEAGFDGVEIHAANGYLIEQFLKSSTNQRTDDYGGSIENRARFLLEVVDAVAEEIGAGRTGIRLSPVTPANDIFEADPQPLYNYVVEELGKRNLAFIHVVEGATGGPRDFKQGDKPFDYATFKGAYRNAGGKGLWIANNGYDRESAIEAVESGKVDAVAFGKAFIANPDLVRRLKDNAPLNEPNQPTFYGGGAEGYTDYPALG

SEQ ID NO: 10292 - protein, 364 aa, Agrobacterium tumefaciens str. C58 (Cereon)
MTDKTLFEPYALGAISLSNRIVMAPLTRNRAGAGFVPGDLTAEYYTQRASAGLIISEATQISQQGQGYQDTPGIYTRAQIDGWRKVTAAVHEKGGRIVLQLWHVGRISHIDLQPNGGQPVAPSAIRAATKTFVNNAFVDVSEPRALEIEELAGIVNDFRKAAANAIDAGFDGVEIHGANGYLLEQFAKDGANVRTDAYGGSVENRARLMLEVTAAVAQEIGPARTGIRISPVSPANGISCSDAQAQYDYIVDQLDALGVAYIHVVEGATGGPRDVAPFDYGSLRRRFSKTYIANNGYDLELAATHIAEGKADLIAFGRPFIANPDLVKRLQSGAPLAEIDPATIYGGGAEGYTDYPRFNEASGS

SEQ ID NO: 10293 - protein, 678 aa, Agrobacterium tumefaciens str. C58 (Cereon)
MSNDPLLQPYQLKHLTLRNRIIVTSHEPAYPEDGMPKGRYRAYTVERAKGGVALTMTAGSAAVSRDSPPVFNNLLAYKDEIVPWIREMTDAVHEQGAAIMIQLTHLGRRTRWDKGDWLPVLAPSHQREAAHRAFPKKIEDWDIERVIKDFADAAERMKAGGMDGVELEAYGHLIDQFVSPLTNELDGPYGGSLDNRMRFCLDVFKAMRERVGDDFILGVRYTADECLKGGTGKAEGLEISRRLRDSGLIDYLNVIRGHIDTDPGLTDVIPIQGMANAPHLDFAGEIRAATQFPTFHAAKIQDVATARHAIASGKVDMVGMTRAHMTDPHIVRKIMEKREDDIRPCVGANYCLDRIYQGGLAFCIHNAATGREETMPHDITRAAERRKVVIVGAGPAGLEAARVCAERGHDVVVFEAANDAGGQIRLTAQSERRREMIGIIDWRMSQCERLGVTFHFNSWAEADTVLSENPDVVIIATGGLPHTDVLSKGNDLVVSAWDIISGDVKPGTNVLVFDDAGDHAGLQAAECLAKAGAKVEIMTPDRAFAPEVMAMNLVPYMRALQKLDVTFTVTYRLEAAERNSNQLIAHVGSDYGGVAKSRNVDQIVVNHGTVPLDELYFELKSGSKNLGETSYDALLAGEAQTVERNPAGTYRLFRIGDAVAARNTHAAIYDALRLAKDI

SEQ ID NO: 10294 - protein, 649 aa, Rhodococcus erythropolis
MTPYPRLFAPLRLGNLTLRNRVVFSAHLTNYAENGLPTEQHASYYEARARGGAGLIITEEHSTHPSDRPYEKMIAGYRPEAIEGYRRITDAVHAHGSSILAQINHNGGQGAGTYSRSPLLAPSAVADPLFREVPKAVDDADIAEILAGFALVARNCVAGGFDGVELQASQSSIVRAFLAPSTNLRTDRYGGGVANRARFLLEVLGVLRKAIGPDRVLGVRLSGYEGTRGGIELSDAVTTAQLIEADGHVDYINTTVGMATETLHLVEASMAVPTGYANFVPSAIREVIDLPVVGVGRFKTPEQAEAALEDGVCDLVGVVRGQIADPDFVNKARAGQSSQVRTCLSCNQECVGRMGLGRWLGCTENPRAGRESVPLPMPRRRGRTVVVVGGGPAGLQAAATAAQRGHAVTLFERERRLGGQILTASVVSVRRELADLVRNLESECRRSGVTIELGVGADLAIVEERAPDVVVIATGARPVRPTWAGGSERVVSVRDVLDGRVLPSGMVLVYDELGFHQGTSVAEFLADRGCAVTIATNGMVVAQDLSVTLDFEGWNRRAFEKSIVQRTDLMATSVSAGASPLVSLVHLPTGVVEEVAVDWVVFATQQEPVDELWNTLQGSSFEIFRIGDALSPRRSHAAVIEGHRAALAI

SEQ ID NO: 10295 - protein, 615 aa, Rhodococcus erythropolis
MGRSLSDRHRAYYQRRAEGGAGIVVTEVASVLENDWPYERAPLASECGPGWQSIAAACAPYGTLVLAGLGHTGMQGSSAYSQSVLWGPSRVADPVTRELPMAMGQPEIDQLMAGFREASAMAIASGMDGVELDAGPRSILRQFLSGLTNTRQDRYGTDRVALVREIISAVREEVGSDHVVSLRLSCDEEAPWAGLTPDLAAGFARDLSPLLDLLVVVRGGLYSSEGYRPDFHCPPNFNLDLCREIKAAVSIPVVVQGSVVDIADARAALGVAEFVEMTRAQIADPDVVVKAARGDRPRPCVLCNQTCLVRDPRNPVVTCVGNPSAGFETVDPDEREQISTPRAVLVVGGGPAGMEAARISAVAGHSVTLVESSSQFGGMIRTFARGDGRSRFTLLAQWLEDECRRSGVTMRTGAAVDAQDLSDARSRGELVVVATGSAARPPTYPVDDSVRWLDASEAFGKLTTVGPGPVALIDPLGGPIAVALAEALAAEGVSISIVTLDSIVGSRLGASGDLVGANTRIQQAGVTRVLASRVIEIASGAVCVEHVHTGEWSQLECEVVIDCSPRLPNETLKEAADIQVGDSVAPRTVLESIREGRFAGFTTRTSFNSAERAIS

SEQ ID NO: 10296 - protein, 285 aa, Yersinia pestis KIM
MKTAKLFSPLKVGALTLPNRVFMAPLTRLRSIEPGDIPTPLMAEYYRQRASAGLIITEATQISFQAKGYAGAPGLHTQEQLNAWKKVTQGVHNEGGHIAVQLWHVGRISHNSLQPGQQAPVAPSAIAADTRTTVRDETGAWVRVPCSTPRALETEEIPGIINDFRQATANAREAGFDYIELHAAHGYLLHQFMSPASNQRTDQYGGSIENRTRLTLEVVDATAAEWGADRIGIRISPLGPFNGLDNGEDQEEAALYLIGPNAESGATDMTSFICRYCEPGRKPKM

SEQ ID NO: 10297 - protein, 381 aa, Magnetospirillum magnetotacticum
MRASVVRRGAGAPAHWRNLHGGTSSALPRGLGGHPRDAVPIGRSRAPPHNEETRMPSLFDPITLGALTLPNRILMAPLTRGRATRTHVPTPMMAEYYAQRASAGLIISEATGISQEGLGWPYAPGIWSDEQVEAWKPVVKAVHDAGGRIVSQLWHMGYLVHSDFLGGEPPVAPSVATAPDQAHTYEGKKPYSQARALREDEIPRLIADYERAARNALAAGFDGVQIHAANGYLLDEFIRDGSNKRSDRYGGSVENRVRLVTKVAQAVAGVVGPERTGIRFSPNGPIQGVDDSNPHETFGLAAEMMERVGLAFIELREPGPNGTFGKATVAPVAPVIKERFGGPVILNCDYDGERAKAAVASGEADAIAFGRPYIANPDLPE

SEQ ID NO: 10298 - protein, 366 aa, Methanosarcina acetivorans C2A
MVIMAEDTDLFSQYRMGDLTLPNRMVMAPMTRSRAGDDDIPVPLTATYYVQRASAGMIITEGSQVSPQGVGFMHTPGIYSAAQAASWKKITDAVHKAGGRIFIQLWHVGRVSHSDLLGGALPVAPSALPVEGYIHTPGGKKPIPVPRALKTDEVPDIVRQFRQAAENARAAGFDGVEIHGANTYLLDQFLRSGSNKRTDKYGGSLENRARLPLEVTKAVIEVWGGDRVGYRISPHNIAHSMSDANPGETFSYFAKELNKTGLGYLHLIEPIGGRSGFVPPEARLGPILRRIFERTFILNGGYGLQSGNEAIDSGEADLIAFGVPFLANPDLPERFRQNAPLNEPKLDTFYVGGEKGYTDYPALVNR

SEQ ID NO: 10299 - protein, 364 aa, Xanthomonas campestris pv. campestris str. ATCC 33913
MSTSTPSPLFSPVRLGALDLSNRVIMAPLTRNRAVAGAVPSPLAVEYYAQRATAGLIIAEGTQISPLGQGYLDTPGIHTPAQVEGWRAVTDAVHRQGGKIALQLWHVGRVSHTSLLPPGEVPVAPSAIRSTGKTFTAQGFSDVSEPRALALEEIPALIEDYRAAARNAIDAGFDGVEVHAANGYLIDQFLRDGSNQRTDAYGGDIENRTRLLAEVVQAIADEIGAERTGVRLSPVTPVYDMHDSDPQALFERAVERLNLIGGLAFVHVIEGATGGPRDNIAFDYTALRAKFDGAWISNNGYDKAMAEQAISRGDTDAVSFGRAYIANPDLVRRLREDAPLAEPNQATLYGGGAEGYTDYPALPA

SEQ ID NO: 10300 - protein, 366 aa, Xanthomonas axonopodis pv. citri str. 306
MLMSKSTQSPLFSPVRLGALDLANRVIMAPLTRNRAVAGQVPSPLAAEYYGQRATAGLIVAEGTQISPLGQGYLDTPGIHTRQQIEGWRAVTDEVHRRGGKIVLQLWHVGRVSHTSVLPPGEVPVAPSAIRAEGKTFTPNGFEDVSEPRALALDEIPGLIEDYRIAARNAIDAGFDGVEVHAANGYLLDQFLRDSSNKRTDAYGGDIENRTRLLAEVVQAIADEIGAERTGVRLSPVTPVYGAHDSDPQPLFERAVERLNLIGGLAFVHVIEGATGGPRDNIAFDYAALRAKFDGAWIANNGYDRGMSEHAISSGYADAIAYGRPFIANPDLVRRLRENAPLAELDQATMYGGGAKGYTDYPALPE

SEQ ID NO: 10301 - protein, 363 aa, Caulobacter crescentus CB15
MSLDALFQPFEFKSLKLPNRVVMAPMTRSFSPGGVPTDEVAAYYRRRAENQVGLIVTEGTGVARPASLNDANVPRFHGEKELAAWKKVVDEVHAAGGKIAPQLWHVGAAKGKDVLGKVDSPSGLSKAGGNPFTEPMTDAEIADTIQAFATAAADAKRLGFDTVELHGAHGYLIDQFFWQGTNVRSDAWGGPTIGERGRFAAEILKAVRAAVGPDYPVIIRLSQWKQQEYTARLAETPKEMEAWLQPLADAGADIFHCSQRRFWEPEFEGSDLNFAGWAKKLTGAPTITVGSVGLSGEFIAAFGGEGSQPTSIDNVIGGLERGEYDMVGVGRALLQDPEWVTKIREGRSDELKAFERAALGTLY

SEQ ID NO: 10302 - protein, 430 aa, Caulobacter crescentus CB15
MGRRDGRRAGPYERPINHVGDARGSIANFGARVDRPRLVVATSWLPARSATPRDAPFASGDSVVSTSSLFAPTTVAGLALRNRVVMSPMTRRFSPGGVPNQAVADYYRRRAEAGVGVIITEGVAVDHPAAVDHADIPNFHGPALDQWKTIAASVTSAGAAFIPQLWHIGGHRSLTADPPNASAPSLSPSGVYEPGKPFGTPATEVEIEAVIQAYAKGARDAAAIGASGVEIHGAHGYLIDQFFWAATNQRQDRYGGDMIERLRFATEVIKACREAVGPSFPIFFRYSQFKQVDYKARLCQSPDELAAFLQPLVDAGVDVFDCSQRRFWEPEFEGSPLNLAGWTKTLTGKPTMTVGSVGLDGDVVASLREGVDVIAASSLDKLDVMLDRGDFDLVGVGRALLADPHWVEKVRDGQTDGLAGFTRAALETLV

SEQ ID NO: 10303 - protein, 355 aa, Bacillus anthracis str. A2012
MTSSNKKSASIYEGTNVNAWGSFENVAETKLFNSIQIGSWPLRNRIAMAPMTRCFADNETGAVGADVVEYYRKRAADGVGLIITEGIVISPRAKGNPGVPGIYTQEQIDSWKPVTEAVHKEGGTIIAQIWHVGRMSHHEIIGGQMPQAPSAIAAEGNVPRFRKPFDTPEAMTLEEIQEVIGQYAQAAKNAIEAGFDGVEIHGAHGYLIDQFTYEFVNKRTDKYGGDLKQRLTFMKEVTEAVIEAIGADKTLLRFSAFKGDNPTYMWENPELAIETFVNMFKEVGLTMIHPSTMSYTQVIADGKNFHQLVRKYWDGAIVGVGNLNPKEAEEALQEGTIDVAAFGRPLIANPDGIIE

SEQ ID NO: 10304 - protein, 366 aa, Corynebacterium efficiens YS-314
MGTHDTDHPLYSSVTLGNVELNNRIVMAPLTRIRANTDGTPTEMMREYYAQRADFGMIITEGTWPIREGRTWGQQPGIETAEHVTAWRGITDAVHERGGKIIMQIMHGGRISHPELTGTGRTVAPSAIAAPDPIRISTGKVDPVIPHELGLDELATVIDQFVAGARNAMAAGMDGVQIHGANGYLLHEFLAPTTNLRGDAYGASPEKRASFVAEVVTAVAREIGAGNTGLRLSPQHNIQGAIETDDADVLATYTALARSLKHLGLAHVELVHHEPEGELIQTLRREFGAPLIVNTGFSRFTQREVAEELVDKQAADAVSVGRLALANPDLVRRWQLDGPLNEPNPETFYVGGEKGYTDYPVMEYSL

SEQ ID NO: 10305 - protein, 375 aa, Staphylococcus aureus subsp. aureus MW2
MKSKYEPLFDKVELPNGVELRNRFVLAPLTHISSNDDGTISDVELPYIEKRSQDVGITINAASNVSDVGKAFPGQPSIAHDSDIEGLKRLATAMKKNGAKALVQIHHGGAQALPELTPGGDVVAPSPISLKSFGQKQEHSAREMTNEEIEQAIKDFGEATRRAIEAGFDGVEIHGANHYLIHQFVSPYYNRRNDVWANQYKFPVAVIEEVLKAKEAYGNKDFIVGYRLSPEEAESPGITMEITEELVNKISHMPIDYIHVSMMDTHATTREGKYAGQERLPLIHKWINGRMPLIGIGSIFTADEALDAVENVGVDLVAIGRELLLDYQFVEKIKDGREDEIINYFDPEREDNHHLTPNLWHQFNEGFYPLPRKDK

SEQ ID NO: 10306 - protein, 399 aa, Staphylococcus aureus subsp. aureus MW2
MYRYKPLLQSIHLPNGIKISNRFVLSPMTVNTSTKEGYITKEDLAYAARRSNSAGMQVTGAAYIEPYGQLFEYGFNIDHDACIPGLTNMASTMKQHGSLAIIQLAHAGRFSNQAILNFGKVYGPSPMTLHSPIEHDVIAMSHEKINSIIQQYRDATLRAIKAGFDGVEISIAQRLLIQTFFSTFSNKRTDHYGADSLKNRARLCLEVMRAVQEVIDKEAPDNFILGFRATPEETRGSDLGYTIDEFNQLIDWVMDVSNIQYLAIASWGRHIYQNTSRTPGDHFGRPVNQIVYEHLAGRIPLIASGGINSPESALDALQHADMVGMSSPFVTEPDFVHKLAEQRPHDINLEFSMADLEDLAIPHAAFKDIVKMMDYGEGLKKHTRDALRQLEQNYHDSSS

SEQ ID NO: 10307 - protein, 365 aa, Shigella flexneri 2a str. 301
MSSEKLYSPLKVGAITAANRIFMAPLTRLRSIEPGDIPTPLMAEYYRQRASAGLIISEATQISAQAKGYAGAPGIHSPEQIAAWKKITAGVHAENGHMALQLWHTGRISHASLQPGGQAPVAPSALSAGTRTSLRDENGQAIRVETSMPRALELEEIPGIVNDFRQAIANAREAAFDLVELHSAHGYLLHQFLSPSSNHRTDQYGGSVENRARLVLEVVDAGIEEWGADRIGIRVSPIGTFQNTDNGPNEEADALYLIEQLGKRGIAYLHMSEPDWAGGEPYTDAFREKVRARFHGPIIGAGAYTVEKAETLIGKGLIDAVAFGRDWIANPDLVARLQLKAELNPQRAESFYGGGAEGYTDYPTL

SEQ ID NO: 10308 - protein, 365 aa, Escherichia coli CFT073
MSSEKLYSPLKVGAITAANRIFMAPLTRLRSIEPGDIPTPLMAEYYRQRASAGLIISEATQISAQAKGYAGAPGIHSQEQIAAWKKITAGVHAENGHMAVQLWHTGRISHASLQPGGQAPVAPSALSAGTRTSLRDENGQAIRVETSMPRALELGEIPGIVNDFRQAIANAREAGFDLVELHSAHGYLLHQFLSPSSNHRTDQYGGSVENRARLVLEVVDAGIEEWGADRIGIRISPIGTFQNTDNGPNEEADALYLIEQLGKRGIAYLHMSEPDWAGGEPYTDAFREKVRARFHGPIIGAGAYTVEKAETLIGKGLIDAVAFGRDWIANPDLVARLQRKAELNPQRAESFYGGGAEGYTDYPTL

SEQ ID NO: 10309 - protein, 414 aa, Leuconostoc mesenteroides subsp. mesenteroides ATCC 8293
MQINYDFLDSYTFKNKPITVRNHIVMAPTTLKSSLEDGSVSDNELKYYQMRSNGPGMIIVEAAYVNELGKGWEGGLSAADDDKIEGLSRLASAIHSGGAKAILQLFASGRQSNQTILRGEQIVSASAQPYPHGSHETPRELKHEEISQTIEDFAAATKRAILAGFDGVELHGANLYLLQQFFSPESNRRQDIWGGTLEKRMRFGLAVTAKVGDTIDKYAERPFLLGYRQSPEESTTPGITLADSLAFVQRLVTLQIDYLHLSLKDAFQKPFRDAKAVKQITTYYTEVLPDNVPLMVAGLIKQPMQVESLLDEGVTFAAMGRALIADPNWVQKVKLNDEKSIRYAVSPADFDLLGVPKPLKKWLLTRFKNGFPVTTDIEFDPKTPWKYYKSMPTQPRQQIDPTKLMTLKKRVDDN

SEQ ID NO: 10310 - protein, 396 aa, Leuconostoc mesenteroides subsp. mesenteroides ATCC 8293
MEKRKFLSRFKFDNGLVIKNHIVMSPMTTMTSFYNGMITTDELNYYAARAGGPGIIITGVANVSDNGKGFEGELSVAHDAMLPGLIKLAKVIHKDGTKAILQIFHAGRKANSAILRGERPVSASAIAASYPADSETPRALNDSEVHQIITEFGEATRRAIEAGFDGVELHGANTYLLQQFYSENSNQRSDEWGGSRGKRLKFPLAVIETVNKTVKKYSKKPFIVGYRISPEEIEEPGIRLEDSLFFVDQIKHKVDYIHLSMGSYKRTSLNNKANKETLISQFSQHTKNIVPLIGIGSVETPDDVNAVMSDGADLVAIGREFIREPQWVQKIERNDLESIRTLISPSDMAELAIPSVMQVYLRESFYSVMHFTDDIETQSDYQNALAPMEGLEKKLS

SEQ ID NO: 10311 - protein, 406 aa, Leuconostoc mesenteroides subsp. mesenteroides ATCC 8293
MLYFVYETEALIMKNLIDKVTFRHGATIDTRTAQSPMLTNSGLNEKVTQDTINYYNARSQSAGMVIVEYTSVSPNGGPSRSWAPDREQLAIYDDSFVPGFKKITEKLKKDGNKAILQLVHSGREAQYRYALGGQVEVPSNIDFPWINYPLHELSEDEVWQIVKDFGTATKRAIASGFDGIEIHGANHYLHQEFFSAYSNVRTDFWGGSLEKRMNFALEVAREVFKVAKENAPKDFIIGYRISPEEVHEDNIGYTWHEAQLLVNQLTENFEFDYVHLSTNDYTATPTDSDKNYAQLLGERVKKPALLMIAGGIHTVEKMKDALQYVDIVSLGRPTLIDNQIGYKIKNGQADHIFLEFNEESVKESHLTPGLIDLLANTAYFDMPGIDYLKTLTDVKLGDAVTHDGTK

SEQ ID NO: 10312 - protein, 372 aa, Oenococcus oeni MCW
MTNYQFLQTFEFKNGIKIKNRIVIPPMTECSSFEDGNVTKNELDYFALRTGGAGIFITPASNVSSLGKGFEGQLSCASDDMLPSLTQVANTIKVNGTKAILQLHHAGRISDSKILRGQQAVGPSAVASLRPGSEIPRELTNEEILQIISDFGQATRRAIEAGFDGIELHGAKTYLIQQFFSPHSNRRSDDWGGSLKKRMKFPLAVVEQVHKIVERYADRPFIIGYRISPEEIETPGIRLADTLALIDVLKKQPIDYLHISTRDVWQTSKNDSDDQIPVVDQIKEHTKNEVPLIAVGNIAKPEEAEKVIEDGFNFVALGREMLREPQWVEKVQNGQEAGINYSLNETDLKQLRITPPLWKFLTKKIHSKLTAD

SEQ ID NO: 10313 - protein, 375 aa, Trichodesmium erythraeum IMS101
MNQLKILEPFTLGDLQLPNRIVMAPLTRRRADINNAPTPLNALYYSQRSSAGLIISEASQISPQGTSLPKTPGIYSQKQIEGWQLVTKAVHNSGGRIFIQLWHGGRCSHPSLQPNGELPVAPSARAPIEEKALTAQEKEVPFVNPRSLLTTEIPEIIAQYRQGAINALEAGADGVEIHGANGYLLDQFLQDNSNQRTDKYGGSIENRSRLLLEVTQAVTEVWGSQRVGIRLSPSSTYQDMYDSNPEALFNYIVSKIDQFNLAYLHIVEPRIKGSHDDLTEKKLQLGVKHFRPLYSGNLMTAGGYTRDLGEEIISQGYTDLVAYGRLFIANPDLPKRFALNAPLNPYYRPTFTGGNEIGYTDYPFLSIDTLAKNII

SEQ ID NO: 10314 - protein, 371 aa, Brucella suis 1330
MASLFDPITIGDLKLANRIVMAPLTRNRSPHAVPNDLNVIYYEQRASAGLIITEATPISQQGQGYADVPGLYSAEQLAGWRRVSDAVHNAGGKIVAQMWHVGRISHNSLQPNGEKPVAPSAITAKSKTYLVHPDGAGEFVPTSEPRALEKSELPGIVADYARAAKDAVETAGFDGVEIHAANGYLIDQFLRGGSNQRTDEYGGSIENRARFLFEVVDAVTKAIGAGKVGIRLSPVTPANDASDPDPQPLFDYVIGKLAACGLAYIHIIEGATGGPRDFQQGPQPFDYARFKQVYRDAGGKAAWMVNNGYDRKMAEEEVEAGRADLVAFGKPFIANPDLVRRLKENAPLNELDQKHMYGGGAKGYTDYPVLA

SEQ ID NO: 10315 - protein, 371 aa, Pseudomonas syringae pv. syringae B728a
MEYLMHDPRTTTDLFSPVTLGSMELANRIVMAPVTRSRYGEDGVPNELHATYYAQRATAGLIVAEATNISAQGRGYAATPGIWSEQQVAGWRLVTDAVHAAGGKIVSQLWHVGRFSSVDLQPNGEAPVAPSAIKAEGNTYTAGGFVPVSMPRALETGEIPGIIEQYKHAAENAKRAGFDGIEVHSANSYLLDQFLRDSTNQRTDQYGGSIENRARLTLEVTQAIVDIWGSDRVGIRLSPVTPDAGNTAPDSNVMGLHGYLIQQLNTFNLAYLHFVEGATATSREVPEGVDMDALSAGFNGPFIGNNNYDLKMAIERRAQGKIDAVAFGRLFISNPDLVARLRHGAELTIAPRESYYGGGAKGYIDWPMGKY

SEQ ID NO: 10316 - protein, 349 aa, Pseudomonas syringae pv. syringae B728a
MTTIFDPITLGDLQLPNRIIMAPLTRCRADEGRVPNAMMAEYYVQRASAGLILTEATSVTPMGVGYPDTPGIWSNDQVRGWSNITKAVHNAGGRIALQLWHVGRISHPSYLNGETPVAPSAIAAEGHVSLMRPITPLPVPRALELAEIGDIVEAYRVGAENAKAAGFDGVEVHGANGYLLEQFLLTGTNQRTDEYGGSVENRARLLLEVTDAVIDVWGAGRVGVHLSPRFDMHDMSDANRAETFSYVAKELGKRGIAFICAREHDAEDSLGPQLKKDFGGVYIANEKFTKDSANAWLAEGKADAIAFGVPYIANPDLPERLASDAPLNEAHPETFYAKGPVGYIDYPRL

SEQ ID NO: 10317 - protein, 354 aa, Pseudomonas syringae pv. syringae B728a
MAPMTRSRAPEDIAAEQIALHYTQRATAGLIVSEGTPISREGQGYLFNPGIYTPEQIQGWKLVTDSVHSVGGRMFAQLWHVGRVSHTSIQIDGKAPVSATTRQAQGAVAFAYGEDGEPGFVPTSAPRPLTTEEVARVVEDFAQAAQNAIDAGFDGVEIHGANGYLLEQFLNPLVNDRGDQYGASNLQDRLRFVFEVVDAACARIGADRVGIRISPYGQLFDMPLYPEIDETYSALCAGMRERGIAYVHVMDQTHFFMAGESSAAQEQALRKLLKHCKAELGNTALILAGDMTRERADALLEENLIDLAAFGQPFIGNPDLVARLKNGWPLTTPDRDTYYGGDAHGYIDYAPYRA

SEQ ID NO: 10318 - protein, 367 aa, Pseudomonas syringae pv. syringae B728a
MSAEALFTPFRLGSLELSSRVVMAPMTRSFSPGHVPNSKVVEYYRRRAAAGVGLIITEGTTVNHKASNGYPNVPQFFGEAPLAGWRKVVEAVHAEGGKIVPQLWHVGAVRRPGTEPDGSVPAYGPMEKVKDGQVLVHGMSKQDIDEVVAAFAQAAADARAIGMDGVEIHGAHGYLVDQFFWEGSNQRSDEYGGSLANRSRFALELIKAVRGAVGPDYPIIFRFSQWKQQDYTARLVQTPEALGEFLQPLADAGVDIFHCSTRRFWEPEFEGSDLNLAGWTRKLTGKPTITVGSVGLDGEFLQFMVNTDKVAQPASLENLLKRLGNDEFDLVAVGRALLVDPDWALKVREGREQDILPFSRDALTTLV

SEQ ID NO: 10319 - protein, 365 aa, Pseudomonas syringae pv. syringae B728a
MSETHKHVTAPFDRGHLKLKNRFAVAPMTRVSADEQGSATQAMTRYYERFAKGGFGLIITEGNYTDRRFSQGYRFQPGLTDDEQAQAWRATTDAVHRHGSVMIAQLMHAGALSQANRFVSESAGPSAIRPKGEQMAFYYGVGSYRVPRAMSDKDIAEAIDGFARAAQLAIGTAGFDGVEIHGANGYLLDQFLTDYSNQRTDQWGGEVGQRLRLTLEVIAAVKKVAGQAPVGVRLSQGKVNDFQHKWAGGEGDAEVIFAALADAGVDYIHVTEHEAWQPAFTQGQASLVELARRYAPDVALIANGGLHDPQKADQVLRQGADIIAVGKGALANPDLPELLRQGAPLRDFDPAILGPIANIKDSELV

SEQ ID NO: 10320 - protein, 366 aa, Pseudomonas fluorescens PfO-1
MTKQTLFSPYTLGSLTLSNRVVLAPLTRNRAGQGFVPSEFAAVYYSQRASAGLLISEATQISQQGQGYQDTPGIYTQAQIDGWRTVTDAVHAKGGKIFLQLWHVGRVSHVDLQENGAAPVAPSALRAATKVFVNNRFEDVSEPRALETSELPGIVSDFRQAAANAVAAGFDGVEIHGANGYLLDQFLRDNANLRTDAYGGSIENRARLLLEVTAAVINEIGADRTGVRLSPVSPANGVSSSDPQAQFNYIVEQLDALGVVYLHMVEGATGGPRDVAPFDFGALRQRFKNTYIANNGYDLDLAAARLAEDQADLIAFGRPFIANPDLVERLKQGAPLSAFNPATLYGGGAAGYIDYPTLAESSVSAS

SEQ ID NO: 10321 - protein, 371 aa, Pseudomonas fluorescens PfO-1
MTQQLFRPIALGPYTLPHRVAMAPLTRSRAGQPGDIPTSMNAEYYRQRASAALIITEATQISRQGQGYAWTPGIYNDEQVQAWREVSRQVHEAGGLIFMQLWHVGRVSHPSFQPDNALPVAPSALPVPGKTFIVDDEGNGVWGDVPVPRALQTSEIADIISDYRRAARNALNAGMDGVEIHAGNGYLLDQFINSNSNQRTDGYGGPLENRARLLLEVVAAVVDEVGADRVGVRLTPMGRFMGMGDESPEATFGYIVRSLNRWKLAYLHLVEPAVVGTVKDENFDPRWDAIIAQLRDAWDGVLMIAGGYDPESAEQALADGRADIIAFGRPFLANPDLPRRIREGLTLNAPDPSTFFGGDQRGYTDYPVYAH

SEQ ID NO: 10322 - protein, 349 aa, Pseudomonas fluorescens PfO-1
MATIFDPIKLGDLELSNRIIMAPLTRCRADEGRVPNALMAEYYVQRASAGLILSEATSVTPMGVGYPDTPGIWSNDQVRGWTNVTKAVHAAGGKIVLQLWHVGRISHPSYLNGETPVAPSAIQPKGHVSLVRPLADYPTPRALETAEIADIVDAYRVGAENAKAAGFDGVEIHGANGYLLDQFLQSSTNQRTDNYGGSLENRARLLLEVTDAAIEVWGAGRVGVHLAPRADSHDMGDDNLAETFTYVARELGKRGIAFICSREKEGADSLGPQLKEAFGGAYIANERFTKDSANAWLAEGKADAVAFGIPFIANPDLPARLKADAPLNEPHPETFYGKGAVGYLDYPTL

SEQ ID NO: 10323 - protein, 374 aa, Pseudomonas fluorescens PfO-1
MNHSSFFTPVTLGRHILKNRIVLPPLTRQRSTQPGNVANELMAEYYQQRAGAGLLVTEGTQIEPRGQGYAWTPGIHTPEQIVGWRKVTEAVHASDGVIFAQLWHVGRVSHTALQPNGDAPVSASAIATDRVSVFIETAPGVGALVPPSAPRALTTDEVQELVQLYIQAARNAMDAGFDGIELHCANGYLVNQFISAHSNLRTDQYGGSLHNRLRFLREVVAGVAKCIGKEKVGVRFAPLFTTTDEARTYLGMVEEDPHTTYIEAIKVLQDVGIAYLSIAEADWDDAPVMPQTFRRAVRDTFGGAIIYAGRYNAESGARLLESGLADLVAFGRPFMANPDLPARIANDWPLNSLNPATVYGGDAEGYVDYPVYGE

SEQ ID NO: 10324 - protein, 367 aa, Pseudomonas fluorescens PfO-1
MIDNSRNTDLFSPMQMGALQLTNRIVMAPVTRSRMAEDGVPNELHATYYAQRASAGLIIAEATNISAQGRGYAMTPGIWSDAQGAGWKKVTDAVHAAGGRIVSQLWHVGRFSSVELQPDRAAPVAPSAIKAEGSTYTENGFVEVSMPRALETSEIPGIIEQYKRAAENARRAGFDGVEVHSANSYLLDQFLRDSTNQRTDRYGGTIENRARLTLEVTEAVISIWGSDRVGIRLSPVTPDAGNTPPDSNVMATYGYLIQQLNRLNLAYLHFVEGATATSRTVPDGVDLDALSAQFEGPFIGNNNYDLEMALERRAQGRIDAVAFGRLFISNPDLVERLRRGTELTIAPRESYYGGGAKGYTDWPTADH

SEQ ID NO: 10325 - protein, 381 aa, Pseudomonas fluorescens PfO-1
MNRMPVDNLFVEPPMPVQALFKPFQLGALELPTRVVMAPMTRSFSPGGVPNSKVIEYYRRRAAAGVGLIITEGTTVGHQASNGYPNVPHFYGEAALAGWKKVVEAVHAEGGKIVPQLWHVGNVRRLGTEPDASVPGYGPSEKLKDGQVVVHRMTKQDIQDVIAAFAQAAKDAQSIGMDGVEIHGAHGYLIDQFFWEGSNQRTDEYGGSLANRSRFAIELIQAVRAAVGEGFPIIFRFSQWKQQDYTARLVQTAEALGEFLKPLSDAGVDIFHCSTRRFWEPEFDGSDLNLAGWTRKLTGKPTITVGSVGLDGEFLQFMVNTDKVAQPASLEKLLERLNNEEFDLVAVGRALLVDPDWAQKVREGREQDILPFSREALMTLV

SEQ ID NO: 10326 - protein, 399 aa, Streptococcus agalactiae 2603V/R
MNNVQGNLFRPLTLPNGLSLENRFVLSPMVTNSSTSEGFVTDDDIAYAVRRAKSAPLQITGAAYITEYGQLFEYGFSVSKDEDIPGLTKLAKAMKSKGAKAVLQLTHAGRFSSHTLARHGYVYGPSPMQLQSPYPHQVKELTHKDILRIIDEYVQATRRAIQAGFDGVEISSAQRLLIQTFFSTFSNQRKDEYGPQTLTNRCRLGLEVFKAVQKVIREEAESDFILGFRATPEETRGSQIGYSIEEFMEFLEKILAIAQVDYLAIASWGHDVFRNTIRSEGVYKGQLVNQVIFEHFGDRVPIMATGGINSASKVFEALQHAHMIGASTPLVVDPEFLQKIKAKCSDQINLRIKVSDLEGLAIPKASFKDIVPLMDYGESLPKEAREVFRELRSNYREER

SEQ ID NO: 10327 - protein, 369 aa, Pseudomonas aeruginosa PAO1
MSNLLLSPLAVGNLALRNRIVMAPMTRSRAQQPGDVPTALNALYYAQRAGAGLIVSEGTQISHLGQGYAYTPGIYSEAQLAGWRQVTEAVHAAGGLIAAQLWHVGRMSHRSLQAGGEAPIAPSPIQAKAQVFIADGQGGGSMAPADAPREMTLEDIRRVRDEFVRAARNALDAGFDLVELHGANGYLIDQFLASASNRRSDAYGGSLENRARFLLEIVDALVAAVGAERVGLRLSPWGTINDMHDDEPEAMTLYLAEALQRRGIAYLHLAEWEWSGGPAYPQGFRERLRERFRAPLIVCGNYDAERAEAILQAGLADAVAIGRPFIANPDLVERIRLGAPLAEANQARFYGGDAAGYTDYPTLGQSATA

SEQ ID NO: 10328 - protein, 370 aa, Pseudomonas aeruginosa PAO1
MLFSPYTLGHLTLPNRIVMPPMTRSRAASGEVATALMAEYYSQRAGAGLIVSEGTQISRQGQGYAWTPGIHSAEQVAGWRQVTDAVHAAGGRIFAQLWHVGRVSHTSLQPGNAAPVSSSALVAEGVKVFVDPQGRGAQAGGGEMVQHSAPRALAVEEIREIVADYAQAARNALDAGFDGVELHGANGYLINQFIDSQANARNDQYGGSLENRLRFLREVAEAVTAVVGRERIGVRLAPLTTLQGAVDDTPQATYLAAARLLDEIGVAYIHIAEADWEDAPAMPAAFKEALRIVYRGSLIYSGMYTKARAEEALARGWADLVGFGRPFIANPDLPYRLEHDLALADGDRSTYFGGGAAGYTDYPSLPQAAG

SEQ ID NO: 10329 - protein, 350 aa, Pseudomonas aeruginosa PAO1
MATLFDPIVLGDLELPNRIVMAPLTRCRADEGRVPNALMAEYYAQRADAGLILSEATAVTPMGVGYPDTPGIWSDDQVRGWSNVTKAVHAAGGRIFLQLWHVGRISDPLYLNGELPVAPSAIAAEGHVSLVRPKRPYVTPRALDTEEIADIVEAYRQGAERAKAAGFDGVEIHGANGYLLDQFLQDSTNKRTDRYGGSIENRARLLLEVTDAAISVWGAQRVGVHLAPRADSHDMGDSNRLETFSHVARELGKRGIAFICAREAQADDSIGVALKKAFGGPYIANEQFTLDSANAILAKGDADAVAFGVPFIANPDLVERLRQGAELNPPRPETFYTGGTEGYLDYPTLA

SEQ ID NO: 10330 - protein, 370 aa, Pseudomonas aeruginosa PAO1
MSAPVEALFQPFRLGALELPTRVVMAPMTRNFSPGGVPNAKVVEYYRRRAAAGVGLIVSEGTTVGHKAANGYPNVPRFYGEDALAGWKQVVDAVHAEGGRIVPQLWHVGSVRRLGVEPDASVPGYGPMEKAKDGKVLVHGMSKADIQEVIAAFAQAARDAQAIGMDGVEIHGAHGYLIDQFFWEGSNQRDDEYGGSLANRSRFAVELVRAVRAAVGADFPIIFRFSQWKQQDYSARLVETPEGLREFLAPLVEAGVDIFHCSTRRFWIPEFEGSELNLAGWTRELTGKPTITVGNVGLDGSEFLQFFGKTDEVAQPASIDGLVERLDKGEFDLVAVGRALLVDPEWAVKVREGRIGDIKPFSREALASLV

SEQ ID NO: 10331 - protein, 311 aa, Mycoplasma capricolum
MNKYEKLFEPFYLNGFKLENRFVLSPMTLSLATLDGKITDKEADYVKRRSHSAPLQITGGVYFDEFGQLFEYGISAKSDDDIPSLTRLYQEMKTDSNCVILQLAHAGKFSKTSLKKYGYLYGPSYEKNHTPIEHEVLELPKEKIKQIIQDYKDATLRVIKAGFNGIEISMAQRLLIQTFFSQIINKRTDEYSATNFENRSRFCLEVVKAIREVIDKYAPKNFIFGFRATPEETYGDILGYTIEDFIQLVDKIIEIGKISYLAIASWGHDIYLNKVRSNTKYKGQLVNKVIYDIYKNKLPIISSGGINTPTK

SEQ ID NO: 10332 - protein, 398 aa, Mycoplasma pulmonis
MDKKELLKNKLFQPLKIKNFVLKNRFVLAPMALNTSTDDGIITDDDLAYAQRRSHSAPMAITGGTYINKYAQLFENGFANDRDEVLPGLTQMAKVMKKDGNLAILQIAHSWRFSIASLIRYKKVYGPSAGVFLTPFEHEVTELTIEEIEGIIQDFENAVLRAIKAGFDGVEIASAQRLLQQAFFSKYSNQRKDKYGNQSLESRALLTMQVLHRVQDVIKKHAHKDFILGFRATPEETIGEIIGYSVEEFNWLMDKILDEIDISYLSLASWGKNIYKTKVRTKGKFYNQLINKVVYEHINGRVPVIANGGINSLESAIEAIEHVDLVGLSTVFVVEPEFVQKLMEKKENQINLDITKANLEDLKIPPYAFKNIAYFFDFGQNLPESTSEVLKENSQKKD

SEQ ID NO: 10333 - protein, 399 aa, Streptococcus agalactiae NEM316
MNNVQGNLFRPLILPNGLSLENRFVLSPMVTNSSTSEGFVTDDDIAYAVRRAKSAPLQITGAAYVTEYGQLFEYGFSVSKDEDIPGLTKLAKAMKSKGAKAVLQLTHAGRFSSHTLARHGYVYGPSPMQLQSPYPHQVKELTHKDILMIIDEYVQATRRAIQAGFDGVEISSAQRLLIQTFFSTFSNQRKDEYGPQTLTNRCRLGLEVFKAVQKVIREEAESDFILGFRATPEETRGSQIGYSIEEFMEFLEKILAIAQVDYLAIASWGHDVFRNTIRSEGVYKGQLVNQVIFEHFGDRVPIMATGGINSASKVFEALQHAHMVGASTPLVVDPEFLQKIKAKRSDQINLRIKVSDLEGLAIPKASFKDIVPLMDYGESLPKEAREVFRELRSNYREER

SEQ ID NO: 10334 - protein, 378 aa, Shewanella oneidensis MR-1
MSVFTAYESGALTLQNRIVMAPMTRARTTQPGNIPNDLMVQYYAQRSSAGLIITEATQISNDSQGYSFTPGVYTEAQIDGWKKVTAAVHEAGGKIFNQIWHVGRVSHPIFQQGNAPIAPSAIAPVGTKVWIVDEAHPEGQMVDCPEPREMTQADIDRVVADFAKAGANAIAAGFDGIEIHGGNGYLIDQFLRTNSNHRTDAYGGSPEKRIRFLLEVVEAVSAQIGADKVGVRLAPYVTFKDMACPEIVETILLAAKQLSAFGVAYLHLSEADWDDAPQIPESFRIELRNVFKGSIIVAGRYDVERANDVIEKGYADLVAFGRAFIANPDLPYRLANQLPLSPFDKGPLFGGSAAGYTDYPSYQAALRAVIRSSDDEVA

SEQ ID NO: 10335 - protein, 365 aa, Shewanella oneidensis MR-1
MTQSLFQPITLGALTLKNRIVMPPMTRSRASQPGDVANHMMAIYYAQRASAGLIVSEGTQISPTAKGYAWTPGIYTPEQIAGWRIVTEAVHAKGCAIFAQLWHVGRVTHPDNIDGQQPISSSTLKAENVKVFVDNGSDEPGFVDVAVPRAMTKADIAQVIADYRQAALNAMEAGFDGIELHAANGYLINQFIDSEANNRSDEYGGSLENRLRFLDEVVAALVDAIGAERVGVRLAPLTTLNGTVDADPILTYTAAAALLNKHRIVYLHIAEVDWDDAPDTPVSFKRALREAYQGVLIYAGRYNAEKAEQAINDGLADMIGFGRPFIANPDLPERLRHGYPLAEHVPATLFGGGEKGLTDYPTYQA

SEQ ID NO: 10336 - protein, 362 aa, Shewanella oneidensis MR-1
MFKAFKGHALETKNRIVMAPMTRSRSTHPGDVPNEMMANYYRQRASAGLIITEGAPVSAVARGYSMTPGIYTPAQIEGWKKVTEAVHQEGGKIFIQLWHVGRRSHSSVSGAEPLAPSAIKIPDQVFGPLPEGGFGMIETQQPKAMSEQDIQATISDFVQAAQNAMLAGFDGVEVHAAHGYLFDTFLRLESNQRQDRYGGSQENRLRFLVDTLQALTQTIGSGKVAVRISPHIGEGFTGDNPEIIQLTLALLQKLQPMNLAYVHFSENISRYVEVSDAFRQQVRRVYQHPIMVAGKLTKQSAQRLLDQHYADFVAFGTPFVTNPDLVARFTHDWPLTEFDADARLTLYGGGEAGYIDYPAYQA

SEQ ID NO: 10337 - protein, 355 aa, Shewanella oneidensis MR-1
MTIENTVNSVENLFDTYKLNDTITLKNRILMAPLTRCMADANLVPTDDMVAYYARRAEAGLIISEATIIRPDAQGYPNTPGIFTQAQIAGWRKVTDAVHANGGKIFVQLWHTGRVAHPHFFGGGDVLAPSAQKIEGSVPRMRELTYVTPKAVTVEDIQGLVRDYAKAAENAIEAGFDGVEIHGANGYLIDQFLHHDSNRRTDEYGGTPVNMSRFALEVVDAIIARIGHDRTGLRISPGAYFNMASDSRDRVVFDYLLPELEKRDLAFVHIGIFDDSIEFDYLGGTASSYVRAHYGKTLVGVGSYSAETASKAIAEDKFDLIAIGRPFIANPDYVAKVRNSEELVAYSDEMLASLI

SEQ ID NO: 10338 - protein, 372 aa, Comamonas sp. NCIMB 9872
MKKVFDLFDLKGLKLRNRVVMAPMSRARILDSTPDSSTALYYGQRAGAGLIIAEGANVSPQACGTMGTAGIYLPEHVAGWRLTTQAVHTAGGRIFLQLAHAGRVSHRSLQPEGAAPVSSTSKHALNTTVFGINAAGHTAPLQTSMPQCLTEQELAGIRSDFVRAARLAMQAGFDGVEIHAGNGFLFEQFINGALNDRQGLYGGAPAAHRLRFLLETLDAVASAIGPDHVGVKVTPFSRLADMPSYEGETQTWLAFANEPLLGSLAYVHAAFGDVDASFALQFRQALRGTLMRPCSPDAAAANAMLEQGLADLVVMGRPFISNPDLVERMRHGWPLSLASDTTVYGGGSAGYTDYPFYKPAQEADNSSADALV

SEQ ID NO: 10339 - protein, 365 aa, Yersinia pestis CO92
MKTAKLFSPLKVGALTLPNRVFMAPLTRLRSIEPGDIPTPLMAEYYRQRASAGLIITEATQISFQAKGYAGAPGLHTQEQLNAWKKVTQGVHNEGGHIAVQLWHVGRISHNSLQPGQQAPVAPSAIAADTRTTVRDETGAWVRVPCSTPRALETEEIPGIINDFRQATANAREAGFDYIELHAAHGYLLHQFMSPASNQRTDQYGGSIENRTRLTLEVVDATAAEWGADRIGIRISPLGPFNGLDNGEDQEEAALYLIDQLNKRNIAYLHISEPDWAGGKPYSDTFRAAVRAHFNGVIVGAGAYSAEKAECLIQKGFIDAVAFGRSYISNPDLVTRLQQHAPLNEPDSNTFYGGGAKGYTDYPTL

SEQ ID NO: 10340 - protein, 364 aa, Vibrio vulnificus CMCP6
MSKLFEPTQLKHLDLQNRVAMAPMTRARTSQPGNIPNAMMATYYKQRASAGLIISEATQISDDSQGYSFTPGVYTDEQVAGWKRVTQAVKSQGAAMFCQLWHVGRVSHPVFQKGEQPIAPSALAPVETKVWIADEQGNGNMVDCVEPRAMTQDDIDRVVSDFAYAAKRAIEAGFDGVEIHGGNGYLIDQFLRTNSNHRTDQYGGSRENRIRFLLQVVDAVSQAIGADKVGVRLAPFITFKDMNCPDIVPTILEASKQLQARDIAYLHLSEADWEDAPEIPESFRIELREYFTNTIIVAGSYTQARADEVLEKGYADLVAFGRPFVSNPDLVARLKHQQPLAELDGATLFGGDERGYTDYTALHV

SEQ ID NO: 10341 - protein, 375 aa, Lactobacillus plantarum WCFS1
MKGCFIVTSFNEPLKFKSGVTLRNRLMMSPMTTTQSFYNGSITHDEIDYYTQRATGLGAVITGAANVEDLGKGWHGELSIAHDTMLPGLSALAHGIQSQGAKAIVQIFHAGRMTHRAVLNGEQIVSASAVAALRDDAETPRAMSIDEIHATISAFGEATRRAIQAGFDGIELHGANTYLIQQFFSPHSNRRTDEYGGRTPQERFRFIDELLKAVFAAVDQYADRPFIVGYRFSPEEFEEPGIRLEDTLWLLSQLRESRLDYVHVSLNNYDRVSRDPQYQDKSIMTYVHEALQGKLPLVGVGGVRTRDDVKTVLQTAELVAVGQQLLYDPTWAVKLAKNADNTMVTAPFEEAVEVTPLSRPLYEFAASRYHSVINS

SEQ ID NO: 10342 - protein, 371 aa, Lactobacillus plantarum WCFS1
MQAKYKKLFEPYTLNNDVVLKNRLVVAPLTIYDSGPDGELTPAAHNFWRNRFRGFGTWIVPFTNVHPSGIGFESPNAFHEENLPTLKAYATISHEQGAKAIIQLAHAGIHADPAMTKGYDLMGPSNLPYMGVRAMTDSEVREMVNAFAYATELAISAGLDGVEIHGANGWLIQQFVSETYNQRTDHWGGSVEKRFNFPLAIIDAIEAVRHKYHRPDFIVGYRFSPEEPGEVGLTMTETLALVDRLLDKPLQYIHISLWNFYKKIRRGGDVKKTRMEAVHDRINGRLPFIGVGDLFAEEQGLKAFNTGWADLLAVGGSVELNPNLIELIKTGQEDQIQSEFDWNEMDSYRFTPAMLYGTLAGNAMFPKVKQN

SEQ ID NO: 10343 - protein, 364 aa, Methanosarcina barkeri
MAEDTDLFSQYRMGDLTLPNRIVMAPMTRNRAGDDDIPVPLTVTYYVQRASAGIIITEGSQVSPQGVGYMHTPGIYSAAQVAGWKKVTDAVHREGGRIFIQLWHVGRVSHPDLLGGALPVAPSALPVEGFTHASGGKKPIPVPRALKTEEVPDIVRQFRQAAENAKTAGFDGVEIHGANTYLLDQFLRSGSNKRTDKYGGSLENRTRLPLEVTKAVIEVWGGDRVGYRISPHNNAHSMSDENPLETFSYFARELNKTGLGYLHLIEPIGGRMGFAPPEARLGPILRRIFERTFILNGGYGLHSGNEAIANGEADLIAFGVPFLANPDLPERFRQNAPLNEPDESTFYVGGAKGYTDYPALVVHR

SEQ ID NO: 10344 - protein, 373 aa, Oceanobacillus iheyensis HTE831
MNANNHDMFSPLTFKNGLELKNRLVMAPMTHYSSNPDGTVSDEEISYYARRSKGVGMVITATTYVTPNGKGFPNQFSAVEDGMIPSLSKLAKGIQNEGAKAILQIFHGGKMCPPSLIPDGDVVSASNIPANSEAAEPRPLKESEIEEIIEAFGETTRRAIEAGYDGVEIHGANGYLLQQFFSPFSNRRDDRFGGSLEKRMAFPLAVIEKVKSVVAEHADASFIVGYRFSPEEPETPGITMDETLQFVDVLADKQLDYLHVSLMDFFSKARRGVEDLNKTRISYLLETIDNRVPLIGVGSIYTAEDARKAFNTGIPLLAIGREIIIDPDWVEKVAEGRDDEIITEINKDKQEELVVPDPLWNVITHAPGWFPGV

SEQ ID NO: 10345 - protein, 360 aa, Pseudomonas syringae pv. tomato str. DC3000
MSEKTLFQPYALGNLTLTSRIVMAPLTRNRAGAGLAPTDLAATYYAQRASAGLIITEATQISPQAQGYQDTPGLYTPEQIAAWRVVTDAVHAEGGRIFVQLWHVGRVSHVDLQPGGAAPVAPSAIRAQTKTFVNNAFTDVSEPRALELSELPGIVNDFRQAAANAIEAGFDGVEIHGANGYLLDQFIKDSANVRTDAYGGSVENRARLLLEVVTAVVKEIGAHRTGVRISPVSPANGVASSDPQPQYEYIAEQLSEQGIAFLHVVEGATGGPRDVAPFDYDALRQRFKHTYLANNGYDLDLATARVNANKADLVAFGRPFISNPDLIERLKTGAPLAELNPATLYGGGAEGYTDYPTIAG

SEQ ID NO: 10346 - protein, 367 aa, Pseudomonas syringae pv. tomato str. DC3000
MNDLSKATDLFSPVQMGSIDLANRIVMAPVTRSRYAEDGVPKDLHATYYAQRATAGMIVAEATNISAQGRGYAATPGIWNEKQVAGWRKVTDAVHAAGGKIVSQLWHVGRFSGVDLQPGGEAPVAPSALQAEGNTYTVDGFVPVSMPRALETDEISGIIAQYRHAAENAKRAGFDGVEVHSANSYLLDQFLRDSTNQRTDHYGGSIENRARLTLEVTQAIVDIWGNDRVGIRLSPVTPDAGNTAPDSNVMGLHGYLIQQLNTLNLAYLHFVEGATATSREVPEGVDMDALSAQFHGPFIGNNNYDLEMAVERRAQGKIDAVAFGRLFISNPDLVARLFHGAELTIAPRESYYGGGAKGYTDWPLGQY

SEQ ID NO: 10347 - protein, 368 aa, Pseudomonas syringae pv. tomato str. DC3000
MNKLFTPFDLAGTSLKNRVVMAPMTRTRTLNNIPNEANALYYAQRASAGLLITEGLPISDESRGYLYTPGIYEDVHLPGWRNVTDAVHAKGGKIFAQLWHVGRMSHISVHGIVPVSSGTVPAVDTTVYAWIEPGKAGPVQPSAPRALETEEVKRVIADFVKSARMAMDAGFDGIEIMAANGFLFDQFLSSSLNTRTDQYGGSIANRQRFLLETIDAIAAEIGGSKIGVRFSPFGRLYDFGVYEGEEETWMSMASALNERELAFVHLNYQPTILAAQTPPGFGAAFREAYKGTVMAAGGFTKEIAESELAKGELDLVAFGTAYIANPDLVERMQNNWPLAESDRATYYGVSGSIEKGYTDYPEYAAAEA

SEQ ID NO: 10348 - protein, 349 aa, Pseudomonas syringae pv. tomato str. DC3000
MTTIFDPITLGDLQLPNRIILAPLTRCRADEGRVPNALMSEYYVQRASAGLILTEATSVTPMGVGYPDTPGIWSNDQVRGWSNITQAVHNAGGRIVLQLWHVGRISHPSYLNGETPVAPSAIAAQGHVSLMRPITPLPTPRALELAEIGDIVEAYRVGAENAKAAGFDGVEVHGANGYLLEQFLLTGSNQRTDQYGGSLENRARLLLEVTDAVIDVWGAGRVGVHLSPRFDMHNMSDENRAETFSYVAKELGKRGIAFICARERDAEDSLGPQLKKDFGGVYIANEKFTKDSANAWLAEGKADAFAFGVPYIANPDLPERLASDAPLNEAHPETFYGKGPVGYIDYPRL

SEQ ID NO: 10349 - protein, 367 aa, Pseudomonas syringae pv. tomato str. DC3000
MSAAALFTPFRLGGLELSSRVVMAPMTRSFSPGHVPNSKVIEYYRRRAAAGVGLIITEGTTVNHPASNGYPNVPQFFGDAPLAGWKKVVDAVHAEGGKIAPQLWHVGAVRRLGTEPDGSIPAYGPMEKVKDGQVLVHGMSKQDIDEVVAAFAQAAADAKAIGMDGVEIHGAHGYLVDQFFWEGSNQRSDEYGGSLANRSRFAIELIKAVRAAVGPDYPIIFRFSQWKQQDYSARLVQTPEALGEFVQPLSDAGVDIFHCSTRRFWEPEFEGSELNLAGWTRKLTGKPTITVGSVGLDGEFLQFMVNTEKVAQPASLENLLERLGKDEFDLVAVGRALLVDPDWAVKVREGREQDILPFSREALTTLV

SEQ ID NO: 10350 - protein, 365 aa, Pseudomonas syringae pv. tomato str. DC3000
MSEINKDVPALFNMGSLKLKNRFALAPMTRVSATEQGCATQAMARYYERFAKGGFGLIITEGNYTDRSFSQGYPFQPGLTDDEQALAWRATTDAVHRHGSAVIAQIMHAGALSQANRFVNEAAGPSAIRPKGEQMAFYYGEGRYRVPRAMSDKDIADTLDGFARATRRAVGAAGFDGVEIHGANGYLLDQFLTDYTNQRTDQWGGNVYQRLRLTLDVIAEVKKAAGQAPVGVRISQGKVNDFQHKWAGGERDAEVIFGALADAGVDYIHITEHQAWQPAFAQGEASLVRLARRYAPDVALIANGGLHDPEKAAQVFRDGADIIAVGKGALANPDLPRLLLEGGAIREFDPAILGPIANIKDSELG

SEQ ID NO: 10351 - protein, 374 aa, Vibrio parahaemolyticus RIMD 2210633
MKQRPNKLFEPAQLKALSLQNRIVMAPMTRARTTQPGNIPNEMMATYYQQRASAGLIISEATQISDDSQGYSFTPGVYTDAQVAGWQGVTQAVKLQGAAMFCQLWHVGRVSHPTFQNGEQPIAPSALAPVETQVWIADEQGNGNMVDCVEPRAMTQADINRVVGDFANAAKRAIESGFDGVEIHGGNGYLIDQFLRTNSNHRTDNYGGSRENRIRFLIEVVDAVIAAVGAHRVGVRLAPFITFKDMDCPDIVPTILEASKQLQERDIAYLHLSEADWADAPTIPETFRIELRKRFRNAIIVAGRYDPQRANEVLEKGYADLVAFGRPFVANPDLVSRLQHHHPLAELDGSTLFGGNERGYTDYPALQQECAEQA

SEQ ID NO: 10352 - protein, 366 aa, Vibrio parahaemolyticus RIMD 2210633
MTDALFQPIQLGSLSLKNRIVMPPMTRSRASQPGNVANDMMATYYAQRAEAGLIVAEGTQISPMGQGYAWTPGIYSPEQIAGWKKVTDAVHEKGGVIFAQLWHVGRVTHPDNIGGEQPISSSALKAENVKVFIDNGTDEPGFVDVVEPREMTKQDIKNVIEEYRQAALNAIKAGFDGVELHAANGYLVNQFIDSEANNRTDEYGGSIENRLRFLGEVVEAMTQAIGAERVGVRLAPFTSLNGTVDSTPVDTYTAAAALLDKLNVVYIHIAEVDWDDAPDTPHDFKTAVRKAYKGTLIYAGRYNAEKAQHAIESGLADMIGFGRPFVANPDLPSRIKHGYPLAEHDPATLFGGGEKGLVDYPAYHAG

SEQ ID NO: 10353 - protein, 372 aa, Bacillus subtilis subsp. subtilis str. 168
MNPKYKPLFEPFTFKSGVTINNRIAVAPMTHYASNEDGTISEAELDYIIPRSKEMGMVITACANVTPDGKAFPGQPAIHDDSNIPGLKKLAQAIQAQGAKAVVQIHHGGIECPSELVPQQDVVGPSDVFDNGKQIARALTEEEVENIVKAFGEATRRAIEAGFDGVEIHGANGYLIQQFYSPKTNQRTDRWGGSDEKRLAFPLAIVDEVKKAASEHAKGAFLVGYRLSPEEPETPGLTMTETYTLVDALGDKELDYLHISLMDVNSKARRGADPTRTRMDLLNERVGNKVPLIAVGSIHSADDALAVIENGIPLVAMGREILVDPNWTVKVKEGREKQIETVIKGTDKEKYHLPEPLWQAIVNTQGWVPYKD

SEQ ID NO: 10354 - protein, 375 aa, Bradyrhizobium japonicum USDA 110
MKFPALFKPLQVGPYELAHRVAMAPLTRMRAERDSFSPRPLNAEYYGQRATPGGLLIAEASPVLSHGRGNPATPGIYSEAQIAGWRKVTDAVHAKGGIIFLQLWHVGRVSHSSFHGGELPVSASAIAIKAEGMKAMTAEGKIADYETPRALETDEVKGIVEAFRQGAKNALAAGFDGVEIHGANGYLLEQFLQSRSNQRTDQYGGGIENRARLLLDVTQAAIDVWGANRVAVRLSPHGIANDSGEPDPMPLYTHVVKALDKLGLAYLHFIEPRSSGAGRADVHWENVPSAMVLFRPLYSGVLMTAGGFTGETANAAIADGHADIIAFGRIFISNPDLPRRLRHDYPITPYNRATFYGGEEKGYTDYPAYDELTPA

SEQ ID NO: 10355 - protein, 367 aa, Bradyrhizobium japonicum USDA 110
MSRSTKLFETYKLGPITLANRLVMAPLTRNRAVPGTFVPGALAADYYGQRASAGLLITEASQVSQQGQGYQDTPGIYSKDQVAGWRKVTDKVHERGGKIFIQLWHVGRISHVALQANGAAPVAPSAIRAKGKTFVNGTFADVSEPRALELSEIRGIIDDFKRATKNALEAGFDGVEIHGANGYLLDQFAKDGANKRTDAYGGSIENRARLMLEVSRAVAAEAGTERTGIRISPVTPANDVSDSNPQALFDHIVDGLSALKLVYLHVVEGATGGPRDFAPFDYASLRKRFSGAYVANNGYDFDLATKVLDANAADLIAFGKPFISNPDLVERLKQGAALNDWDKNTFYGGSAKGYTDYPTLEAAEAAQ

SEQ ID NO: 10356 - protein, 373 aa, Bradyrhizobium japonicum USDA 110
MEGPSPFSVVFEKEPAMNSLFSPVRIGGLELSNRLVMAPMTRSRADAGGVPGGLAAEYYAQRAGVGLIVTEGTQPSDDGQGYMTTPGIYTPAHVAGWRKVTDAVHGKGGHIFIQLMHAGRMSHPDNTPHHRQGVAPSAIAPDTPIFTPKGMQDIPQPRSLATDDVRRTVADFRDAARHAIAAGADGVEIHGANGYLVQQFIAPSANTRTDAYGGSIENRARFAIEVATAIAGEIGADRTAIRLSPGITMWGIDEGAEGPDLYRHLVGELDKLSLAYLHIMHQGDERLLADLRRLWRGKLIVNRPGRPRDRIGSDVAAGLADLEAYGQMILANPDFIARLKSGALLNEADRTTFFGGTARGYTDYPALDAIAAV

SEQ ID NO: 10357 - protein, 371 aa, Brucella melitensis 16M
MASLFDPITIGDLKLANRIVMAPLTRNRSPHAVPNDLNVIYYEQRASAGLIITEATPISQQGQGYADVPGLYSAEQLAGWRRVSDAVHNAGGKIVAQMWHVGRISHNSLQPNGEKPVAPSAITAKSKTYLVHPDGAGEFVPTSEPRALEKSELPGIVADYARAAKDAVETAGFDGVEIHSANGYLIDQFLRGGSNQRTDEYGGSIENRARFLFEVVDAVTKAIGAGKVGIRLSPVTPANDASDPDPQPLFDYVIGKLAACGLAYIHIIEGATGGPRDFQQGPQPFDYARFKQVYRDAGGKAAWMVNNGYDRKMAEEEVEAGRADLVAFGKPFIANPDLVRRLKENAPLNELDQKHMYGGGAKGYTDYPVLA

SEQ ID NO: 10358 - protein, 407 aa, Bacteroides thetaiotaomicron VPI-5482
MESKLFTPVTFGPLTLRNRTIRSAAFESMCPGNAPSQMLLDYHRSVAAGGVGMTTVAYAAVTQSGLSFDRQLWLRPEIISGLREVTGAIHTEGAAAGIQIGHCGNMSHKKICGTTPISASTGFNLYSPTFVRGMKREELPEMARAYGRAVHLAREAGFDAVEVHAGHGYLISQFLSPYTNHRKDDYGGLLQNRMRFMEMVMNEVMTAAGSDMAVIVKMNMRDGFKGGMETDESLQVAKRLLALGAHALVLSGGFVSKAPMYVMRGAMPIRSMAYYMDCWWLKYGVRMFGKWMIPTVPFREAYFLEDALKFRAALPEAPLIYVGGLVSREKIDEVLDAGFDAVQMARALLNEPEFVNRMRREEQARCNCGHSNYCIGRMYTIEMACHQHLKEKLPPCLQREIEKLEKQ

SEQ ID NO: 10359 - protein, 375 aa, Bacillus cereus ATCC 14579
MTSSRNKATSFYEGTNVNAGGFFENVEETKLFYPIQVGGWSLRNRIAMAPMTRCFADNETGVVGADVVEYYRKRAADGIGLIITEGIVISPRAKGNPGVPGIYTQEQIDSWKPVTEAVHKEGGTIIAQIWHVGRMSHHEIIGGQMPQAPSAIAAEGNVPRFRKPFDMPEAMTLEEIQEVIDQYAQAAKNAIEAGFDGVEIHGAHGYLIDQFTYEFANKRTDKYGGDLKQRLTFMKEVTAAVIEAVGANKTLLRFSAFKGDNPTYMWENPEFAIETFINMFKEVGLTMIHPSTMNYTQEIADGKNFHQLVRKYWDGTIVGVGNLNPKEAEEALQEGTIDVAAFGRPLIANPDFVHRIKHAESLVEYDAKEHLVTLV

SEQ ID NO: 10360 - protein, 336 aa, Streptomyces avermitilis MA-4680
MTRNRASADGVPQPLMATYYAQRASAGLIIAEAATPNAVGQTYPNITAIHDATHVAGWRGVTDAVHAAGGRMFLQLQHGGRVGHPATSGLTPVAPSPVPLPETIFTPSGHRPSVVPREMTAADIRTTVADFAAAARNAIDAGFAGVEVHSANGHLLHQFLATNTNRRTDAYGGSVAARIRFAVEVTEAVADAIGAERVGVRISPGTTVNGVEEDDTELLYPAFVEALAALGPAYLHLVHADPDQPLFRHIRENWPTTLMANPVLGPELPADGGAHAAGRLLTAGADLIALGRPFLANPDLVTRLRTGAPVNPVRDRFMMYVGGERGYTDYPTLTVA

SEQ ID NO: 10361 - protein, 375 aa, Streptomyces avermitilis MA-4680
MTVTTDATDRAAQILSRPVTLNGLTVPNRIVMAPMTRQFSPGGIPGEDVASYYARRAAAGVGLIVTEGTYVGHESAGQSDSIPRFHGEEQLAGWSKVADAVHAAGGTIVPQLWHIGMVRGAGEPPFADAPPVGPSGIGTEGAEVTGKAMTQQDLDDVIEAFAKAAADAERIGFDGVELHGAHGYLIDQFLWAGTNRRTDAYGGDPVARTKFAAEIVAAVRSAVSPSFPVLFRYSQWKQQAYDARLAETPEELEAILAPLAAAGVDAFHASTRRYWQPEFDGSDLNLAGWTKKITGKPAISVGSVGLNGEFLKAFQGEGSTVRGIDDLLDRLESGEFDLVAIGRALLQDPEWAAKVLAGRFSELAAYDASSLKTLH

SEQ ID NO: 10362 - protein, 555 aa, Sulfolobus solfataricus
MDLSKLLVPIRVGDVVLKNRIAMSPMISNLGTPEGYPSDAHIAYLAERAKGGVGLIITEYTYVNHVDARGSVNELGMYSDELTPKFTRLTELIHALGSKIFVQLVHVGRKTRKDIIWGNKPIAPSPIPIMDEVREMTKEDIERVKNDFINAAIRAKRAGFDGIELHGAHGYLIAQFLSPATNKRGDEYKDGVKFVEEILKGIREKVRITVGIRISVTEFDNGGLTPEIVAEIGKRLEKAGIDYIHLSAGRDGPLGSSMPYYYKRTSFLEEAKVVRDTVKIPIFLVGSIITPQDAIKAREIADVVVLGRQLLADPYWLEKAKRDLPIRPCIRCNQSCRGVVYKEVRCDVNPELGWELLPPLEKGRGEVTVVGGGVMGLEAARVLALRGFAVTLYEQNNKLGGQFLLYRDPWKVNEFQALIDYYERELRRLNVEIKLNVKMECSDCIMAIPDYEIPKMPDVKGEKVLIDSNLYVYHDYAFELAKYNEVYMTERSFKGLDRTREYLLRKELSEVGVKFIEESNSIKFDVEIHDIVDDQPSIGKAIQRGYWLGRSFKSY

SEQ ID NO: 10363 - protein, 548 aa, Thermoplasma acidophilum
MVLASEPGYIGTVRIRNRLVMSPMISNMADPDGNTNENHISYLEERAKGGAGLIITEYTYVDRRSGIGSRNQMGMYDERQIPKFSRLTERIHAHGAKIFVQLVHAGAKAIGAINEYKIAPSKTNFDPSVREMDASDIEDVISAYRKAANIAERSGFDGIEIHGAHGYLVDEFLSPWWNKRTDRYGGSFENRIRFAQEVIDAVRSEVDIPVGIRISLYEDEEDGYSPDYGMKIAESIRNIDYVHVSAGNNEPPGSSASFYSPHAHIFQKLRGSTGKTLIVAGSITAREDVDLVLSAADFVAVGRAMLADPYFPMKIITGKGEIRPCIRCNQGCRNLAYGEVRCTVNPYFVVPEPRKIYKGEVVVVGAGVKGLEASLYAAKSGLKVVIYEKEDRIGGQINSIFDASKAREFRQLLDYYGRTIKKYGIDVRLGERYSGDGIYCLPDTVYPDLPDKDEIWIDSNVYMYHDLALRYAAEHKVYLSSYSLTSLDRARRKAYANIARKAGVTIVDTADHYDVSIHDRNQYDIYQAMLSGIEAMRSHIAASENEYL

SEQ ID NO: 10364 - protein, 536 aa, Thermoplasma acidophilum
MRIRNRLVMSPMISNMADPDGNTNENHISYLEERAKGGAGLIITEYTYVDRRSGIGSRNQMGMYDERQIPKFSRLTERIHAHGAKIFVQLVHAGAKAIGAINEYKIAPSKTNFDPSVREMDASDIEDVISAYRKAANIAERSGFDGIEIHGAHGYLVDEFLSPWWNKRTDRYGGSFENRIRFAQEVIDAVRSEVDIPVGIRISLYEDEEDGYSPDYGMKIAESIRNIDYVHVSAGNNEPPGSSASFYSPHAHIFQKLRGSTGKTLIVAGSITAREDVDLVLSAADFVAVGRAMLADPYFPMKIITGKGEIRPCIRCNQGCRNLAYGEVRCTVNPYFVVPEPRKIYKGEVVVVGAGVKGLEASLYAAKSGLKVVIYEKEDRIGGQINSIFDASKAREFRQLLDYYGRTIKKYGIDVRLGERYSGDGIYCLPDTVYPDLPDKDEIWIDSNVYMYHDLALRYAAEHKVYLSSYSLTSLDRARRKAYANIARKAGVTIVDTADHYDVSIHDRNQYDIYQAMLSGIEAMRSHIAASENEYL

SEQ ID NO: 10365 - protein, 398 aa, Kluyveromyces lactis
MSFMNFEPKPLADTDIFKPIKIGNTELKHRVVMPALTRMRALHPGNVPNPDWAVEYYRQRSQYPGTMIITEGAFPSAQSGGYDNAPGVWSEEQLAQWRKIFKAIHDNKSFVWVQLWVLGRQAFADNLARDGLRYDSASDEVYMGEDEKERAIRSNNPQHGITKDEIKQYIRDYVDAAKKCIDAGADGVEIHSANGYLLNQFLDPISNKRTDEYGGSIENRARFVLEVVDAVVDAVGAERTSIRFSPYGVFGTMSGVSDPVLVAQFAYVLAELEKRAKAGKRLAYVDLVEPRVTSPFQPEFEGWYKGGTNEFVYSVWKGNVLRVGNYALDPDAAITDSKNPNTLIGYGRAFIANPDLVERLEKGLPLNQYDRPSFYKMSAEGYIDYPTYEEAVAKGYKK

SEQ ID NO: 10366 - protein, 349 aa, Pseudomonas fluorescens
MATIFDPIKLGDLELSNRIIMAPLTRCRADEGRVPNALMAEYYVQRASAGLILSEATSVTPMGVGYPDTPGIWSNDQVRGWTNITKAVHAAGGKIVLQLWHVGRISHPLYLNGEAPVAPSAIQPKGHVSLVRPLADYPTPRALETAEIAEIVEAYRTGAENAKAAGFDGVEIHGANGYLLDQFLQSSTNQRTDNYGGSLENRARLLLEVTDAAIDVWGAGRVGVHLAPRADSHDMGDDNLAETFTYVARELGKRGIAFICSREKEGADSLGPQLKEAFGGAYIANERFTKDSANAWLAEGKADAVAFGVPFIANPDLPARLKADAPLNEPRPELFYGKGPVGYIDYPTL

SEQ ID NO: 10367 - protein, 377 aa, Pseudomonas putida
MPDTSFSNPGLFTPLQLGSLSLPNRVIMAPLTRSRTPDSVPGRLQQIYYGQRASAGLIISEATNISPTARGYVYTPGIWTDAQEAGWKGVVEAVHAKGGRIALQLWHVGRVSHELVQPDGQQPVAPSALKAEGAECFVEFEDGTAGLHPTSTPRALETDEIPGIVEDYRQAAQRAKRAGFDMVEVHAANACLPNQFLATGTNRRTDQYGGSIENRARFPLEVVDAVAEVFGPERVGIRLTPFLELFGLTDDEPEAMAFYLAGELDRRGLAYLHFNEPDWIGGDITYPEGFREQMRQRFKGGLIYCGNYDAGRAQARLDDNTADAVAFGRPFIANPDLPERFRLGAALNEPDPSTFYGGAEVGYTDYPFLDNGHDRLG

SEQ ID NO: 10368 - protein, 377 aa, Pseudomonas putida
MPDTSFSNPGLFTPLQLGSLSLPNRVIMAPLTRSRTPDSVPGRLQQIYYGQRASAGLIISEATNISPTARGYVYTPGIWTDAQEAGWKGVVEAVHAKGGRIALQLWHVGRVSHELVQPDGQQPVAPSALKAEGAECFVEFEDGTAGLHPTSTPRALETDGIPGIVEDYRQAAQRAKRAGFDMVEVHAANACLPNQFLATGTNRRTDQYGGSIENRARFPLEVVDAVAEVFGPERVGIRLTPFLELFGLTDDEPEAMAFYLAGELDRRGLAYLHFNEPDWIGGDITYPEGFREQMRQRFKGGLIYCGNYDAGRAQARLDDNTADAVAFGRPFIANPDLPERFRLGAALNEPDPSTFYGGAEVGYTDYPFLDNGHDRLG

SEQ ID NO: 10369 - protein, 354 aa, Pseudomonas putida
MTKLFSPVQLGPLNLPNRVVMAPMTRSRALGNVPNDLMAQYYSLRAEAGLLITEGTSPSPNGLGYAHIPGIYSDAQVAGWRQVAEAVNAAGGRVFVQLMHTGRVGHPANLPLGAHLLAPSAVAAPGEMWTDTEGMQPHPVPGTMTEQDIAAAIEEYAAACKNTVAAGFDGVELHGANGYLIDQFLNTASNHRSDRWGGSIDNRIRFAVEVARAAAAAIGAERVGIRISPYGVFNGMASDADMDALYLRLIEALNDVGLVYLHVVDHSSMGAPPVSETLKVQLRTAFRGKYILSGGYDAARTNADLAANKGDLVAFGRPFIANPDLAQKLKSGGELKPADPATFYTPDAKGYTEF

SEQ ID NO: 10370 - protein, 378 aa, Ralstonia solanacearum
MFQSLFPGAEMTQQLLSPIQVGQTALANRVVMAPLTRSRAAQPGDVPTELNGTYYAQRATAGLIVTEATQVSRQGQGYAWTPGMYTDAQEAGWKAVVDAVHAKGGRISQQLWHVGRISHTLLQEGGQAPVAPSAIVAQGAQSFVVQPDGTPANVPTSEPRALATEEIPGIIAQYRQAVQRARRAGFDFVEIHAANGYLLHQFLSTNSNQRADQYGGSLENRARLILEVVDAAIAEIGAERVGIRLSPHFVAHDIADAEAETSALYLARELTRRGVAYLHIAEPDWAGGPELSDAFRRQLRDAFKGALIVCGQYTAEEGEQMIASGLADAVAFGRPFIANPDLVARFRAGAGLNTPDRSTFYGGQEKGYTDYPTLEEAA

SEQ ID NO: 10371 - protein, 359 aa, Ralstonia solanacearum
MNALFAPVRVGRHTLQNRLAMAPMTRSRAEPDGTPGELAADYYAQRASVGLIVTEGTQPSDDGQGYLTTPGIYTDAHVAGWKAVTSAVHAKGGHLFIQLMHAGRMSHPDNTPHHRPGVAPSAIAPGAPMFTATGMQDIPAPRALTTEEVRRTVDDFRLAARRAIEAGTDGVEIHGANAYLIQQFFAPSANTRTDAYGGSIENRARFAIEVAAAIADEIGADRTGIRLSPGTTMWGIDEGAEGPDLYRYLVAELDKLGLAYLHVMHQGDEPLLADLRRRWKQPLIVNRPGRPREQVGADVASGLADLEAYGQMVLANPDFVARLKAHAPMNEAQRNTFFGGSAPGYTDYPTLGETAGASA

SEQ ID NO: 10372 - protein, 360 aa, Pseudomonas syringae pv. glycinea
MPTLFDPLTLGDLQSPNRVLMAPLTRGRATREHVPTELMIEYYTQRASAGLIITEATGITQEGLGWPYAPGIWSDEQVEAWKPVTQAVHEAGGRIILQLWHMGRTVHSSFLGGAKPVSSSATRAPGQAHTYEGKQDYDEARPLSADEIPRLLNDYEHAAKNAMAAGFDGVQIHAANGYLIDQFLRDNSNVRGDAYGGSIENRIRLLVEVTRRVAETVGAEKTGVRLSPNGDSQGVNDSNPEPLFSAAAKALDEIGIAHLELREPGYEGTFGKADRPPVHPVIRQAFSRTLILNSDYTLETAQAALATGEADAITFGRPFLANPDLPHRFAERLPLNKDVMETWYSQGPEGYVDYPTADQK

SEQ ID NO: 10373 - protein, 219 aa, Lactobacillus collinoides
MKIDQIFSPYQLNKRVTLRNRLVLAPLNIQSSLFDGSVSLNNLNFHKARAKYVGLDIIGSAYISDSANTAYGAISVADDSKIDGLKKLATVIHQGGSKAILQLVHAGRMTNSYASKGAPVLTPSEVKAAHGDVDLPKAMTKTDIETVIKQFETATIRAIKAGFDGVELHGANTFLFQQFMSPLSNLRTDEYGGSLENRIRFCAETAKRVLDTAHAHKPG

SEQ ID NO: 10374 - protein, 366 aa, Lithospermum erythrorhizon
MASKKLLFTPYQLGKHLLSHRIVMSPMTRNRSFDAMPQKHAILYYSQRASKGGFILTEATGVSDTAQGYPHTPGIWTKEQPEAWKPIVDAVHAKGAVFFCQLWHVGRVSNKGFQPNGQDPISSTTKGFTPAVRASYVQEDWFSPPRALETDEIPKIIDDFRIAARNAIDAGFDGVELHGAHGYLLEQFLKDNVNDRTDKYGGSLENRCRFVLELVEAVVNEVGADKVGIKLAPFSDFMEAGDSDPATLGTYLAEALNKFGILYMHVLEPRMKTTGETNNESIDPMRKAFKGTFVVGGGYDKELGEKALEEGRADLVVYGRPFVSNPDLPKRFEIDAPLNEYDRNTFFTHDPVVGYTDYPFLEEATA

SEQ ID NO: 10375 - protein, 385 aa, Lithospermum erythrorhizon
MSIPSSKLLFTPYQLGKHLLSHRIVMSPMTRNRSFDAMPQKHAILYYSQRTSPGGFIVTEATGVSDTAQGYPHTPGIWTKEQTEAWKPIVDAVHAKGGVFFCQLWHVGRVSNKGFQPNGQDPISSTTKGFTPAVRASYVQEDWFSPPRALETDEIPKIIEDFVVSARNAIDAGFDGIELHGAHGYLLEQFLKDNVNDRTDKYGGSLENRCRFVLELVEAVVKEVGADKVGIKLAPFSDFMEAGDSDPAALGTYLVEALNKYGLLYLHVLEPRMKTTGETNNQSIDPMRKAFKGTFMVGGGYDKDLGEKALEEGRADLVVYGRPFVANPDLPKRFEVDAPLNEPDRNTFFSHDPVVGYTDYPFLEEATCLVPVFDTHCIFSIFLFN

SEQ ID NO: 10376 - protein, 379 aa, Azotobacter vinelandii
MLFTAYRLGNLDLPNRILMPPMTRSRAGAGNVPTALMAEYYAQRASAGLIVSEGTQISQQGQGYAWTPGIHSRQQVAGWRGVTDAVHAAGGRIFAQLWHVGRISHVSLQPNGAAPVSSSPLLADGVKVFIDPEGRGPRAGVGEMVQHSAPRALSEAEIAQVVRDFAAAARHALEAGFDGVELHGANGYLINQFIDSRANTRSDGYGGSLSNRLRFLREVTEAVVAVAGRGRVGVRLAPLTTLQGAVDDTPQATYLGAAKLLDDLDVAYIHIAEADWEDAPDMPVAFKEALRLIYGGTLIYAGKYTLERAEAALRDGWADLIGFGRPFIANPDLPRRLRHGWPLNEPDASRFFGGAVAGYTDYPFATQDGQAAAMEEDVR

SEQ ID NO: 10377 - protein, 459 aa, Azotobacter vinelandii
MGQPASGRLRRRPVQGHRPVPRDAPGVGQEYPFPAGPDRRCADRGSAGDRRPVFRGRHHRQANRGFAGLRQEFQRGGRRTASTRPVPGPGLRPPMSPFQEIATMSIFQSGQIGNLALANRIVMAPLGRARSDVQSRVPLPRVATYYSQRAGAGLIVSEATHVSPNSVSRPGGSAIHTAEQVEGWKAVTAAVHAAGGRIFQQLFHLGRKAHQGRLPGNALPVAPSAIAAQGEVETPQGPQPFPVPRALERAEIPALVEEFRQAARNSLLAGFDGVEIHAANGYLIDQFLRDGSNRRQDDYGGSVANRARLLLEIVDAVIGVFGPGRVGVRISPHFEVDGIGDSDPAALYTHVAEQLQARGIAYLHLIEPDSVEPARRLAPRLRQLFRGAFILAGEFDRARAIRALAEGRADFVAFGRLFIANPDLVERLRREAPLNPPDEATFYSGEEHGYIDYPFLAVG

SEQ ID NO: 10378 - protein, 349 aa, Azotobacter vinelandii
MSTLFDPIEIGDLQLPNRIVMAPLTRCRAEPGRVPGALMAEYYVQRASAGLIISEATSVCPTGVGYPDTPGIWSDEQVAGWKNVTQAVHAAGGRIVLQLWHVGRISDPLYLNGELPVAPSAIQPKGHVSLVRPQKAFETPRALETDEIPGLVEAYRQGAENARKAGFDGVEIHAANGYLLDQFLQDSTNRRTDRYGGSLENRARLLLEVTDAAISVWGAGRVGVHLAPRADLHDMGDSNRAETFSHVARELGKRGIAFICTREKEDADSLTPQIKQAFGGAVIANERFTKEQADRWLAESKADAVAFGVPFIANPDLPARLAADAPLNEAHPETFYSSGPQGYLDYPTL

SEQ ID NO: 10379 - protein, 379 aa, Azotobacter vinelandii
MWVYEMKQSALFTTAQLGPYTLKNRIVLPPLTRSRSSQPGNIPNDLMATYYRQRTGAGFMVTEGTQIEPRGQGYAWTPGIHSAEQVEGWRKVTDAVHAERGVIFAQLWHVGRVSHTSLQPGGEAPVAPSAIRADSVKVFIETGPGTGALAEPSTPRALTTAEVKELIQLYAQAARNALEAGFDGVELHCANGYLVNQFISAHTNRRDDEYGGSLHNRLRFLREITQAVADVVGKERMGVRFAPLFATTDEDRVYLGLVEEDPHQTYIEAVKILEDEGIAYLSLAEADWENAPELPEAFREDVRKTFSGKILYAGKYTAERGNRVIQAGWGDLIAFGRPFIANPDLPDRIANNWPLNPVDLTSMYGGTDKGYTDYPTYRP

SEQ ID NO: 10380 - protein, 99 aa, Chenopodium rubrum
LGTPNVGEKKECPHSLLPMRKAFDGTFIAAGGYDREDGNKAVMKSYTDLVAYGRLFLANPDLPRRFELDAPLNKYHRDTFYISDPIVGYTDYPFLEDAM

SEQ ID NO: 10381 - protein, 371 aa, Agrobacterium tumefaciens
MTSLFEPAQAGDIALANRIVMAPLTRNRSPGAIPNNLNATYYEQRATAGLIVTEGTPISQQGQGYADVPGLYKREAIEGWKKITDGVHSAGGKIVAQIWHVGRISHTSLQPHGGQPVAPSAITAKSKTYIINDDGTGAFAETSEPRALTIDDIGLILEDYRSGARAALEAGFDGVEIHAANGYLIEQFLKSSTNQRTDDYGGSIENRARFLLEVVDAVAEEIGAGRTGIRLSPVTPANDIFEADPQPLYNYVVEQLGKRNLAFIHVVEGATGGPRDFKQGDKPFDYASFKAAYRNAGGKGLWIANNGYDRQSAIEAVESGKVDAVAFGKAFIANPDLVRRLKNDAPLNAPNQPTFYGGGAEGYTDYPALAQ

SEQ ID NO: 10382 - protein, 372 aa, Arabidopsis thaliana
MENGEAKQSVPLLTPYKMGRFNLSHRVVLAPLTRQRSYGNVPQPHAAIYYSQRTTPGGFLITEATGVSDTAQGYQDTPGIWTKEHVEAWKPIVDAVHAKGGIFFCQIWHVGRVSNSGFQPNGKAPISCSDKPLMPQIRSNGIDEALFTPPRRLGIEEIPGIVNDFRLAARNAMEAGFDGVEIHGANGYLIDQFMKDTVNDRTDEYGGSLQNRCKFPLEIVDAVAKEIGPDRVGIRLSPFADYMESGDTNPGALGLYMAESLNKYGILYCHVIEARMKTMGEVHACPHTLMPMRKAFKGTFISAGGFTREDGNEAVSKGRTDLVAYGRWFLANPDLPKRFQVDAPLNKYDRPTFYTSDPVVGYTDYPFLESTA

SEQ ID NO: 10383 - protein, 374 aa, Arabidopsis thaliana
MEMVNAEAKQSVPLLTPYKMGRFNLSHRVVLAPLTRQKSYGSVPQPHAILYYSQRTSPGGFLIAEATGVSDTAQGYPDTPGIWTKEHVEAWKPIVDAVHAKGGIFFCQIWHVGRVSNRGFQPRRQAPISCTGKPIMPQMRANGIDEARFTPPRRLSIEEIPGIVNDFRLAARNAMEAGFDGVEIHGAHGYLIDQFMKDKVNDRTDEYGGSLQNRCKFALEVVDAVAKEIGPDRVGIRLSPFADYMESGDTNPEALGLYMVESLNKYGILYCHMIEPRMKTVGEIAACSHTLMPMREAFKGTFISAGGFTREDGNEAVAKGRTDLVAYGRWFLANPDLPKRFQLDAPLNKYNRSTFYTSDPVVGYTDYPSLESTA

SEQ ID NO: 10384 - protein, 372 aa, Arabidopsis thaliana
MENGEAKQSVPLLTPYKMGRFNLSHRVVLAPLTRQRSYGNVPQPHAAIYYSQRTTPGGFLITEATGVSDTAQGYQDTPGIWTKEHVEAWKPIVDAVHAKGGIFFCQIWHVGRVSNSGFQPNGKAPISCSDKPLMPQIRSNGIDEALFTPPRRLGIEEIPGIVNDFRLAARNAMEAGFDGVEIHRANGYLIDQFMKDTVNDRTDEYGGSLQNRCKFPLEIVDAVAKEIGPDRVGIRLSPFADYMESGDTNPGALGLYMAESLNKYGILYCHVIEARMKTMGEVHACPHTLMPMRKAFKGTFISAGGFTREDGNEAVSKGRTDLVAYGRWFLANPDLPKRFQVDAPLNKYDRPTFYTSDPVVGYTDYPFLESTA

SEQ ID NO: 10385 - protein, 374 aa, Arabidopsis thaliana
MEMVNAEAKQSVPLLTPYKMGRFNLSHRVVLAPLTRQKSYGSVPQPHAILYYSQRTSPGGFLIAEATGVSDTAQGYPDTPGIWTKEHVEAWKPIVDAVHAKGGIFFCQIWHVGRVSNRGFQPRRQAPISCTGKPIMPQMRANGIDEARFTPPRRLSIEEIPGIVNDFRLAARNTMEAGFDGVEIHGAHGYLIDQFMKDKVNDRTDEYGGSLQNRCKFALEVVDAVAKEIGPDRVGIRLSPFADYMESGDTNPEALGLYMVESLNKYGILYCHMIEPRMKTVGEIAACSHTLMPMREAFKGTFISAGGFTREDGNEAVAKGRTDLVAYGRWFLANPDLPKRFQLDAPLNKYNRSTFYTSDPVVGYTDYPSLESTA

SEQ ID NO: 10386 - protein, 370 aa, Arabidopsis thaliana
MENGEAKQSVPLLTPYKMGRFNLSHRVVLAPLTRQRSYGNVPHAAIYYSQRTTPGGFLITEATGVSDTAQGYQDTPGIWTKEHVEAWKPIVDAVHAKGGIFFCQIWHVGRVSNSGFQPNGKAPISCSDKPLMPQIRSNGIDEALFTPPRRLGIEEIPGIVNDFRLAARNAMEAGFDGVEIHGANGYLIDQFMKDTVNDRTDEYGGSLQNRCKFPLEIVDAVAKEIGPDRVGIRLSPFADYMESGDTNPGALGLYMAESLNKYGILYCHVIEARMKTMGEVHACPHTLMPMRKAFKGTFISAGGFTREDGNEAVSKGRTDLVAYGRWFLANPDLPKRFQVDAPLNKYDRPTFYTSDPVVGYTDYPFLESTA

SEQ ID NO: 10387 - protein, 367 aa, Arabidopsis thaliana
METKQSIPLLMPYKMGPFNLSHRVVLAPLTRSRSYGNIPQPNAKLYYTQRTTPGGLLISESCVVSETSLGYPDLPGLWNRDQVEAWKPIVDAVHSKGGIFFCQIWHGGRVFHQDQPNGEAPVSSTDKPLMCKNMYGGQFKPPRRLRSDELPAIVNDFRIAARNAIEAGFDGVEVHGAHGYLIDQFLKDKVNDRSDQYGGSLENRCRFALEVIEAVVNEIGSDRVGIRLSPFADYMESGDSNPEALGLYLVQAMNKHVVYGHMVEPRMKTLEGIFECTESLTPMRKAFKGTFIVAGGYSREDGNKAVEEGRTDLVAYGRPFLANPDLTRRFELNEPLNRYDRSTFYTSDPVVGYTDYPFLETTDTTTA

SEQ ID NO: 10388 - protein, 324 aa, Arabidopsis thaliana
MKNFNLTHRIVMAPMARMRSYGNIPQPHVALYYCQRTTPGGLLISEATGVSETAMAYQNMPGIWRKEQIEAWKPIVDAVHSHGGIFFCQLWHAGRVSHQDCQPNGESPVSSTDKPFADDPSNEFTPPRRLRTDEIPTIINDFRLAARNATEAGFDGVEIHGAHGYLIDQFMKDSVNDRTDSYGGSLENRCRFALQVIEAVSKEIGPDRVGIRLSPFADYMESGDTDPKRLGLYMAKSLNRFEILYCHMIEPRMKTVSEIFECRESLTPMRNAFNGTFIVAGGYTREDGNKAVAEGRTDLVAYGRLFLANPDLPKRFELNAPLNK

SEQ ID NO: 10389 - protein, 371 aa, Mesorhizobium loti
MTTLFDPLRAGDLTLANRIVMAPLTRNRSPNAVPGDLSVTYYSQRATAGLIVTEATAISHQGQGYANVPGLYGADQLAGWRRVTDAVHRGGGKIVVQLWHVGRISHNTLQPGGGKPVAPSAIRANSKTFLVKPDGSGEFAETSEPRALDAAELPGIVDDFRRAAKAAIEVAGFDGVEIHGANGYLIDQFLRSGTNHRNDAYGGSIENRTRFLFEVVDAVTGAVGAGRTGIRLSPVTPANDASDSDPQPLFNHVVAGLGGRGLAYIHIVEGATGGARDFSQGDRPFDYEELKATYRKAGGAGAWLVNNGYDKELAEKAVGDGYAELVAFGKLFIANPDLVSRLKRNAELNAPDKATFYGGDARGYTDYPTAA

SEQ ID NO: 10390 - protein, 373 aa, Sinorhizobium meliloti
MASLFDPITIGDISLSNRVVMAPLTRNRSPQAVPNDLNVAYYEQRASAGLLITEGTAISHQGQGYADVPGLYKPEALAGWRKVTDSVHKAGGKIVVQMWHVGRISHDSLQPQGGKPVAPSAIRAKSKTYLVNPDGTGSFAETSEPRALEPAEIAGIVEDYRKASRAAIEAGFDGVEIHAANGYLIDQFLRSGSNERTDAYGGSIENRARFLFEVVDAVTKEIGAGRVGIRISPVTPANDAFDPDPQPLFTYVVEGLARYPLAYVHVIEGATGGARDHQQGDRPFDYTSLRAAYAAAGGRAAWMTNNGYDRGLALKTVESGEADLVAFGKPFIANPDLVRRLRDNVALNAPDQATFYGGGAKGYTDYPSLENVA

SEQ ID NO: 10391 - protein, 363 aa, Sinorhizobium meliloti
MEIPMNPMFTSVRVGRYMLPNRLVMAPMTRSRAAFDGTPGELATEYYVQRARLGLIVTEGTQPSDDGQGYLTTPGIYTPAHIAGWRKITSAVHDKGGHIFIQLMHAGRMSHPDNTPHHRQGVAPSAIAPGAGMFTATGMQDIPTPRALTTEEVRRTVAEFSHAARSAIEAGADGIEIHGANAYLVQQFFAPSANTRTDEYGGSIENRARFAIEVATAIAEEVGADRTAIRLSPGTALWGIDEGAEGPDLYRYLVAELDKLGLAYVHILHQSNEPLLADIRKLWRQPLILNRPGRPRGQIGADVASGLADLEAFGQMVLANPDFVARLKADAAMNESDPKTFYGGAAKGYIDYPVLSARTDTSS

SEQ ID NO: 10392 - protein, 370 aa, Sinorhizobium meliloti
MNAPAIIPSPVFTGTSLKGLDFANRLSVAPMTRISASCAGVPGERMVRYYQRFARGGFSLVMSEGIYTDKAYAQTYSGQPGLTDREQADAWRRAVDAVHAAGGSIFAQLMHGGALSQGNPYRSDTIGPSAIRPKGSQMTGYRGDGPYAMPREISEAEIAAAIEGFAGAARLAIEVAGFDGIEIHGANGYLLDQFFTDYTNHRQDRWGGDIVARFGLSLEVLKAVRAAIGPSVPLGLRLSQGKVNDFRHKWAEREQGAARVFEALAESPADFAHVTEFEAWRPAFEGGEISLVSLARRHAPRLFLIANGSLHELARAEQVMESGADMIALGRGALVNPDWPHLTAARSALRPFELSMLAPISDIKDSELAL

SEQ ID NO: 10393 - protein, 678 aa, Sinorhizobium meliloti
MPNDPLLQPYQLKHLTLRNRIIVTAHEPAYPEDGMPKERYRAYTVERARGGVAMTMTAGSAAVSKDSPPVFNNLLAYRDEIVPWIREMTDAVHEEGAVIMIQLTHLGRRTRWDKGDWLPVVAPSHHREAAHRAFPKKIEDWDIDRIIKDFADAAERMKAGGMDGVELEAYGHLIDQFASPLTNELDGPYGGSLDNRMRFCFDVLKAIRARVGDEFILGVRYTADECLPGGTDKAEGLEISKRLKESGLIDYLNIIRGHIDTDPGLTDVIPIQGMANSPHLDFAGEIRAATNFPTFHAAKIPDVATARHAIASGKVDMVGMTRAHMTDPHIVRKIIEKREEDIRPCVGANYCLDRIYQGGAAYCIHNAATGRELTMPHSIAKAHCRRKVVVVGTGPAGLEAARVAGERGHEVIVFEAASDPGGQVRLTAQSPRRREMISIIDWRMSQCEKLGVTFHFNTWAEAEAIQAESPDVVIIATGGLPHTEVLSRGNELVVSAWDIISGDAKPGTNVLIFDDAGDHAALQAAEFLATAGARVEIMTPDRSFAPEVMAMNLVPYMRCLQKLDVTFTVTYRLEAVEKSGNELVAHVGSDYGGISKQRTFDQVVVNHGTIPLDELYFELKPFSSNLGEIAHDQMIAGEPQSVVRNAEGKFQLFRIGDAVAARNTHAAIYDALRLLKDI

SEQ ID NO: 10394 - protein, 387 aa, Glycine max
AAARRRQKGEIEFTQEMASPLLTPYKMGKFNLSHRVVLAPLTRQRSYDNVPQPHAILYYSQRTSNGGLLITEATGVSDTAQGYPQTPGIWTKDHVQAWKPIVDAVHAKGGVFFCQIWHVGRVSDSVYQPNGQAPISSTDKPLTPQIRSNGIDQVQFTPPRRLRTDEIPHIVNDFRLAARNAIEAGFDGVEIHGAHGYLLEQFMKDKVNDRTDEYGGSLENRCRFALEVVEAVVNEIGADRVGIRLSPFAEYSESGDSNPKELGLYMMNALNKYGILYCHMVEPRMKTVGEKTECPHSLVPMRKAFNGTFIAAGGYDRQDGINAVAENRADLVAYGRWFLANPDLPKRFALNAPLNKYHRETFYTSDPVLGYTDYPFLDDEESNAVAS

SEQ ID NO: 10395 - protein, 419 aa, Glycine max
  unsure (1)..(419): unsure at all Xaa locations
RTKATREKAEKEIGKEAKEFYTKMVEQKNQVIPLLTPYRMGNLNLSHRIVLAPLFRARSYNNVAQPHAILYYSQRATKGGLLITEATTISPTSKYHPNAVGIWSREQIEAWKPIVDAVHAKGGIFFCQIVHTGRAYDPDLKPDGQTLISSTNKPFTHNATEPTALRTAEIPDIVNEFRLAARNAIEAGFDGVEIHGAHGFLIDQFLKDQVNDRTDKYGGSLENRCRFALEVVEAVVEEIGADRVGMRLSPFSDFNECSDSNPQALGLYMAKSLSKHGVLYCHMVEPRWDISGETLHTLAPMKKAFNGTFIVAGGYDRKEGNKAVTEDKANLVAYGRLFLANPDLPKRLEVDEPLNKYNRETFYTPDPVVGYTDYPFIXRKCNXGSHELEGWIYSYVLHYLMFKSCLIWVYLYFSLNYIL

SEQ ID NO: 10396 - protein, 394 aa, Glycine max
  unsure (1)..(394): unsure at all Xaa locations
TSSAARRRQKGEIEFTQEMASPLLTPYKMGKFNLSHRVVLAPLTRQRSYDNVPQPHAILYYSQRTSNGGLLITEATGVSDTAQGYPQTPGIWTKDHVQAWKPIVDAVHAKGGVFFCQIWHVGRVSDSVYQPNGQAPISSTDKPLTPQIRSNGIDQVQFTPPRRLRTDEIPHIVNDFRLAARNAIEAGFDGVEIHGAHGYLLEQFMKDKVNDRTDEYGGSLENRCRFALEVVEAXVVNEIGAHRVGIRLSPFAEYSDVGXESNPNLVNXLYMLKALNKNAILYNYLAGQILHFGCGYSXYXQPLLCIRKALNGTIIGXSRHVLQNVIIAVEXKYRAVLVAYCRWFLANPDLPKRFALNAPLNKYHRETFYTSDPXXLGYTDYPFLDDEESNAVAS

SEQ ID NO: 10397 - protein, 388 aa, Glycine max
  unsure (1)..(388): unsure at all Xaa locations
MANTNSDTKEESKKMDERETIPLLTSYKMGNFNLSHRIVLAPLTRSRSYNFVPQPHAALYYSQRTTKGGFLIGEATGVSDTAKDGYPNTPGIWTREQVEAWKPIVSTVHEKGGIFFCQLWHAGKVSNYDEFQPHGEAPISSTNKRPRKEIPKLVNEFVIAAKNAMEAGFDGIELHGANGYLLDQFLKDKVNDEDDEYCGTIENRCRLPLEAVKAVADENGADKAGITLVLLADCVXDDTNNDDPQALGIHMAESLNQLGILYIHLIEPRTMVTQFHKFDTKYLSLEPIRKAFKGTFIVAGGYDRSEGNLAISSSAADLVAYGRLFLANPDLPTRFQLDAQLNEPDATTFSTHDPVLGYTDYPFLQDIXSVEVIRGHKMNRLVLQKPIN

SEQ ID NO: 10398 - protein, 300 aa, Glycine max
  unsure (1)..(300): unsure at all Xaa locations
MATEADAPVIPLLTPYKMGNFNLSHRVVLAPLTRMRSYNNVPQPHAVLYYSQRTSPGGLLISEATGVSDTAQGLVHTPGIWTKEQVEAWKPIVNAVHAKGGVFFCQIWHVGRVSSPVFQPNGQAPISSTDKPLKQNGIEEAQVTPPRRLRTDEIPHIVNDFRVAARNAIKAGFDGVEIHGAHGYLLEQFIKDKVNDRSDGYGGSLENRCRFALEVVDAVVKEIGAEKVGVRLFHLTEQXECGDSEPXXLAPFFANALXKDNILYCHMVEPRMKNALEVVECPHSLMPMRKAFNGTFISAX

SEQ ID NO: 10399 - protein, 317 aa, Glycine max
  unsure (1)..(317): unsure at all Xaa locations
MGKFNLSHRVVLAPLTRQRSYDNVPQPHAILYYSQRTSNGGLLITEATGVSDTAQGYPQTPGIWTKDHVQAWKXHASAHASGNFPXPFAXLPNTNVSNTLPNTTIISMAVQIVGFDGVEIHGAHGYLLEQFMKDKVNDRTDEYGGSLENRCRFALEVVEAVVNEIGADRVGIRLSPFAEYSESGDSNPKELGLYMMNALNKYGILYCHMVEPRMKTVGEKXTECPHSLVPMRKAFNGTFIAAGGYDRQDGINAVAENRADLVAYGRWFLANPDLPKRFALNAPLNKYHRETFYTSDPVLGYTDYPFLDDEESNAVAS

SEQ ID NO: 10400 - protein, 371 aa, Pisum sativum
MGAPIANAIPLITPYKMGNFNLSHRVVMAPLTRMRSYNNVPQPHAILYYAQRASQGGLLIAEATGVSDTAQGYPNTPGIWTKEQVEAWKPIVEAVHAKDSVFFLQIWHVGRVSNSIYQPNGQAPISSTDKAITSNDQQQFTAPRRLRTNEIPNIVNDFKLAARNAIEAGFDGVEIHGAHGYLLDQFMKDKVNDRTDEYGGSLENRCRFTFEVVEAVANEIGADKVGIRLSPFAEYAESGDSNPNALGLYMANALNKYNILYCHMVEPRLIQTFDPVETPHSLEPMRKAFNGTFMVAGGYNRQDGIKAIAENRADLVVYGRWFISNPDLPKRFALDAPLNKYNRETFYSSDPVIGYTDYPFLNDETPVESKA

SEQ ID NO: 10401 - protein, 384 aa, Vigna unguiculata
MVTATATAAATAPSHQAIPLLTPYKMGKFNLSHRVVLAPLSRERSYNNVPQPHAVVYYSQRTSNGGLLIAEATGVSDTAQGYPNTPGIWTKEQVEAWKPIVDAVHAKGGIFFCQIWHVGRVSDSSYQPNGQAPISSTDKPLPPTPRANGLGYIEHTPPRRLTTEELPGIVNDFRIAARNAIEAGFDGVEVHGAHGYLLDQFLKDQANDRTDQYGGSLENRCRLPLEVVEAVVNEVGADRVGIRLSPFADFNDCGDSNPLQLGLYMVNALNKYNILYCHMVEPRMGSVGGPDENLTPMRKVFNGTFIVAGGYDREDGIKAIAEDRADLVAYGRLFLANPDLPKRFALNAPLNQYNRKTFYHEDPDPLVGYIDYPFLDEESNGVAS

SEQ ID NO: 10402 - protein, 237 aa, Oryza sativa (japonica cultivar-group)
MVYSKPRRLRTDEIPQIIDDFRRAARNAIEAGFDGVEIHGAHGYLLEQFMKDSANDRTDEYGGSLENRCRFAVEVIDAVVAEVGAHRVGIRLSPFVDFMDCFDSDPVALGSYMVQQLNKHPGFLYCHMVEPRMAIIEGRRKIAHGLLPFRKQFNGTFIAAGGYDREEGNKVVADGYADLVAYGRLFLANPDLPRRFELDAPLNRYDRSTFYTQDPVVGYTDYPFLEEIDEESRTTYA

SEQ ID NO: 10403 - protein, 86 aa, Daucus carota
  unsure (1)..(86): unsure at all Xaa locations
MKKVGEKAETHHTLVPMRKAFHGTFIVAGGYDREDGNTAVAENCXDLVAYGRQFLANPDLPKRFELNAPLNXYDRNTFYISDPVVG

SEQ ID NO: 10404 - protein, 379 aa, Catharanthus roseus
MAKQVDNGQEEQQQNPQNPLLTPYKLGKFQLSHRIVLAPLTRQRSYGNVPQPHAVLYYSQRTSKGGLLISEAAGVSNTAQGYPMTPGIWTKEQVEAWKPIVDAVHAKGGVFFCQIGHVGRVSNYSYQPNGQAPISSTDKGLTPLYRANGIGYVEHTPPRRLTTDELPGIVNDFRAALNAIEAGFDGVEIHGAHGYLIDQFLKDQVNDSTDEYGGSLENRCRFALEIVEAVSNAIGADRVGIRLSPFAGYMESGDSNPEALGLYMAEALNKYGILYCHMVNPRMKTLGENCEVPHSLLPMRKAFRGTFMAAGGYDREDGIKALAENRADLVVYGRLFLANPDLPKRFELNAPLNKYNRETFYIPDPVLGYTDYPFLEATE

SEQ ID NO: 10405 - protein, 376 aa, Lycopersicon esculentum
MENKVVEEKQVDKIPLMSPCKMGKFELCHRVVLAPLTRQRSYGYIPQPHAILHYSQRSTNGGLLIGEATVISETGIGYKDVPGIWTKEQVEAWKPIVDAVHAKGGIFFCQIWHVGRVSNKDFQPNGEDPISCTDRGLTPQIRSNGIDIAHFTRPRRLTTDEIPQIVNEFRVAARNAIEAGFDGVEIHGAHGYLIDQFMKDQVNDRSDKYGGSLENRCRFALEIVEAVANEIGSDRVGIRISPFAHYNEAGDTNPTALGLYMVESLNKYDLAYCHVVEPRMKTAWEKIECTESLVPMRKAYKGTFIVAGGYDREDGNRALIEDRADLVAYGRLFISNPDLPKRFELNAPLNKYNRDTFYTSDPIVGYTDYPFLETMT

SEQ ID NO: 10406 - protein, 376 aa, Lycopersicon esculentum
MENKVVEEKQVDKIPLMSPCKMGKFELCHRVVLAPLTRQRSYGYIPQPHAILHYSQRSTNGGLLIGEATVISETGIGYKDVPGIWTKEQVEAWKPIVDAVHAKGGIFFCQIWHVGRVSNKDFQPNGEDPISCTDRGLTPQIMSNGIDIAHFTRPRRLTTDEIPQIVNEFRVAARNAIEAGFDGVEIHGAHGYLIDQFMKDQVNDRSDKYGGSLENRCRFALEIVEAVANEIGSDRVGIRISPFAHYNEAGDTNPTALGLYMVESLNKYDLAYCHVVEPRMKTAWEKIECTESLVPMRKAYKGTFIVAGGYDREDGNRALIEDRADLVAYGRLFISNPDLPKRFELNAPLNKYNRDTFYTSDPIVGYTDYPFLETMT

SEQ ID NO: 10407 - protein, 383 aa, Oryza sativa
REERRGEGAGQGRGGKMSSTAPLLTPYKMGRFDLSHRVVLAPLTRQRSYGNVPQPHAILYYQQRTTKGGLLIAEATGISDTAQGYKDTPGIWTKEQVEAWKPIVDGVHAKGGIFFCQIWHVGRVSNNTFQPNGQAPISSTNKSLKPAVRANGIDVATFSTPRRLETDEIPFVVNDYRVAARNAIEAGFDGVEIHGAHGYLIDQFLKDQVNDRSDKYGGSLENRCRFALEVVQAVTDEIGADKVGIRLSPFASYSEAADSNPEALGLYMANALNKFGILYCHMVEPRMVKLGEKFETPHSLRPIRDAFKGTFIAAGGYNKEDGNKAVSTGYTDLVAYGRLFLSNPDLPERFEIDAPLNKYNRETFYISDPVIGYTDYPFLPSDV

SEQ ID NO: 10408 - protein, 401 aa, Triticum aestivum
  unsure (1)..(401): unsure at all Xaa locations
STVESSTPGRHSFHQHKGPPPRTGGGRAEGGKEQTKEDEPLLTPYKMGRFDLSHRVVLAPLTRERSFGNVPQPHAILYYQQRTTKGGLLIAEATGVSDTAQGYKDTPGIWTKEQVEAWKPIVNGVHAKGGIFFCQIWHVGRVXNHTFQPNGQAPISSTDKPIKPATRADGIGLAKISTPRRLQTDEIPLVIEDFRVAARNAIEAGFDGVEIHGAHGYLIDQFLKDQVNDRTDKYGGSLENRCRFALEVVQAVADEIGADKVGIRLSPFASYSDASDSNPEALGLYMAQALNKLGILYCHMVEPRMVNIGEKLETPHSLRAMRDAFKGTFIVAGGYGRDDGDKAIADGYADLVAYGRLFLSNPDLPRRFEIDGPLNKYNRDTFYLSDPVIGYTDYPFLPSDI

SEQ ID NO: 10409 - protein, 391 aa, Triticum aestivum
  unsure (1)..(391): unsure at all Xaa locations
GRRGRKRSRERKGPKKRGREDEQRSXHNPXLLAHYKMGKFDLSHRVVLAPLTRERSFGNVPQPHAILYYQQRATKGGLLIAEATGVSDTAQGYKDTPGIWTKKQVEAWKPIVDGVHAKGGIFFCQIWHVGRVSNHTFQPNGQAPISSTDKPIKPATRADGIGLAKVSTPRRLTTDEIPLVIDDFRVAARNAIEAGFDGVEIHGAHGYLIDQFLKDQVNDRTDKYGGSLENRCRFALEVVQAVADEIGADKVGIRLSPFASYSDASDSNPEALGLYMAQALNKLGILYCHMVEPRMVNIGEKLETPHSLRAMRDAFKGTFIVAGGYGRDDGDKAIADGYADLVAYGRLFLSNPDLPRRFEIDGPLNKYNRDTFYLSDPVIGYTDYPFLPSDI

SEQ ID NO: 10410 - protein, 387 aa, Triticum aestivum
  unsure (1)..(387): unsure at all Xaa locations
GNKRSLLKQEIREEDEQAGWYXGSTVPLLTPYKMGAFDLSHRVVLAPLTRTRSYGNVPQPHAILYYQQRTTKGGLLIAEATGVSDTAQGYKDTPGIWTKEQVEAWKPIVDGVHAKGGIFFCQIWHVGRVSNHTYQPNGQAPISSTDKPLKPMVIDKHIVADFATPRPLETDEIPMVINDFRVAARNAIEAGFDGVEIHGAHGYLIDQFLKDQVNDRTDKYGGSLENRCRFALEVVQAVVDEVGADKVGIRLSPFANYPVPSDSNPEALGLYMAHALNKFGILYCHMVEPRMVNIGEKFETPHSLRPIRDAFKGTFIVAGGYDRDDGNKAIADDYADLVAYGRLFLSNPDLPRRFEIGAPLNKYIRDTFYLSDPVIGYTDYPFLPSDV

SEQ ID NO: 10411 - protein, 419 aa, Triticum aestivum
  unsure (1)..(419): unsure at all Xaa locations
QNVEDLNREKERNQRREEGKMSNAASTTPLLAHYKMGKFDLSHRVVLAPLTRERSFGNVPQPHAILYYQQRATKGGLLIAEATGVSDTAQGYKDTPGIWTKKQVEAWKPIVDGVHAKGGIFFCQIWHVGRVSNHTFQPNGQAPISSTDKPIKPATRADGIGLAKVSTPRRLTTDEIPLVIDDFRVAARNAIEAGFDGVEMHGVHGYXLIDQVLKDQVNDRTDXKYGGSLENRCRFALEVVQAVVDEVGADKVGIRLSPFANYSEASDSNPEALGLYMAHALNKFGILYCHMVEPRMVNIGEKVXNXPHSLRPIRDAFKGTFIVAGGYDRDDGNKAIADDYADLVAYGRLFLSNPDLPRRFEIGAPLNKYIRDTFYLSDPXXIGYTDYPFLPSDVXMGLSGMNPHPIRSSTSCISTMLKE

SEQ ID NO: 10412 - protein, 448 aa, Novosphingobium aromaticivorans
MPGPASTSLRTPGRCRRDARTRVPGPAQRFLSAGQGNASGVAAKSGRVHLNSSWGPLNPVAKRNRALSSRGVAEVIKEPPSMHEPLFQPVRLGAIEAPNRIIMAPLTRGRANPQAVPTPIMGEYYRQRASAGLIISEATAISPEGAGWPSAPGIWTDEQTEAWKPIVDEVHAAGGRIVLQLWHMGRVVHPYFLGGEPPVSASATRAPGHAHTPEGTKDYETARPLRLDEIPRLIDDYGRAAENARKAGFDGVQLHAANGYLIDQFLRDGTNLRDDDYGGSPENRVRLMREVMERLISIWGKERVSIRLSPNGDSQGVDDSNPEATFGEAARVLEELGVGFVELRQPGPEGTFGNTDVPKQDGLIRSIYTGPLVLNSDYTPEEAAADVASGRADAISFGRPFISNPDLVERIRVGAHLNPNKGVPATWYFPGEAGYTDYPTLAEETAIA

SEQ ID NO: 10413 - protein, 467 aa, Novosphingobium aromaticivorans
MRRRMGHHADDVFRPVRTHRRPLVLPPPPAALLVRHRPQQAAGGRPQDALAGRAALSRQLPRPVPELEDLLGTPGTAARRPGRTARPAREIHRDHAPRRPPAPPARAELTDMADLFSPVRLGEIELANRIVMAPMTRDRAGPHDEPTDLMVEYYRQRASAGLIVTEGTQPSPNGKGYWRTPGIHSPEQVEGWRRVAEAVHGEGGRIAVQLMHVGRASVRANKAPDAETVAPSAIPCPDPIPGPDGVPVPTEMPRELAAHEIPGVIAEYVAAARNARAAGIDGVELHCASGYLPMQFLSSNSNQRGDAYGGSAENRVRFVVETLSALAAAISPGRVGFRICPGVKFNGMDDADPAETYATLLRAVDHMGLAYCHLIHIPNQGFDSLDLVRANWSGPVIENCGLTRERAEKVLAEGKAEAVSFGYAFIGNPDLVERLRTGAPLAKADRDTFYTGHGDDARGYTDYPRAG

SEQ ID NO: 10414 - protein, 382 aa, Schizosaccharomyces pombe
MNDRGELFKPIKVGNMLLQHRIVHAPMTRLRATDYGKITGLMVEYYSQRSMIPGTLLIADATFVGEKSGGFPNNPRCFTKEQAESWIPLVEAVHKNKSFLFIQFWPLPGDLKDEYRNDLEKMQKITYSDCPQDPGGLPAGIHSFDAVQGVEVYKKKYMSKRDIQEHIQDFVNAADLAVNIAKADGVEIHQVNGFLLDRFVLGGFGDQCDPEYRGSIENRCRFPLEVLEAVTRKIGQERVGYRISPFSGWMQKIDFMEVNIYLMSEIAKRFPKLAYIHAIEPRKYWSGHKLVSSEQNTSFLQKYWKGPFITAGGYDPETAVQAANERGVLVAFGRNFIANPDLVFRIKHHIPLNKWDRSSFYLPKTEKGYTDYPFSKEFLQSK

SEQ ID NO: 10415 - protein, 392 aa, Schizosaccharomyces pombe
MAVQKLYESQSKLFQPIKVGNMQLQHRMVHAPATRLRCLDNGLVMTDLVKEYYKQRSSIPGTLLITESLFSGAKSGGFSNIPCLYNDEHVEAWKPIVQAIHDNDCFVFIQFWNLPGELKVDYLEDQERLEKVTQGECPMDPTGLPAALGSAYSICGEELYVDKFMTKQDIQEHITTYTEAAKRAVFGCGADGVEVHQVNGFLLDKFVLNGYGDKCDPEYCGSLENRARFCLELLESVVNAIGQERVGYRISPFSDIWKDKDSFEAHVFMIKKIKERFPNLAYLHAIEPRQYWNGHVHITQEKNTLIYKNLWGDPFITAGGHDRDSAIQMAEQENTLVAFGRYFLSNPDLPFRLKYNLPLNKWDRATFYTKMSPKGYIDYPFSKEFLDTKKVE

SEQ ID NO: 10416 - protein, 402 aa, Pichia angusta
MTPSTSLASSNLFKPIKVGKVELKNRLVFAPTTRYRASKDFVPTDSMLKYYEQRAENNGGLLTAEATYVDFNFGLYPFTPMIKTPAQVAAWAKIIEAVHKQGSYFSIQLWHLGRAADPKFNKEKGVPFVAPSAIYLDQDSEKAAREAGNELRELTIPEIEAIVKEFAAAAKRAIHEAKADFIELHSAHGYLLDQFIQPNINKRTDKYGGSIENRARLVLEVVDACIEAVGAEHVGIRLSPYAKFQGSEGVDSEINPIASFGYILSELEKRARDGNRLAYVSVVEPRVSGNVDSNDQRKFDTSWIREIWKGILFRAGGYLKENEQSLEHDVNQDDRTLIGVSRYYTSNPDLVERLKKGLSLTPYDRSRFYNHSSNDGYLTWPKYGEDEEKYKAVLDVEPKALA

SEQ ID NO: 10417 - protein, 402 aa, Pichia angusta
MSKTPTLANTNLFKPIKVGKVELKNRLVFAPTTRYRASKDFVPTDSMLKYYEQRAENNGGLLVTEATYPDYSFGLYPDTPMIKTPAQVAGWKKVIEAVHNKGSFVSIQLWHLGRTASAEFNKSKGLPLVGASPIYMDEDSEKAAKEAGNELRALTIPEIENIVTEYAAAAKRAIHEAKADFIELHGAHGYLLDQFNQPGSNKRTDKYGGSIENRARLILEAVDACIEAVGAEHVAIRLSPYAAVQGIKGVDSEIHPISYFGYVLSELERRAQEGKRLAYISVVEPRVNGIYDSKDKREFNTSWISEIWKGVLLRSGAYLNENYKFLQHDVDENDRTLIGVSRYYTSNPDLADRLKNGHELTPYDRSKFYKHSSNDGYLTWTRYGEKEPQYKDLVDVAPEPLA

SEQ ID NO: 10418 - protein, 401 aa, Pichia angusta
MSQPSLTDTNLFKPIKVGNVELKHGFFSAPTTRFRASDDFVPTDSMLSYYEQRAENNGGLIVAEATFPDYSFGLYPNAPMIKTPEQVAAWKKIVDAVHKQGSFFSIQLWHLGRVAVPQLNKKYNVPLVGPSKLYVDESSEKAAKEAGNELHELTIPEIEAIVKEFAAGAKRVVDEAKADFVEILAGGGYLLDQFNHSNINKRTDKYGGSIENRARLILEVVDACIEAVGAEHVGIKLSPYAAVNGLQGVDTEIHPISRYGYILSELERRGKEGKRIAYITMIEPRVNGTEDSKDTRAFDSSWVGEIWKSTLLRAGAYLNQFSNYLIQDVNKDDRTLIGAARYFTSNPDLIERLRKGQELTPYDRSKFYTPATNDGYITWTKYGEDPEKYKGLVAVKPQPLS

SEQ ID NO: 10419 - protein, 400 aa, Saccharomyces cerevisiae
MPFVKDFKPQALGDTNLFKPIKIGNNELLHRAVIPPLTRMRAQHPGNIPNRDWAVEYYAQRAQRPGTLIITEGTFPSPQSGGYDNAPGIWSEEQIKEWTKIFKAIHENKSFAWVQLWVLGWAAFPDTLARDGLRYDSASDNVYMNAEQEEKAKKANNPQHSITKDEIKQYVKEYVQAAKNSIAAGADGVEIHSANGYLLNQFLDPHSNNRTDEYGGSIENRARFTLEVVDAVVDAIGPEKVGLRLSPYGVFNSMSGGAETGIVAQYAYVLGELERRAKAGKRLAFVHLVEPRVTNPFLTEGEGEYNGGSNKFAYSIWKGPIIRAGNFALHPEVVREEVKDPRTLIGYGRFFISNPDLVDRLEKGLPLNKYDRDTFYKMSAEGYIDYPTYEEALKLGWDKN

SEQ ID NO: 10420 - protein, 399 aa, Saccharomyces cerevisiae
SFVKDFKPQALGDTNLFKPIKIGNNELLHRAVIPPLTRMRALHPGNIPNRDWAVEYYTQRAQRPGTMIITEGAFISPQAGGYDNAPGVWSEEQMVEWTKIFNAIHEKKSFVWVQLWVLGWAAFPDNLARDGLRYDSASDNVFMDAEQEAKAKKANNPQHSLTKDEIKQYIKEYVQAAKNSIAAGADGVEINSAHGYLLNQFLDPHSNTRTDEYGGSIENRARFTLEVVDALVEAIGHEKVGLRLSPYGVFNSMSGGAETGIVAQYAYVAGELEKRAKAGKRLAFVHLVEPRVTNPFLTEGEGEYEGGSNDFVYSIWKGPVIRAGNFALHPEVVREEVKDKRTLIGYGRFFISNPDLVDRLEKGLPLNKYDRDTFYQMSAHGYIDYPTYEEALKLGWDKS

SEQ ID NO: 10421 - protein, 400 aa, Saccharomyces cerevisiae
MSFVKDFKPQALGDTNLFKPIKIGNNELLHRAVIPPLTRMRALHPGNIPNRDWAVEYYTQRAQRPGTMIITEGAFISPQAGGYDNAPGVWSEEQMVEWTKIFNAIHEKKSFVWVQLWVLGWAAFPDNLARDGLRYDSASDNVFMDAEQEAKAKKANNPQHSLTKDEIKQYIKEYVQAAKNSIAAGADGVEIHSANGYLLNQFLDPHSNTRTDEYGGSIENRARFTLEVVDALVEAIGHEKVGLRLSPYGVFNSMSGGAETGIVAQYAYVAGELEKRAKAGKRLAFVHLVEPRVTNPFLTEGEGEYEGGSNDFVYSIWKGPVIRAGNFALHPEVVREEVKDKRTLIGYGRFFISNPDLVDRLEKGLPLNKYDRDTFYQMSAHGYIDYPTYEEALKLGWDKK

SEQ ID NO: 10422 - protein, 400 aa, Saccharomyces cerevisiae
MPFVKGFEPISLRDTNLFEPIKIGNTQLAHRAVMPPLTRMRATHPGNIPNKEWAAVYYGQRAQRPGTMIITEGTFISPQAGGYDNAPGIWSDEQVAEWKNIFLAIHDCQSFAWVQLWSLGWASFPDVLARDGLRYDCASDRVYMNATLQEKAKDANNLEHSLTKDDIKQYIKDYIHAAKNSIAAGADGVEIHSANGYLLNQFLDPHSNKRTDEYGGTIENRARFTLEVVDALIETIGPERVGLRLSPYGTFNSMSGGAEPGIIAQYSYVLGELEKRAKAGKRLAFVHLVEPRVTDPSLVEGEGEYSEGTNDFAYSIWKGPIIRAGNYALHPEVVREQVKDPRTLIGYGRFFISNPDLVYRLEEGLPLNKYDRSTFYTMSAEGYTDYPTYEEAVDLGWNKN

SEQ ID NO: 10423 - protein, 399 aa, Saccharomyces cerevisiae
SFVKDFKPQALGDTNLFKPIKIGNNELLHRAVIPPLTRMRALHPGNIPNRDWAVEYYTQRAQRPGTMIITEGAFISPQAGGYDNAPGVWSEEQMVEWTKIFNAIHEKKSFVWVNLWVLGWAAFPDNLARDGLRYDSASDNVFMDAEQEAKAKKANNPQHSLTKDEIKQYIKEYVQAAKNSIAAGADGVEIHSANGYLLNQFLDPHSNTRTDEYGGSIENRARFTLEVVDALVEAIGHEKVGLRLSPYGVFNSMSGGAETGIVAQYAYVAGELEKRAKAGKRLAFVHLVEPRVTNPFLTEGEGEYEGGSNDFVYSIWKGPVIRAGNFALHPEVVREEVKDKRTLIGYGRFFISNPDLVDRLEKGLPLNKYDRDTFYQMSAHGYIDYPTYEEALKLGWDKK

SEQ ID NO: 10424 - protein, 399 aa, Saccharomyces cerevisiae
SFVKDFKPQALGDTNLFKPIKIGNNELLHRAVIPPLTRMRALHPGNIPNRDWAVEYYTQRAQRPGTMIITEGAFISPQAGGYDNAPGVWSEEQMVEWTKIFNAIHEKKSFVWVQLWVLGWAAFPDNLARDGLRYDSASDNVFMDAEQEAKAKKANNPQHSLTKDEIKQYIKEYVQAAKNSIAAGADGVEINSANGYLLNQFLDPHSNTRTDEYGGSIENRARFTLEVVDALVEAIGHEKVGLRLSPYGVFNSMSGGAETGIVAQYAYVAGELEKRAKAGKRLAFVHLVEPRVTNPFLTEGEGEYEGGSNDFVYSIWKGPVIRAGNFALHPEVVREEVKDKRTLIGYGRFFISNPDLVDRLEKGLPLNKYDRDTFYQMSAHGYIDYPTYEEALKLGWDKS

SEQ ID NO: 10425 - protein, 181 aa, Saccharomyces cerevisiae
MPFVKGFEPISLRDTNLFEPIKIGNTQLAHRAVMPPLTRMRATHPGNIPNKEWAAVYYGQRAQRPGTMIITEGTFISPQAGGYDNAPGIWSDEQVAEWKNIFLAIHDCQSFAWVQLWSLGWASFPDVLARDGLRYDCASDRVYMNATLQEKAKDANNLEHSLTKDDIKQYIKDYIHAAKNS

SEQ ID NO: 10426 - protein, 290 aa, Desulfitobacterium hafniense
MHSPAQIDGWRQVTDAVHAAGGRIFLQLWHVGRMSHASFHDGEPPVAPSALSPDAQVWIVRDGVGAMVDCPLPRALRRDEIAGVVEQFRRGAANAIAAGFDGVEIHGANGYLIDQFLRTTSNVREDEYGGSIANRVRFLDEVTRAVAAEVGAQRTGIRLAPYITARNMNCPQIIPAILEAARRLQAIGVAYLHLSEADWDDAPHVPDSFRHELRSIYSGALIVAGRYDRERGERILSQGLADLVAFGRPFIANPDLPQRYAHDWPLAAFDPATLFGGDERGYTTYPAYAV

SEQ ID NO: 10427 - protein, 297 aa, Desulfitobacterium hafniense
MICCSVMNGHSFLEVPTMSNQDPLFSPIRIGKMELKNRIVLPAMHLNYCPDGEVTERLIEFYRVRARGGVGLVIVGGCGIDRVGNTLGMIQLDEDRYIPGLQKLVEAVHQEGAKVMTQLYQAGNYASSLLTGNQPVAPSPLPSKLTKEIPHELTVEEIKELVQTFAQAAVRTQKAGFDGVEILAGTGYLISEFLSPATNKRTDEYGGDLPNRMRFALEIMAAIRQGVGPDFPVVVRIAGHDFIPGGHTNKEARTFAKALAAAGVDAINVTGGWHETLVPQITHECSPVRLPLFSPGN

SEQ ID NO: 10428 - protein, 547 aa, Thermoplasma volcanium
MVNPGDKGRIGNVEIKNRIVMAPMISNIANSDGSPSEPYISYMRERARGGIGLIITEYTYVDPESGKGSRNQLGIYDDIFLPKFSRLAEAVHDYGSKIFVQLVHAGAKALPSSSYKIAPSKTSFDKNAREMDSSDIERVIRNYERAASIARRAGFDGIEIHGAHGYLVDEFISPYWNRRTDKYGGSLEGRIKFPQEVIDAVKSEVDIPVGIRLSLYEDEVGGYGPDYGIKVAKSLVNIDYVHFSAGNNDPPGSSAPFYSNHTHILSKFPGGSNKPTILVGSVTTAEDVRNVLKVADFVAVGRAVLADPYFARKVIDNYGHIRPCIRCNQACRNLAYGEVRCTVNPYFAFPRQLRKLSGDVVIVGGGVKGLEAARFAALNGLSVTLYEQDDKIGGQLNTIYDEAKRKEFNRLIEYYKEVLDRLGVEIITSEKYKGKGIYCLPDKTYPDLQEKPEIFIDSNVYMYHDIALKYSSTSKVFVTYRSLSSLDRARKAAFLKIAESRGIKFIEKADNYDVSIYEEKQYDIGEAMKSGINEVEKYIDDRINEFL

SEQ ID NO: 10429 - protein, 444 aa, Aspergillus parasiticus
MARAGQAVDPSPLGQPLEFHFARRSAPNRFLKAGMSERMCSWTEENPSARGIPSRELIETYRTWGRGNIGAIVTGNVMIDPNHIEAEGNPTIPPNALFSGERFDQFANLAAAARANGSLILAQISHPGRQTPSHRQPEPISASDVPLDTENMGNTFAVPRAATENEIKNIITGFAHAAEFLDRAGYDGVELHAAHGYLLNQFLSRATNLRTDKYGGTLTNRMRLILEIRAAITEKVRPGFIVGIKINSVEFQPNGIVPDEACELCCALEEHRFDFVELSGGKYKNLEEDDNAKHIISKRHEAFFLDVAQKVVSSLTKMKSYLTGGFRSTAGMVDGLQTVDGIGLARPFCQEPYLCHDILRGKIPGAIIPVMDQLNYQLTVAAACIQMRQIGNKVQPVDLSSQDAVDAITAAAEGWLKRKAIDRSEEAFKPPLLSGDAAPLSVEA

SEQ ID NO: 10430 - protein, 444 aa, Aspergillus fumigatus
MASRYHSAPVDVAPLGKPLQFKISKRTAPNRFYKAAMTERMSSWSPTDLKARGVPSRELINLYKRWGEGGYGLISTGNIMIAYDQLEAPGNPIIDLENPFHGERFDAFRELASQAKRHGSLIIGQVSHPGRQTEERLQPNPVSASDVQLDKEIMGMQFAKPHAASKDEITDFIRRWTHAAVYLHKAGYDGIQLHGAHGYLLAQFLSQTTNRRTDEYGGSLENRARLIVEIAQSIRKELPASTGFILGIKINSVEFQAGGFTADEARELCQILEENEFDFVELSGGTYEFIAFSHKRDSTKQRESFFLEFASLITPALSKTKSYVTGGLRTASGMVGALETVDGVGLARPACQEIRLPRDILDGKVTAAINPKIDQQDFGVTSVAAGTQMKQVGKDEQPIDLSDEKNVEMFMKHLSGWSQRMREDAATMNLYGYVDLPKGEAYRG

SEQ ID NO: 10431 - protein, 379 aa, Neurospora crassa
MAATAAESRLFQPLKLTPKITLGHRLAMAPLTRFRSDDEHVPIVPLMTTYYSQRASVPGTLLVTEATFISPAAGGYDNVPGIYNAAQIAAWKKITDAVHAKGSFIFCQLWSLGRAANPEVLAKEGGLKLKSSSAVPMEEGAPVPEEMTVAEIKERVAEYAAAAKNAVEAGFDGVEIHGANGYLIDQFLQDTCNQRTDEYGGSIENRSRFAHEVVKAVVEAVGAEKTGIRLSPYSTFQGMKMKKDLIPQFEDVIRKINGFGLAYLHLTQSRVAGNMDVQPEEDEENLAFAAKLWDGPLLIAGGLTPETAKHLVDREFPEKDVVATFGRHFISTPDLPFRIKEGIELNPYDRDTFYKAKSPDGYIDQPFSKEFEKVYGAQA

SEQ ID NO: 10432 - protein, 407 aa, Candida albicans
MTIESTNSFVVPSDTKLIDVTPLGSTKLFQPIKVGNNVLPQRIAYVPTTRFRASKDHIPSDLQLNYYNARSQYPGTLIITEATFASERGGIDLHVPGIYNDAQAKSWKKINEAIHGNGSFSSVQLWYLGRVANAKDLKDSGLPLIAPSAVYWDENSEKLAKEAGNELRALTEEEIDHIVEVEYPNAAKHALEAGFDYVEIHGAHGYLLDQFLNLASNKRTDKYGCGSIENRARLLLRVVDKLIEVVGANRLALRLSPWASFQGMEIEGEEIHSYILQQLQQRADNGQQLAYISLVEPRVTGIYDVSLKDQQGRSNEFAYKIWKGNFIRAGNYTYDAPEFKTLINDLKNDRSIIGFSRFFTSNPDLVEKLKLGKPLNYYNREEFYKYYNYGYNSYDESEKQVIGKPLA

SEQ ID NO: 10433 - protein, 365 aa, Enterobacter cloacae
MSAEKLFTPLKVGAVTAPNRVFMAPLTRLRSIEPGDIPTPLMGEYYRQRASAGLIISEATQISAQAKGYAGAPGLHSPEQIAAWKKITAGVHAEDGRIAVQLWHTGRISHSSIQPGGQAPVSASALNANTRTSLRDENGNAIRVDTTTPRALELDEIPGIVNDFRQAVANAREAGFDLVELHSAHGYLLHQFLSPSSNQRTDQYGGSVENRARLVLEVVDAVCNEWSADRIGIRVSPIGTFQNVDNGPNEEADALYLIEELAKRGIAYLHMSETDLAGGKPYSEAFRQKVRERFHGVIIGAGAYTAEKAEDLIGKGLIDAVAFGRDYIANPDLVARLQKKAELNPQRPESFYGGGAEGYTDYPSL

SEQ ID NO: 10434 - protein, 364 aa, Enterobacter cloacae
SAEKLFTPLKVGAVTAPNRVFMAPLTRLRSIEPGDIPTPLMGEYYRQRASAGLIISEATQISAQAKGYAGAPGLHSPEQIAAWKKITAGVHAEDGRIAVQLWHTGRISHSSIQPGGQAPVSASALNANTRTSLRDENGNAIRVDTTTPRALELDEIPGIVNDFRQAVANAREAGFDLVELHSAHGYLLHQFLSPSSNQRTDQYGGSVENRARLVLEVVDAVCNEWSADRIGIRVSPIGTFQNVDNGPNEEADALYLIEELAKRGIAYLHMSETDLAGGKPYSEAFRQKVRERFHGVIIGAGAYTAEKAEDLIGKGLIDAVAFGRDYIANPDLVARLQKKAELNPQRPESFYGGGAEGYTDYPSL

SEQ ID NO: 10435 - protein, 379 aa, Trypanosoma cruzi
MATFPELLRPLKLGRYTLRNRIIMAPLTRCQATEDDHVPRTESMLKYYEDRASAGLIIAEATMVQPNYTGFLTEPGIYSDAQIEEWRKIVDAVHKKGGLIFLQLIHAGRAGIPEKILQQSKSDQDPLAGRLLAASAIPIKDHRIPAYFAASGEKETYGVPEELTDDEVRDGIIPLFVEGAKNAIFKAGFDGVEIHGANGYLLDAFFRESSNKRQSGPYAGTTIDTRCQLIYDVTKSVCDAVGSDRVGLRISPLNGVHGMIDSNPEALTKHLCKKIEPLSLAYLHYLRGDMVNQQIGDVVAWVRGSYSGVKISNLRYDFEEADQQIREGKVDAVAFGAKFIANPDLVERAQQNWPLNEPRPETYYTRTAVGYNDYPTYNK

SEQ ID NO: 10436 - protein, 379 aa, Trypanosoma cruzi
MATFPELLRPLKLGRYTLRNRIIMAPLTRCQATEDCHVPRTESMLKYYEDRASAGLIIAEATMVQPNYTGFLTEPGIYSDAQIEEWRKIVDAVHKKGGLIFLQLIHAGRAGIPEKILQQSKSDQDPLAGRLLAPSAIPIKDHRIPAYFAASGEKETYGVPEELTDDEVRDGIIPLFVEGAKNAIFKAGFDGVEIHGANGYLLDAFFRESSNKRQSGPYAGTTIDTRCQLIYDVTKSVCDAVGSDRVGLRISPLNGVHGMIDSNPEALTKHLCKKIEPLSLAYLHYLRGDMVNQQIGDVVAWVRGSYSGVKISNLRYDFEEADQQIREGKVDAVAFGAKFIANPDLVERAQHNWPLNEPRPETYYTRTAVGYNDYPTYNK

SEQ ID NO: 10437 - protein, 453 aa, Caenorhabditis elegans
MVRRFPTAAPESSILGEHLKFPSGKIAQNRFLKAALTEMLSIFDPSTPGANGVPTQEIINVYDKWGNGQFGVILTGNVQVSPVHLEAPGNAMIFKEGETPARREAYKKWANVTKQDGALAVVQLSHGGRQTPITVNKTPFSASDVQLDKEVRFIGFGKPVPLTPEQIKTEVIERFVYAAKYAYETGFDGVQLHGAHGYLLAQFTSPTTNKRTDHYGGSVSNRQRIVLEIFDAIRKEIPASTGFLIGLKTNSVEFQSEGTTVDDAIEMCRAYENIGFDFVELSGGTYEQLAFQHLKESTKRREAFFLEFAEKIRPVFKNTVVYLTGGFRTVNAMVEAIKSGATQGIGLGRPITAEPDLPKKILQKLAPSAVFDAIDQSEFVLSLLASNTQIEQMGRNSLKEANNDVTYGLSDFSDEDTVKRFGKAVEEFAELLKIQASRGVAIPNVITFEGVKA

SEQ ID NO: 10438 - protein, 451 aa, Caenorhabditis elegans
MSLRRFPHAEIVSPDVLGEHLKFRNGRETNNRFLKSALTEIQSNYYPNEPKRHGLPTDTILNIYDKWGNGNFGMILTSNVLVDPTNLEAAGNAIIFKEGDCHERRALFTYWAKLMKQDGALAVIQLSHAGRQTPEFVNPTPWSASDVQLVSATRMTTYGKPKPLSIEQIKTEVVDRFVYAAKFAYECGFDGIEIHGANGYLLSQFTSPTTNKRTDKYGGSLENRQRIVIEVYDAIRAEIPASTGFLVGIKTNSVEFQSEGLTLEDAKIMCQVYEDKGVDFVELTGGTFEKLNWTWDRESTKKREAFFAEFAEQIRPVFNKTVVYLTGGFRTVSAMINAISCNATQGIGLGRPITAEPDLPKKILEGKAISAVQDSFNPNDIATTVMASGTQMDQMGRTNMEKAGGNIMHLITDFSDEHTVQRFSEALGLHVKQAALDISEGKIPKAIIAFN

SEQ ID NO: 10439 - protein, 457 aa, Caenorhabditis elegans
MAASRFCDNLTVSSKILGEQLNFRNGKTAQNRFLKAALTERVSTYDPENPKKHGLPTNFILNLYDKWGHGKFGTILTGNVLVDPTNLESAGNAIIFKEGDGEERRALFTQWAKNMKQDGALAVVQLSHGGRQTPITVEPNPWSASDVKLSGERRFTAFGQPVPLSTEQIKTQIIDRFVYAAKFAYETGFDGVELHGAHGYLLAQFTSPTTNKRTDQYGGSIENRQRIILEIYDAIRAEIPESTGFMVGIKTNSVEFQEQGTTVDDAKVMCQVYEDKGFDFVELSGGTYEKLAFHHMRDSTRNREAFFLEFAEKIRPVFKKTVVYLTGGFRTVKAMVEAIENGATQGIGLGRPITAEPDLPKKIIEGLVASSIKNALDENDFGITNLASNTQMQQMGRTTYQQTNQTPTYGISDFSNEETVNRYKEALKDYTVFMKSMASQNKPIHGVLVFEGIKQEA

SEQ ID NO: 10440 - protein, 451 aa, Caenorhabditis elegans
MSLRRFPHAEIVSPDVLGEHLKFRNGRETNNRFLKAALTEIQSSYYPDEPKRHGLPTDAILNIYDKWGNGSFGMILTSNVLVDPTNLEAAGNAIIFKEGDCHERRALFTYWAKLMKQDGALAVMQISHAGRQTPVFVNPTPWSASDVQLVSAARFTTYGKPKPLSTEQVETEVVDRFVYAAKFAYECGFDGIQLHGAHGYLLSQFTSPTTNKRVDKYGGSLENRQRIVIEIYDAIRAEIPASTGFLIGIKTNSVEFQSEGLTLEDAKTMCQVYESKGFDFVELSGGTYEQLNWTWERESTKKREAFFVEFAEQIRPVFNKTVVYLTGGFRTVSAMINAISCNATQGIGLGRPITAEPDLPKKILKGRVISAVQDSFNPNDIATTALASGTQMDQMGRTSLEKASGNIMHLITDFSDGLTVQKFCEALGHHVEQAALDISEGKIPKAIIAFN

SEQ ID NO: 10441 - protein, 449 aa, Caenorhabditis elegans
MKRFPHAATVSSKVLGGKLNFPNGITAQNRFMKAAMTERLATYSLDDFKNHGLPTEQILNIYDKWGHGQFGMIITGNVCVDPINLEAAGNAIIFKEGESSKRRNLFSQWAQKIKQDGSLAIMQLSHAGRQASVFVNPTPYGVSDIELKTDPPGSMYGKPIALTTDQIKTEVVDRFVYAAKFAYECGFDGVQLHGAHGYLLTQFTSPTTNNRNDKYGGSIENRNRVIIEIYDEIRKEIPETSGFLIGIKTNSKEFQDKGTTVEDAKQMCIEYEKRGFDFVELTGGTAEKFVFAHQRESTVIREAFFVEFAETIRPVFKNTVVYLTGGFRTTGAMVDAITRNTTQGIGLGRPATAEPDLPKKLLNGDVPSAVKDEFNPNDMIKQIMASGSQIEQMARNSVEGAGGNVMDQITDYSDEKMVALFTEKAAQLFVDAAKDALAGKIPKNIVIMN

SEQ ID NO: 10442 - protein, 472 aa, Caenorhabditis elegans
MSPQRFPTSTTSASSTILGDRLKFRNGPEAQNRFLKAALTEIQSTYAPNEPKKHGLPTDTILNIYDKWGNGKYGVILTSNVLVDPTNLESAGNAIIFKEGESHERRALYTYWAQLMKQDGALAVMQLSHAGRQTPELVNPSPWSASDVQLVSSARFITYGKPIPLPTELVKTEVVDRFVYAAKYAYECGFDGIQLHGAHGYLFSQFTSPTTNKRTDKYGGSLENRQRIVLEIYDAIRAEIPASTGFLVGIKTNSVEFQNEGLTLEDAKLMCKVYEERGFDFVELSGGTFEKIAFVHERESTRRREAFFVEFAEQKILNFSKLSKLFLSFNMFLELFKVLQIRPVFNKTVVYLTGGFRTAPAMIDAIKSNATQGIGLGRPITAEPDLPKKILEGDVTSAIQDHLPDLQAALRWSRWAEQAWRKLVGSKLLGLIYYFSQDETVARFGETVVQHLQKAALDTSKGRRPNQVVTFN

SEQ ID NO: 10443 - protein, 369 aa, Yersinia pestis
MDKLFTPFKVGDTELVNRVVMAPMTRSRATVGDTADELTAKYYQQRASAGLIITEGSQISVQGQGYLFTPGIYNDAQVKGWERVTNAVHNAGGKIYIQLWHVGRISHTGLQNDGQAPVSSVAVKAKNSTCYARDENGQPGLVPVSEPRALSVSEIKDVVQDYVQAAENAIRAGFDGVEIHAANGYLLEQFINGGLNTRQDEYGGADPENRLRFVLEVTDAISQAIGAGKTGIRLAPFGRLFDMHPFEGEEETWLLLAKELSTRSLSYVHLSDQQTLGEQAIPAGFIEKFRAAYDGPLIIAGGFDKQRAEQYLQQGKADLIGFGRPYIANPDLVERMVNDWPLNQVDRATMYGGDEKGYTDYPVWSDTQA

SEQ ID NO: 10444 - protein, 370 aa, Nostoc punctiforme
MTTEINLFSSYQLGNLELPNRIVMAPLTRNRASKGNVPYELNATYYAQRASAGLIISEATQVTPEGQGYPATPGIHSPEQVEGWKLITDAVHQQGGRIFLQLWHVGRISHPDLQPNGALPVAPSAIAPKGEAATYEGPKPFVTPRALETSEIPQIVEQYRQGAANALAAGFDGVEIHSANGYLIDQFLRDRTNQRTDKYGGSIENRTRFLLEVTEAVTSVWDSNRVGVRLSPSGTFNDIGDSNPLETFGYAAQALNQFNLAYLHIYEATEADIRHGGIIVPTSHIRDRFTGTLIVNGGYTREKGDAVLANKAADLVAFGTLFISNPDLPRRLALNAPLNEANQATFYGGGEQGYTDYPFWSAANEAVAKA

SEQ ID NO: 10445 - protein, 324 aa, Nostoc punctiforme
MVEYYTQRASAGLIITEGTHPSPMGRGYTTCPGLHNQEQVGGWRKVTDAVHAAGGRIFVQLMHAGRVSHSSLLPNHARPIAPSAVPVVSEEVHVWDGKVPFEIPRPLELSEIPEIVEEFRRAAELSIEAGFDGVELHAATGYLPNQFQVSGSNQRTDAYGGTLENRTRFTLEVVNALCKVRGAEQIGVKIAPGFTVNDTFDDNPAETYTYVAKALSPLGLAYLHVGYNQGYARGTAPNFNPIDLLRTVYQGTLLAVGGFDRQQGDEAITSRRADAIVFGRPFISNPDLVERLRLNAPLSKGDIRTFYGGSEHGYTDYPTLPQLH

SEQ ID NO: 10446 - protein, 367 aa, Vibrio cholerae
MSRLFEPTDLKQLTLQNRVVMAPMTRARSSQPGNIPNPMMATYYQQRASAGLIISEATQISDDAQGYSFTPGVYTDEQTSGWKTVTQAVKQQGAAMFCQLWHVGRVSHPVFQKGQLPIAPSALKPVETQVWIADEQGNGQMVDCVEPRAMTQADIDRVVNDFAQAAKCAIEAGFDGVEIHGGNGYLIDQFLRTNSNHRTDSYGGSRENRMRFLLEVVDAVSQAIGASRVGVRLAPFITFKDMDCPDIVPTILEASKQLQARDIAYLHLSEADWDDAPTIPESFRIELRKHFTNAIIVAGRYTLERAEEVLQKGYADLVAFGRPFVANPDLVSRLKHQQPLAQLDGKTLFGGGEQGYTDYPKIPEQPI

SEQ ID NO: 10447 - protein, 347 aa, Vibrio cholerae
MTDILFQPYALNDVITLNNRIAMAPLTRCMADDDLVPTDAMVAYYARRADAGLIISEATIIRPDAQGYPNTPGLFTQAQIAGWKKVTDAVHANGGKIFAQLWHTGRVAHPAFFAGEYVLAPSALGVEGSVPRRRELQYTVPKAASQAEIKQLVADYAQAAENARLAGFDGVEIHGANGYLIDQFLHFDSNQRSDEYGETPANMARFALEVVDAVIARIGAERTALRVSPGAYFNIKADPRDREVFDYLLPELEKRNLAYLHEGMFDDSVTFDFLGGRVSTYLRQHYSKTLMGVGGFSAETGATAIENNEFDLLAIGRPFIANPDYIARVQKGEELKAYQDSMLTELY

SEQ ID NO: 10448 - protein, 736 aa, Hyphomicrobium sp. X
MARDPRFDILFTPLKLGSKTIRNRFYQVPHCNGAGTNSPGMNMAHRGIKAEGGWGAVNTEQCSIHPECDDTLRITARIWDQGDMRNLRAMVDHVHSHGSLAGCELFYGGPHAPAIESRTISRGPSQYNSEFATVPGCPGFTYNHEADIDELERLQQQYVDAALRARDTGFDLVNVYGAHAYGPMQWLNPYYNRRTDKYGGSFDNRARFWIETLEKIRRAVNDDVALVTRCATDTLYGTKGVELTEDGLRFIELASPYLDLWDVNIGDIAEWGEDAGPSRFYPIAHENDWIRHIKQATNKPVVGVGRYYDPEKMLQVIKAGIIDIIGAARPSIADPWLPRKIDEGRVDDIRTCIGCNVCISRWEMGGVPFICTQNATAGEEYRRGWHPEKFEPKKSDHDVLIVGAGPAGSECARVLMERGYTVHLVDTREKTGGYVNDVATLPGLGEWSFHRDYRQTQLEKLLKKNPECQIALKQKPMTADDILQYGASRVVIATGAKWSTTGVNHRTHEPIPGADASLPHVLTPEQVYEGKKAVGKRVMIINYDAYYTAPSLAEKFARAGHDVTVATVCGLGAYMEYTLEGANMQRLIHELGIKVLGETGCSRVEQGRVELFNIWGEGYKRSYKGAGQLPRNENTSHEWHECDTVILVTSRRSEDTLYRELKARKGEWEANGITNVFVIGDAESPRIIADATFDGHRLAREIEDADPQHQKPYKREQRAWGTAYNPDENPDLVWRV

SEQ ID NO: 10449 - protein, 365 aa, Escherichia coli K12
MSSEKLYSPLKVGAITAANRIFMAPLTRLRSIEPGDIPTPLMAEYYRQRASAGLIISEATQISAQAKGYAGAPGIHSPEQIAAWKKITAGVHAENGHMAVQLWHTGRISHASLQPGGQAPVAPSALSAGTRTSLRDENGQAIRVETSMPRALELEEIPGIVNDFRQAIANAREAGFDLVELHSAHGYLLHQFLSPSSNHRTDQYGGSVENRARLVLEVVDAGIEEWGADRIGIRVSPIGTFQNTDNGPNEEADALYLIEQLGKRGIAYLHMSEPDWAGGEPYTDAFREKVRARFHGPIIGAGAYTVEKAETLIGKGLIDAVAFGRDWIANPDLVARLQRKAELNPQRAESFYGGGAEGYTDYPTL

SEQ ID NO: 10450 - protein, 365 aa, Salmonella enterica subsp. enterica serovar Typhi
MSSAKLFTPLKVGAITATNRVFMAPLTRLRSIEPGDIPTPLMAEYYRQRASAGLIISEATQISAQAKGYAGAPGLHSDEQIAAWKKITQGVHAQGGHMAVQLWHTGRISHASLQPGGQAPVAPSAINAGTRTSLRDENGQAIRVETSTPRALDTHEIPGIVNDFRQAIANAREAGFDLVELHSAHGYLLHQFLSPSSNHRTDRYGGSVENRARLVLEVVDAGIKEWGADRIGIRLSPVGTFQNVDNGPNEEADALYLIEALGKRGIAYLHMSEPDWAGGEPYSDAFREKVRARFHGPIIGAGAYTPEKAEDLIEKGLIDAVAFGRDYIANPDLVARLQRKAELNPQRPESFYGGGAEGYTDYPTL

SEQ ID NO: 10451 - protein, 403 aa, Nitrosomonas europaea
MTKGVWCMYGWRQPRNCRKQRLTHLRLLSIGNTVSFTIVFCSPIWGFIHMLFNPLQVGSLTLPNRILLAPLTRARADAGHMPNALMAEYYSQRATGGLLISECTMVAPGTSAFVNEPGIYNDAQIAAWRQVTDAVHAKGGRIFMQIWHAGRAAYPGAADGAPIVSSSATAIEGEIHTPQGKVPHAVPRPLTVDEIPGIVAAFAQGARNAIAAGFDGVEVHGANGYLIDQFLRDTPNQRTDAYGGSLENRARLLFEVLTAVTQAIGSERVGLRLSPLNSFNSMKDSDPLALIGFLADRLNAFKLAYLHVMRADFFGVQKADVMPVAREKYKGVLVGNMGYSADEAEAAIAEGRLDAVAFGTAFLANPDLPARIRAKAPLNAPDSNTFYAGGAKGYTDYPTLQLA

SEQ ID NO: 10452 - protein, 547 aa, Ferroplasma acidarmanus
MNPFEKANIGGAEIKNRFVMAPMISNLCNPDGTTNENHIRYLEERARGGFGLIITEYAYVDDSNGKGSPNEMGIFSRSQLPKLSRLTERIHSAGSKIFVQLVHSGGKANPHYNTGKIFAPSSVDYIGSIPEEMTKDDIKKVEEKFVNAAELAYRAGFDGIELHGAHGYLLQEFISPALNKRTDEYGGSVENRIRILNEISSAIKSKLNMPLGIRLSLYEDDEGGYDADYGIDVASRLENMDYVHFSSGRFAPPGSSASFYYDNVHIGAKLKKKLDKNTMLVGSIRSMEDIEKALTVSDFVVLGRQALADPYTPVKIKMKMPYRVCIRCNQACRNLANAEVRCTINPYTGIEGTVHPGRKYHGEIAIVGSGIKGLEAALYSANKGFKPIIYEESSFGGQFNEIIDKYKKRDFTPLIEYYRSMLEKYGIEIRQESSNTGIFCLPDKVYPDILDVGDVSIDTNIYRYFDDALRIAEKNKVIMSNNSLNSLERSRVTGYRRLAEKAGIEFKDMDHYDFKLYDSSQYDILEAMKSGRRVIENYILENETEFL

SEQ ID NO: 10453 - protein, 362 aa, Cytophaga hutchinsonii
MKTSNLFEPLKIGSISLKNSIVMAPMTRCRAIGNIPNDLMATYYGQRATAGLIITEGASPSPNGLGYARIPGIFNKEQVEGWKKITTAVHDKGGKIVIQLMHTGRISHPANMPEGASILSASSVKPGGQMWTDSLQMQDYPIPKTMTVEEILQTKEEFVTAAKNAIEAGFDGVELHGANGYLLEQFISPHTNMRGDEYGGGIDRRCKFVLDVVEAVAAAIGKDKTGIRLSPYGVASDMPPYPDIEVTYEYLALALNDLGIDYIHVVDHSAIGAPAVPLSIKEKIRAGFSNTIILCGGFDQAAAERAIDTGLTNAVAFGRPFINNPDLVERLKNNQPLSDKLNTDAFYSADEKGYTDYPVFGG

SEQ ID NO: 10454 - protein, 365 aa, Salmonella typhimurium LT2
MSSAKLFTPLKVGAITATNRVFMAPLTRLRSIEPGDIPTPLMAEYYRQRASAGLIISEATQISAQAKGYAGAPGLHSDEQIAAWKKITQGVHAQGGHMAVQLWHTGRISHASLQPGGQAPVAPSAINAGTRTSLRDENGQAIRVETSTPRALDTHEIPGIVNDFRQAIANAREAGFDLVELHSAHGYLLHQFLSPSSNHRTDRYGGGVENRARLVLEVVDAGIKEWGADRIGIRLSPVGTFQNVDNGPNEEADALYLIEALGKRGIAYLHMSEPDWAGGEPYSDAFREKVRARFHGPIIGAGAYTPEKAEDLIEKGLIDAVAFGRDYIANPDLVARLQRKAELNPQRPESFYGGGAEGYTDYPTL

SEQ ID NO: 10455 - protein, 664 aa, Clostridium acetobutylicum
MNKYKKLFEPIKIGKCEIKNRFALAPMGPLGLADSEGGFNQRGIDYYTERAKGGTGLIITGVTFVDNEVEEHGMPNCPCPTHNPVQFVRTGREMTERIHAYNSKVFLQMSGGFGRVTIPTNLGEFPPVAPSPIQHRWLDKTCRELTVDEIKSIVKKFGEGAFNAKRAGFDGVQIHAVHEGYLIDQFAISLFNHRTDEYGGSLENRLRFAREIVEEIKNRCGEDFPVTLRYSPKSFIKDLRDGALPGEEFVEKGRDLDEGVEAAKLLVSYGYDALDTDVGSYDSWWWSHPPMYQEKGLYRKYAKLMKDTVDVPVICAGRMDDPDMALEAVENGTCDVISLGRPLLADPDYVNKLRSNKCKSIRPCISCQEGCMGRVQHYSMLNCAVNPQACKERANSLTPIIKSKKVLIVGGGVAGCEAARVLALRGHEPVLYEKSNRLGGNLIPGGAPSFKEDDIALADWYTNTLKELNVEVNLNSEVTKEQILNSKFDTVIVATGSTPKVFPLGDDEKVFTAAEVLLGQKDPGETTVVVGGGLVGCELALDLAKKGKKVTIVEALNKILALNGPLCSANSEMLQKLIPFNGIDVKANSKVKGYKNGLLKMETENGIEELPCDSVILSVGYKEENSLYKELEFEIPEIYLLGDARKVSNIMYGIWDAFEVANHI

SEQ ID NO: 10456 - protein, 380 aa, Escherichia coli O157:H7 EDL933
MTNKHPSLFSPFMLTEKIKLRNRIVMAPMTTWSANPDGTISEQELEFYKRRSQNVGLVITGCTYVTPSGIGFTHEFAAYDDRFINSLEKLAAAAKSGGAPAILQIFHAGNKAIPELVPNNDVISASASSVKSGDFMKRVVQSREMTENEIQETIRAFGDVTKRAIKAGFDGIELHGAHGFLLQNFFSPLFNQRNDRWGGDLEGRMRFPLAVLQEVKNVVYEYATKPFAIGYRISPEESATGGLRIEDTYKLLDRLISSGISYIHTSLVSINDSYPVESPNGPRTIELILNHIAGRVPVIAAGKIRTPSQAQEAISTGLPLVAIGKGLVINPEWVTLAESGRGHEIQTTLNPQLVPELTIPDKLWDQIQASKGTGWFPLMD

SEQ ID NO: 10457 - protein, 399 aa, Streptococcus pyogenes M1 GAS
MKERFSPLFEPLTLPNGSQLDNRFVLSPMVTNSSTKDGYVTQDDVSYALRRAASAPLQITGAAYVDPYGQLFEYGFSVTKDADISGLKELAQAMKAKGAKAVLQLTHAGRFASHALTKYGFVYGPSYMQLRSPQPHEVKPLTGQQIEELIAAYAQATRRAIQAGFDGVEVSSAQRLLIQTFFSTFSNKRTDSYGCQTLFNRSKLTLAVLQAVQQVIKQEAPDGFIFGFRATPEETRGNDIGYSIDEFLQLMDWVLNVAKLDYLAIASWGRHVFRNTVRSPGPYYGRRVNQVVRDYLRNKLPVMATGGMNTPDKAIEALAHADFIGVSTPFVVDPEFAHKIKEGCEESIHLRIRPADLKSLAIPQASFKDIVPLMDYGESLPKESRTLFRSLTHNYKEIK

SEQ ID NO: 10458 - protein, 399 aa, Streptococcus pyogenes MGAS8232
MKERFSPLFEPLTLPNGSQLDNRFVLSPMVTNSSTKDGYVTQDDVSYALRRAASAPLQITGAAYVDPYGQLFEYGFSVTKDADISGLKELAQAMKAKGAKAVLQLTHAGRFASYALTKYGFVYGPSYMQLRSPQPHEVKPLTGQQIEELIAAYAQATRRAIQAGFDGVEVSSAQRLLIQTFFSTFSNKRTDSYGCQTLFNRSKLTLAVLQAVQQVIKQEAPDGFIFGFRATPEETRGNDIGYSIDEFLQLMDWVLNIAKLDYLAIASWGRHVFRNTVRSPGPYYGRRVNQVVRDYLRNKLPVMATGGMNTPDKAIEALAHADFIGVSTPFVVDPEFAHKIKEGCEESIHLRIRPADLKSLAIPQASFKDIVPLMDYGESLPKESRTLFRSLTHNYKEIK

SEQ ID NO: 10459 - protein, 669 aa, Leptospira interrogans serovar lai str. 56601
MKYSEIFQPIQIGSIVLPNRVIMGSMHLGLEGMPMTADRMIAFYGRRFDGGASFITTGGIAVNHEGRGSNIFFNFQREEDCKELSVVANSLKSKGIFCAQLFHAGRYAYHRELVAPSALRAPINRYVPKALSEEEAWKTVEDFGDSALKAKEVGFGAVEVMGSEGYLVNQFFSPVTNHREDFFGGSSEKRMNFAIEVMKNIRKKVGKDFPVVYRMSGIDLIPGNPTFEEVILLAEKLKEAGADALNIGIGWHESRIPTISMLVPRGAWAKISGKIKAKVKDIPIIASNRVNMPETMSRILKDQEADILSMARPFLADPDILNKIKANQEERINTCIACNQACLDHTFKEQMVSCLVNPSANRELELSKLKKADKKHVVVVGSGPGGLESARISAIRGHKVTVLEATDKIGGQLNLAAQIPGKSEFLETIRYFKNELKNLGVEIHFGYQATLDSILVLKPDAVIFATGVKPREFTLPGIEKKKTASYADYLSGKFQPGNKVVVIGGGGIGCDVAHKLTEEDSSTIDSYFHRYNVTSYTNAQIQKEKPNRKVSIFRRSGKIGSGLGATTAWALLQELESKEVGFYTSLSYKEVTDQGLVIETKKDGAQTIECDSIILCAGQLSEVSLYEEFKSKVPEIPSYLIGGAKDASGIDAKRAMLEGFEAAIEIGVN

SEQ ID NO: 10460 - protein, 329 aa, Escherichia coli CFT073
  unsure (1)..(329): unsure at all Xaa locations
MTNKHPSLFSPFMLTEKIKLRNRIVMAPMTTWSANPDGTISEQELEFYKRRSQNVGLVITGCTYVTPSGIGFTHEFAAYDDRFINSLEKLAAAAKSGGAPAILQIFHAGNKAIPELVPNNDVISASASSVKSGDFMKRVVQSREMTENEIQETIRAFGDVTKRAIKAGFDGVELHGAHGFLLQNFFSPLFNQRNDRWGGDLEGRMRFPLAVLQEVKNVVYEYATKPFAIGYRISPEESVTGGLRIEDTYKLLDRLISSGISYIHTSLVSIXIATLLXLPNGPRTIELILNHIAGRXTGNRRXKIHTPXQAQEAIXRWXATCCDPXKXWR

SEQ ID NO: 10461 - protein, 391 aa, Arabidopsis thaliana
MTAAQGNSNETLFSSYKMGRFDLSHRVVLAPMTRCRALNGVPNAALAEYYAQRTTPGGFLISEGTMVSPGSAGFPHVPGIYSDEQVEAWKQVVEAVHAKGGFIFCQLWHVGRASHAVYQPNGGSPISSTNKPISENRWRVLLPDGSHVKYPKPRALEASEIPRVVEDYCLSALNAIRAGFDGIEIHGAHGYLIDQFLKDGINDRTDQYGGSIANRCRFLKQVVEGVVSAIGASKVGVRVSPAIDHLDATDSNPLSLGLAVVDMLNKLQDVNGLKLAYLHVTQPRYHAYGQTESGRQGSDEEEAKLMKSLRMAYKGTFMSSGGFNKELGMQAVQQGDADLVSYGRLFIANPDLVSRFKIDGELNKYNRKTFYTQDPVVGYTDYPFLAPSSRL

SEQ ID NO: 10462 - protein, 391 aa, Arabidopsis thaliana
MTAAQGNSNETLFSSYKMGRFDLSHRVVLAPMTRCRALNGVPNAALAEYYAQRTTPGGFLISEGTMVSPGSAGFPHVPGIYSDEQVEAWKQVVEAVHAKGGFIFCQLWHVGRASHAVYQPNGGSPISSTNKPISENRWRVLLPDGSHVKYPKPRALEASEIPRVVEDYCLSALNAIRAGFDGIEIHGAHGYLIDQFLKDGINDRTDQYGGSIENRCRFLKQVVEGVVSAIGASKVGVRVSPAIDHLDATDSNPLSLGLAVVDMLNKLQDVNGLKLAYLHVTQPRYHAYGQTESGRQGSDEEEAKLMKSLRMAYKGTFMSSGGFNKELGMQAVQQGDADLVSYGRLFIANPDLVSRFKIDGELNKYNRKTFYTQDPVVGYTDYPFLAPSSRL

SEQ ID NO: 10463 - protein, 391 aa, Arabidopsis thaliana
MTAAQGNSNETLFSSYKMGRFDLSHRVVLAPMTRCRALNGVPNAALAEYYAQRTTPGGFLISEGTMVSPGSAGFPHVPGIYSDEQVEAWKQVVEAVHAKGGFIFCQLWHVGRASHAVYQPNGGSPISSTNKPISENRWRVLLPDGSHVKYPKPRALEASEIPRVVEDYCLSALNAIRAGFDGIEIHGAHGYLIDQFLKDGINDRTDQYGGSIENRCRFLKQVVEGVVSAIGASKVGVRVSPAIDHLDATDSNPLSLGLAVVDMLNKLQDVNGLKLAYLHVTQPRYHAYGQTESGRQGSDEEEAKLMKSLRMAYKGTFMSSGGFNKELGMQAVQQGDADLVSYGRLFIANPDLVSRFKIDGKLNKYNRKTFYTQDPVVGYTDYPFLAPSSRL

SEQ ID NO: 10464 - protein, 391 aa, Arabidopsis thaliana
MTAAQGNSNETLFSSYKMGRFDLSHRVVLAPMTRCRALNGVPNAALAEYYAQRTTPGGFLISEGTMVSPGSAGFPHVPGIYSDEQVEAWKQVVEAVHAKGGFIFCQLWHVGRASHAVYQPNGGSPISSTNKPISENRWRVLLPDGSHVKYPKPRALEASEIPRVVEDYCLSALNAIRAGFDGIEIHGAHGYLIDQFLKDGINDRTDQYGGSIENRCRFLKQVVEGVVSAIGASKVGVRVSPAIDHLDATDSNPLSLGLAVVDMLNKLQDVNGLKLAYLHVTQPRYHAYGQTESGRQGSDEEEAKLMKSLRMAYKGTFMSSGGFNKELGMQAVQQGDADLVSYGRLFIANPDLVSRFKIDGKLNKYNRKTFYTQDPVVGYTDYPFLAPFSRL

SEQ ID NO: 10465 - protein, 391 aa, Arabidopsis thaliana
MTAAQGNSNETLFSSYKMGRFDLSHRVVLAPMTRCRALNGVPNAALAEYYAQRTTPGGFLISEGTMVSPGSAGFPHVPGIYSDEQVEAWKQVVEAVHAKGGFIFCQLWHVGRASHAVYQPNGGSPISSTNKPISENRWRVLLPDGSHVKYPKPRALEASEIPRVVEDYCLSALNAIRAGFDGIEIHGAHGYLIDQFLKDGINDRTDQYGGSIANRCRFLKQVVEGVVSAIGASKVGVRVSPAIDHLDATDSDPLSLGLAVVGMLNKLQGVNGSKLAYLHVTQPRYHAYGQTESGRQGSDEEEAKLMKSLRMAYNGTFMSSGGFNKELGMQAVQQGDADLVSYGRLFIANPDLVSRFKIDGELNKYNRKTFYTQDPVVGYTDYPFLAPFSRL

SEQ ID NO: 10466 - protein, 400 aa, Glycine max
  unsure (1)..(400): unsure at all Xaa locations
MADNATTQGSNTLFSPYKMAKFNLSHRVVLAPMTRCRALNWIPQAALAEYYAQRSTPGGFLISEGTLISPTAPGFPHVPGIYSDEQVEAWRNIVDAVHAKGSIIFCQLWHVGXRASHPVYQPGGAPPISSTSKPISXXRWRILLPDGSYGVYPEPRALSTSEIPEIVQHYRQAAINAIRAGFDGIEIHGAHGYLIDQFLKDGINDRTDEYGGSLANRCRFLMQVVQAVVSAIGAERVAVRISPAIDHLDAIDSDPLGLGLAVVERLNNLQKELGRKLTYLHVTQPRYTAYGQTESGRPGSEKEEAHLMQNLRKAYEGTFMCSGGFTRKLGMEAVAEGHADLVSYGRLFISNPDLVLRLKLNAPLTKYNRKTFYTQDPVIGYTDYPFLSKESETKEPRARL

SEQ ID NO: 10467 - protein, 398 aa, Glycine max
MADNATTQGSNTLFSPYKMAKFNLSHRVVLAPMTRCRALNWIPQAALAEYYAQRSTPGGFLISEGTLISPTAPGFPHVPGIYSDEQVEAWRNIVDAVHAKGSIIFCQLWHVGRASHPVYQPGGAPPISSTSKPISAKWKILMPDGSHGVYPEPRALTTSEISEIVHHYRQAAINAIRAGFDGIEIHGAHGYLIDQFLKDAINDRTDEYGGPLENRCRFLMEVVEAVVSAIGAERVAIRISPAIDFNDAFDSDPLGLGLAVIERLNNLQKQVGTKLAYLHVTQPRFTLLAQTESGRPGSEKEEAHLMQNLRKAYEGTFMCSGGFTRKLGMEAVAEGHADLVSYGRLFISNPDLVLRLKLNAPLTKYNRKTFYTQDPVIGYTDYPFLSKESETKEPRARL

SEQ ID NO: 10468 - protein, 396 aa, Lycopersicon esculentum
MASSAQDGNNPLFSPYKMGKFNLSHRVVLAPMTRCRALNNIPQAALGEYYEQRATAGGFLITEGTMISPTSAGFPHVPGIFTKEQVREWKKIVDVVHAKGAVIFCQLWHVGRASHEVYQPAGAAPISSTEKPISNRWRILMPDGTHGIYPKPRAIGTYEISQVVEDYRRSALNAIEAGFDGIEIHGAHGYLIDQFLKDGINDRTDEYGGSLANRCKFITQVVQAVVSAIGADRVGVRVSPAIDHLDAMDSNPLSLGLAVVERLNKIQLHSGSKLAYLHVTQPRYVAYGQTEAGRLGSEEEEARLMRTLRNAYQGTFICSGGYTRELGIEAVAQGDADLVSYGRLFISNPDLVMRIKLNAPLNKYNRKTFYTQDPVVGYTDYPFLQGNGSNGPLSRL

SEQ ID NO: 10469 - protein, 394 aa, Oryza sativa
MDRPPPDQQRQKQAPLFSPYQMPRFRLNHRVVLAPMTRCRAIGGVPGPALAEYYAQRTTQGGLLISEGTVVSPAGPGFPHVPGIYNQEQTDAWKKVVDAVHAKGGIFFCQLWHVGRASHQVYQPNGAAPISSTDKPISARWRILMPDGSYGKYPKPRRLAASEIPEIVEQYRQAAINAIEAGFDGIEIHGAHGYIIDQFLKDGINDRTDEYGGSLSNRCRFLLEVTRAVVSAIGADRVAVRISPAIDHLDAYDSDPIKLGMAVVERLNALQQQSGRLAYLHVTQPRYTAYGQTESGQHGSAEEESRLMRTLRGTYQGTFMCSGGYTRELGLEAVESGDADLVSYGRLFISNPDLVERFRLNAGLNKYVRKTFYTPDPVVGYTDYPFLGQPKSRM

SEQ ID NO: 10470 - protein, 410 aa, Triticum aestivum
  unsure (1)..(410): unsure at all Xaa locations
MDRPAPDQRPTLFSPYQMRRFSLAHRVVLAPMTRCRAIGGLPGPALAEYYAQRATQGGLLISEGTVVSPAGPGFPHVPGIYNQEQIDGWKKVVDAVHAKGGIFFCQLWHVGRASHQVYQPDGAAPISSTDKPISARWKILLPDGSYGTYPTPRRLATSEIPDIVEQYRQAAINAIKAGFDGIEIHGAHGYIIDQFLKDGINDRTDEYGGSLTNRCKFLLEVTRAVLSAIGAERTAVRVSPAIDHLDAYDSNPMQLGMAVVERLNALQQEAGQLAYLHVTQPRYAAYGQTESGPHGSAEEESRLMRTLRGAYRGTFMCSGGYTRELGLEAVESGDADLVSFGRRFISNPDLVERLRLNAGLNKYVRKTFYTPDPVVGYTDYPFLXQAXIAHVVCTRLVIGVGIYCEVYLEK

SEQ ID NO: 10471 - protein, 363 aa, Novosphingobium aromaticivorans
MTLPSLFRPAALPGLDLPNRLVMAPMTRRMSPGGIPGADVAAYYRRRAEGGVGLIITEGTGIADPAALAERDVPEFHGDALRGWSTVVDEVHAGGAKIFPQLWHVGSARRPDMTNTPEVPAVSPAGLFAPGQPNGEALDEARIGRIITAYGEAAAQALRMGFDGIELHFAHGYLVDQFLWEPTNGRADGWGRTPWLLAREVVAECRRQTNPDFPICMRFSQWKQQDYGARLFADPACLEAFLGPMVDAGVDMFHCSTRRFWEPEFAGSRMNLAGWTRRLSGKPVITVGSVGLDEDFLVTRVGDDPTADGARLELLEDMLATGEVDLVAVGRALIGDPQWSAKVREGRFDQIRTFTRDDLARLD

SEQ ID NO: 10472 - protein, 711 aa, Novosphingobium aromaticivorans
MSVRAYRHLLSPGRINRLELKNRIFFSPMGSNLAEEDGSVGDRLRTYYVARAKGGAALVTMGSVSVGFPEGASNWRQEAISDDRFVPGLKRLADEVHEHGAKLCVQLHHGGLVAMTDMLDGRPVACPNPPPAAKDSGDFVDVMLPEEQAKFFEPYAKMGEVRYNSLDASGVDHIVDLFARAAVRAKTAGIDAVELHAGHGYIFSTFLSPAYNHRTDEFGGSIENRARLLLKTIRAVRAAVGPDYPVWMRFDSQEFLMDYGITLEDAIAVARMAQEAGLDAIHVSAHGDGNYGRTYSTGHATDIRNGFVDNAAAIKAAVSIPVICPGRIEPEEADRFIAQGKLDFVTMGRKLLADPELPNKLAAGKPETVRPCVYCYTCISSIFNSSHIVCAVNPMTGFETDRQPQPASKRKVVLVVGGGPGGMAAARDLSDKGHKVVLCEATDRLGGTAQFASIAYAPNQRIVDWLRREVTARPIEVRLGTRATADLARRIGADEVIVATGARRAMPPIPGSERDFVFSGDDMRNLVLGQNLDSLASKTGLATRLAMKLGRATGLTKRIGLLRAGSKAWMPLGEHVVIIGGELVGLELAEFLAHRGRKVTVLEESARVGKGIPLVRRFRAVDDCHALGVALLTETSGFRIGDGTVTYSNAHGQERTLRADTVIVAQGATGDESLTKEMRSAGFLTHSVGDCTGVGYIEGAMRDAALAIQAI

SEQ ID NO: 10473 - protein, 452 aa, Clostridium kluyveri
FIMTSSEMTERVHAYGSKIFLQLSMGFGRSGAPGGLLTSQPVSASAVPNYWDPTVTCRELTTSEVEWIVEKFAEGAKIAHKAGFDGVEIHAVHEGYLLDQFTLSIFNRRTDKYGGDLRGRLQLPIEIVEPIKTEVGSNFPVGLRYSVKSCIKDWGQGGLAEEDYVEKARDLEEALEAPKILEAAGYDAFNADLGTPDPWYWAHPPLYQKDGLYLPYPKELKKVVKIPVMVAGKMGMPDVAEGALEDEAADMVTLGRPLLCDAYWPKKFLTGQIDRIRPCIGCHTGCMGRGFEGRPLSCTVNPAAGRERYYEVKPAAAPKKVMIVGGVAGMEAARITAMRGHKVSMYEGTKELGGQLFRLQFLISPIDDRRLLDWYRNEMKELKVKLVLDTNVTEEVVEKEKPDVVIIATGAKEIKLNLPGIEKDKVATVIEVLKGSKQVGENVLMVGGGLVA

SEQ ID NO: 10474 - protein, 435 aa, Thermotoga maritima
MKKRFKYRTLEEMRWEAITLGIDLPLSGDFDVFRDLVDLGSKTIPNRFVDQPMEGNDAQLDGTPGPLTLRRYRKLAEGGAGVIWVEAIAVSREARGNDRQLMLTEETVNSFRSFVAEIKSVSLKTKNFEPYIVAQLTHPGRFGKNRKILFHDKFLDEKYGITEDFPLMSDEELDSLKEQYLRAAKFAKTAGFDAVDIKACHRYLLSELLAAHTREGKYGGSYENRTKLLKDIVRLVRKEVEIDITVRLNLSDFIPYPYGWGSTEEGTLDFTEPGRLLKELEELGVKIINVTASTPYLKPHINRPYDEMGKYNPPEHPIVGAMRLLNLAKLAKETLSKTLVVASGFTWFRQFAPYVAAGMLKNGWCDFVGFGRMTFAYPDYPKDILTKGELDPKKVCITCNKCAELKAAGESCGCVVRDGEVYLPIYRKMEESKKS

SEQ ID NO: 10475 - protein, 380 aa, Oryza sativa
MVHAPAKVAAAAAIPLLTPYKMGQLELSHRVVLAPLTRCRSYGNVPQPHAAVYYSQRATRGGLLIAEATDISPTAQGYPETPGIYTQQQIEAWKPIVDAVHRKGALFFLQIWHVGRVSTTDFQPNGQAPISSTDKQITPDDSGMVYSKPRRLRTDEIPQIIDDFRRAARNAIEAGFDGVEIHGAHGYLLEQFMKDSANDRTDEYGGSLENRCRFAVEVIDAVVAEVGAHRVGIRLSPFVDFMDCFDSDPVALGSYMVQQLNKHPGFLYCHMVEPRMAIIEGRRKIAHGLLPFRKQFNGTFIAAGGYDREEGNKVVADGYADLVAYGRLFLANPDLPRRFELDAPLNRYDRSTFYTQDPVVGYTDYPFLEEIDEESRTTYA

SEQ ID NO: 10476 - protein, 374 aa, Oryza sativa
  unsure (1)..(374): unsure at all Xaa locations
PAKEAIPLLTPYKQAGGKIDLSHRVLLSPMTRCRSYGNVPQPHAALYYTQRATSGGLLITEATGVSDTAQGYPETPGVWTREHVEAWKPIVDAVHRKGALFICQLWHVGRVSTNDYQPNGQAPISSSDIQITPDGSGIXXYSKPRRLRVDEIPQIVDDFRLAARNAIEAGFDGVEIHGANGYLLEQFMKDSSNDRTDEYGGSLENRCRFAVEVIDAVVGEIGAHRVGIRLSPFLDFMDCVDSDPEALGSYMVEQLNKHEGFLYCHMVEPRMAIVDGRRQIQHGLLPFRKAFKGTFIAAGGYDREEGNKVIENGYTDLVSFGRLFLANPDLPKRFELDAPLNKYDRNTFYTQDPIVGYTDYPFLDEDQNNSVADA

SEQ ID NO: 10477 - protein, 379 aa, Oryza sativa
  unsure (1)..(379): unsure at all Xaa locations
MVHAPAKVAAAAAIPLLTPYKMGQLELSHRVVLAPLTRCRSYGNVPQPHAAVYYSQRATRGGLLIAEATDISPTAQGYPETPGIYTQQQIEAWKPIVDAVHRKGALFFXCQLWHVGRVSTTDFQPNGQAPISSTDKQITPDDSGMVYXXKPRRLRTDEIPQIIDDFRRAARNAIEAGFDGVEIHGAHGYLLEQFMKDSANDRTDEYGGSLENRCRFAVEVIDAVVAEVGAHRVGIRLSPFVDFMDCFDSDPVALGSYMVQQLNKHPVLYCHMVEPRMAIIEGRRKSLLPFRKQFNGTFIAAGGYDREEGNKVVADGYADLVAYGRLFLANPDLPRRFELDAPLNRYDRSTFYTQDPXXVGYTDYPFLEEIDEESTTTYA

SEQ ID NO: 10478 - protein, 775 aa, Oryza sativa
  unsure (1)..(775): unsure at all Xaa locations
MVHAPAKVAAAAAIPLLTPYKMGQLELSHRVVLAPLTRCRSYGNVPQPHAAVYYSQRATRGGLLIAEATDISPTAQGYPETPGIYTQQQIEAWKPIVDAVHRKGALFFLQIWHVGRVSTTDFQPNGQAPISSTDKQITPDDSGMVYSKPRRLRTDEIPQIIDDFRRAARNAIEAGFDGVEIHGAHGYLLEQFMKDSANDRTDEYGGSLENRCRFAVEVIDAVVAEVGAHRVGIRLSPFVDFMDCFDSDPVALGSYMVQQLNKHPGFLYCHMVEPRMAIIEGRRKIAHGLLPFRKQFNGTFIAAGGYDREEGNKVVADGYADLVAYGRLFLANPDLPRRFELDAPLNSCTTSWMHNELTTFNTSMCPYLRCDKGINTAFVTFVRLCLVHAKIESLVEIETAKMVHAPAKEAIPLLTPYKMGQLELSHRVVLAPLTRCRSYGHVPQPHAAVYYSQRATNGGLLIAEATVISPTAQGYPDTPGIYTQQQIEAWKPIVDAVHRKGALFFLQIWHVGRVSTTDFQPNGQAPISSTDKQITPDDSGMVYXXKPRRLRTDEIPQIVDDFRRAARNAIESGFDGVEIHGAHGYLLDQFMKDSANDRTDEYGGNLENRCRFAVEVIDAVVAEVGAHRVGIRLSPFDNYMDCFDSNPVALGSYMVQQLNKHPVLYCHMVEPGMAIVEGRRKSLLPFRKQFNGTFIAAGGYDREEGNKVVADGYADLVAYGRLFLANPDLPRRFELDAPLNRYDRSTFYTQDPXXVGYTDYPFLEEIDEESTTTYA

SEQ ID NO: 10479 - protein, 400 aa, Oryza sativa
  unsure (1)..(400): unsure at all Xaa locations
XANDDHQAIPLLTPYKQAGRPGSKLDLSHRVLLAPMTRCRSYGNVPQPHAALYYTQRATRGGLLITEATGVSATAQGYPETPGVRTREHVEAWKPIVDAVHRKGALFICQLWHVGRVSNNGFQPDGLAPISSTDKAITPDGYGXXVYSKPRRLRTDEIPQIVDDFRLAARNAVEAGFDGVEIHGANGYLLEQFMKDSSNDRTDEYGGSLENRCRFAVEVIDAVVGEIGAHSVGIRLSPFLDYMDCVDSDPEALGSYMVEQLNKHEVLYCHMVEPRMAIVDGRRQIQHGLLPFRKQFNGTFIAAGGYDREEGNKAVADGYADLVAYGRLFLANPDLPKRFELDAPMNNYDRNTFYTQDPVVGYTDYPFLDEHHHDDQCLTICFIQFFCENMKMFMLCLENI

SEQ ID NO: 10480 - protein, 388 aa, Oryza sativa
  unsure (1)..(388): unsure at all Xaa locations
ASSRGHTSVEMAREAEKDAAAAAEIPLLTPYKMGRFELSHRVVLAPLTRNRSYGNVPRPHAVLYYTQRATSGGLLVTEATGVSDTAQGYPDTPGIWTQQQVEAWKPIVDAVHRKGALFICQLWHVGRVSTNEYQPDGQAPISSTDRQITPDDSGIVYSKPRRLRTEEIPQIIDDFRRAARNAIEAGFDGVEIHGAHGYLLEQFMKDSANDRSDEYGGSLENRCXRFVVEVIDAIVAEVGAHRVGIRLSPFIDYMDCVDSDPVALGSYMVQQLNKHPVLYCHMVEPRMAIVEGPPMASCPFRKLFNGTFIAAGGYDREEGNKVIADGYADLVAYGRHFLANPDLPKRFAINAPLNKYNRSTFYIQDPXXVGYTDYPFLDEKDEGAATYA

SEQ ID NO: 10481 - protein, 404 aa, Triticum aestivum
  unsure (1)..(404): unsure at all Xaa locations
EPPAHRNRAQRKVYRSFCNLRSIQFTARKMVAKEAIPLLTPHRMGRFELSHRVVLAPLTRCRSYANVPQPHAALYYSQRATEGGLLIAEATGVSATAQGYPETPGIWTQQHVDAWKPIVDAVHRKGALFFCQIWHVGRVSTNDFQPDGQAPISSTDQQITPDAESGMVYSKPRQLQTDEIPLIVDDFRRAARNAIEAGFDGVEIHGAHGYLLEQFMKDSSNDRTDEYGGSLENRCRFAVEVIDAIVHEIGADRVGIRLSPFVDYMDCFDSDPHALGMYMVQQLNKHQGFVYCHMVEPRMAIVDGRRQIPHGLLPFRKAFNGTFIAAGGYDREEGNKVVADGYADLVAYGRIFLANPDLPKRFELDSPLNKYDRNTFYTQDPVIGYTDYPFLEGGSNAEXFTHST

SEQ ID NO: 10482 - protein, 414 aa, Triticum aestivum
  unsure (1)..(414): unsure at all Xaa locations
QPQTYRNRAQKQETEQDFYRFLCNLRSIQFTASKMVAKEAIPLLTPHRMGRFELSHRVVLAPLTRCRSYANVPQPHAAAYYSQRATKGGLLIAEATGVSATAQGYPETPGIWTQQQVDAWKPIVDAVHRKGALFFCQIWHVGRVSTNDFQPDGQAXPISSTDKQITPDAESGMVYSKPRQLQTDEIPLIVDDFXRRAARNAVEAGXFDGVEIHGAHGYLWXEQFMKDSSYDRTDEXTGGSLENRCRFAVEVIDAIVHEIGADRVGIRLSPFVDYMDCFDSDPHALGMYMVQQLNKHQGFVYCHMVEPRMAIVDGRRQIPHGLLPFRKAFNGTFIAAGGYDREEGNKVVADGYADLVAYGRIFLANPDLPKRFELDSPLNKYDRNTFYTQDPVIGYTDYPFLEGGSNAEXFTHST

SEQ ID NO: 10483 - protein, 365 aa, Novosphingobium aromaticivorans
MSLSSSPSSSLFEPLTFAHGPAWRNRLMLAPLTNQQSHPDGRLSDEELRWLEMRGQGGFGMVMTAAAHVQAIGQGFPGQLGVFSDDHVPALSRLADALRRSGAVSAIQLHHAGSRSPAALVGTPVSPSASDNGARALTLQEVERLRDDFIAAAHRADRAGFDGVEVHGAHGYVLAEFLSPTINRREDRYGGSAENRARIVFEVIEGIRATCRPDFQIGLRLSPERFGQDLGEILAVAARAMGEARIDYLDMSLWDVFKHPEDETRRERTLLEWFADLPRGKVRLGVAGKIMGGRDAAHVLEQGCDFAVIGRAAILRHDFPERVRQDGDYVSPALPVTARHLADEGLSKPFLDYMRTWKGFVTEDA

SEQ ID NO: 10484 - protein, 488 aa, Psidium guajava
MARVVMSNMSPAMSSTYPPSLSPPSSPRPTTLPVRTIPGSYGWPLLGPISDRLDYFWFQGPETFFRKRIEKYKSTVFRANVPPCFPFFSNVNPNVVVVLDCESFAHLFDMEIVEKSNVLVGDFMPSVKYTGNIRVCAYLDTSEPQHAQVKNFAMDILKRSSKVWESEVISNLDTMWDTIESSLAKDGNASVIFPLQKFLFNFLSKSIIGADPAASPQVAKSGYAMLDRWLALQLLPTINIGVLQPLVEIFLHSWAYPFALVSGDYNKLYQFIEKEGREAVERAKAEFGLTHQEAIHNLLFILGFNAFGGFSIFLPTLLSNILSDTTGLQDRLRKEVRAKGGPALSFASVKEMELVKSVVYETLRLNPPVPFQYARARKDFQLKSHDSVFDVKKGELLCGYQKVVMTDPKVFDEPESFNSDRFVQNSELLDYLYWSNGPQTGTPTESNKQCAAKDYVTLTACLFVAYMFRRYNSVTGSSSSITAVEKAN

SEQ ID NO: 10485 - protein, 499 aa, Citrus sinensis
MNASMMMINSMSVSPDMPSSSPFQSQSLSTPTSSPPSTSLPLRTIPGSYGWPLLGPISDRLDYFWFQGPETFFRKRIEKHKSTVFRTNIPPTWPLFLNVNPNVIAVLDCKSFAHLFDMEIVEKKNILVGDFMPSVKFTGGLRVSAYLDTSEPKHAQLKGFAMDTLKRSSKLWVSEVVSSLDTLFDTVEKELSEKNSISYMVPLQKCVFNFLSKSIVGADPKADAEIAENGFSMLDKWLALQILPTVSINILQPLEEIFLHSFAYPFALVSGDYNKLHNFVEKEGKEVVQRGQDEFGLTKEEAIHNLLFILGFNAFGGFSILLPKLINAIASDTTGLQAKLRSEVKEKCGTSALTFESVKSLELVQSVVYETLRLNPPVPLQFARARKDFQLSSYDSVYDIKKGELLCGYQPLVMRDSKVFDDAESFKAERFMGEKGSELLSYLYWSNGPQTGTPNDMNKQCAGKDYVTLVACLTVAYVFQRYESITGNSSSITAVEKAK

SEQ ID NO: 10486 - protein, 492 aa, Arabidopsis thaliana
MLLRTMAATSPRPPPSTSLTSQQPPSPPSQLPLRTMPGSYGWPLVGPLSDRLDYFWFQGPDKFFRTRAEKYKSTVFRTNIPPTFPFFGNVNPNIVAVLDVKSFSHLFDMDLVDKRDVLIGDFRPSLGFYGGVCVGVNLDTTEPKHAKIKGFAMETLKRSSKVWLQELRSNLNIFWGTIESEISKNGAASYIFPLQRCIFSFLCASLAGVDASVSPDIAENGWKTINTWLALQVIPTAKLGVVPQPLEEILLHTWPYPSLLIAGNYKKLYNFIDENAGDCLRLGQEEFRLTRDEAIQNLLFVLGFNAYGGFSVFLPSLIGRITGDNSGLQERIRTEVRRVCGSGSDLNFKTVNEMELVKSVVYETLRFNPPVPLQFARARKDFQISSHDAVFEVKKGELLCGYQPLVMRDANVFDEPEEFKPDRYVGETGSELLNYLYWSNGPQTGTPSASNKQCAAKDIVTLTASLLVADLFLRYDTITGDSGSIKAVVKAK

SEQ ID NO: 10487 - protein, 478 aa, Arabidopsis thaliana
NISAATITPLTASPPYNAGIVRLAVGWTIIGPFRFQGPDKFFRTRAEKYKSTVFRTNIPPTFPFFGNVNPNIVAVLDVKSFSHLFDMDLVDKRDVLIGDFRPSLGFYGGVRVGVYLDTTEPKHAKVRTYVALLLLRFAMETLKRSSKVWLQELRSNLNIFWGTIESEISKNGAASYIFPLQRCIFSFLCASLAGVDASVSPDIAENGWKTINTWLALQVIPTAKLGVVPQPLEEILLHTWPYPSLLIAGNYKKLYNFIDENAGDCLRLGQEEFGLTRDEAIQNLLFVLGFNAYGGFSVFLPSLIGRITGDNSGLQERIRTEVRRVCGSGSDLNFKTVNEMELVKSVVYETLRFSPPVPLQFARARKDFQISSHDAVFEVKKGELLCGYQPLVMRDANVFDEPEEFKPDRYVGETGSELLNYLYWSNGPQTGTPSASNKQCAAKDIVTLTASLLVADLFLRYDTITGDSGSIKAVVKAK

SEQ ID NO: 10488 - protein, 384 aa, Arabidopsis thaliana
MDLVDKRDVLIGDFRPSLGFYGGVRVGVYLDTTEPKHAKIKGFAMETLKRSSKVWLQELRSNLNIFWGTIESEISKNGAASYIFPLQRCIFSFLCASLAGVDASVSPDIAENGWKTINTWLALQVIPTAKLGVVPQPLEEILLHTWPYPSLLIAGNYKKLYNFIDENAGDCLRLGQEEFGLTRDEAIQNLLFVLGFNAYGGFSVFLPSLIGRITGDNSGLQERIRTEVRRVCGSGSDLNFKTVNEMELVKSVVYETLRFSPPVPLQFARARKDFQISSHDAVFEVKKGELLCGYQPLVMRDANVFDEPEEFKPDRYVGETGSELLNYLYWSNGPQTGTPSASNKQCAAKDIVTLTASLLVADLFLRYDTITGDSGSIKAVVKAK

SEQ ID NO: 10489 - protein, 492 aa, Glycine max
  unsure (1)..(492): unsure at all Xaa locations
FGSRSNHHTTQHFPSPPPPCXLPPPSLVTAATPTELPIRQIPGSYGFPLLGPISDRLDYFWFQKPESFFRKRVEKYKSTVFRTNVPPSFPFFVNVNPNVIAVLDVKSFSHLFDMDLVDKKDVLVGDFVPSVAFTGNMRVGVYQDTTEPQHSKVKNYIMDILKRSSGIWVSELESNLDTLWDNIEASLSKSSSVSYLFPLQQFLFTFLCKVLAGADPARDPKIAESGYSMLNSWLALQLLPTVSVGILQPLEEIFLHSFAYPFFLVGGNYNNLYNFIKQQGKDTINRGARFGLTEEEAIHNLLFVLGFNSYGGFSIFLPSLIDAIASNSALQEKLKKEAREKGGSTLTFDSVKEMDLIQSVVYETLRMNPPVPLQYGRARKDFRLSSHDSVFHVKKGELLCGFQKLVMRDSVIFDEPDRFKPDRFTQEKGAQLLNYLYWSNGPQTGSPSVSNKQCAGKDVVTLTAALIVAYLFRRYDSIQGDGSSITALQKTK

SEQ ID NO: 10490 - protein, 480 aa, Medicago sativa
MSLPPPIPPPSLTTPPKARPTELPIRQIPGSYGWPLLGPLSDRLDYFWFQKPENFFRTRMDKYKSTVFRTNIPPTFPFFTNVNPNIIAVLDCKSFSHLFDMDLVDKRDVLVGDFVPSVEFTGNIRVGVYQDVSEPQHAKAKNFSMNILKQSSSIWVPELISNLDIFLDQIEATLSKSSSASYFSPLQQFLFTFLSKVLARADPSLDSKIAESGSSMLNKWLAVQLLPTVSVGTIQPLEEIFLHSFSYPYALVSGDYNNLYNFIKQHGKEVIKSGTEFGLSEDEAIHNLLFVLGFNSYGGFSIFLPKLIESIANGPTGLQEKLRKEAREKGGSTLGFDSLKELELINSVVYETLRMNPPVPLQFGRARKDFQLSSYDSAFNVKKGELLCGFQKLIMRDPVVFDEPEQFKPERFTKEKGAELLNYLYWSNGPQTGSPTVSNKQCAGKDIVTFTAALIVAHLLRRYDLIKGDGSSITALRKAK

SEQ ID NO: 10491 - protein, 480 aa, Medicago sativa
MSLPPPIPPPSLATPPKARPTELPIRQIPGSHGWPLLGPLSDRLDYFWFQKPENFFRTRMEKYKSTVFRTNVPPTFPFFTNVNPNIIAVLDCKSFSHLFDMDLVDKRDVLVGDFVPSVEFTGNIRVGVYQDVSEPQHAKAKNFSMNILKQSSSIWVPELISNLDIFLDQIEATLSNSSSASYFSPLQKFLFTFLSKVLARADPSLDPKIAESGSSMLNKWLAVQLLPTVSVGTIQPLEEIFLHSFSYPYALVSGDYKNLYNFIKQHGKEVIKNGTEFGLSEDEAIHNLLFVLGFNSYGGFSIFLPKLIESITNGPTGLQEKLRKEAREKGGSTLGFDSLKELELINSVVYETLRMNPPVPLQFGRARKDFQLSSYDSAFNVKKGELLCGFQKLVMRDPVVFDEPEQFKPERFTKEKGAELLNYLYWSNGPQTGSPTVSNKQCAGKDIVTFTAALIVAHLLRRYDLIKGDGSSITALQKAK

SEQ ID NO: 10492 - protein, 480 aa, Medicago sativa
MSLPPPIPPPSLATPPKARPTELPIRQIPGSHGWPLLGPLSDRLDYFWFQKPENFFRTRMDKYKSTVFRTNVPPTFPFFTNVNPNIIAVLDCKSFSHLFDMDLVDKRDVLVGDFVPSVEFTGNIRVGVYQDVSEPQHAKAKNFSMNILKQSSSIWVPELISNLDIFLDQIEATLSNSSSASYFSPLQKFLFTFLSKVLARADPSLDPKIAESGSSMLNKWLAVQLLPTVSVGTIQPLEEIFLHSFSYPYALVSGDYKNLYNFIKQHGKEVIKSGTEFGLSEDEAIHNLLFVLGFNSYGGFSIFLPKLIESIANGPTGLQEKLRKEAREKGGSTLGFDSLKELELINSVVYETLRMNPPVPLQFGRARKDFQLSSYDFAFNVKKGELLCGFQKLVMRDPVVFDEPEQFKPERFTKEKGAELLNYLYWSNGPQTGSPTVSNKQCAGKDIVTFTAALIVAHLLRRYDLIKGDGSSITALRKAK

SEQ ID NO: 10493 - protein, 480 aa, Capsicum annuum
MIPIMSSAPLSTATPISLPVRKIPGSYGFPLLGPLWDRLDYNWFQKLPDFFSKRVEKYNSTVFRTNVPPCFPFFLGVNPNVVAVLDVKSFAHLFDMEIVEKANVLVGDFMPSVVYTGDMRVCAYLDTSEPKHTQIKNFSLDILKRSSKTWVPTLVKELDTLFGTFESDLSKSKSASLLPALQKFLFNFFSLTFLGADPSASPEIANSGFAYLDAWLAIQLAPTVSIGVLQPLEEIFVHSFSYPYFLVRGGYEKLIKFVKSEAKEVLTRAQTDFQLTEQEAIHNLLFILGFNAFGGFTIFLPTLLGNLGDEKNAEMQEKLRKEVREKVGTNQENLSFESVKEMELVQSFVYESLRLSPPVPSQYARARKDFMLSSHDSVYEIKKGELLCGYQPLVMKDPKVFDEPEKFMLERFTKEKGKELLNYLFWSNGPQTGRPTESNKQCAAKDAVTLTASLIVAYIFQKYDSVSFSSGSLTSVKKAC

SEQ ID NO: 10494 - protein, 480 aa, Capsicum annuum [sequence omitted]

SEQ ID NO: 10495 - protein, 476 aa, Lycopersicon esculentum
MNSAPLSTPAPVTLPVRSIPGSYGLPLVGPIADRLDYFWFQKPENFFTKRMEKHKSTVFRTNVPPCFPFFGSVNPNVVAVLDVKSFSHLFDMEIVEKANVLVGDFMPSVVYTGDMRVCAYLDTSEPKHAQIKNFSQDILKRGSKTWVPTLLKELDTMFTTFEADLSKSNTASLLPALQKFLFNFFSLTILGADPSVSPEIANSGYIFLDSWLAIQLAPTVSIGVLQPLEEILVHSFAYPFFLVKGNYEKLVQFVKNEAKEVLSRAQTEFQLTEQEAIHNLLFILGFNAFGGFSIFLPTLLGNLGDEKNADMQEKLRKEVRDKVGVNPENLSFESVKEMELVQSFVYETLRLSPPVPSQYARARKDFKLSSHDSVYEIKKGELLCGYQPLVMKDPKVFDEPEKFVLERFTKEKGKELLNYLFWSNGPQTGRPTESNKQCAAKDMVTLTASLIVAYIFQKYDSVSFSSGSLTSVKKAS

SEQ ID NO: 10496 - protein, 476 aa, Lycopersicon esculentum
MNSAPLSTPAPVTLPVRSIPGSYGLPLVGPIADRLDYFWFQKPENFFTKRMEKHKSTVFRTNVPPCFPFFGSVNPNVVAVLDVKSFSHLFDMEIVEKANVLVGDFMPSVVYTGDMRVCAYLDTSEPKHAQIKNFSQDILKRGSKTWVPTLLKELDTMFTTFEADLSKSNTASLLPALQKFLFNFFSLTILGADPSVSPEIANSGYIFLDSWLAIQLAPTVSIGVLQPLEEILVHSFAYPFFLVKGNYEKLVQFVKNEAKEVLSRAQTGFQLTEQEAIHNLLFILGFNAFGGFSIFLPTLLGNLGDEKNADMQEKLRKEVRDKVGVNPENLSFESVKEMELVQSFVYETLRLSPPVPSQYARARKDFKLSSHDSVYEIKKGELLCGYQPLVMKDPKVFDEPEKFVLERFTKEKGKELLNYLFWSNGPQTGRPTESNKQCAAKDMVTLTASLIVAYIFQKYDSVSFSSGSLTSVKKAS

SEQ ID NO: 10497 - protein, 476 aa, Lycopersicon esculentum
MNSAPLSTPAPVTLPVRSIPGSYGLPLVGPIADRLDYFWFQKPENFFTKRMEKHKSTVFRTNVPPCFPFFGSVNPNVVAVLDVKSFSHLFDMEIVEKANVLVGDFMPSVVYTGDMRVCAYLDTSEPKHAQIKNFSQDILKRGSKTWVPTLLKELDTMFTTFEADLSKSNTASLLPALQKFLFNFFSLTILGADSSVSPEIANSGYIFLDSWLAIQLAPTVSIGVLQPLEEILVHSFAYPFFLVKGNYEKLVQFVKNEAKEVLSRAQTEFQLTEQEAIHNLLFILGFNAFGGFSIFLPTLLGNLGDEKNADMQEKLRKEVRDKVGVNPENLSFESVKEMELVQSFVYETLRLSPPVPSQYARARKDFKLSSHDSVYEIKKGELLCGYQPLVMKDPKVFDEPEKFVLERFTKEKGKELLNYLFWSNGPQTGRPTESNKQCAAKDMVTLTASLIVAYIFQKYDSVSFSSGSLTSVKKAS

SEQ ID NO: 10498 - protein, 479 aa, Lycopersicon esculentum
IPIMNPAPLSTPAPVTLPVRSIPGSYGLPLVGPIADRLDYFWFQKPENFFTKRMEKHKSTVFRTNVPPCFPFFGSVNPNVVAVLDVKSFSHLFDMEIVEKANVLVGDFMPSVVYTGDMRVCAYLDTSEPKHAQIKNFSQDILKRGSKTWVPTLLKELDTMFTTFEADLSKSNTASLLPALQKFLFNFFSLTILGADPSVSPEIANSGYIFLDSWLAIQLAPTVSIGVLQPLEEILVHSFAYPFFLVKGNYEKLVQFVKNEAKEVLSRAQTEFQLTEQEAIHNLWFILGFNAFGGFSIFLPTLLGNLGDEKNADMQEKLRKEVRDKVGVNPENLSFESVKEMELVQSFVYETLRLSPPVPSQYARARKDFKLSSHDSVYEIKKGELLRGYQPLVMKDPKVFDEPEKFVLERFTKEKGKELLNYLFWSNGPQTGRPTESNKQCAAKDMVTLTASLIVAYIFQKYDSVSFSSGSLTSVKKAS

SEQ ID NO: 10499 - protein, 480 aa, Solanum tuberosum
MIPIMSSAPLSTPAPVTLPVRTIPGSYGLPLLGPIADRLDYFWFQKPENFFTKRMEKHKSTVFRTNVPPCFPFVGSVNPNVVAVLDVKSFSHLFDMEIVEKANVLVGDFMPSEVYTGDMRVCAYLDTSEPKHAQIKNFSLDILKRSSKTWVPTLLKELDTMFTTFEADLSKSKEASLLPALQKFLFNFFSLTLLGADPSVSPEIANSGYIFLDSWLAIQLAPTVSIGVLQPLEEILVHSFAYPFFLVKGNYEKLVQFVKNEAKEVLNRAQTEFQLTEQEAIHNLLFILGFNAFGGFTIFLPTLLGNLGDEKNAEMQEKLRKEVRDKVGVNPENLSFESVKEMELVQSFVYETLRLTPPVPSQYARARKDFKLSSHDSVYEIKKGELLCGYRPLVMKDPKVLDEPEKFVLERFTKEKGKELLNYLFWSNGPQTGRPTESNKQCSAKEIVTLTASLIVAYIFQKYDSVSFSSGSLTSVKKAS

SEQ ID NO: 10500 - protein, 477 aa, Oryza sativa
FPQPASAAAATRPIPGSYGPPLLGPLRDRLDYFWFQGPDDFFRRRAADHKSTVFRANIPPTFPFFLGVDPRVVAVVDAAAFTALFDPALVDKRDVLIGPYVPSLAFTRGTRVGVYLDTQDPDHARTKAFSIDLLRRAARNWAAELRAAVDDMLAAVEEDLNRAPAASYLIPLQKCIFRFLCKALVGADPAADGLVDRFGVYILDVWLALQLVPTQKVGVIPQPLEELLLHSFPLPSFVVKPGYDLLYRFVEKHGAAAVSIAEKEHGISKEEAINNILFVLGFNAFGGFSVFLPFLVMEVGNGRDDLRRRLREEVRRVLGGGDGGEAGFAAVREMALVRSTVYEVLRMQPPVPLQFGRARRDFVLRSHGGAAYEVGKGELLCGYQPLAMRDPAVFDRPEEFVPERFLGDDGEALLQYVYWSNGPETGEPSPGNKQCAAKEVVVATACMLVAELFRRYDDFECDGTSFTKLDKRELTPS

SEQ ID NO: 10501 - protein, 210 aa, Triticum aestivum
  unsure (1)..(210): unsure at all Xaa locations
RVGGRVGGXAWAVFLPFLILQVGKDAALRARLRDEVRAALERHAGEVGFASVRGMPLVRSTVYEVLRMNPPVPLQFGRARRDFVLRSHGGEGFSVAAGEMLCGYQPLAMRDPAVFDRPDEFVADRFVGAEGEALLRYVYWSNGPETGEPAAGNKQCAAKEVVVATACMLVAELFRRYDDFECDGTAFTRLHKRPQPSXKSNLVLYVRLGN

SEQ ID NO: 10502 - protein, 496 aa, Nicotiana attenuata
MSTLMAKMMSGSTPTNPGSTGTSSPSLTPPPASLPVRTIPGGYGWPLLGPISDRLDYNWFQGPNTFFTKRIEKHKSTVFRTNVPPCFPFFLGVNPNVVAVLDVKSFSHLFDMEIVEKANVLVGDFMPSVKYTGDMRVCAYLDTSEPKHTQIKNFSLDILKRSSKTWVPTLVNELNSMFETFESDISKSNSASLLPTMQKFLFNFFSLSLLGANPSASPEIANSGYVMLDTWLAIQLAPTVSIGLLQPLEEIFVHSFNYPFFLVKGSYEKLIQFVKNEAKEVLNRGKSEFGLTEQEAIHNLLFILGFNAFGGFSIFLPTLLGNLGDEKNAELQEKLRNEVREKVGLKTENLSFESVKEMELVQSFVYETLRLSPPVPSQYARARKDFKLSSHDSVYEIKKGELLCGYQPLVMRDPKVFDDPEKFVLERFTKEKGKELLNYLFWSNGPQTGRPTESNKQCAAKDVVTLTASLIVAYIFQRYDSVSFSSGSLTSVKKAS

SEQ ID NO: 10503 - protein, 385 aa, Coffea arabica
MELQEVLHMNGGEGDASYAKNSSFNQLVLAKVKPVLEQCVGELLRANLPNINKCIKVADLGCASGPNTLLTVRDIVQSIDKVRQEMKNELERPTIQVFLTDLFQNDFNSVFMLLPSFYRKLEKENGRKIGSCLIAAMPGSFHGRLFPEESMHFLHSSYSLQFLSQVPSGLVTELGITANKRSIYSSKASPPPVQKAYLDQFTKDFTTFLRIRSEELLSRGRMLLTCICKGDEFDGPNTMDLLEMAINDLVVEGHLEEEKLDSFNVPIYAASVEELKCIVEEEGSFEILYLETFKLRYDAGFSIDDDCQVRSHSPEYSDEHARAAHVASLLRSVYEPILANHFGEAIIPDIFHRFATNAAKVIRLGKGFYNNLIISLAKKPEKSDI

SEQ ID NO: 10504 - protein, 385 aa, Coffea arabica
MELQEVLHMNGGEGEASYAKNSSFNQLVLAKVKPVLEQCVRELLRANLPNINKCIKVADLGCASGPNTLLTVWDTVQSIDKVKQEMKNELERPTIQVFLTDLFQNDFNSVFMLLPSFYRKLEKENGRKIGSCLIAAMPGSFHGRLFPEESMHFLHSSYSLQFLSQVPSGLVTELGITANKRSIYSSKASPPPVQKAYLDQFTKDFTTFLRMRSEELLSRGRMLLTCICKGDECDGPNTMDLLEMAINDLVAEGRLGEEKLDSFNVPIYTASVEEVKCMVEEEGSFEILYLQTFKLRYDAGFSIDDDCQVRSHSPVYSDEHARAAHVASLIRSVYEPILASHFGEAIIPDIFHRFATNAAKVIRLGKGFYNNLIISLAKKPEKSDI

SEQ ID NO: 10505 - protein, 385 aa, Coffea arabica
MELQEVLHMNGGEGEASYAKNSSFNQLVLAKVKPVLEQCVRELLRANLPNINKCIKVADLGCASGPNTLLTVWDTVQSIDKVRQEMKNELERPTIQVFLTDLFQNDFNSVFMLLPSFYRKLEKENGRKIGSCLIAAMPGSFHGRLFPEESMHFLHSSYSLQFLSQVPSGLVTELGITANKRSIYSSKASPPPVQKAYLDQFTKDFTTFLRMRSEELLSRGRMLLTCICKGDECDGPNTMDLLEMAINDLVAEGRLGEEKLDSFNVPIYTASVEEVKCMVEEEGSFEILYLQTFKLRYDAGFSIDDDCQVRSHSPVYSDEHARAAHVASLIRSVYEPILASHFGEAIIPDIFHRFATNAAKVIRLGKGFYNNLIISLAKKPEKSDI

SEQ ID NO: 10506 - protein, 385 aa, Coffea arabica
MELQEVLHMNGGEGDASYAKNSSFNQLVLAKVKPVLEQCVGELLRANLPNINKCIKVADLGCASGPNTLLTVRDIVQSIDKVRQEMKNELERPTIQVFLTDLFQNDFNSVFMLLPSFYRKLEKENGRKIGSCLIAAMPGSFHGRLFPEESMHFLHSSYSLQFLSQVPSGLVTELGITANKRSIYSSKASPPPVQKANLDQFTKDFTTFLRIRSEELLSRGRMLLTCICKGDEFDGPNTMDLLEMAINDLVVEGHLEEEKLDSFNVPIYAASVEELKCIVEEEGSFEILYLETFKLRYDAGFSIDDDCQVRSHSPEYSDEHARAAHVASLLRSVYEPILANHFGEAIIPDIFHRFATNAAKVIRLGKGFYNNLIISLAKKPEKSDI

SEQ ID NO: 10507 - protein, 384 aa, Coffea arabica
MELQEVLHMNGGEGDTSYAKNSFYNLFLIRVKPILEQCIQELLRANLPNINKCIKVADLGCASGPNTLLTVRDIVQSIDKVGQEKKNELERPTIQIFLNDLFQNDFNSVFKSLPSFYRKLEKENGCKIGSCLIGAMPGSFYGRLFPEESMHFLHSCYCLHWLSQVPSGLVTELGISANKGCIYSSKASRPPIQKAYLDQFTKDFTTFLRIHSEELISRGRMLLTWICKEDEFENPNSIDLLEMSINDLVIEGHLEEEKLDSFNVPIYAPSTEEVKCIVEEEGSFEILYLETFKVPYDAGFSIDDDYQGRSHSPVSCDEHARAAHVASVVRSIFEPIVASHFGEAILPDLSHRIAKNAAKVLRSGKGFYDSVIISLAKKPEKADM

SEQ ID NO: 10508 - protein, 384 aa, Coffea arabica
MELQEVLHMNGGEGDTSYAKNSFYNLFLIRVKPILEQCIQELLRANLPNINKCIKVADLGCASGPNTLLTVRDIVQSIDKVGQEKKNELERPTIQIFLNDLFQNDFNSVFKSLPSFYRKLEKENGRKIGSCLIGAMPGSFYGRLFPEESMHFLHSCYCLHWLSQVPSGLVTELGISANKGCIYSSKASRPPIQKAYLDQFTKDFTTFLRIHSEELISRGRMLLTWICKEDEFENPNSIDLLEMSINDLVIEGHLEEEKLDSFNVPIYAPSTEEVKCIVEEEGSFEILYLETFKVPYDAGFSIDDDYQGRSHSPVSCDEHARAAHVASVVRSIFEPIVASHFGEAIMPDLSHRIAKNAAKVLRSGKGFYDSLIISLAKKPEKSDV

SEQ ID NO: 10509 - protein, 372 aa, Coffea arabica
MELQEVLRMNGGEGDTSYAKNSAYNQLVLAKVKPVLEQCVRELLRANLPNINKCIKVADLGCASGPNTLLTVRDIVQSIDKVGQEKKNELERPTIQIFLNDLFPNDFNSVFKLLPSFYRKLEKENGRKIGSCLIGAMPGSFYSRLFPEESMHFLHSCYCLQWLSQVPSGLVTELGISTNKGSIYSSKASRLPVQKAYLDQFTKDFTTFLRIHSEELFSHGRMLLTCICKGVELDARNAIDLLEMAINDLVVEGHLEEEKLDSFNLPVYIPSAEEVKCIVEEEGSFEILYLETFKVLYDAGFSIDDEHIKAEYVASSVRAVYEPILASHFGEAIIPDIFHRFAKHAAKVLPLGKGFYNNLIISLAKKPEKSDV

SEQ ID NO: 10510 - protein, 385 aa, Coffea arabica
MELQEVLRMNGGEGDTSYAKNSAYNQLVLAKVKPVLEQCVRELLRANLPNINKCIKVADLGCASGPNTLLTVRDIVQSIDKVGQEKKNELERPTIQIFLNDLFPNDFNSVFKLLPSFYRKLEKENGRKIGSCLIGAMPGSFYSRLFPEESMHFLHSCYCLQWLSQVPSGLVTELGISTNKGSIYSSKASRLPVQKAYLDQFTKDFTTFLRIHSEELFSHGRMLLTCICKGVELDARNAIDLLEMAINDLVVEGHLEEEKLDSFNLPVYIPSAEEVKCIVEEEGSFEILYLETFKVLYDAGFSIDDDYPVRSHFQVYGDEHIKAEYVASLIRSVYEPILASHFGEAIMPDLFHRLAKHAAKVLHLGKGFYNNLIISLAKKPEKSDV

SEQ ID NO: 10511 - protein, 378 aa, Coffea arabica
MELQEVLHMNGGEGDTSYAKNSSYNLALAKVKPVLEQCIRELLRANLPNINNCIKVADLGCASGPNTLLTVRDIVQSIDKVGQEEKNELERPTIQIFLNDLFQNDFNSVFKLLPSFYRKLEKENGRKIGSCLISAMPGSFYGRLFPEESMHFIHSCYSFHWLSQVPSGLVIELGISANKGSIYSSKGCRPPVQKAYLDQFTKDFTTFLRIHSKELFSRGRMLLTCICKVDEFDEPNPLDLLDMAINDLIVEGLLEEEKLDSFNIPFFTPSAEEVKCIVEEEGSCEILYLETFKAHYDAAFSIDDDYPVRSHEQIKAEYVASLIRSVYEPILASHFGEAIMPDLFHRLAKHAAKVLHMGKGCYNNLIISLAKKPEKSDV

SEQ ID NO: 10512 - protein, 384 aa, Coffea arabica
MELQAVLHMNGGEGDTSYAKNSSYNLALAKVKPVLEQCIRELLRANLPNINNCIKVADLGCASGPNTLLTVRDIVQSIDKVGQEEKNELERPTIQIFLNDLFQNDFNSVFKLLPSFYRKLEKENGRKIGSCLISAMPGSFYGRLFPEESMHFIHSCYSFHWLSQVPSGLVIELGISANKGSIYSSKASRPPVQKAYLDQFTKDFTTFLRIHSKELFSRGRMLLTCICKVDEYDEPNPLDLLDMAINDLIVEGHLEEEKLASFNLPFFTPSAEEVKCIVEEEGSFEILYLETFKAHYDAGFSIDDDYPVRSHFQVYGDEHIKAEYVASLIRSVYEPILASHFGEAIMPDLFHRLAKHAAKVLHLGKGCYNNLIISLAKKPEKSDM

SEQ ID NO: 10513 - protein, 378 aa, Coffea arabica
MELQEVLHMNEGEGDTSYAKNASYNLALAKVKPFLEQCIRELLRANLPNINKCIKVADLGCASGPNTLLTVRDIVQSIDKVGQEEKNELERPTIQIFLNDLFQNDFNSVFKLLPSFYRKLEKENGRKIGSCLISAMPGSFYGRLFPEESMHFLHSCYSVHWLSQVPSGLVIELGIGANKGSIYSSKGCRPPVQKAYLDQFTKDFTTFLRIHSKELFSRGRMLLTCICKVDEFDEPNPLDLLDMAINDLIVEGLLEEEKLDSFNIPFFTPSAEEVKCIVEEEGSCEILYLETFKAHYDAAFSIDDDYPVRSHEQIKAEYVASLIRSVYEPILASHFGEAIMPDLFHRLAKHAAKVLHMGKGCYNNLIISLAKKPEKSDV

SEQ ID NO: 10514 - protein, 378 aa, Coffea arabica
MELQEVLHMNEGEGDTSYAKNASYNLALAKVKPFLEQCIRELLRANLPNINKCIKVADLGCASGPNTLLTVRDIVQSIDKVGQEEKNELERPTIQIFLNDLFQNDFNSVFKLLPSFYRKLEKENGRKIGSCLISAMPGSFYGRLFPEESMHFLHSCYSVHWLSQVPSGLVIELGIGANKGSIYSSKGCRPPVQKAYLDQFTKDFTTFLRIHSKELFSRGRMLLTCICKVDVFDEPNPLDLLDMAINDLIVEGLLEEEKLDSFNIPFFTPSAEEVKCIVEEEGSCEILYLETFKAHYDAAFSIDDDYPVRSHEQIKAEYVASLIRSVYEPILASHFGEAIMPDLFHRLAKHAAKVLHMGKGCYNNLIISLAKKPEKSDV

SEQ ID NO: 10515 - protein, 384 aa, Coffea arabica
MELQEVLHMNEGEGDTSYAKNASYNLALAKVKPFLEQCIRELLRANLPNINKCIKVADLGCASGPNTLLTVRDIVQSIDKVGQEEKNELERPTIQIFLNDLFQNDFNSVFKLLPSFYRKLEKENGRKIGSCLISAMPGSFYGRLFPEESMHFLHSCYSVHWLSQVPSGLVIELGIGANKGSIYSSKASRPPVQKAYLDQFTKDFTTFLRIHSKELFSRGRMLLTCICKVDEYDEPNPLDLLDMAINDLIVEGHLEEEKLASFNLPFFTPSAEEVKCIVEEEGSFEILYLETFKAHYDAGFSIDDDYPVRSHFQVYGDEHIKAEYVASLIRSVYEPILASHFGEAIMPDLFHRLAKHAAKVLHLGKGCYNNLIISLAKKPEKSDV

SEQ ID NO: 10516 - protein, 384 aa, Coffea arabica
MELQEVLHMNGGEGDTSYAKNSSYNLFLIRVKPVLEQCIQELLRANLPNINKCFKVGDLGCASGPNTFSTVRDIVQSIDKVGQEKKNELERPTIQIFLNDLFQNDFNSVFKLLPSFYRNLEKENGRKIGSCLIGAMPGSFYSRLFPEESMHFLHSCYCLHWLSQVPSGLVTELGISANKGCIYSSKASGPPIKKAYLDQFTKDFTTFLRIHSEELISRGRMLLTFICKEDEFDHPNSMDLLEMSINDLVIEGHLEEEKLDSFNVPIYAPSTEEVKRIVEEEGSFEILYLETFYAPYDAGFSIDDDYQGRSHSPVSCDEHARAAHVASVVRSIYEPILASHFGEAILPDLSHRIAKNAAKVLRSGKGFYDSVIISLAKKPEKADM

SEQ ID NO: 10517 - protein, 353 aa, Brassica napus var. napus
MATTPQWIMIGGDGPESYNQHSSYQRALLETSKEKMNEAISAKLSLDLISDRFCVADFGCASGPNTFVAVQNIIDAVEDKYRKETGQNRAENIEFQVLFNDSTTNDFNTLFQALPPGRRYYSAGVPGSFFGRVLPKHSFHIGVISYAFHFTSKIPKGITDRDSPLWNRDVHCTGFNEAVKKAYLDQYSADTKNLLDARAEELFHGGLMLLLGSGLRNGVKMSETAKGIMMDLIGASLNDLAQQGVIDQDKVDSFSTPLYIAEEGELRQIIKENGKFTIEAFEDIIHPNGEFPLDPKILAVSFRASYGAFLSAYFGVDTTRKVFELVEVKARKEFSKIQNAKPGMQYLIVLRKN

SEQ ID NO: 10518 - protein, 318 aa, Brassica napus var. napus
MNEAISAKLSLDLISDRFCVADFGCASGPNTFVAVQNIIDAVEDKYRKETGQNRAENIEFQVLFNDSTTNDFNTLFQALPPGRRYYSAGVPGSFFGRVLPKHSFHIGVISYAFHFTSKIPKGITDRDSPLWNRDVHCTGFNEAVKKAYLDQYSADTKNLLDARAEELFHGGLMLLLGSGLRNGVKMSETAKGIMMDLIGASLNDLAQQGVIDQDKVDSFSTPLYIAEEGELRQIIKENGKFTIEAFEDIIHPNGEFPLDPKILAVSFRASYGAFLSAYFGVDTTRKVFELVEVKAREEFSRIQNAKPGMQYLIVLRKN

SEQ ID NO: 10519 - protein, 357 aa, Atropa belladonna
MKVVEVLHMNGGNGDISYANNSLVQRKVILMTKPITEQAISDLYCSFFPETLCIADLGCSSGANTFLVVSELVKIVEKERKIHNLQSAGNLFHFNDLPGNDFNTIFQSLGKFQQDLRKQIGEEFGPCFFSGVPGSFYTRLFPSESLHFVHSSYSLMWLSQVPDLIEKNKENIYIASTSPPSVIKAYYKQYEKDFSNFLKYRSEELMKGGKMVLTFLGRESEDPSSKECCYIWELLSMALNELVLEGLIEEEKVDSFNIPQYTPSPEEVKYIVEKEGSFIINRLEATRVHWNVSNEGINGGYNVAKCMRAVAEPLLVSQFDQKLMNLVFQKYEEIISDCISKEKTEFINVIVSLTKKR

SEQ ID NO: 10520 - protein, 370 aa, Cucumis sativus
MLHVNGGMGNTSYANNSRLQREIISMTCSIAKEALTNFYNQHIPTSITIADLGCSSGQNTLMLVSYLIKQVEEIRQKLHQRLPLEYQIFLNDLHGNDFNAVFTSLPRFLEDLGTQIGGDFGPCFFNGVPGSFYARLFPTKSVHFFHSSSSLHWLSRVPVGIENNKGNIYIGSTSPKSVGEAYYKQFQKDFSMFLKCRAEELVMGGGMVLTLVGRTSEDPSKSGGYYIWELLGLALNTMVAEGIVEEKKADSFNIPYYIPSPKEVEAEVVKEGSFILNQLKASSINLNHTVHKTEEESSTPLINNSLADATDYDFAKCIQSVSEPLLIRHFGEAIMDELFIRHRNIVAGCMAKHRIMECINLTISLTKKIS

SEQ ID NO: 10521 - protein, 359 aa, Clarkia breweri
MDVRQVLHMKGGAGENSYAMNSFIQRQVISITKPITEAAITALYSGDTVTTRLAIADLGCSSGPNALFAVTELIKTVEELRKKMGRENSPEYQIFLNDLPGNDFNAIFRSLPIENDVDGVCFINGVPGSFYGRLFPRNTLHFIHSSYSLMWLSQVPIGIESNKGNIYMANTCPQSVLNAYYKQFQEDHALFLRCRAQEVVPGGRMVLTILGRRSEDRASTECCLIWQLLAMALNQMVSEGLIEEEKMDKFNIPQYTPSPTEVEAEILKEGSFLIDHIEASEIYWSSCTKDGDGGGSVEEEGYNVARCMRAVAEPLLLDHFGEAIIEDVFHRYKLLIIERMSKEKTKFINVIVSLIRKSD

SEQ ID NO: 10522 - protein, 389 aa, Arabidopsis thaliana
MEVMRVLHMNKGNGETSYAKNSTAQSNIISLGRRVMDEALKKLMMSNSEISSIGIADLGCSSGPNSLLSISNIVDTIHNLCPDLDRPVPELRVSLNDLPSNDFNYICASLPEFYDRVNNNKEGLGFGRGGGESCFVSAVPGSFYGRLFPRRSLHFVHSSSSLHWLSQVPCREAEKEDRTITADLENMGKIYISKTSPKSAHKAYALQFQTDFLVFLRSRSEELVPGGRMVLSFLGRRSLDPTTEESCYQWELLAQALMSMAKEGIIEEEKIDAFNAPYYAASSEELKMVIEKEGSFSIDRLEISPIDWEGGSISEESYDLAIRSKPEALASGRRVSNTIRAVVEPMLEPTFGENVMDELFERYAKIVGEYFYVSSPRYAIVILSLVRTG

SEQ ID NO: 10523 - protein, 389 aa, Arabidopsis thaliana
MEVMRVLHMNKGNGETSYAKNSTAQSNIISLGRRVMDEALKKLMMSNSEISSIGIADLGCSSGPNSLLSISNIVDTIHNLCPDLDRPVPELRVSLNDLPSNDFNYICASLPEFYDRVNNNKEGLGFGRGGGESCFVSAVPGSFYGRLFPRRSLHFVHSSSSLHWLSQVPCREAEKEDRTITADLENMGKIYISKTSPKSAHKAYALQFQTDFWVFLRSRSEELVPGGRMVLSFLGRRSLDPTTEESCYQWELLAQALMSMAKEGIIEEEKIDAFNAPYYAASSEELKMVIEKEGSFSIDRLEISPIDWEGGSISEESYDLVIRSKPEALASGRRVSNTIRAVVEPMLEPTFGENVMDELFERYAKIVGEYFYVSSPRYAIVILSLVRAG

SEQ ID NO: 10524 - protein, 379 aa, Arabidopsis thaliana
MDPRFINTIPSLRYDDDKCDDEYAFVKALCMSGGDGANSYSANSRLQKKVLSMAKPVLVRNTEEMMMNLDFPTYIKVAELGCSSGQNSFLAIFEIINTINVLCQHVNKNSPEIDCCLNDLPENDFNTTFKFVPFFNKELMITNKSSCFVYGAPGSFYSRLFSRNSLHLIHSSYALHWLSKVPEKLENNKGNLYITSSSPQSAYKAYLNQFQKDFTMFLRLRSEEIVSNGRMVLTFIGRNTLNDPLYRDCCHFWTLLSNSLRDLVFEGLVSESKLDAFNMPFYDPNVQELKEVIQKEGSFEINELESHGFDLGHYYEEDDFEAGRNEANGIRAVSEPMLIAHFGEEIIDTLFDKYAYHVTQHANCRNKTTVSLVVSLTKK

SEQ ID NO: 10525 - protein, 396 aa, Arabidopsis thaliana
MDSRFTDSTTTLRCNGKSENERKNGDEERISKYSFVSPLCMRGGDGYNSYSSNSLLQRRVLSKAKPVLVKNTKDLMINLNFPTYIKVADLGCSSGQNTFLAMSEIINTINVFCQQRNQNPPEIDCCLNDLPSNDFNTTFKFIQFFNGMNITSKESYFVYGVPGSFYSRLFPRRSLHFVHSSYGLHWLSKVPEGLEKNKMSVYITNSSPLSTYKAYLNQFQRDFATFLKLRSEEMVSNGRMVLTFIGRNTIDNPLHRDCCHFWTLLSKSLRDLVAEGLVSASKVDSFYLPFYDPNEKEIKEMVQKEGSFEIRDLETHGYDLGHCNQDESKRSKSGQNEANYIRAVSEPLLAAHFGDAIINILFNKFACHVSQHVSCRNKTTVSIVVSLTKKKTFLMS

SEQ ID NO: 10526 - protein, 354 aa, Arabidopsis thaliana
MSGGDGDNSYSTNSLLQKKVLSKAKPVLVKNTKGMMINLNFPNYIKVADLGCATGENTFLTMAEIVNTINVLCQQCNQKPPEIDCCLNDLPDNDFNTTFKFVPFFNKRVKSKRLCFVSGVPGSFYSRLFPRKSLHFVHSSYSLHWLSKVPKGLEKNSSSVYITTSSPPNAYKAYLNQFQSDFKSFLEMRSEEMVSNGRMVLTFIGRKTLDDPLHRDCCHFWTLLSTSLRDLVYEGLVSASKVDSFNIPFYDPSKEEVMEMIRNEGSFEINDLEIHGFELGLSNHDEDYMLHSQISKAGQREANCIRAVSESMLVADFGVDIMDTLFKKFAYHVSQHASCTNKTTVTLVVSLIRK

SEQ ID NO: 10527 - protein, 371 aa, Arabidopsis thaliana
MDKKDMEREFYMTGGDGKTSYARNSSLQKKASDTAKHITLETLQQLYKETRPKSLGIADLGCSSGPNTLSTITDFIKTVQVAHHREIPIQPLPEFSIFLNDLPGNDFNFIFKSLPDFHIELKRDNNNGDCPSVFIAAYPGSFYGRLFPENTIHFVYASHSLHWLSKVPTALYDEQGKSINKGCVSICSLSSEAVSKAYCSQFKEDFSIFLRCRSKEMVSAGRMVLIILGREGPDHVDRGNSFFWELLSRSIADLVAQGETEEEKLDSYDMHFYAPSADEIEGEVDKEGSFELERLEMLEVKKDKGNTEGDISYGKAVAKTVRAVQESMLVQHFGEKILDKLFDTYCRMVDDELAKEDIRPITFVVVLRKKL

SEQ ID NO: 10528 - protein, 385 aa, Arabidopsis thaliana
MSLCLILCRCDCKSEYKVDEERSSKYPFVGALCMNGGDVDNSYTTKSLLQKRVLSITNPILVKNTEEMLTNLDFPKCIKVADLGCSSGQNTFLAMSEIVNTINVLCQKWNQSRPEIDCCLNDLPTNDFNTTFKFITFFNKKLTSNGSCFVSGVPGSFYSRLFPRKSLHFIYSIYSIHFLSKVPDGLEKNKMSVYITSSSPLSEYKAYLNQFKRDFTTFLRMRSEEMVHNGRMVLTLIGRNTLDNPLYRDCCHCWTLLSNSLRDLVFEGLLSASKVYSFKMPFYDPNEEEVKEIIRNEGSFQINDLEMHEFDLGHSKEKCSLQSHKAKAGQKEASCIRAVTETMLVAHFGDDIIDALFHKYAHHVSQHASCRVKTSVTLIVSLVRK

SEQ ID NO: 10529 - protein, 368 aa, Arabidopsis thaliana
MGVLSMKGGDGEHSYANNSEGQKRLASDAKPVVVETVKEMIVKTDFPGCIKVADLGCSSGENTLLVMSEIVNTIITSYQQKGKNLPEINCCLNDLPDNDFNTTFKLVPAFHKLLKMDVKGKCFISGVPGSFYSRLFPSKSLHFVHSSLCLHWLSKVPDGLEDNKKNVYLRSPCPPNVYKSYLTQFKNDFSLFLRLRADETVPNGRMALTFVGRKSLDPLSKDCFQNWSSISDSLLDLVSEGIVKESDVDSFNLPFYNPDESEVREVIESEGSFKISNFETIFGLLFSYKTGRTEVKDDDDNLDQSCRFEVIRKRASIIRSITEPMLGAHFGDAIMDRLFERYTYHLAERYDTLRNKPTVQFFVSLTRK

SEQ ID NO: 10530 - protein, 363 aa, Arabidopsis thaliana
MKGGDGEHSYANNSEGQKRLASDAKPVVVETVKEMIVKTDFPGCIKVADLGCSSGENTLLVMSEIVNTIITSYQQKGKNLPEINCCLNDLPDNDFNTTFKLVPAFHKLLKMDVKGKCFISGVPGSFYSRLFPSKSLHFVHSSLCLHWLSKVPDGLEDNKKNVYLRSPCPPNVYKSYLTQFKNDFSLFLRLRADETVPNGRMALTFVGRKSLDPLSKDCFQNWSSISDSLLDLVSEGIVKESDVDSFNLPFYNPDESEVREVIESEGSFKISNFETIFGLLFSYKTGRTEVKDDDDNLDQSCRFEVIRKRASIIRSITEPMLGAHFGDAIMDRLFERYTYHLAERYDTLRNKPTVQFFVSLTRK

SEQ ID NO: 10531 - protein, 368 aa, Arabidopsis thaliana
MGVVSMKGGDGEHSYANNSEAQKSITSDAKPEVMKSVNEMIVKMDFPGCIKVADLGCSSGENTFLVMSEIVNTIITTYQQNGQNLPEIDCCLNDLPENDFNTTFKLIPSFHEKLKMNVKGNCYVSGCPGSFYTRLFPSKSLHFVHSSFCLHWLSKVPDGLEENKKNVYLRSPCPPNLYESYWNQFKKDFSMFLRMRAEETMPSGRMALTLVGRKTLDPLSKECFKDWSLVSDSLLDLVSEGVVKESDLESFNLPYYSPDESEVKEVIENEGSFEIKNFETIFGLLFSYKTGHSEVKDDDDDVDHSRRFEVVKTRANMTRSIIEPMLVAHFGEAIIDRLFDKYIYHACQRYDTLRNKPTVNFFVSLTRK

SEQ ID NO: 10532 - protein, 327 aa, Arabidopsis thaliana
MAKPVLVRNTEEMMMNLDFPTYIKVAELGCSSGQNSFLAIFEIINTINVLCQHVNKNSPEIDCCLNDLPENDFNTTFKFVPFFNKELMITNKSSCFVYGAPGSFYSRLFSRNSLHLIHSSYALHWLSKVPEKLENNKGNLYITSSSPQSAYKAYLNQFQKDFTMFLRLRSEEIVSNGRMVLTFIGRNTLNDPLYRDCCHFWTLLSNSLRDLVFEGLVSESKLDAFNMPFYDPNVQELKEVIQKEGSFEINELESHGFDLGHYYEEDDFEAGRNEANGIRAVSEPMLIAHFGEEIIDTLFDKYAYHVTQHANCRNKTTVSLVVSLTKK

SEQ ID NO: 10533 - protein, 359 aa, Arabidopsis thaliana
MKGGTGDHSYATNSHYQRSVFYEIQPLVIENVREMLLKNGFPGCIKVADLGCSTGQNTVLAMSAIAYTIMESYQQMSKNPPEIDCYLNDLPENDFNTTFKLFHSFQEKLKPEVKGKWFVSGVPGSFYSRLFPRKSLHFVHSAFSIHWLSRIPDGLESNTKSIHIKYPYPSNVYKSYLNQFKIDFSLFLKMRSEEVVHNGHMVLTFVGRKVSDTLSKDCFQVWSLLSDCLLDLASEGFVNDSMVKSFNMPFYNPNEEEVREFILKEGSFEITKIEKFDHVVPYKIDREEEDEEQSLQLEAGIKHASWARCITEPLLVAHFGDAIIEPVFNKYAHYMAKYLSVSNHRRNMTLVIVVSLTRK

SEQ ID NO: 10534 - protein, 335 aa, Arabidopsis thaliana
MKSVNEMIVKMDFPGCIKVADLGCSSGENTFLVMSEIVNTIITTYQQNGQNLPEIDCCLNDLPENDFNTTFKLIPSFHEKLKMNVKGNCYVSGCPGSFYTRLFPSKSLHFVHSSFCLHWLSKVPDGLEENKKNVYLRSPCPPNLYESYWNQFKKDFSMFLRMRAEETMPSGRMALTLVGRKTLDPLSKECFKDWSLVSDSLLDLVSEGVVKESDLESFNLPYYSPDESEVKEVIENEGSFEIKNFETIFGLLFSYKTGHSEVKDDDDDVDHSRRFEVVKTRANMTRSIIEPMLVAHFGEAIIDRLFDKYIYHACQRYDTLRNKPTVNFFVSLTRK

SEQ ID NO: 10535 - protein, 353 aa, Brassica napus
MATTPQWIMIGGDGPESYNQHSSYQRALLETSKEKMNEAISAKLSLDLISDRFCVADFGCACGPNTFVAVQNIIDAVEDKYRKETGQNRAENIEFQVLFNDSTTNDFNTLFQALPPGRRYYSAGVPGSFFGRVLPKHSFHIGVISYAFHFTSKIPKGITDRDSPLWNRDVHCTGFNEAVKKAYLDQYSADTKNLLDARAEELFHGGLMLLLGSGLRNGVKMSETAKGIMMDLIGASLNDLAQQGVIDQDKVDSFSTPLYIAEEGELRQIIKENGKFTIEAFEDIIHPNGEFPLDPKILAVSFRASYGAFLSAYFGVDTTRKVFELVEVKARKEFSKIQNAKPGMQYLIVLRKN

SEQ ID NO: 10536 - protein, 375 aa, Oryza sativa (japonica cultivar-group)
MASSLLHCSDKLPFMNVETVLHMKEGLGETSYAQNSRGMDTLKSLITNSAADVYLSQMPERFAVADLGCSSGPNALCLAEDIIGSIGRICCRSSRPPPEFSVLLNDLPTNDFNTIFFSLPEFTDRLKAAAKSDEWGRPMVFLSGVPGSFYGRLFPAKSVHFVCSCSSLHWLSQVPSGLLDEMNRPINKGKMYISSTSPLAVPVAYLRQFQRDFSLFLKSRAAEVFSGGRMVLAMLGRQADGYIDRRTTFLWELLSESFASLVAQGLVEEDKVDAYNVPFYAPSIGEIEEEVRREGSFRMDYVQTYEINLSSSGDARRDGRTVSMAIRAIQESMLSHHFGPEIVDALFAKYTELVTASMEREEVKSVQIGVVLTRL

SEQ ID NO: 10537 - protein, 378 aa, Oryza sativa (japonica cultivar-group)
MSSSLQCPDDPAPSMNVEAVLHMKEGVGETSYAKNSTLQKKSMDTVKSLVTESARDVYASLKPERFTLADLGCSSGTNALGMVEEIVRSVAEVCRGSSPPPEFSVLLNDLPTNDFNTIFSRLPEFTGKLKADADADAGDDPMVFLSGVPGSFYGRLFPSKNVHFVCSFSSLHWLSQVPPGLLDETNGPVNKGKMFISSTSPPAVAAAYSRQFRRDFSLFLRSRAAEVVAGGRMVVSMLGREGERHADRNTTLLWDLLSESFAALVSQGVVEQGKVDAYDAPFYAPSIGEIEEEVRRQGSFRMEVARAYEASLSGSGDARKDGRTVSMAVRAIQESMLGHHFGTEIVDALFAKYTELVTATMEREEVRSVQIGVVLTRL

SEQ ID NO: 10538 - protein, 137 aa, Oryza sativa (japonica cultivar-group)
MKPLIEAAVVDMFEAGLPARFGVADLDCASGPNALALISTAINAVHHHLLGPAPAAASRCDELTVLLNDLPTNDFTSAMTGLPLLRQKHSVVGSGVDYWPGVFVSVVPGTFYGRLFPERTMHLVCSSFSLHWLSKVC

SEQ ID NO: 10539 - protein, 238 aa, Oryza sativa (japonica cultivar-group)
MKPLIEAAVVDMFEAGLPARFGVADLDCASGPNALALISTAINAVHHHLLGPAPAAASRCDELTVLLNDLPTNDFTSAMTGLPLLRQKHSVVGSGVDYWPGVFVSVVPGTFYGRLFPERTMHLVCSSFSLHWLSKSRLVTPTGTKDLSLVPVGIVAESTRHLRDRGGGDGQPYLFTSSSTNIISSSHLFLFLLLSSNSSPSLPHHPFLFLLSNFSSNSSPSLPIIPPLTPLLPSPSSH

SEQ ID NO: 10540 - protein, 357 aa, Petunia x hybrida
MEVVEVLHMNGGNGDSSYANNSLVQQKVILMTKPITEQAMIDLYSSLFPETLCIADLGCSLGANTFLVVSQLVKIVEKERKKHGFKSPEFYFHFNDLPGNDFNTLFQSLGAFQEDLRKHIGESFGPCFFSGVPGSFYTRLFPSKSLHFVYSSYSLMWLSQVPNGIENNKGNIYMARTSPLSVIKAYYKQYEIDFSNFLKYRSEELMKGGKMVLTLLGRESEDPTSKECCYIWELLAMALNKLVEEGLIKEEKVDAFNIPQYTPSPAEVKYIVEKEGSFTINRLETSRVHWNASNNEKNGGYNVSRCMRAVAEPLLVSHFDKELMDLVFHKYEEIISDCMSKEKTEFINVIVSLTKIN

SEQ ID NO: 10541 - protein, 357 aa, Petunia x hybrida
MEVVEVLHMNGGNGDSSYANNSLVQQKVILMTKPITEQAMIDLYSSLFPETLCIADLGCSLGANTFLVVSQLVKIVEKERKKHGFKSPEFYFHFNDLPGNDFNTLFQSLGAFQEDLRKHIGESFGPCFFSGVPGSFYTRLFPSKSLHFVYSSYSLMWLSQVPNGIENNKGNIYMARTSPLSVIKAYYKQYEIDFSNFLKYRSEELMKGGKMVLTLLGRESEDPTSKECCYIWELLAMALNKLVEEGLIKEEKVDAFNIPQYTPSPAEVKYIVEKEGSFTINRLETSRVHWNASNNEKNGGYNVSRCMRAVAEPLLVSHFDKELMDLVFHKYEEIVSDCMSKENTEFINVIISLTKIN

SEQ ID NO: 10542 - protein, 383 aa, Antirrhinum majus
MTKQTQKQNKRMKLAQVLHMNGGLGKSSYASNSLVQRKVISITKPIIEEAMTEFYTRMLPSPHTISIADLGCSCGPNTLLVAAELVKIIVKLRQKLDREPPPEFQIHLNDLPGNDFNSIFRYLLPMFREELREEIGGGEEAGRRCFVSGVPGSFYGRLFPTKSLHFVHSSYSLMWLSKVPEGVKMNKENIYIASTSPQNVINAYYEQFQRDFSSFLICRSEEVIGGGRMVLTFLGRKSASARSKECCYIWELLSLALKQLVLEGVIEKEKLHSFHIPQYTPSPTEVKAEVEKEGSFTVNRLEVSEITWASCGNDFHLPELVASGNEYNVAKCMRSVAEPLLIEHFGESVIDRLFEKYREIIFDRMSREETKFFNVTISMTRRE

SEQ ID NO: 10543 - protein, 364 aa, Antirrhinum majus
MKVMKKLLCMNIAGDGETSYANNSGLQKVMMSKSLHVLDETLKDIIGDHVGFPKCFKMMDMGCSSGPNALLVMSGIINTIEDLYTEKNINELPEFEVFLNDLPDNDFNNLFKLLSHENGNCFVYGLPGSFYGRLLPKKSLHFAYSSYSIHWLSQVPEGLEDNNRQNIYMATESPPEVYKAYAKQYERDFSTFLKLRGEEIVPGGRMVLTFNGRSVEDPSSKDDLAIFTLLAKTLVDMVAEGLVKMDDLYSFNIPIYSPCTREVEAAILSEGSFTLDRLEVFRVCWDASDYTDDDDQQDPSIFGKQRSGKFVADCVRAITEPMLASHFGSTIMDLLFGKYAKKIVEHLSVENSSYFSIVVSLSRR

SEQ ID NO: 10544 - protein, 369 aa, Camellia sinensis
MELATAGKVNEVLFMNRGEGESSYAQNSSFTQQVASMAQPALENAVETLFSRDFHLQALNAADLGCAAGPNTFAVISTIKRMMEKKCRELNCQTLELQVYLNDLFGNDFNTLFKGLSSEVIGNKCEEVPCYVMGVPGSFHGRLFPRNSLHLVHSSYSVHWLTQAPKGLTSREGLALNKGKIYISKTSPPVVREAYLSQFHEDFTMFLNARSQEVVPNGCMVLILRGRQCSDPSDMQSCFTWELLAMAIAELVSQGLIDEDKLDTFNIPSYFASLEEVKDIVERDGSFTIDHIEGFDLDSVEMQENDKWVRGEKFTKVVRAFTEPIISNQFGPEIMDKLYDKFTHIVVSDLEAKLPKTTSIILVLSKIDG

SEQ ID NO: 10545 - protein, 359 aa, Oryza sativa
MKVEQDLHMSRGDGETSYAANSRLQEKAILKTRPLLHKAVEEAHASLFPRALVVADLGCSSGPNTLLVVSEVLSAVANRSSCDHKSSLVADVQFFLNDLPGNDFNLVFQSLELFKKLAEMEFGKALPPYYIAGLPGSFYTRLFPDRSVHLFHSSYCLMWRSKVPDKLARNAGNMYIWETTPPSVVKLYQRQFQEDFSQFLALRHDELVSGGQMVLTFLGRKNRDVLRGEVSYMYGLLAQALQSLVQEGRVEEEKLDSFNLPFYSPSVDEVKAVIRQSGLFDISHIQLFESNWDPQDDSVRSGVNVARCIRAVLEPLIARHFGRCIVDDLFDMYARNVAQHLEQVKTKYPVIVLSLKARR

SEQ ID NO: 10546 - protein, 308 aa, Triticum aestivum
  unsure (1)..(308): unsure at all Xaa locations
MASEQTVHMNGGQGDTSYARNSSLQNAEQNKMRPLIEEAIADLLSTGASLPRSMVVADLGCSSGPNALTLVSICVDAIRSQCLRSRQPPVEVCVFLNDLPDNDFNMVVKSLVAFQQXXHRSVVTGVMPGSFYGRLFTSGSLHLACSANSLHWLSEAPEELRRNKIPAYDIDEHVRRERRRVVIGAYARQFRKDFTLFXLELRAIELAAGGRLVASLAGRRSEEPAAEFTHAWESVALVLSEMASKGMINRAKFDTFYIPIYGPSDEELREIIQAEGSFSIREMQVRHLDPQICSGSNGXFEIQIKVXS

SEQ ID NO: 10547 - protein, 370 aa, Zea mays
MPMTIERDLHMATGNGETSYTKNSRIQEKVMFQIKPVLEEATRAAYSALLPRTMVVADLGCSSGPNTLRFVSEVIGIIARHCKEHDRRHAHNLFFLNDLPGNDFNNLFRSISRWQETTRVRQPEALPPCYISGLSGSFYTRIFPSESVHLFHSLFSVHWHSQASEQLKDTKNNIYITKNMPPSMVKLFQQQFEKDFSLFLKLRYEELVSGGQMVLTFIGRKHEDVFTREPNHLYGLLAQSLKSLVDEGLVEKEKLESFYLPIYSPSVGEVEAIVKQVGLFNMNHVKVFEINWDPYGDSEGDDVHDSIRSGENVAKCLRAVMEPLVASQFGEHILDKLFKEYARRVAKHLENEKTKHAILVLSIEKAIIHV

SEQ ID NO: 10548 - protein, 367 aa, Zea mays
MRIERDLHMATGDGETSYTKNSRIQEKTMFQIKPVLEEATRAVYTALHPQTMVVADLGCSSGPNTLRFVSEVIGIIARHCKEYGRQHDHTQLHLNDLPGNDFNNLFQLIQQFNKSTAINHKSEAAPCYISGLPGSYYTRIFPSESVHLFHSLFCLQWRSEAPEGNKKTCLDIYITKTMSPSMVKLFQQQFQKDFSLFLRLRYEELVSGGQMVLTFIGRKHENVFTGESNHLYGLLAQSLKSLVDEGLVEKEKLESFYLPMYSPSVGEVEAILKQVGLFNMNHVKVFQTNWDPYDDLESDVVHNSIRSGENVAKCLRAVMQPLVASQFGEPILDKLFKEYARRVAKHLENEKTKHAIIVLSIEKAIHL

SEQ ID NO: 10549 - protein, 372 aa, Zea mays
MRIERDLHMATGDGETSYTKNSRIQEKTMFQIKPVLEEATRAVYTALHPQTMVVADLGCSSGPNTLRFVSEVIGIIARHCKEHGRQHAQLQFFLNDLPGNDFNNLFQLIQQFNKPTAINHKSEAAEALPPPCYISGLPGSYYTRIFPSESVHLFHSLFCLQWRSEAPEGNKKTCLDIYITKTMSPSMVKLFQQQFQKDFSLFLRLRYEELVSGGQMVLTFIGRKHEDVFTGESNHLYGLLAQSLKSLVDEGLVEKEKLESFYLPMYSPSVGEVEAILKQVGLFNMNHVKVFQTNWDPYDDLESDVVHNSIRSGENVAKCLRAVMQPLVASQFGEPILDKLFKDYARRVAKHLENEKTKHAIIVLSIEKAIHL

SEQ ID NO: 10550 - protein, 372 aa, Zea mays
MRIERDLHMATGDGETSYTKNSRIQEKTMFQIKPVLEEATRAVYTALHPQTMVVADLGCSSGPNTLRFVSEVIGIIARHCKEYGRQHDHTQLHLNDLPGNDFNNLFQLIQQFNKSTAINHKSEAAEALPPPCYISGLPGSYYTRIFPSESVHLFHSLFCLQWRSEAPEGNKKTCLDIYITKTMSPSMVKLFQQQFQKDFSLFLRLRYEELVSGGQMVLTFIGRKHENVFTGESNHLYGLLAQSLKSLVDEGLVEKEKLESFYLPMYSPSVGEVEAILKQVGLFNMNHVKVFQTNWDPYDDLESDVVHNSIRSGENVAKCLRAVMQPLVASQFGEPILDKLFKEYARRVAKHLENEKTKHAIIVLSIEKAIHL

SEQ ID NO: 10551 - protein, 377 aa, Zea mays
  unsure (1)..(377): unsure at all Xaa locations
MKVERDLHMSRGDGEDSYASNSRLQEKSILKTRPVLHKAVAAAHALSLSSGVVVADLGCSSGPNTLLVVSEVLAAVAMVAGGSAXXPQHVQFFLNDLPGNDFNLVFRSLDLLKNKKLAAKDSGRSRCYLAGLPGSFYTRLFPDHCVHLFHSSYCLMWRSKVPDELAVNEGHMYIWETTPQAVVALYRRQFQEDMSLFLRLRHRELVPGGHMVLAFLGRKKSKDVLRGEVSYTWGLLAQALQSLVKQGRVKKDKLDSFNLPFYAPSMDEVRDVITRSQAFDITHIQLFESNWDPHDDDDVVEEDVAAVQSGVNVARSIRAVIGPLIARHFGEHILDDLFELHAKNVAVHLQKVKTKYPVIVVSLQAKXAARQIKDQAS

SEQ ID NO: 10552 - protein, 378 aa, Zea mays
MSMRIERDLHMATGNGETSYTKNSRIQEKAMFQMKSVLEEATRAVCTALLPQTMVVADLGCSSGPNTLRFVTEVTRIIAHHCKLEHNRRHDHPLHLNDLPGNDFNNLFQLIEQFNKSSTTHKGDAATEALQPPCYISGLPGSYYTRIFPSESVHLFHSLFCLQWRSQAPEQLKGTQKSCLDIYITKTMSPSMVKLFQQQFQKDFSLFLRLRYEELVSGGQMVLTFIGRKHEDVFTGESNHLYGLLAQSLKSLVDEGLVEKEKLESFYLPIYSPSVGEVEAIVKQLGLFNMNHVKVFEINWDPYDDSEGDDVHNNIESGENVAKCLRAVMEPLVASQFGERILDKLFKEYARRVAKHLENEKTKHAVLVLSIKKAIIHV

SEQ ID NO: 10553 - protein, 380 aa, Zea mays
MASSLLHCPDKLPFLDVEAILHLKEGLGETSYAQNSSLQKRGMDTLRSLITSTATDVYVSQMPERFTVADLGCSSGPNALCLAEDIVGSIGRACGRSSRPPPEFSVLLNDLPTNDFNTIFFSLPEFADRLEAAARTDEWGRPMVFLSGVPGSFYGRLFPRTSVHFICSCSSLHWLSQVPPGLFDETDNRPVNKGKMYISSTSPAAVPLAYLRQFRRDFGVFLRSRAAEVVPGGRMVLAMLGRQTEGYVDRRTTFLWELLSESFAALVSQGLVEQEKVDAYNVPFYAPSVREVEEEVRREGSFRLDHVQTYEINLSSSGDAKEDGRTVSMAIRAIQESMLSHHFGTDIVDALFHRYTELVTESMEREDVKSVQIGVVLTRL

SEQ ID NO: 10554 - protein, 406 aa, Zea mays
  unsure (1)..(406): unsure at all Xaa locations
YIXSQAPLSXGYMDIRRVSHMAEGEGEGEWSYSKNCRRQQVAVRETRPTVETAVKQVYAALLPRTMVVADLGCSAGPNTLLFISSVLSSIAAAAGAERCKPPSELQFVLNDLPGNDFNHLFRSVEEEFRRAAGCERGPPPPPYYVMGLPESYYNRLFPRQSVHLFHSSYCLHWRSQEPEGLEAWRKPCLNEDNIYIARSRTTTPSVAKLFQEQFQKDFSLFLKLRHEELVHGGRMVLVFLGRKNEDAYSGDLNQLFALVATALQSLVLKGLVEKEKLESFNLPIYGPSVGEVEDLVTQSGLFSMDLIKQFEMNWDPLDDSEGDDVVEDSGSSMNVAKYIRSVLKSLIVRHFGEAIIDAWFAEFRRLVAEHLEKEKTKFTTFAMCLKKEXYRCIDLHIRMCIVFRTV

SEQ ID NO: 10555 - protein, 399 aa, Zea mays
  unsure (1)..(399): unsure at all Xaa locations
YIXSQAPLSXGYMDIRRDFHMAEGEGEWSYSXKNCRRQQVAVRETRPMVETAVKQVYAALXXPRTMVVADLGCSAGPNTLLFISSVLSSIAAAAGAERCKPPSELQFVLNDLPGNDFNHLFRSVEEEFRRAAGCERGPPPPPYYVMGLPESYYNRLFPRQSVHLFHSSYCLQWRSQEPEGLEAWRKPCLNEDNIYIARTTTPSVAKLFQEQFQKDFSLFLNLRHEELVHGGRMVLIFLGRKNEDVYSGDLNQLFALVATALQSLVLKGLVEKEKLESFNLPVYGPSVGEVEELVTRSGLQFSMDLIKQFEMNWDPFDDSEGDNDVVVVGSSVNVAKLIRSVLKALVVRHFGEAVLDACFAEFRRLVAEHLGKEKTKFTTIAMCLKKEXYIYVCVLYFVR

SEQ ID NO: 10556 - protein, 381 aa, Zea mays
  unsure (1)..(381): unsure at all Xaa locations
MKVERDLHMSGGDGEDSYASNSRLQEKSILKTRPVLHKAVAAAHRLVALXQEDPAGGAMVVADLGCSSGPNTLLVVSEVLAAVAMVAGGSAQPQHVQFFLNDLPGNDFNLVFRSLDLEESLLPPYYVAGLPGSFYTRLFPDHCVHLFHSSYCLMWRSKVPDELAXVAAVLNEGHMYIWETTPQAGXCALYRRQFQEDMSLFLRLRHRELVPGGHMVLAFLGRKKSKDVLRGEVSYTWGLLAQALQSLVKQGRVKKDKLDSFNLPFYAPSMDEVRDVITRSQAFDITHIQLFESNWDPHDDDDXGDEDGSAVQSGVNVARSIRAVIGPLIARHFGEHILDDLFELHAKNVAVHLQKVKTKYPVIVVSLQAKXAARQIKDQAS

SEQ ID NO: 10557 - protein, 311 aa, Zea mays
  unsure (1)..(311): unsure at all Xaa locations
NFPYYLSYFTKFEKKNSLYFFCYLSYVQGGQQSNLKPMIEEAVVSLLNDDDGATGLAIADLGCSSGPNTLVLVSTAVAAVRRRCSELRRQPPELCVHLNDLPNNDFNLVXPRAWPRTRKPKKAXGPPVLTSIVPGSFHGRLFSKRSLHLVCSNASLQWLSKAXXRAGAERDPVXTTGTSRRGVLGVLQSSXAYARQFRSDFTQILRLRAQEMVPGGKMVFSLLGQRPDDKPENALQLFEFINAVLHEMASKGLIDEERLHSFYIPVYGPSEKELREIVEAEGSFSIDKMERSMNLLLLGMPISLPRQGRAG

SEQ ID NO: 10558 - protein, 244 aa, Zea mays
  unsure (1)..(244): unsure at all Xaa locations
XLLYHRDXYGYKXRDFHMAEGEGEWSYSKNCRRQQVAVRETRPMVETAVKQVYAALFPRTMVVADLGCSAGPNTLLFISSVLSSIAAAXCCXXNGASRLXKGPPPPPYYVMGLPESYYNRLFPRQTVHLFHSSYCLHWRSQEPEGLEAWRKPCLNEDNIYIARSRTTTPSVAKLFQEQFQKDFSLFLKLRHEELVHGGRMVLVFLGRKNEDAYSGDLNQLFALVATALQSLVLKEIKSKKKKKK

SEQ ID NO: 10559 - protein, 200 aa, Zea mays
DHKNIYITKTMSPSMVKLFQQQFQKDFSLFLRLRYEELVSGGQMVLTFIGRKHENVFTGESNHLYGLLAQSLKSLVDEGLVEKEKLESFYLPMYSPSVGEVEAILKQVGLFNMNHVKVFQTNWDPYDDLESDVVHNSIRSGENVAKCLRAVMQPLVASQFGEPILDKLFKEYARRVAKHLENEKTKHAIIVLSIEKAIHL

SEQ ID NO: 10560 - protein, 200 aa, Zea mays
DHKNIYITKTMSPSMVKLFQQQFQKDFSLFLRLRYEELVSGGQMVLTFIGRKHENVFTGESNHLYGLLAQSLKSLVDEGLVEKEKLESFYLPMYSPSVGEVEAILKQVGLFNMNHVKVFQTNWDPYDDLESDVVHNSIRSGENVAKCLRAVMQPLVASQFGEPILDKLFKDYARRVAKHLENEKTKHAIIVLSIEKAIHL

SEQ ID NO: 10561 - protein, 213 aa, Zea mays
  unsure (1)..(213): unsure at all Xaa locations
SLHFLSMVGSDGAXPNRGRVYVSESGPAAVLDAYRSQFHADFLAFLSCRADEMRPRGLLILTFVARRTARPTAHDCYLWDFLADALMDMAADGLVDEEQVHAFNVPFYGPCLDDLAKVIAREGSFTVRTMQLFDISRRCLLLQSASDDELAMETTSTVRAVVEPMLRAHFGLEAMDGLFCRYSLRLEEYYRSNTSRNKDDLTNVFLVLEKKLH

SEQ ID NO: 10562 - protein, 220 aa, Zea mays
  unsure (1)..(220): unsure at all Xaa locations
STRCTRLVQIDHVYTRTTSTSLRTTAHFDVENATGAHPGRTSPLLLKIACSMKNSCMSERMVLIFLGRQDEDVYSGXDINQLFALVATALQSLVSKGLVEKEKLESFNLPIYGPSVGEVKDLVTXSGLFSMDLIKQFETNWDPLDDSEGGDVVEDSGMNVAKFIRPALKSSIVYHFGEAIIDAWFAEFRRLVAEHLEKEKTKFTTFAMCLXRKNNMVKYI

SEQ ID NO: 10563 - protein, 166 aa, Zea mays
  unsure (1)..(166): unsure at all Xaa locations
LKLRRKELVHGGRMVLVFLSRKNEDVYSGDLNQLFAFVATALQSLVSKGLVEKEKLESFNLPIYGLSVGEVEDLVTGLFSMDLIKQFEMNWDPFDDSXSARRSMNVAKYIRSALKSLIVCHFGEAIIDAWFAEFRRLVAEHLEKEKTKFTTFAMCLXRKNNMVLYI

SEQ ID NO: 10564 - protein, 386 aa, Coffea liberica
MELQEVLRMNGGEGDTSYAKNSSYNLALAKVKPVLEQCIRELLRANLPNINNCIKVADLGCASGPNTLLTVRDIVQSIDKLGLEEKNELERPTIQIFLNDLFQNDFNSVFKLLPSFYRKLEKENGRKIGSCLISAMPGSFYGRLFPEESMHFLHSCYCLHWLSQVPSGLVTELGISANKGSIYSSKASRLPVRKAYLDQFTKDFTTFLRIHSEELFSHGRMLLTCICKGVEFDARNAIDLLEMAINDLVVEGHLEEEKLDSFNLPVYIPSTEEVKCIVEEEGSFEILYLETFKVLYDAGFSIDDDYPLRSHVQVYSDEHIKAEYVASSVRAVYEPILASHFGEAIIPDIFHRFAKHAAKVLPLGKGFYNNLIISLAKKPEKSDVNH

SEQ ID NO: 10565 - protein, 384 aa, Coffea liberica
MELQEVLRMNGGEGDTSYAKNSSYNLFLIRVKPVLEQCIQGLLRANLPNINKCIKVADLGCASGSNTLSTVRDIVQSIDKVGQEKKNELERPTIQVFLNDLFQNDFNSVFKLLPSFYRKLEKENGRKIGSCLIGAIPGSFYGRLFPEESMHFLHSCYCLHWLSQVPSGLVTELGISANKGCIYSSKASRPPIKKAYLDQFTKDFTTFLRVHSEELISRGRMLLTWICKEDEFENPNSIDLLEMSLNDLVIEGHLEEEKLDSFNLPIYAPSAEEVKCIVEEEGSFEILYLETFKAPYDAGFSIDDDYQGRSHSPVSCDEHAIAEHVASVVRSIYEPILASHFGEAIMPDLSHRIAKNAAKVLRSGKGFYDSIIISLAKKQEKSDM

SEQ ID NO: 10566 - protein, 385 aa, Coffea liberica
MELQEVLRMNGGEGDTSYAKNSSYNLFLIRVKPVLEQCIQGLLRANLPNINKCIKVADLGCASGSNTLSTVRDIVQSIDKVGQEKKNELERPTIQVFLNDLFQNDFNSVFKLLPSFYRKLEKENGRKIGSCLIGAMPGSFYGRLFPEESMHFLHSCYCLHWLSQVPSGLVTELGISANKGCIYSSKASRPPIKKAYLDQFTKDFTTFLRVHSEELISRGRMLLTWICKEDEFENPNSIDLLEMSLNDLVIEGHLEEEKLDSFNVPIFAPSTEEVKCIVEEEGSFEILYLETFKAPYDAGFSIDDDYQGRSHSPVSCDEHAIAEHVAAVVRSIYEPILASHFGEAIMPDLSHRIAKNAAKVLRSGKGFYDSIIISLAKKPEKSDVN

SEQ ID NO: 10567 - protein, 386 aa, Coffea liberica
MELQEVLRMNGGEGDTSYAKNSSYNLFLIRVKPVLEQCIQGLLRANLPNINKCIKVADLGCASGSNTLSTVRDIVQSIDKVGQEKKNELERPTIQVFLNDLFQNDFNSVFKLLPSFYRKLEKENGRKIGSCLIGAMPGSFYGRLFPEESMHFLHSCYCLHWLSQVPSGLVTELGISANKGCIYSSKASRPPIKKAYLDQFTKDFTTFLRVHSEELISRGRMLLTWICKEDEFENPNSIDLLEMSLNDLVIEGHLEEEKLDSFNVPIFAPSTEEVKCIVEEEGSFEILYLETFKTPYDAGFSIDDDYQGRSHSPVSCDEHAIAEHVAAVVRSIYEPILASHFGEAIMPDLSHRIAKNAAKVLRSGKGFYDSIIISLAKKPEKSDVNH

SEQ ID NO: 10568 - protein, 372 aa, Coffea canephora
MELQEVLRMNGGEGDTSYAKNSAYNQLVLAKVKPVLEQCVRELLRANLPNINKCIKVADLGCASGPNTLLTVRDIVQSIDKVGQEKKNELERPTIQIFLNDLFPNDFNSVFKLLPSFYRKLEKENGRKIGSCLIGAMPGSFYSRLFPEESMHFLHSCYCLQWLSQVPSGLVTESGISTNKGSIYSSKASRLPVQKAYLDQFTKDFTTFLRIHSEELFSHGRMLLTCICKGVELDARNAIDLLEMAINDLVVEGHLEEEKLDSFNLPVYIPSAEEVKCIVEEEGSFEILYLETFKVLYDAGFSIDDEHIKAEYVASSVRAVYEPILASHFGEAIIPDIFHRFAKHAAKVLPLGKGFYNNLIISLAKKPEKSDV

SEQ ID NO: 10569 - protein, 371 aa, Coffea canephora
MELQEVLHMNEGEGDTSYAKNASYNLALAKVKPFLEQCIRELLRANLPNINKYIKVADLGCASGPNTLLTVRDIVQSIDKVGQEEKNELERPTIQIFLNDLFQNDFNSVFKLLPSFYRKLEKENGRKIGSCLISAMPGSFYGRLFPEESMHFLHSCYSVHWLSQVPSGLVIELGIGANKGSIYSSKGCRPPVQKAYLDQFTKDFTTFLRIHSEELFSHGRMLLTCICKGVELDARNAIDLLEMAINDLVVEGHLEEEKLDSFNLPVYIPSAEEVKCIVEEEGSFEILYLETFKVLYDAGFSIDDEHIKAEYVASSVRAVYEPILASHFGEAIIPDIFHRFAKHAAKVLPLGKGFYNNLIISLAKKPEKSDV

SEQ ID NO: 10570 - protein, 392 aa, Brassica rapa subsp. pekinensis
MEVMRILHMNKGNGETSYAKNSIVQSNIISLGRRVMDEALKKLMIRNSEILSFGIADLGCSSGPNSLLSISNIVETIQNLCHDLDRPVPELSLSLNDLPSNDFNYIFASLPEFYDRVKKRDNNYESLGFEHGSGGPCFVSAVPGSFYGRLFPRRSLHFVHSSSSLHWLSQVPCGEVNKKDGVVITADLDNRGKIYLSKTSPKSAHKVYALQFQTDFSVFLRSRSEELVPGGRMVLSFLGRSSPDPTTEESCYQWELLAQALMSLAKEGIIEEENIDAFNAPYYAASPEELKMAIEKEGSFSIDRLEISPVDWEGGSISDDSYDIVRFKPEALASGRRVAKTIRAVVEPMLEPTFGQKVMDELFERYAKLVGEYVYVSSPRYTIVIVSLLRMG

SEQ ID NO: 10571 - protein, 351 aa, Brassica carinata
MAPTYTMAGGKGPNSYSQHSTYQKALLEVAKEKISEAISTKLEINSASNRFNIADFGCSTGPNTFLAVQNIIDAVGQRYRKETQINPDDNIEFQVLFNDHSNNDFNTLFQTLPPTKRYFVAGVPGSFFGRVLPRDSLHVGHCSYSLHWLSQVPKGIADRSSPAWNRDIHCTGFSEEVAEAYLDQFKIDMGSFLKARGEELVSGGLLFLLGSCVPDGVKMSETMKGMLLDHLGNCLNDVAKEGLINQEELNSFNFPIYPAHVAEFKSVIEDNGCFTIEAFEKISHANEEFPLDPEFLATSNRVTFGGVIESRFGKEAMERTNELYEKKCPEILPELAKAKSGMQFFIMLRRN

SEQ ID NO: 10572 - protein, 366 aa, Stephanotis floribunda
MEVVEVLHMNGGTGDASYASNSLLQKKVILLTKPITEEAITELYTRLFPKSICIADMGCSSGPNTFLAVSELIKNVEKKRTSLGHESPEYQIHLNDLPSNDFNTIFRSLPSFQKSFSKQMGSGFGHCFFTGVPGSFYGRLFPNKSLHFVHSSYSLMWLSRVPDLEEVNKGNIYLSSTSPLSVIRAYLKQFQRDFTTFLQCRAEELVPGGVMVLTLMGRKGEDHSGKESGYALELLARALNELVSEGQIEEEQLDCFNVPQYTPSPAEVKYFVEEEGSFSITRLEATTIHWTAYDHDHVTGHHHAFKDGGYSLSNCVRAVVEPLLVRHFGEAIMDEVFHRYREILTNCMTKEKIEFINVTVSMKRRV

SEQ ID NO: 10573 - protein, 366 aa, Glycine max
MKVAHVLHMNGGVGHASYANNSLVQEKVICLTKPIREEAITSLYCNTVPRSLAVADLGCSSGPNTLLVVSEFIKIVEKLCRELNHKSPEYKVFLNDLPGNDFNNIFKSLDSFKEKLRDEMESRIGPCYFYGVPGSFYGRVFPNQSLHFVHSSYSLQWLSKVPEGVDNNRGNVYIGSTSPTNVARAYYEQFQRDFSLFLKCRAEELVKGGCMVLTFLGRRSDDPSSKDGGYIWELMATALNDMVLQGIIKEEQLDTFNIPQYTPSPSEVKLEVLKEGSFAINRLEVSEVNWDAFDDWNALEFESALSDGGYNVAQCMRAVAEPMLVSHFGEAIIEEVFSRYQQILADRMSKEKTKFTNVTILLTKKA

SEQ ID NO: 10574 - protein, 366 aa, Glycine max
MKVAQVLHMNGGVGHASYANNSLLQQKVICLTKPIREEAITSLYCNTVPRSLAVADLGCSSGPNTLLVVSEFIKIVEKLCRELNHKSPEYKVFLNDLPGNDFNNIFKSLDSFKKKLCDEMESGIGPCYFSGVPGSFYGRVFPNQSLHFVHSSYSLHWLSKVPEGVDNNRGNVYIGSTSPTNVARAYYEQFQRDFSLFLKCRAEELVKGGRMVLTFLGRRSDDPSSKDGGYVWELMATALNDMVLQGIIKEEQLDTFNIPLYTPSPSEVKLEVLKEGSFASNRLEVSEVNWNAFDDWNALEFESALSDGGYNVAQCMRAVAEPMLVSHFGEAIIEEVFSRYQQILTDRMSKEQTKCINVTVLLTRKA

SEQ ID NO: 10575 - protein, 612 aa, Oryza sativa
MKVEQDLHMSRGDGETSYAANSRLQEKAILKTRPLLHKAVEEAHASLFPRALVVADLGCSSGPNTLLVVSEVLSAVANRSSCDHKSSPDVQFFLNDLPGNDFNLVFQSLELFKKLAEMEFGKALPPYYIAGLPGSFYTRLFPDRSVHLFHSSYCLMWRSKVPDKLASGEVLNAGNMYIWETTPPSVVKLYQRQFQEDFSQFLALRHDELVSGGQMVLTFLGRKNRDVLRGEGRVEEEKLDSFNLPFYSPSVDEVKAVIRQSGLFDISHIQLFESNWDPHDSDDDDVATLDSVRSGVNVARCIRAVLEPLIARHFGRCIVDDLFDMYARNVAQHLEQVKTNKQKLPVVARVNNNAARTKHLSAPETSAMVVRRSADASSPLRSIQIPDSTIGKAQVWGAMGSYHYTSTSHFFFAGGGEGEYSSYKGTGSTDTHRPTTVRIPVTTPGPERPPDDAAAARIQAAFRGHLVRRHAAAVRGADDEATRLERLLRRQETVDAVRGDERERARFSEALMAVLLRLDAVPGYYPAVREARRAVTRRVVGLQEVFDAVLAAPDAADTCGVPASLDQVLEGIWGESPAAPPPPPPPPPPAAVEVEEEVLAGRDNYPIGQFNG

SEQ ID NO: 10576 - protein, 227 aa, Triticum aestivum
  unsure (1)..(227): unsure at all Xaa locations
GITEKHHRGSTSMKVEDVLHMATGDGENSYAANSRIPMKAMLKNRPLLQRTVEEVYTSLSSASTMVVADLGCSSGPNALFIVAEVTGMISDYNQNTNEEQHGVELQFLLNDLPKNDFNLIFQSLDQFHTVTRKGEGDEAATPPYYVVGLPGSFYNRLCPSQSVHLFHSSYSLHWLSKVPEELSSGEYVNEGNIHIGKTTPHSIVNLFREQFQIDFELFLTLRSKELX

SEQ ID NO: 10577 - protein, 398 aa, Streptomyces coelicolor A3(2)
MLSEQSVPVVRATLPAVGAAIGDIAALFYRKLFDAHPELLRDLFNRGNQANGEQQRALAGSVAAFAGLLLENPDERADVLLSRISHKHASLGITPDQYTIVHRHLMAAVVDVLGDAVTPEVARAWDEVYWLMANALIALEARLYTEKGVAEGDVWRTMEIVDRVEESADAVSLVLGSADGRPVVPFRPGQYVSVQVELADGARQIRQYSLSAAPGRSDWRITVKRVRGDGQPDGEVSSWLYANARKGDALNVSLPAGDLALAEHDGPLLLVSAGIGVTPMLSMLDHLAAAGATRPVTVVHADRTPDHHAHRQEQLDLIRTLPGARLHLWYEEPGDRAPEASTGRADLTGLDLPADLTVYLCGPVPFMRAVRGDLLRRGVPAEAIHYEVFGPDLWLGQQ

SEQ ID NO: 10578 - protein, 403 aa, Streptomyces coelicolor A3(2)
MLSSQSAQIVRDTLPTVGASLGTITDLFYRRMFEERPELLRDLFNRANQASGVQREALAGAVAAFATALVKHPDERPDAVLGRIANKHASLGITSDQYTLVGRHLLAAVAEVLGDAVTPAVAAAWDEVYWLMANALIAMEARLYARSDVEDGSVWQSMEIVERHEETPDTASFVLRPADGSPTRPFVPGQYVSVRAELPDGAHQIRQYSLSSAPGGGTWRFTVKRERSLDGQVPDGEVSTWLHTHARPGDVLRVSLPFGDLLLPEGDGPLLLASAGIGVTPMLAMLEHLATAAPDRPVTVVHADRSPALHAHRLELTALVERLPHASLHLWYEDTADHPDASADHVNEGWADLTGLSPVPGTTAFLCGPLSFMKAVRTDLLAHGLSPRAIHYEVFGPDLWLSK

SEQ ID NO: 10579 - protein, 435 aa, Streptomyces coelicolor A3(2)
MTGRFEFMHQSSHPDRPTTPADDWSGANAAHLAAPARIAAAPASVTDEDVALVRASLTVVTPHVSELAAHFYSILFSRYPQVRDLFPAELDVQRERLVRALLRIVELVDDPDNLVAFCSRLGRGHRKFGTQSGHYPAVGECLLQALSHFAGPAWHPALATAWQRAYTAAADVMVRAAEEDARSRPAVWDAHIVGHVHRGHGIAEITVRPHQPYPFVAGQYVSIETPWAPRQWRQYSPANAPRPNSELTFHVRAVREGKVSNALVHHARPGDPVRLGPPEGDMVLRPTRQRDLLFVAGGTGLAPIRALIEEVAQGSISDAREVSLFIGARTANELYGLDDMLRMSQRYHWLRVRAAVSDERIPGLEGTLPEVLAEFGPWYRHEAYLCGPPQMLSGAVHALRRHGVPPRHIHYDPWDTPVLTAPLGPPPPDEEDDQL

SEQ ID NO: 10580 - protein, 393 aa, Burkholderia sp. TH2
MLSAEHRAIVKATVPLLESGGEALTTHFYKTMLAEYPSVRPLFNQAHQQSGDQPRALANAVLMYARHIDQLEQLGGLVSQIVNKHVALNILPEHYPIVGACLLRAIREVLGAEIATDAVIEAWGAAYQQLADLLIGLEENVYVEKETATGGWRGTRAFVVARKVKESDEITSFYLRPADGGELLEFHPGQYIGLKLIVDGEEIRRNYSLSAAANGREYRISVKREPNGKASNYLHDSVNEGATLDLLTPSGDFTLEHNDKPLVLISGGVGITPTLAMLNAALQTSRPIHFIHATRHGGVHAFRDHIDELAARHPQLKRFYVYEKPRHDDEAHHAEGYIDEARLIEWLPATRDVDVYFLGPKSFMQAVKRHLKTIGVPEKQSRYEFFGPASALD

SEQ ID NO: 10581 - protein, 429 aa, Ralstonia metallidurans
MSSAGFIVCKNMHFTCMIQGVLLMLSAASRPYIDASVPVLREHGLAITTHFYREMFAARPELKRIFNMGNQANGSQQQSLASAVFAYAANIDRADVLAPVVERIVHKHVAVGLTPAHYPIVGKYLLEAIAAVLGDAATPPLLAAWDEAYWLLAGELIAAEARLYERHGVAAGELLRVRVVNREQEGDQVVALTLAAEDGSPLRDFAPGQYISVEASFADGRRQLRQYSLSGERGLPTWRISVKREDGASDAPAGTVSNWLHENAQVGTTLHVSTPWGDFAPELDSRQPIVLMSAGIGVTPMVSVLRTLAHENPHRPVLFAHAARHGRQHAHRRDLAWARERMPNLRTHVSYETPQSVDASGRDYDHAGTMPVEALLKSGDNAAFNDARFYLCGPLGFMQEQRRALIASGVPVGHIHREVFGPDLLDDIL

SEQ ID NO: 10582 - protein, 403 aa, Deinococcus radiodurans
MLTPEQKAIVKATVPALEAHGETITRTFYASMFAAHPELLNIFNPANQQTGKQARSLAASVLAYAAHIDHPEALGGMVGRIAHKHVSLEVLPEHYPIVGQYLLGAIAGVLGDAAKPEILDAWAAAYGELADLMIGIEKGMYDAGAGQPGGWRDFRPFRVARKVAESRVITSFVLEPVGGGALPAYQPGQYLSLKVKVPGQERWQIRQYSLSDAPSPDHYRISVKREGGGLVSEYLHGAVQEGDELLVHVPAGDFVLQQSERPVVLISAGVGITPMLAMVQTLAQAGSQRPVTFIHAAQNGSVHAFRDDVARLTHEYPHFRKVVFYDEAGPDDQLGTHHDVAGRLSLDAVRGALPAGEAEFYYCGPAGFAGAVEAILDDLQVPAERRFTETFGPSQSFAPVILG

SEQ ID NO: 10583 - protein, 414 aa, Burkholderia fungorum
MDRKGATVDARLTIHSPPGLPMLSAEHRAIVKATVPLLESGGEALTTHFYRILIGEHPEVRPMFNLANQASGAQPRALANSVLMYARHIDQLEQLGGLVSQIINKHVALNILPEHYPIVGQCLLRAIREVLGAEIATDAVIAAWAAAYRQLADLLIGLEEKIYAEREAAPGGWRGTRLFRVARKVRESDEITSFYLRPDDNGELLAFHPGQYIGVRLYIDGEEVRRNYSLSAMSNGCEYRISVKREANGKVSSHLHTHLNENDTIELFAPAGDFTLEPGDKPLVLISGGVGITPTLAMLQAALHTNRVVHFIHSARHGGVHAFRDTIEQLAARHPQLKRFYCYEQRRADDADADGIGYLDETRLDAWLPETRDVDVYFLGPIAFMKAVKKHLKAIGVPESQSRYEFFGPAAALE

SEQ ID NO: 10584 - protein, 733 aa, Burkholderia fungorum
MMTSGLRPGDPGAILRLIRAPPDARQPFPDSPLMPHPDRSAVVSANSTDNAVSPWHAGELKLQRAVGVAERMQEVGRRVIRRLMPDQHRAFFPQLPFVALGAVDHEGDVWATLVAGKPGFLHAPTARTLRVDLVRDPHDPASAGLDDGEAVGLLGIELHTRRRNRLNGTVSHSAGAGFNVDVTQSFGNCPQYIQMRDAEFVRDPASPPPVEAVQLEHLSERARTMIDTADTFFVASYVDDPAGRQVDVSHRGGKAGFVRLSEDGVLTIPDFAGNLFFATLGNFVINPRAGLVFADFESGDLLQLTGEAQVDLDSPEIAAFQGAERLWRFKPRRIVYRAGALPLRWKLQANGWSPNSLMTGSWDEVASRVKAQALADAWRPFKVTQVVDESSVIRSFYLEPLDGAGLIPHAAAQHLPIRVTLPGCTKPVIRTYTLSTAPADGSYRISVKRQGLVSAHLHDTLRVGSVIEARAPAGQFTIDAAARRSAVLLAAGVGVTPMLAMLRHIVYEGLRTRRVRPTWFFHSARTLAERAFTKEIDQLAASAGGAVRVVRTLTDTEGAQMGKDFDASGRLDVELLRATLPFNDYDFYLCGPAGFMQSLYDGLRELNVADNRIHAEAFGPAGLHRRADAGADAGLAHLPADKPVPVAFVKSGKEARWNPDSGSLLDLAESRGLSPEFGCRGGSCGTCRTRVLEGAVAYPVAPEFKVASDEALICCAVPAQAGTSGAERLLLDL

SEQ ID NO: 10585 - protein, 320 aa, Burkholderia fungorum
MNPLIAVRVARKRIEAADIASLILESADGAPLPPAGPGAHIDVHTPSGCVRQYSLCNLADEHGHYRIAVLRDSASRGGSISMHDDVLEGGKLSISAPKNHFPLREDARHSILIAGGIGITPVIAMASALHARGASFALHYRTRSAARTAFLRELTHGALAPHCALYHDDAPALRKLELMPLLEAAPPDTHVYVCGPKGFMDAVISTARAQHWSEDRIHFEYFAGVATPGANANSFEVVLAKSGQVVQVAPSQTIVEVCSAHGVAIPTSCLHGICGTCITRVLEGEVEHKDFYLTPQERASHTQMLPCCSRAKSHRLVLDL

SEQ ID NO: 10586 - protein, 396 aa, Escherichia coli O157:H7 EDL933
MLDAQTIATVKATIPLLVETGPKLTAHFYDRMFTHNPELKEIFNMSNQRNGDQREALFNAIAAYASNIENLPALLPAVEKIAQKHTSFQIKPEQYNIVGEHLLATLDEMFSPGQEVLDAWGKAYGVLANVFINREAEIYNENASKAGGWEGTRDFRIVAKTPRSALITSFELEPVDGGAVAEYRPGQYLGVWLKPEGFPHQEIRQYSLTRKPDGKGYRIAVKREEGGQVSNWLHNHANVGDVVKLVAPAGDFFMAVADDTPVTLISAGVGQTPMLAMLDTLAKAGHTAQVNWFHAAENGDVHAFADEVKELGQSLPRFTAHTWYRQPSEADRAKGQFDSEGLMDLSKLEGAFSDPTMQFYLCGPVGFMQFAAKQLVDLGVKQENIHYECFGPHKVL

SEQ ID NO: 10587 - protein, 397 aa, Xylella fastidiosa Dixon
MSASFSPHTITLIKSTVPLLAEHGTTIIEAMYHRLFEDPQIEALFNQANQKNGTQIHALAGAILAYARNIDNPGVLASAIERISQKHVGYAIHPEHYPHVATALLGAIKQVLGDVATSEVLEAWGEAYWFIANLLKDREAVIREGIMTKNGGWIHWRRFVISKRIPESETITSFMLHPEDGGPVVPHQAGQYLTFRFDAAGMPGMKRNYSISCGPNSDYYRITVKREHGTGASAFLHDQAKVGTIIECTPPVGDFFLPSVIERPIVLLSGGVGLTPMVSMMEQIAEAHPDAQVWYVHGTQNRETHAMDAHIRALVSRHKHMKATTFYTQRSEADDAEAGFITIDWLRANTPFQKADFYLCGPRPFLRTFVRDLIGAGVPAAQVHYEFFGPMDEEMAA

SEQ ID NO: 10588 - protein, 397 aa, Xylella fastidiosa Ann-1
MSASFSPHTITLIKSTVPLLAEHGTTIIEAMYHQLFEDPQIEALFNQANQKNGTQIHALAGAILAYARNIDNPGVLASAIERISQKHVGYAIHPEHYPHVATALLGAIKQVLGDVATSEVLQAWGEAYWFIANLLKDREAVIREGIMTKNGGWIHWRRFVISKRIPESETITSFMLHPDDGGPVVPHQAGQYLTFRFDAAGMPGMKRNYSISCGPNSDHYRITVKREHGTGASAFLHDQAKVGTIIECTPPVGDFFLPSVIERPIVLLSGGVGLTPMVSMMEQIAEAYPDAQVWYVHGTQNRETHAMDAHIRALVSRHKHMKATTFYTQRSEADDAEAGFITIDWLRANTPFQKADFYLCGPRPFLRTFVRDLIGAGVPAAQVHYEFFGPMDEEMAA

SEQ ID NO: 10589 - protein, 381 aa, Staphylococcus aureus subsp. aureus Mu50
MLTEQEKDIIKQTVPLLKEKGTEITSIFYPKMFKAHPELLNMFNQTNQKRGMQSSALAQAVMAAAVNIDNLSVIKPVIMPVAYKHCALQVYAEHYPIVGENLLKAIQDVTGLEEHDPVIQAWAKAYGVIADVFIQIEKEIYDQMMWIGFKPFKITNIKQESEDIKSFTVETEEYDFSEFTPGQYITVDVSSDKLPYRAKRHYSIVSGEKNHLTFGVKRDVTTEHEGEVSTILHDEIKEGDMINLAAPVGGFVLENTTEPQLFLGSGIGVTPLVAMYEAASAKGLDTQMVQVAENEQHLPFKDNFNSIASHYDNAKLYTHLKDKQGYIGTEELQAFLANKPEIYICGGTKFLQSMIEALKSLNYDMDRVHYETFIPRLSVAV

SEQ ID NO: 10590 - protein, 392 aa, Pseudomonas putida KT2440
MLNAEQRAIIKATVPLLESGGEALTTHFYKMMLSEYPEVRPLFNQAHQASGDQPRALANGVLMYARHIDQLEQLGGLVGQIINKHVALQILPEHYPIVGSCLLRAIEEVLGKDIATPAVIDAWGAAYGQLADILIGAEENLYKEKEEAEGGWRGTREFRLVRREQESSEIVSFYFAPVDGMPVLKAEPGQYIGLKLDIDGAEQRRNYSLSALCDGKEYRISVKREAGGKVSNYLHDELKVGDTLQLFPPAGDFTLAASDKPLVLISGGVGITPTLAMLQAALQTRREVHFIHCARNGAVHAFRDWIDGLAARHPQLKRFYCYAEPEGGAAADAVGLLSEDLLAEWLPQERDVDAYFLGPKGFMAAVKRQLKGLGVPEQQSRYEFFGPAAALE

SEQ ID NO: 10591 - protein, 678 aa, Pseudomonas putida KT2440
MQQSPDHRPSPWHAGEKTLQEKVGVAERMEAFGQKVIRDHMPDQHRTFYHQLPFMVAASVDAQGRPWATLLEGPEGFVSSPDPRMLTIHTTLPADDPATPGLAAGQAVGLLGIELHTRRRNRINGQIRHAAQGQLQVAVEQAFGNCPQYIQLRDYTRVTEPALGRIDATTLDTSTVSMIQAADTFFVASYVEHAYGQRSVDVSHRGGRPGFIKVEGNRLTIPDYAGNLHFNTLGNLVVNPRAGLLFIDFKNGNVLQLYGRAEVLLDSPAIQAFEGAERLWTLQVEKVVWRPAAVALRWAFKEYAPTSLMTGTWAEADARLEQRQQQRQWLAWRVLRVEQESRDIRSFYLEPPAGCRVAFAPGQHLPVQVPRDGESALIRTYSLSSAPDDGFLRISVKAQGPASRYLHERVVAGDVLNVRPPMGSFTLDQQSTRPLVLIGAGVGITPLLAMLRQQLRTGQARRIHLFHGARSLADLPFQQELAALRQQAGDLLQVHRALSQPEGHAQVGRDYEFAGRLGIEQVKATLALDDYDFYLCGPGSFTQQLYEGLRGVHVPDARIHAEAFGPSTLRRHTDADQPVLQQPPAADEPVPVYFAASAKEARWVPGSGTLLELAEARGLAPEFSCRGGSCGTCKTRLVSGQVHYPNPPAELPEAGSVLICCAVPAKVEEGMQALVLDV

SEQ ID NO: 10592 - protein, 397 aa, Xylella fastidiosa 9a5c
MSASFSPHTITLIKSTVPLLAEHGTTIIEAMYHRLFEDPQIEALFNQANQKNGTQIHALAGAILAYARNIDNPGVLASAIERIAQKHVGYAIHPEHYPHVATALLGAIKKVLGDVATSEVLEAWGEAYWFIANLLKDREAVIREGIMTKNGGWIHWRRFVISKRIPESETITSFMLHPEDGGPVVPHQAGQYLTFRFDAAGMPGMKRNYSISCGPNSDHYRITVKREHGTGASAFLHDQAKVGTIIECTPPVGDFFLPSVIERPIVLLSGGVGLTPMVSMMEQIAEAHPDAQVWYVHGTQNRETHAMDAHIRALVSRHKHMKATTFYTQRREADDAEAGFITIDWLRANTPFQKADFYLCGPRPFLRTFVRDLIGAGVPAVQVHYEFFGPMDEEMAA

SEQ ID NO: 10593 - protein, 381 aa, Staphylococcus epidermidis ATCC 12228
MLTEKEQDIIKQTVPLLQDKGTEITSIFYPKMFEANPELLNMFNQTNQKKGMQSAALAQAVLAAAMNINNLGAIKPAIMPVAHKHCALQVYPEHYPIVGENLLAAIQDVTGLESDDPVIQTWAKAYGEIADVFIKLEQEIYNHMLWKGFKPFKITNITQETSDIKSFTVESEEYDLSQFEPGQYITVDVSSEKLPYRAKRHYSIIDGDENHLVFGVKRDVTTEHEGEVSTILHDEISEGDMINLSAPVGGFSIENTERPQLFIGSGVGMTPLVSMFKKAASLNVPTQMIQAVVTEDERPFAQKLDSITDNYEQAQLHLHVKDKEGYLEAKELEQYLSEQPEIYICGGTKFLHSIINSLKELNYDMNHVHFETFIPRLSVQV

SEQ ID NO: 10594 - protein, 397 aa, Xylella fastidiosa Temecula1
MSASFSPHTITLIKSTVPLLAEHGTTIIEAMYHRLFEDPQIEALFNQANQKNGTQIHALAGAILAYARNIDNPGVLASAIERISQKHVGYAIHPEHYPHVATALLGAIKQVLGDVATSEVLEAWGEAYWFIANLLKDREAVIREGIMTKNGGWIHWRRFVISKRIPESETITSFMLHPEDGGPVVPHQAGQYLTFRFDAAGMPGMKRNYSISCGPNSDHYRITVKREHGTGASAFLHDQAKVGTIIECTPPVGDFFLPSVIERPIVLLSGGVGLTPMVSMMEQIAEAYPDAQVWYVHGTQNRETHAMDAHIRALVSRHKHMKATTFYTQRSEADDAEAGFITIDWLRANTPFQKADFYLCGPRPFLRTFVRDLIGAGVPAAQVHYEFFGPMDEEMAA

SEQ ID NO: 10595 - protein, 413 aa, Magnetospirillum magnetotacticum
MPTPLSARTIAVVKATIPALETHGLTITRRMYERLFQNTDIRDLFNQSHHGETGSQPKALALAVLAYARNIDNLGVLTGAVERIAQKHVALNILPEHYSFVADALIGAIQDVLGEAATPEIVEAWGEAYWFLAELLIGREATIYRDLASKSGGWNGWRDFVVESVTPESEIIRSFVLVPADGGPVLRHEPGQYLGFLLDLPGRGVLKRNYSISCAPNDRAYRITVKREAKTEHPAGLVSNWLHDAAIAGTVLKVAAPAGDFFLDRSSNAPVVLVSGGVGLTPMVSMLESITETTPERPTWFVHSALNGRVHALREHVRNLAANRDNLRVRIFYTAPEAQDRVGEAYDIPGPVTAEWLVANTPSEQATYYLCGPKSFLASLANGLVRAGIPAERVRFEFFGPADALLEEPKQAA

SEQ ID NO: 10596 - protein, 402 aa, Bacillus anthracis str. A2012
MLSEKTIEIVKSTVPLLQEKGVEITTRFYEILFSEHPELLNIFNHTNQKKGRQQQALANAVYAAATYIDNLEAIIPVVKQIGHKHRSLGIKAEHYPIVGTCLLRAIKEVAGAPDEVLNAWGEAYGVIADAFISIEAEMYEEAAHKEGGWKDFRNFVVVKKVKESDVITSLYLKPEDGGKVSSFIPGQYVTVQINIEGETYTHNRQYSLSDAPGKEYYRISVKKEKGVDTPDGKVSNYLHDHVKEGDMLPVSAPAGDFVLNMDSTLPVVLISGGVGITPMMSMLNTLIEQDSKRNVCFVHAAINSNTHAMKEHVEAVDNEYEQVKAYTCYSAPTEKDLEMKNFDKEGFVEREWLQTIIPTTEAEFYFCGPVPFMKHINAVLTDLGVKQEHIHYEFFGPAASLQ

SEQ ID NO: 10597 - protein, 140 aa, Campylobacter jejuni subsp. jejuni NCTC 11168
MTKEQIQIIKDCVPILQKNGEDLTNEFYKIMFNDYPEVKPMFNMEKQISGEQPKALAMAILMAAKNIENLENMRSFVDKVAITHVNLGVKEEHYPIVGACLLKAIKNLLNPDEATLKAWEVAYGKIAKFYIDIEKKLYDK

SEQ ID NO: 10598 - protein, 144 aa, Clostridium perfringens str. 13
MLDQKTIDIIKSTVPVLKSNGLEITKTFYKNMFEQNPEVKPLFNMNKQESEEQPKALAMAILAVAQNIDNLEAIKPVVNRIGVIHCNAKVQPEHYPIVGKHLLGAIKEVLGDGATEDIINAWAKTYGVIAEVFINNEKEMYASR

SEQ ID NO: 10599 - protein, 248 aa, Clostridium perfringens str. 13
MENVWNGFRQLEIFKIEEEAKDIKSFYLRATDGKPLKEYKCGQFLPLKIETDDEVIKKEMRRYSLSGDPKKNYYRLTIKRVPNGKVSGYFHESINVGDTILAMPPFGNFTLTEDSNKPLVLLSGGIGITPILSMLYGAKEQSRDIYFVEAVLNSDNLALNSDVQGIKKVKNFKEIKIFSEPLESDIKGKDFDEEGFITKEWIKNNLPLNGEFFFCGPTLFMKSIRNSLKDLGVKEDNINFEFFGKEEF

SEQ ID NO: 10600 - protein, 404 aa, Corynebacterium efficiens YS-314
MIGVSRPTPQNSYPGGSTVIVSTKPLTDRSRLSEAHAEMIKATLPLVGSKINDITPVFYNRMFTAHPELLRSTFNRANQKQGDQQKALAASIATFATMLVDPEAPDPVDMLARIGHKHVSLGITADQYNIVHEHLFGAIVEVLGADVVTPPVAEAWDAVYWLMANVLIDLESDLYASNDLAPGDVFRHVTVTGKKQLSDKVWEYTFEGDLVTPAPGQYTSIGVKLPDGARQLRQYSLLSGTDSQYRIAVEDNGEVSTFLRDNVEVGDTIEASVAAGDLVMNDDVNPVVLISQGIGSTPMVGMLNQVAADRHVTVLHADQSEKDHAQREEMVALVGGLANGALYTFYRDADQWLNVAGHIPSDASVYLCGGNEFLQNVRGQLENLEEQPREIRFELFSPNDWLIS

SEQ ID NO: 10601 - protein, 381 aa, Staphylococcus aureus subsp. aureus MW2
MLTEQEKDIIKQTVPLLKEKGTEITSIFYPKMFKAHPELLNMFNQTNQKRGMQSSALAQAVMAAAVNIDNLSVIKPVIMPVAYKHCALQVYAEHYPIVGENLLKAIQDVTGLEENDPVIQAWAKAYGVIADVFIQIEKEIYDQMMWIGFKPFKITNIKQESEDIKSFTVETEEYDFSEFTPGQYITVDVSSEKLPYRAKRHYSIVSGEKNHLTFGVKRDVTTEHEGEVSTILHDEIKEGDMINLAAPVGGFVLENTTEPQLFLGSGIGVTPLVAMYEAASAKGLDTQMVQVAENEQHLPFKDNFNSIASHHDNAKLYTHLKDKQGYIGAEELQAFLANKPEIYICGGTKFLQSMIEALKSLNYDMDRVHYETFIPRLSVAV

SEQ ID NO: 10602 - protein, 386 aa, Corynebacterium glutamicum ATCC 13032
MIVSTQPITDRSALSAEHAEVIKATLPLVGGKINEITPVFYNKMFAAHPELIANTFNRGNQKQGDQQKALAASIATFATMLVTPDAPDPVQLLSRIGHKHVSLGITADQYDIVHEHLFAAIVEVLGAETVTAPVAEAWDAVYWIMANVLIGFENNLYASNDLEPGDVFREVTVTAKKQLSATVWEYTLAGELVAPEPGQYTSIGVVLDDGARQLRQYSLLGGSDTEYRIAVEDNGEVSGFLRDRVSVGDKIEATIAAGDLVLNKDTNPVVLISQGIGSTPMVGMLAGMNPERDVVVLHADQAESTYAQVEEVQGLVEKLPKAAFEIFYRDNDQWLEVAGRIPSGASVYLCGGVEFLKNVREQIEALDEQPRDVNFELFAPNDWLIS

SEQ ID NO: 10603 - protein, 396 aa, Shigella flexneri 2a str. 301
MLDAQTIATVKATIPLLVETGPKLTAHFYDRMFTHNPELKEIFNMSNQRNGDQREALFNAIAAYASNIENLPALLPAVEKIAQKHTSFQIKPEQYNIVGEHLLATLDEMFSPGQEVLDAWGKAYGVLANVFINREAEIYNENASKAGGWEGTRDFRIVAKTPRSALITSFELEPVDGGAVAEYRPGQYLGVWLKPEGFPHQEIRQYSLTRKPDGKGYRIAVKREEGGQVSNWLHNHANVGDVVKLVAPAGDFFMAVADDTPVTLISTGVGQTPMLAMLDTLAKAGHTAQVNWFHAAENGEVHAFADEVKELGQSLPRFTAHTWYRQPSEADRAKGQFDSEGLMDLSKLEGAFSDPTMQFYLCGPVGFMQFTAKQLVDLGVKQENIHYECFGPHKVL

SEQ ID NO: 10604 - protein, 396 aa, Escherichia coli CFT073
MLDAQTIATVKATIPLLVETGPKLTAHFYDRMFTHNPELKEIFNMSNQRNGDQREALFNAIAAYASNIENLPALLPAVEKIAQKHTSFQIKPEQYNIVGEHLLATLDEMFSPGQEVLDAWGKAYGVLANVFINREAEIYNENASKAGGWEGTRDFRIVAKTPRSALITSFELEPVDGGAVAEYRPGQYLGVWLKPEGFPHQEIRQYSLTRKPDGKGYRIAVKREEGGQVSNWLHNHANVGDVVKLVAPAGDFFMAVADDTPVTLISAGVGQTPMLAMLDTLAKAGHTAQVNWFHAAENGDVHAFADEVKELGLSLPRFTAHTWYRQPNEADRAKGQFDSEGLMDLSKLEGAFSDPTMQFYLCGPVGFMQFAAKQLVDLGVKQENIHYECFGPHKVL

SEQ ID NO: 10605 - protein, 426 aa, Thermobifida fusca
MGGQWGSRIPLFNMHPGCKLTGVSAPQPFGGCMLSTQSADIVRATLPVVGAHLDEITSRFYSTMFSERPELLDGLFNRGNQANGEQRRALAGSIAGFASALLANPDERPDALLARIAHKHAAVAVTDDQYVIVHKYLFGAIADVLGDAATPEVIAAWDEVYWLMGGALIALEARLYAEKNADNGRTWREWTIVDRREETPDVFSLVLRPSDGGPLPEARPGQYVSVLHRMPDGIRQIRQYSISGGDEHTRRITIKRVRGTEHTPEGEMSALLYATAKAGDTLTVSAPFGDVVLTDSDRPLVFATAGIGCTPIVGMLNYLAATGATRRILALHADRSRAEHALWQETSTLIARLPHAQYVVWYEEGDGGLPGQMDLTGLEIPADAEVYLCGPLPFMREIRTQFLAAGVPAKDIHYEVFGPDLWLPAD

SEQ ID NO: 10606 - protein, 695 aa, Microbulbifer degradans 2-40
MPLCPPSNSEFTTSHFNKDSTMKRLQPSQFHQAEKAVQKRLGVADMVAQHSEGYIRSTMPGQHRDFFTNLPMVIVSITDFDGFPWPIPLHGKPGFIKSPNANTLEIETYPTLKDVLKLNFKKSQKIGILGIELHTRRRNRMNGTIKEINNNSFLVICEQSFGNCPQYIQKRELHWVDTPQKCLQTEDIFLTNTLTSTCAEWIESSDTFFISSRTKRLSTDKRDGLDVSHRGGKPGFVKVENDTLYFPDFSGNQFFNTLGNIQSDSRVGLYFPDYESGKIILISGTAKIIWDKELTRIFEGAERIISVKVRNCLILDSFLPMRGVLTELSPSLIRTGTWENPQEKSAARVYKQFKIIKKIKESRDVTSFYIRPLDGSALSSYLPGQFLPISIKQPHTSSTCLRTYTLSQAPLSNAYRFSVKREKFGLASRILHDTINTGDSLYVSQPEGKFTLQTNKKTNVLLSAGIGITPMIAMLQGLIREVEKGEKPQDVYFIHSTQNSETHTFANELKHLNKRHKWLQLYTIYSQPKLNDKLGQHYDVSGRISLDLLRKILPTDNFDVYLCGSESFMRSSYTNLKAMGIAESRIFYEFFDDGSFESHQLNKFQTAQRAEIYFAKSNITATWTPNDGTLLQFAEKMGLKPMYSCRTGNCGTCSCTLSTGEVTYANKPGYTPANGSALICCARPALNTTKLTFHI

SEQ ID NO: 10607 - protein, 393 aa, Pseudomonas fluorescens PfO-1
MLSVQDRAIVKSTVPLLESGGEALITHFYRMMLSEYPEVRPLFNQAHQASGDQPRALANGVLMYARHIDQLDQLGDLVAKIINKHVALQILPEHYPIVGTCLLRAISEVLGEEIATPEVMSAWGAAYGQLAEILIGAETAIYDQKEQAVGGWRGAREFIVAAKVEESAEIISFYFEPADKGPILAAEPGQYIGMKLVLDGEEIRRNYSLSALANKGQYRISVKREPGGRASNYLHDQLHVGASIQLFPPSGEFTLTASDKPLVLISGGVGITPTLAMLEAALETERPVYFIHSARNGSVHAFRDWIDGLAARHPQLKRFYCYAEDDGVSPAADKVGLLSEEQLGEWLPAERDVDAYFLGPKGFMGAIKRHLKALGVPEKQSRYEFFGPAAALE

SEQ ID NO: 10608 - protein, 677 aa, Pseudomonas fluorescens PfO-1
MMERSPWHAGEQQLQAHVGVAERMEEFGRKVIRTWMPDQHRQFYQQLPFMLYGAVDAEGRPWASVLEGEPGFAHSPEPTQLQFASLPAADDPAQLQAGAAIGLLGIELHTRRRNRLNGHIDNLDANGFGLTVDQSFGNCPQYIQLRQFQRVPLTDPQTRKAEHRDSLDAAAIALIESADTFFVASYVDVDGERSVDVSHRGGQPGFVRIEGNRLTIPDFAGNLHFNTLGNLLLNPLAGLLFIDFSTGDVLQLSGRTEIILDAPQIEAFQGAERLWTFEVEKLVRRPAALALRWRFDGMSPTSLLTGNWAQADARLQAKALGDSWRPLRVAKVEMESRHIRSIYLEPNDGAGLPVFLAGQHLPLRFTLDGEVHIRTYSLSGAPSDDFFRISVKREGRVSTHLHEQIRVGDVLEARLPQGHFTVAALERKPLVLLAAGVGITPLLSMLREVVYQGLRTRRIRPTLFVQSSRSLADQPFRAEVDRLLEDAGDAVKVLRVLSQPEDDLVEGKDFDLRGRIDGDLLRNLLTDEDFDQVDFVLCGPGGFTQGIYDILRELNVRDGQIHAETFGPSTLKRQADPDAIVMEQPPAATTSVPVLFERSAKEARWQPDGGSLLELAESRGLRPEFSCRGGSCGTCKTRLISGAVNYPQPPAEVPEEGQVLICCAVPAQSAQPLVLDL

SEQ ID NO: 10609 - protein, 393 aa, Pseudomonas aeruginosa PAO1
MLSNAQRALIKATVPLLETGGEALITHFYRTMLGEYPEVRPLFNQAHQASGDQPRALANGVLMYARHIDQLQELGPLVAKVVNKHVSLQVLPEHYPIVGTCLLRAIREVLGEQIATDEVLEAWGAAYQQLADLLIEAEESVYAASAQADGGWRGVRRFRVARKQAESEEITSFYLEPVDGQPLLAFQPGQYIGLRLDIDGEEVRRNYSLSAASNGREYRISVKREAGGRVSNYLHDRVAEGDELDLFPPAGDFVLRDSDKPLVLITAGVGITPALAMLQEALPQARPIRFIHCARHGGVHAFRDWIEDVSAQHEQVEHFFCYSEPRAGDSADAEGLLSREKLADWLPQERDLDAYFLGPRPFMAQVKRHLADLGVPSQQCHYEFFGPAAALDA

SEQ ID NO: 10610 - protein, 396 aa, Yersinia pestis CO92
MLDTQTIAIVKSTIPLLAATGPKLTAHFYERMFKHHPELKNIFNMSNQSSGDQREALFNAICAYATNIENLAALLPTVERIAQKHTSLNIQPEHYPIVGEHLIATLDELFSPGQAVLDAWAKAYGVLADVFIQRESQIYQQSETETGGWRTLRRFRIIKKEQQSEVICSFVLAPEDGGQVLHYKPGQYLGIYIEHESLEFQEIRQYSLTTAPNGKTYRIAVKREEQGTVSNLLHRELNEGDIVRIAPPRGDFFLDVSPDTPVALISAGVGQTPMLSMLNTLYSQQHAAPVHWLHAAENGRVHAFADEVSAIAAKMPNLSRHVWYREPDLQDKHGEDYHSQGLMDLSSYQWLADDPKRHYYFCGPLPFMQFIGRQLLAQGIAPEQIHYECFGPHKVI

SEQ ID NO: 10611 - protein, 394 aa, Vibrio vulnificus CMCP6
MLSENTINIVKSTAPLLAETGPKLTAHFYQRMFEHNPELKDIFNMSNQRNGDQREALFNAICAYASNIDNLPALLGAVEKIAHKHSSFLITADQYQIVGGHLLATIDELFSPGQAVLDAWAEAYGVLANVFIQREEQIYQDNQSQTGGWRGLREFELVEKQYESAHICSFVFKPVDGGSVVSFKPGQYLGIYINDEQFENQEIRQYSLSSSVRPDCYRISVKREEGGRVSNYLHDHLDVGSKVKLAAPAGDFFLDAAPTAPVVLISAGVGLTPTLSMLESLTEHQAPVTWIHATENGQQHAFKQHVKQLVETHPHFNSLVWYNQPNSDDKIGDDFQFSGWVNLHEIETVLKQADVQVYFCGPVGFMQFIAKQLLEMGVPEQQFHYECFGPHKVV

SEQ ID NO: 10612 - protein, 406 aa, Oceanobacillus iheyensis HTE831
MSNTTVLLDKKTTEIIKATVPVLKEHGEAITKHFYKILLENNPELKNVFNQTNQRKGAQSKALANTVYAAAANIEKLEEILPHVKQIAHKHVSLNIKPEQYPIVGKYLLIAIKEVLGDAATDEIIEAWEKAYFVIADIFISVEKEMYNEKKNQIGGWTGFRDFKVIKKVKESKEITSFYLKPDDNLPITTFIPGQYITIKAQIESEAYVHLRQYSLSTAPGKDYYRISVKREASNQPIGVVSNYLHTSVEVGSVLPISAPAGDFILDERDHRPLVLISGGVGLTPIMSMLESVVEHQPNRNVVFIHAAKSIDHQAMRKRVSEIAKSKEQVKQYVVYSNPTNRTDGDKQGYIDYEWLKEVIPTKDAAFYLCGPKPFMSAINNDLQNMNIAQNDIHMELFGPLEPIAK

SEQ ID NO: 10613 - protein, 394 aa, Vibrio parahaemolyticus RIMD 2210633
MLSNQTIEIVKATAPLIAETGPKLTAHFYDRMFTHNPELKDIFNMSNQRNGDQREALFNAICAYAANIENLPALLGAVEKIAHKHTSFLITKDQYQIVGKHLIATIDELFNPGQEVLDAWAEAYGVLANVFIQREEQIYQANASQEGGWRGLREFELVGKQLESEHICSFVFKPTDGSKVTKYKPGQYLGIYINSDKFENQEIRQYSLSSSVQENTYRISVKREQGGKVSNYLHDELNIGDKVKLAAPAGDFFMDVDTNTPVVLISAGVGLTPTLSMLESLTEHHAPVTWVHATENSKHHAFKEHVNQLVTAKENMNALIWYNQPTAEDKIGEDFHFTGFVNLHEIEAALKQDNVQVYFCGPVGFMQHVAKQLQELGVPQEQFHYECFGPHKVV

SEQ ID NO: 10614 - protein, 399 aa, Bacillus subtilis subsp. subtilis str. 168
MLDNKTIEIIKSTVPVLQQHGETITGRFYDRMFQDHPELLNIFNQTNQKKKTQRTALANAVIAAAANIDQLGNIIPVVKQIGHKHRSIGIKPEHYPIVGKYLLIAIKDVLGDAATPDIMQAWEKAYGVIADAFIGIEKDMYEQAEEQAGGWKEYKPFVIAKKERESKEITSFYLKPEDSKPLPEFQAGQYISIKVRIPDSEYTHIRQYSLSDMPGKDYYRISVKKDGVVSSYLHDGLQEGDSIEISAPAGDFVLDHASQKDLVLISAGVGITPMISMLKTSVSKQPERQILFIHAAKNSEYHALRHEVEEAAKHSAVKTAFVYREPTEEDRAGDLHFHEGQIDQQFLKELIANTDADYYICGSPSFITAMHKLVSELGSAPESIHYELFGPQLSLAQSV

SEQ ID NO: 10615 - protein, 139 aa, Aquifex aeolicus VF5
MLSEETIRVIKSTVPLLKEHGTEITARMYELLFSKYPKTKELFAGASEEQPKKLANAIIAYATYIDRLEELDNAISTIARSHVRRNVKPEHYPLVKECLLQAIEEVLNPGEEVLKAWEEAYDFLAKTLITLEKKLYSQP

SEQ ID NO: 10616 - protein, 587 aa, Bradyrhizobium japonicum USDA 110
MMARLLSVNVGLPRDVAWQGKTVHTGIWKAPVEGPRRVRRLNIDGDGQGDTAGHGGEQRAVFVYQDESYRYWQEHLGRPDLVHGQFGENFTVEGLADTNVCIGDRYRIGSALFEVTQPRVTCYRLGIRMDEPDMPALLVRHGRPGFYFRVIEEGDVEAGDEITLLANGPESMSVFEINALLYLPPHPRDRLERALRIPALSRGWNRSFASLLEQQRTSKIAAGNAGLGPAASPPPAWRGFRPFRVSRKIAESGTVTSLILEPTDGHRAAPALPGQFVVVRLGPSEAQAMTRSYSLSSRSDAPPYRISIKREAHGAASLYIADSLRVGDVVEVGAPRGSFTLRQDARPVVLLSAGIGVTPVLAMLHALVAEGSTRDVWWLHGARNGREHAFAAETRGLLAGLAHYHSHVCFSAPDPADRPGADFDSAGHLDQHLIERLNMPRDGDFYLCGPAAFMSDLTAGLAALGVAPDRIHTELFGARPSLTPGIAASPRTPAHAPVGAPGPGPMVSFARSGLNVRWGPSYASLLELAEACDVPVRWSCRTGVCHNCESGLVAGEVSYAPDPLDPPADGNVLICCSQPKADVVIDL

SEQ ID NO: 10617 - protein, 402 aa, Bacillus cereus ATCC 14579
MLSAKTIEIVKSTVPLLQEKGVEITTRFYQILFSEHPELLNIFNHTNQKKGRQQQALANAVYAAATYIDNLEAIIPVVKQIGHKHRSLGIKAEHYPIVGTCLLRAIKEVAGAPDEVLNAWGEAYGVIADAFISIEAEMYEEAAHKEGGWKDFRNFVIVKKVKESDVITSFYLKPEDGGKVSSFIPGQYVTIQINIEGETYTHNRQYSLSDAPGKEYYRISVKKEKGVDTPDGKVSNYLHGHVKEGDVLPVSAPAGDFVLNMDSTLPVVLISGGVGITPMMSMLNTLIEQDSKRNVYFVHAAINSNTHAMKEHVKAVENEYEQVKAYTCYSAPTEKDLEMKNFDKEGFIESEWLKTIIPTTEAEFYFCGPVAFMKHINAALTDLSVKQEHIHYEFFGPATSLQ

SEQ ID NO: 10618 - protein, 400 aa, Streptomyces avermitilis MA-4680
MLSEQSAATVRATLPAVGAAVGEITARFYDRLFAARPELLRDLFNRGNQAAGTQRQALAGSIAAFATYLVEHPDERPDAMLDRIAHKHASLGIAPGQYAVVHEHLFAAIAEVLGDAVTPEVAAAWDEVYWLMANALIAIERRLYAQHENTGDTGGRRPWRVVERVDETADVAAFRLRPADGRPLPDFRPGQYVSVRVELPDGARQTRQYSLVGAPGSPELRIAVKRVHGGTTPDGEVSNHLHARVREGSVLELSAPYGDLALEATDVPLLLASAGIGVTPMIAMLEHLALTGHRAPVTVVHADRSPAEHALRADHEAYAAKLADAAVHFWYEHPEPGHPADRTGLVDLTGVPVSAGTRAYLCGPLPFMRAVRTQLIEKGVAPADIHYEVFGPDLWLARES

SEQ ID NO: 10619 - protein, 565 aa, Streptomyces avermitilis MA-4680
MFEARHTMDAPTTTSADNGTSGGTGGAGWFTPRKQPETPQGGGQEAPEGSRLAAMRPVGRPSAGEGTEQQRIPPTEEAVVAPTQPMSGEPLRSLPDPAAPAPARHLGATLTEETRPAPAPIAASQPESAHEALRPLAGQPQFGQPQSGPVQPQPAAALPERGIPQREPGPPEPGSPRPGPDPQVPTPGPAPGPEASPDAVLIRRTMAEVGPVAGKVTSYFYALLFVRHPDLRSLFPAAMDTQRDRLLKALLTAAEHIDNTEVLVAYLQNLGRGHRKYGTRPEHYPAVGECLIGALSRYASGIWDEETEAAWVRAYTTISQVMIDAAAADELRAPAWWYAEVVSHDLRTPDIAVITVRPDQPYPFLAGQYTSLETPWWPRIWRHYSFASAPRSDGLLSFHVKAVPAGWVSNALVHRARPGDIIRLGPPAGSMTVDHTTESGLLCLGGGTGIAPIKALVEDVAEHGERRPVEVFYGARRDHDLYDIDTMLRLQQSHPWLSVRPVVDQRAHLQLPDVIREYGPWNEYDAYLSGPPGMIRSGVDALRGIGIPPDRIRHDSVEELVAAGD

SEQ ID NO: 10620 - protein, 401 aa, Ralstonia solanacearum
MLSEQSKPLIDASVPVLREHGLTITQTFYRNMFASHPELTNLFNMGNQANGSQQQSLASAVFAYAANHGNNAALAPVVGRIVHKHAAVGIRPSHYPIVGRHLLGAIAEVLGDAATPELLAAWDEAYWLLAAELIAAEARLYAHTQSGPDHRQPVRIIERHAQAEDVVSFTLEAVGGAKLADFLPGQYISVQVELAPGVLQQRQYSLSDAPNGRTWRISVKRDAGGSGRPAGTVSNWLHDNARPGEVLLVSQPYGDFVPQLATDSPIVLMSAGVGITPMIATLNALARRNTARKVVFSHAGQAASHVAHADDLERAAQVLPDFAAHVFLESGEAADFAARPARPGRMTVETFLDDGVADADFYLCGPLPFMQAQRAALLAGGVPAGRIHREVFGPDLLDDIL

SEQ ID NO: 10621 - protein, 393 aa, Azotobacter vinelandii
MLTEQQRAIVKATVPLLETGGEALTSHFYRIMLAEHPEVRPLFNQAHQASGEQPRALANAVLMYARHIDRLEALGPLVAQIVNKHVSLQVLPEHYPIVGACLLRAIREVLGAETATDAVLDAWGAAYGMLAELLIGAEEAAYAAGAAVPGGWRGARAFRVARRVVESEEIVSLHLRPEDGGALPAFRPGQYIGLRLVLDGEEVRRNYSLSAAPNGEEYRISVKRHATGRVSRHLHEQVREGDRLELFPPAGEFVLNDSDKPLVLIGAGVGVTPLLAMLEAALPGGRPIRFIHCARHAGVQAFRQQVEALAGRHPQLEAFFCYSAPRAGDRADANGRLDAQRLAAWLPAERDLDAYFLGPKSFMAQVKRQLRELGVPQEQCHYEFFGPAQALEA

SEQ ID NO: 10622 - protein, 403 aa, Sinorhizobium meliloti
MLTQKTKDIVKATAPVLAQHGYAIIQHFYKRMFQAHPELKNIFNMAHQERGEQQQALARAVYAYAANIENPESLSAVLKDIAHKHASLGVRPEQYPIVGEHLLASIKEVLGDAATDEIISAWAQAYGNLADILAGMESELYERSEERAGGWAGWRRFIVREKNPESDVITSFVLEPADGGPVADFEPGQYTSVAVQVPKLGYQQIRQYSLSDSPNGRSYRISVKREDGGLGTPGYVSSLLHDEINVGDELKLAAPYGNFYIDVSATTPIVLISGGVGLTPMVSMLKKALQTPPRKVVFVHGARNSAVHAMRDRLKEASRTYPDFKLFIFYDEPLPTDIEGRDYDFAGLVDVEKVKDSILLDDADYYICGPVPFMRMQHDKLLGLGITEARIHYEVFGPDLFAE

SEQ ID NO: 10623 - protein, 397 aa, Dictyostelium discoideum
MSLSQQSISIIKATVPVLQVHGVNITTTFYRNMFKANPQLLNIFNHSNQREGKQQNALANTVLQAAIHIDKLNELNLAPIVHKHVALGVLPEHYPIVGTNLLGAIKEVLQDAATDEILGAWGEAYGVIAQAFIDAEAALYKVTEEQIGGWRDTREFIVDRKVEESSNIISFYFKPADGKPIATYIPGQYITIKVPLTLENGEQRTHIRHYSLSDTPSEQYYRISVKKEDALKKSDPNGVVSNHLHANVKVGDKVLLSPPAGDYVVDQLSSNPILLVSGGVGITPLLSMAKATLAKQPEREVTFVHSSKNKQYQPFANELSQLEKSNKVKVSTVHSETDGQITKDKLEKFINPSQIKDTKVFICGPVSFMSAINKQLIELGYPKENISYEIFGPLTNV

SEQ ID NO: 10624 - protein, 423 aa, Dictyostelium discoideum
MLSQKSIQIIKSTVPLLEKYGVEITSLFYKNMFEAQPQFLNIFNHSNQRNQKQPVALANTILQSAIHIEKLNEINLMPIVHKHVALGITPEMYPIVGAHLLGAMKTVMQDEATPEIMAAWTEAYRAVAQAFMDAEEDLYFETEEQIGGWKDTREFVVDRIEEETPLIKSFYFKAYDGKEIATYIPGQYITVKITLPGDGVDVPTDKMRTYVRHYSLSDKPNDEYYRISIKKELGKNTPNGIVSNHFHNNIKVGDVVPMSVPAGDFVVNNDSETPILLICGGVGINPLFSMLKETLVQQPDRKINFIFSTHCESSQPFKEELKQLEDDYKETGNLKINLVYSENQGHINKEIIEKYSTQHVDQAEIDETDVYICGPVPFMMQVNKDLLQLGFHKENVHYELFGPLTPVLEENQMLRGVKNIIEN

SEQ ID NO: 10625 - protein, 149 aa, Novosphingobium aromaticivorans
MMRIASEHAKTIVKATAPAIEKHGVDITTAMYKRLFQNDEVKAMFDQAAQDSGEQPRRLAGAILAYAKNIDKLENLGSAVQRMVQRHVDTGVKAEHYPYVAEALLPAIRDVLGAEVATDEVLAAWGEAYWMLADILIAAEKQAYLEAVA

SEQ ID NO: 10626 - protein, 694 aa, Novosphingobium aromaticivorans
MVRASPPPADHRPLVVEEAMDDTQRVANSPIWHEGERALQAHVGVVDRMGEVGARVIRPFMPDQHRTFYAQLPFVILGSVDAEGAAWATVVEGEPGFLSSPDPKSLVLGALPHADDPALGGIHDEAALGLLGIELHNRRRNRVNGTLRFPSAGAPLLEVGQSFGNCPQYIQLRDATLSRAPAAPPPHLAEELPALDAAARAMIGSADTLFVASYADRLDSGRQVDVSHRGGKAGFVRVDAEGKLTIPDFAGNLFFATLGNVLLNGQAGLVFIDFESGDLLQMSGKAEVVLDSPEIASFAGAERLWTFVPQRIVRRKGALALRWSFRDNGWSPNSLATGQWPAALHWQQLRVERIVAESASIRSFHLRPVSPDLGWQHEAGQHLPIRVRLPGEDSPAVRTYTLSSAPSDPLYRISVKREGKVSAWLHEQVREGDIIEARAPAGSFVIEPGAPRLAVLIGAGIGITPMISMLRELVSLGANGAPARPAVLIQSARSLAERAFANELASLADRVRVVRVLGDAKGAQAGADYDLEGRIDLQLLSAVLPFGDHDFYLCGPKGFMQAIYDALRGANVPDHRIHAEAFGPSSLVRRRDTTRETAPAAQPSAVPVPVLFTASLKEARWKPGEGTLLELAEARGLKPEFGCRSGSCASCKVKLVSGAVAYPRTPSAEVASGEVLLCCAVPAEGNDKPLQVEA

SEQ ID NO: 10627 - protein, 427 aa, Schizosaccharomyces pombe
MSSVEVNRENADVANTNRQANLAEGYEIKELNESQKQYIRSSIPILESSGVNLTKAFYQKMLGNYPEVLPYFNKAHQISLSQPRILAFALLNYAKNIDDLTSLSAFMDQIVVKHVGLQIKAEHYPIVGHCLLSTMQELLPSDVATPAFLEAWTTAYGNLAKILIDSEKKVYQSQPWNGFVEFKVTELINESSDVKSVYLGPKDPAFRISHAHPGQYVSVLWEIPGLSHKTLREYSLSNRVDTCRNQFRISVRRVAGGVVSNFVHDNLKVGDIVGVSPPAGNFVYKRSEENVNRPLLCFAGGIGITPLIPIIETALLDGRKVNFCYSSRNYVSRPFKQWLEQLKLKYKENLKLKEFFSEESSVTKEQIVDEVMTRIINEEDLEKLDLSECDIYMLGPNNYMRFVKQELVKLGVEPNKVQSEFFGPYIP

SEQ ID NO: 10628 - protein, 388 aa, Pichia norvegensis
MSAAKQLFKIVPLTPTEINFLQSLAPVVKEHGVTVTSTMYKYMFQTYPEVRSYFNMTNQKTGRQPKVLAFSLYQYILHLNDLTPISGFVNQIVLKHCGLGIKPDQYPVVGESLVQAFKMVLGEAADEHFVEVFKKAYGNLAQTLIDAEASVYKTLAWEEFKDFRVTKLVKEAEDVTSVYLTPVDGFKLKPIIPGEYISFRWDIHNPDITDIQPREYSISQDVKENEYRISVRDIGIVSDYINKKLQVGDIVPVHAPVGTMKYDSISKKGKVAVLAGGIGITPMIPIIEHALKDGKDVELYYSNRSYQSEPFREFFSNLEKENNGKFKLNNYISAENQKLQVKDLEHINPDEYDVYLLGPVAYMHEFKTYLVGKGVSDLKMEFFGPTDP

SEQ ID NO: 10629 - protein, 267 aa, Desulfitobacterium hafniense
MAPLQRTHIAAGAGRRGAGARRPHRRTPAAPAGAGLSPARNDSLPTQGFHRMTTALNEAAAAVVRATVPALAAHGHAVTTAMYRRLFRDERIAALFNHANQGGDNAQAHALAGAILAYAQHIDDLPALSGALERIAQKHVGYHILPEHYPFVAGALLGAIEETLGEAATPQVLAAWGEAYWFLADLLQRREAELRGELAQVVGGWSGWREFVVAAKRAENASSDAAIVSFELRPADGGAVIAHRPGQYLTLRYPVPGQARQAQYSIS

SEQ ID NO: 10630 - protein, 403 aa, Ralstonia eutropha [sequence omitted]

SEQ ID NO: 10631 - protein, 418 aa, Neurospora crassa
MTLTDAQISIVKSTAPVLKQHGEAITTVFYNDLITENPSLKNIFSLTSQATGAQPRALAHAVLAYATYIDNLSALSEAVARIAHKHVSLQVEPAQYAIVGQYLIQAIGKVLGDAATPEIVDAWTAAYGVLANVFIGVEGGMYEENEKKDHWKGWRKFRIARKVEESSSISSFYLRPVDGATLPKYLPGQYVSVQVLVSQLGYLQSRQYSLSEAPKEGGMEEYRISVKREEGETGAPGLVSNLLHGMQEGAEVEVSHPQGEFFLDPADASKEGVPAVLISVGVGATPMMAILKSLLQENVKRRPVSWIHASKSSSTQPFGEEVRRIVKENPEQVSAHVFLKTVAGTDQAGVHYDFADTRMDLTKLDGERDLHLADKRTEYYICGPETFMVETRKVLVGLGVDKSKVHLELFATGFVADE

SEQ ID NO: 10632 - protein, 537 aa, Neurospora crassa
MALTYQQSKLVRDTIPALKEHGERITSIFYKTMLTDHPELNNYFNSVNQKNGRQPRALTAVILGFASNINHLSELVPKFERMCNKHCSLGIQPEHYEVVGKYLIQAFGEVLGPAMTPEVQTAWTKAYWMLAKMLIGREAQLYRDFESWPSWRPFKIDRIVNECDDLYTFYLVPQDGKRLPKFLPGQYVSVQIQVPGGNLQSRQYSLSEAWREDYYRITIRRDEGTVYSNSVSKSFFNPGIVSNYLIDQTTVGSILQVSHPAGEFFLDVHNTSTVPLVLISAGVGVTPMVSIANTVMESQPSRQIAWIHGCRKHIPFEDHIKTLRKKNSNFQTKIFKTVINSTDRPGETYDYNERMDLAKLKPEELHLQHGGTEYFICGPEQFMVNQKLYLMQQGVSASRIKCEIFTTGDLKLGLIIETIDQEEEAGDEKRVTHISREGGGGWENVAPDPRKARRSPSLSTKLPKRRNHAAVSGLSTGSGTQKLAPTLLNPSSTRTRRDMTIPPPTTTTAMPGMEEEEEEERREEERRYRWREASALG

SEQ ID NO: 10633 - protein, 343 aa, Methylocystis sp. M
MYQIVIETEDGETCSFECGPSEDVISAGLRQSVILLASCRAGACATCKADCTDGDYELIDVKVQALPPDEEEDGKVLLCRTFPRSDLHVVVPYTYDRISFQAIQTNWLAEITECDRVSSNVVRLVLQPLTADGAAPISLNFLPGQFVDIEIPGTHTRRSYSMASVAEDGRLEFFIRLLPDGAFSNYLRTQARVGQRVALRGPAGSFSLHKSERPRFFVAGGTGLSPVLSMIRQLHKESDPQPATLFFGVTNYEELFYVDELKALQHAMPSLDVQIAVVNVSEGNGVAKGTVIDLLQDELGRRAEKPDIYLCGPPGMIDAAFAAASSAGVPKEQVYLEKFLASG

SEQ ID NO: 10634 - protein, 415 aa, Fusarium oxysporum
MALTAAQVAIVKSTAPILKEHGKTITTTFYRNMLGAHPELKNYFSLRNQQTGAQQAALANSVLAYATYIDDLGKLSHAVERIAHKHVSLFIKPEHYPIVGTHLIGAIGEVLGSALTTEIKDAWVAAYGQLADIFIQREGQMYEAAGEWNSWRKFKIVKKEAENDSVTSFYLEPTDGKPLPKFLPGQYVSVQIPIPELDGLLQSRQFSLSEAPGTNHYRISVKLQGPTEEPAVEDLAAGKIAGLLSTRLHNRYNVGDEVELSPPAGEFSLDPADTSAAKKPLVLLSAGVGATPLVSILDSVLQSPTASRPITWIHGARYSGSTCFVPHVLDSAKKHENITAKIFLEDVKEGDQYDFKGEIDLAKLQKEQLLQLDNADAEYYICGPEDWMVNVRAFLEENGVPRERQHLELFKTGDI

SEQ ID NO: 10635 - protein, 395 aa, Erwinia chrysanthemi
MLDQQTIATIKSTIPLLAETGPALTAHFYQRMFHHNPELKDIFNMSNQRNGDQREALFNAICAYATHIENLPALLPAVERIAQKHASFNIQPEQYQIVGTHLLATLEEMFQPGQAVLDAWGKRYGVLANVFIQRESDIYQQSAGQNGGWHGIRPFRIVAKQPQSSLITSFTLEPVDGGPIAAFRPGQYLAVYIRDKRFEYQEIRQYSLTNEPNGRYYRIAVKRETMGSVSGYLHDVAREGDVIELAAPHGDFYLEVTPETPVALISAGVGQTPMLSMLHSLKNQQHQADIFWLHAAENTEVHAFADEIADVAATLPQLQSYVWYREASSEAARSAHAFHGLMALKDLPTPLPMTNLHCYLCGPVAFMQFAARQLLELGITESQIHYECFGPHKVI

SEQ ID NO: 10636 - protein, 458 aa, Giardia intestinalis
MTLSEDTLRAVEATAGLIAAQGIEFTRAFYERMLTKNEELKNIFNLAHQRTLRQPKALLDSLVAYALNIRRINELYELKGKGLPVPPEHWAELQGFFSAAERVANKHTSFGIQPAQYQIVGAHLLATIEDRITKDKDILAEWAKAYQFLADLFIKREEEIYAATEGCKGGWRQTRTFRVEEKTRVNEIICKFRLVPAEEGAGVVEHRPGQYLAIFVRSPEHFQHQQIRQYSIISAPNSAYYEIAVHRDEKGTVSRYLHDYVSTGDLLEVAPPYGDFFLRYLEADEQAPADTQASQEFQMLQSGAINFAAEKTMPIVLISGGIGQTPLLSMLRFLAQKEGKETARPIFWIHAAHNSRVRAFKEEVDAIRETALPSLRVVTFLSEVRATDREGEDYDFAGRINLDRISELTKLEADNANPHYFFVGPTGFMTAVEEQLKTKSVPNSRIHFEMFGPFKASH

SEQ ID NO: 10637 - protein, 396 aa, Salmonella typhimurium
MLDAQTIATVKATIPLLVETGPKLTAHFYDRMFTHNPELKEIFNMSNQRNGDQREALFNAIAAYASNIENLPALLPAVEKIAQKHTSFQIKPEQYNIVGTHLLATLDEMFNPGQEVLDAWGKAYGVLANVFIHREAEIYHENASKDGGWEGTRPFRIVAKTPRSALITSFEFEPVDGGTVAEYRPGQYLGVWLKPEGFAHQVFRQYSLTRKPDGKGYRIAVKREDGGQVSNWLHHHASVGDVVHLAAPAGDFFMNVAADTPVSLISAGVGQTPMLAMLDTLAKEQHTAQVNWFHAAENGDVHAFADEVSELGRTLPRFTAHTWYREPTEADRAQRLFDSEGLMDLSKLEAAISDPAMQFYLCGPVGFMQFAAKQLVSLGVNNENIHYECFGPHKVL

SEQ ID NO: 10638 - protein, 146 aa, Vitreoscilla stercoraria
MLDQQTINIIKATVPVLKEHGVTITTTFYKNLFAKHPEVRPLFDMGRQESLEQPKALAMTVLAAAQNIENLPAILPAVKKIAVKHCQAGVAAAHYPIVGQELLGAIKEVLGDAATDDILDAWGKAYGVIADVFIQVEADLYAQAVE

SEQ ID NO: 10639 - protein, 439 aa, Nostoc punctiforme
MLESLGRIKNPLVRSIAAAATVSSVITLSAAVVIGVSNAKAKSAYQFGVYSSLFGTASGAVFGLVYTNKASGNKSTPDLKTLDSHVWQDWRNFVVVRKVKESEEITSFYLQPEDKGEITNFQPGQFLTIKLDIPGQDKPVIRTYSLSDYPENCEYYRLSIKREPAPNGLDVMPGIASNFMHDRIQEGSVILAKPPNGKFVLDVQKSIPAVLISNGVGITPMISMAKACSLLNPTRPIWFVHGARDGKFHAFRDEVREISRQNHNLNVHFRYSRPTPEDRGKYHSVGYVDAALIQELVRQEAEYFLCGSPSFMQSIMQGLKESGVPDSRVFFESFGKPMKSVSEKQTQTVTGDDKFAEIVFAKSGKTLTWQPSDGTILEFAEANDINPPFSCRVGVCGTCMCKIREGVVAYQEEPTATTDQGSVLICISQPGTSKLVLDI

SEQ ID NO: 10640 - protein, 126 aa, Nostoc punctiforme
MYEIMFQNHPEVKEQFSMAAQADGSQPARLATAVYSYANQIDNLPALKSMVEKIAHRHVQTHVTPEQYPIVGESLLQAMKDVLGEAATEEVMAAWTEAYQALSEVFIHREHDIYVGEDKKAQLLHS

SEQ ID NO: 10641 - protein, 394 aa, Vibrio cholerae
MLTQEHINIIKSTIPLLESAGPALTQHFYQRMFSHNPELKHIFNMTHQKTGRQSVALFEAIAAYAKHIDNLAALTSAVERIAHKHTSFNIQPEHYQIVGHHLLETLRELAPDAFTQPVEEAWTAAYFFLAQVFIDREGALYLERKQALGGWRDGRTFVVREKQVESAYVTSFVLVPADGGAVLDYQPGQYIGIEVTPEGSDYREIRQYSLSHASNGREYRISVKREGVGSDNPGLVSHYLHNNVKVGDSVKLYAPAGDFFYVERERPVVLISAGVGATPMQAILHTLAKQNKSGVTYLYACNSAKEHTFAQETAQLIAQQGWMQQVWYRDESADDVLQGEMQLAELILPIEDGDFYLCGPIGFMQYVVKQLLALGVDKARIHYEVFGPHAQLAA

SEQ ID NO: 10642 - protein, 394 aa, Vibrio parahaemolyticus
MLSNQTIEIVKATAPLIAETGPKLTAHFYDRMFTHNPELKDIFNMSNQRNGDQREALFNAICAYAANIENLPALLGAVEKIAHKHTSFLITKDQYQIVGKHLIATIDELFNPGQEVLGAWAEAYGVLANVFIQREEQIYQANASQEGGWRGLREFELVGKQLESEHICSFVFKPTDGSKVTKYKPGQYLGIYINSDKFENQEIRQYSLSSSVQENTYRISVKREQGGKVSNYLHDELNIGDKVKLAAPAGDFFMDVDTNTPVVLISAGVGLTPTLSMLESLTEHHAPVTWVHATENSKHHAFKEHVNQLVTAKENMNALIWYNQPTAEDKIGEDFHFTGFVNLHEIEAALKQDNVQVYFCGPVGFMQHVAKQLQELGVPQEQFHYECFGPHKVV

SEQ ID NO: 10643 - protein, 396 aa, Escherichia coli K12 [sequence omitted]

SEQ ID NO: 10644 - protein, 411 aa, Bacillus halodurans
MSTATLSQETKQIVKATVPILAEHGEAITKHFYKRMFSHHPELLNIFNQTHQKQGRQPQALANSIYAAAEHIDNLEAILPVVSRIAHKHRSLNIKPEQYPIVGENLLAAMREVLGDAASDDVLEAWREAYELIADVFIQVEKKMYEEASQAPGGWREFRSFVVEKKQRESATITSFYLKPEDGKALASYKPGQYITVKVTIPGHEHTHMRQYSLSDAPEKGYYRITVKREEGDGDLPPGIVSNYLHQHIHEGDVLEITAPAGDFTLQEEGERPIVFISGGVGITPLMSMFNTLMQRGVKREVIFIHAAINGFYHAMHDHLAQTASQQENVHYAVCYERPTPGDRMNPFMKKEGFIDESFLRSILHDREADFYFCGPVPFMKTIAQILKDWDVPEQQVHYEFFGPAGTLASS

SEQ ID NO: 10645 - protein, 396 aa, Salmonella enterica subsp. enterica serovar Typhi
MLDAQTIATVKATIPLLVETGPKLTAHFYDRMFTHNPELKEIFNMSNQRNGDQREALFNAIAAYASNIENLPALLPAVEKIAQKHTSFQIKPEQYNIVGTHLLATLDEMFNPGQEVLDAWGKAYGVLANVFIHREAEIYHENASKDGGWEGTRPFRIVAKTPRSALITSFEFEPVDGGTVAEYRPGQYLGVWLKPEGFAHQEIRQYSLTRKPDGKGYRIAVKREDGGQVSNWLHHHANVGDVVHLAAPAGDFFMNVAADTPVSLISAGVGQTPMLAMLDTLAKEQHTAQVNWFHAAENGDVHAFADEVSELGRTLPRFTAHTWYREPTEADRAQRVFDSEGLMDLSKLEAAISDPAMQFYLCGPVGFMQFAAKQLVSLGVNNENIHYECFGPHKVL

SEQ ID NO: 10646 - protein, 333 aa, Methylocystis sp. WI14
  unsure (1)..(333): unsure at all Xaa locations
MYQIVIETEDGETCSFECGPSEDVISAGLRQSVILLASCRAGGCATCKADCTDGDYELIDVKVQALPPDEEEDGKVLLCRTFPRSDLHIVVPYTYDRISFQAIQTNWLAEITECDRVSSNVVRLVLQPLTADGAAPISLNFMPGQFVDIEIPGTHTRRSYSMASVAEDGSLEFFIRLLPDGAFSNYLRSQARVGQRVALRGPAGSFSLHKSERPRFFVAGGTGLSPVLSMXRQLKKESDPLPATLFFGVTNYDELFYVEELKALQHAMPSLDVQIAVVNVSEGNGVAKGTVIDLLQDELGRRAEKPDIYLCGPPGMIDAAFAAASSAGVPKEQ

SEQ ID NO: 10647 - protein, 396 aa, Salmonella typhimurium LT2
MLDAQTIATVKATIPLLVETGPKLTAHFYDRMFTHNPELKEIFNMSNQRNGDQREALFNAIAAYASNIENLPALLPAVEKIAQKHTSFQIKPEQYNIVGTHLLATLDEMFNPGQEVLDAWGKAYGVLANVFIHREAEIYHENASKDGGWEGTRPFRIVAKTPRSALITSFEFEPVDGGTVAEYRPGQYLGVWLKPEGFAHQEIRQYSLTRKPDGKGYRIAVKREDGGQVSNWLHHHASVGDGVHLAAPAGDFFMNVAADTPVSLISAGVGQTPMLAMLDTLAKEQHTAQVNWFHAAENGDVHAFADEVSELGRTLPRFTAHTWYREPTESDRAQRLFDSEGLMDLSKLEAAISDPAMQFYLCGPVGFMQFAAKQLVSLGVNNENIHYECFGPHKVL

SEQ ID NO: 10648 - protein, 351 aa, Cricetulus griseus
MGNAAAAKKGSEQESVKEFLAKAKEEFLKKWESPSQNTAQLDHFDRIKTLGTGSFGRVMLVKHKETGNHYAMKILDKQKVVKLKQIEHTLNEKRILQAVNFPFLVKLEFSFKDNSNLYMVMEYVPGGEMFSHLRRIGRFSEPHARFYAAQIVLTFEYLHSLDLIYRDLKPENLLIDQQGYIQVTDFGFAKRVKGRTWTLCGTPEYLAPEIILSKGYNKAVDWWALGVLIYEMAAGYPPFFADQPIQIYEKIVSGKVRFPSHFSSDLKDLLRNLLQVDLTKRFGNLKNGVNDIKNHKWFATTDWIAIYQRKVEAPFIPKFKGPGDTSNFDDYEEEEIRVSINEKCGKEFTEF

SEQ ID NO: 10649 - protein, 763 aa, AKT8 murine leukemia virus
MGQTVTTPLSLTLEHWGDVQRIASNQSVDVKKRRWVTFCSAEWPTFGVGWPQDGTFNLDIILQVKSKVFSPGPHGHPDQVPYIVTWEAIAYEPPPWVKPFVSPKLSLSPTAPILPSGPSTQPPPRSALYPALTPSIKPRPSKPQVLSDNGGPLIDLLTEDPPPYGEQGPSSSDGDGDREEATSTPEIPAPSPMVSRLRGKRDPPAAVSTTSRAFPLRLGGNGQLQYWPFSSSDLYNWKNNNPSFSEDPGKLTALIESVLTTHAREETLIIIPGLPLSLGATDTMNDVAIVKEGWLHKRGEYIKTWRPRYFLLKNDGTFIGYKERPQDVDQRESPLNNFSVAQCQLMKTERPRPNTFIIRCLQWTTVIERTFHVETPEEREEWATAIQTVADGLKRQEEETMDFRSGSPSDNSGAEEMEVSLAKPKHRVTMNEFEYLKLLGKGTFGKVILVKEKATGRYYAMKILKKEVIVAKDEVAHTLTENRVLQNSRHPFLTALKYSFQTHDRLCFVMEYANGGELFFHLSRERVFSEDRARFYGAEIVSALDYLHSEKNVVYRDLKLENLMLDKDGHIKITDFGLCKEGIKDGATMKTFCGTPEYLAPEVLEDNDYGRAVDWWGLGVVMYEMMCGRLPFYNQDHEKLFELILMEEIRFPRTLGPEAKSLLSGLLKKDPTQRLGGGSEDAKEIMQHRFFANIVWQDVYEKKLSPPFKPQVTSETDTRYFDEEFTAQMITITPPDQDDSMECVDSERRPHFPQFSYSASGTA

SEQ ID NO: 10650 - protein, 501 aa, AKT8 murine leukemia virus
AREETLIIIPGLPLSLGATDTMNDVAIVKEGWLHKRGEYIKTWRPRYFLLKNDGTFIGYKERPQDVDQRESPLNNFSVAQCQLMKTERPRPNTFIIRCLQWTTVIERTFHVETPEEREEWATAIQTVADGLKRQEEETMDFRSGSPSDNSGAEEMEVSLAKPKHRVTMNEFEYLKLLGKGTFGKVILVKEKATGRYYAMKILKKEVIVAKDEVAHTLTENRVLQNSRHPFLTALKYSFQTHDRLCFVMEYANGGELFFHLSRERVFSEDRARFYGAEIVSALDYLHSEKNVVYRDLKLENLMLDKDGHIKITDFGLCKEGIKDGATMKTFCGTPEYLAPEVLEDNDYGRAVDWWGLGVVMYEMMCGRLPFYNQDHEKLFELILMEEIRFPRTLGPEAKSLLSGLLKKDPTQRLGGGSEDAKEIMQHRFFANIVWQDVYEKKLSPPFKPQVTSETDTRYFDEEFTAQMITITPPDQDDSMECVDSERRPHFPQFSYSASGTA

SEQ ID NO: 10651 - protein, 1092 aa, Adiantum capillus-veneris
MSTSSSMNDQRRDAYSLRAPPNEGKLHPLARDSRGSLEVFNPGNPSSLTAASIGAGMQYTPSWQQQQPPEDENYDLPLNQREKEENIYNQTHGGPERERGPDKGTSPSDHKRGMSTGTSPPTRSKYSEIFTSHDTIDKEGKFQAYQTNEESTHDWLSSTPAGQGPMLGGGFGGGEGARGSYLLGTREHPKARCDSLAERAAGWGLVLKTDGDSGRVDGVRTRTSEEEREFRRLSEERRSLNSSTVRTSDDSGFTSDTSNASRIPRVSKDVLQALEGFQQTFVIADGTKPDLPIMYASAGFFKMTGYTSSEVIGRNCRFLQGKETDPEEIDRIRECISKGSGYCGRLLNYKKDGSAFWNLLTISPIKDVDGSVLKYIGMQVEVSQFTEGTKENAMRPNGLSESLIKYDARQKERASFQVTELVEAIKDPKQVGDDKKTSISLGVVRPVAPSGPRKGPDLRELLTAQQYTPRSATSVQPKGSNLTEPGSHRESISKRNRSSGFFSFLGLDKLAGKGPGNQHDAAEFIEPEILMTKDEDSSEASFELDKARLKEIRRGIDLATTLERIEKNFVITDPRLPDNPIIFASDNFLELTEYSREEILGRNCRFLQGPDTNRETVKLIRDAIDNEKEVTVQLLNYTKTGRTFWNLFHLQPMRDHKGELQYFTGVQLDGTEYLEPLTKRLSQQIASEGAKIIRETAANVNEALRELPDANLKVEDLWRIHSRLVLPKPHKLNHDSWGVIRKIHASGEKVKLKHFRPLRPLGYGDTGSVHLVELRGTGKLFAMKAMEKNVMVKRNKVHRVCAEREILGMMDHPFLPTLYASFETQTHVCLITDFCAGGELFLLLERQPTKIFREETARFYTSEVVVALEYLHCQGVIYRDLKPENILLQQDGHVMLSDFDLSYLSSSNPRLVVPPRLHKKRSKRKNFPPPIFRAEPIGACNSFVGTEEYIAPEVITGSGHNSSVDWWALGILMYEMLYGRTPFRGKTRQKTFGNILHKDLVFPRRIPTSLAARQLINGLLQKDPENRLGSQGGANEIKGHPFFQGVNWTLIRCMRPPTFDAPVCFAGSELDVEGDEALDWDDVEASNPIEYF

SEQ ID NO: 10652 - protein, 1465 aa, Adiantum capillus-veneris
MATPGGPKTKHSVSVAQTRADARLHAAFEGSGDAGAGGSRAPFDYSKSGMDASSVTSVAPEAITAYLQRMQRGGLTQAFGCMLVVAGQKIVAFSENAPEMLEVAAGLGTDLRMLFTQGSTAALDQAVKEEDLSSVNPLVLQSCGGSAKQFYAMLHRIEDVAGVVIDLEPIENGVVEKKSSAEMAVKPIARVQSLPGGEIGRLCQVVVEEVQEMTGYDRVMAYKFHEDGHGEVVAEVRRPDLEPYLGLHYPSTDVPQASRMMFMKNGVRMIGDCTLPPVRVVQAKELAQPISLAGSTLRAPHGCHAQYMSNMGSAASLTMAVAIDDYDDDSSLSCGSRKLWGLVVCHHPSPRTVSYPLRCACEKLMVAFGVQLNIELDLAAQLRENHILTTQALLCDMLRRIRGAPIGIVSRSPSIMDLVKCDGAALYYGGRFWPLGTTPSEFQIRDLAEWLLGASEEIASTGVTCTDSLAEMGYPGAALLGDAVCGMAAAMITPNSDFLFWFRSHTAKEVYWGGAEHDPQSRDDDSWMQLPRSSFKAFLEIVKRRSLPWEEVEVDAIRSLQLILREDLEQFCAAVGAVKASDGDDEDSLVPSAKKLSLKETEENGGADNSKKLERMHSAAAGGGGGGGRWEKMRLPSSLAQEWMEAIRGTGDGGASGGGGGGPFDWDLISAFQHNSFIVVDALKPDFPIIYASTGFFNLTGYTSREVIGGNCRFLQGPDTNPADVASIREALAQGTGTFCGRLLNYRKDGSSFWNLLTIAPIKDDLGSIVKLIGVQLEVSKYTEGIRANNRRPNGMPQSLIRYDVRHQDKVSAFIAQLVAALTKPDKVETPRLSSAMRFSLTGQTIESLPQPTAIPREGGGRTRRPRSSSFLSLLGMEKEKDIPEEDELQELEVIMLEDASVGRPGSLDDPERTRRGIDLATTLERIGKSFVITDPRLPDNPIIFASDRFLELTEYTREEVLGNNCRFLQGRGTDRKAVQLIRDAVKEQRDVTVQVLNYTKGGRAFWNLFHLQVMRDENGDVQYFIGVQQEMVAPRPVHQPPELPDILPDRVEQEKAEVVRATAQRVDAAARELPDANLVPDHLFAPHSKVVTPLPHSKTNSSSWFAIRRVQRRLRRGERLGLKHFRPIKPLGSGDTGSVHLVELRGTGQVFALKAMDKSMMLQRNKVHRARAEREILAIMDHPFLPTLYASFQTKTHVCLITDYCPGGDLFLLQDKQPTQTLSERTASFYAAEVVVALEYLHCMGVIYRDLKPENVLLQKNGHILLTDFDLSFLTSCRPQLILQGGKGRSRRSKRRRRVTFCAEPRVSSNSFVGTEEYIAPEIISGEPHSSAVDWWALGILLYEMLYGRTPFVGRNRQKTFYNVLNKELIFPTSIPVSLAGRQLIAGLLQRDPTIRLGTLRGASELKKHPFFREINWPLIRWRKFSANQAHNANNVSSLDEGESDSGNAWEANGGSTQSFQDTF

SEQ ID NO: 10653 - protein, 1465 aa, Adiantum capillus-veneris
MATPGGPKTKHSVSVAQTRADARLHAAFEGSGDAGAGGSRAPFDYSKSGMDASSVTSVAPEAITAYLQRMQRGGLTQAFGCMLVVAGQKIVAFSENAPEMLEVAAGLGTDLRMLFTQGSTAALDQAVKEEDLSSVNPLVLQSCGGSAKQFYAMLHRIEDVAGVVIDLEPIENGVVEKKSSAEMAVKPIARVQSLPGGEIGRLCQVVVEEVQEMTGYDRVMAYKFHEDGHGEVVAEVRRPDLEPYLGLHYPSTDVPQASRMMFMKNGVRMIGDCTLPPVRVVQAKELAQPISLAGSTLRAPHGCHAQYMSNMGSAASLTMAVAIDDYDDDSSLSCGSRKLWGLVVCHHPSPRTVSYPLRCACEKLMVAFGVQLNIELDLAAQLRENHILTTQALLCDMLRRIRGAPIGIVSRSPSIMDLVKCDGAALYYGGRFWPLGTTPSEFQIRDLAEWLLGASEEIASTGVTCTDSLAEMGYPGAALLGDAVCGMAAAMITPNSDFLFWFRSHTAKEVYWGGAEHDPQSRDDDSWMQLPRSSFKAFLEIVKRRSLPWEEVEVDAIRSLQLILREDLEQFCAAVGAVKASDGDDEDSLVPSAKKLSLKETEENGGADNSKKLERMHSAAAGGGGGGGRWEKMRLPSSLAQEWMEAIRGTGDGGASGGGGGGPFDWDLISAFQHNSFIVVDALKPDFPIIYASTGFFNLTGYTSREVIGGNCRFLQGPDTNPADVASIREALAQGTGTFCGRLLNYRKDGSSFWNLLTIAPIKDDLGSIVKLIGVQLEVSKYTEGIRANNRRPNGMPQSLIRYDVRHQDKVSAFIAQLVAALTKPDKVETPRLSSAMRFSLTGQTIESLPQPTAIPREGGGRTRRPRSSSFLSLLGMEKEKDIPEEDELQELEVIMLEDASVGRPGSLDDPERTRRGIDLATTLERIGKSFVITDPRLPDNPIIFASDRFLELTEYTREEVLGNNCRFLQGRGTDRKAVQLIRDAVKEQRDVTVQVLNYTKGGRAFWNLFHLQVMRDENGDVQYFIGVQQEMVAPRPVHQPPELPDILPDRVEQEKAEVVRATAQRVDAAARELPDANLVPDHLFAPHSKVVTPLPHSKTNSSSWFAIRRVQRRLSRGERLGLKHFRPIKPLGSGDTGSVHLVELRGTGQVFALKAMDKSMMLQRNKVHRARAEREILAIMDLPFLPTLYASFQTKTHVCLITDYCPGGDLFLLQDKQPTQTLSERTASFYAAEVVVALEYLHCMGVIYRDLKPENVLLQKNGHILLTDFDLSFLTSCRPQLILQGGKGRSRRSKRRRRVTFCAEPRVSSNSFVGTEEYIAPEIISGEPHSSAVDWWALGILLYEMLYGRTPFVGRNRQKTFYNVLNKELIFPTSIPVSLAGRQLIAGLLQRDPTIRLGTLRGASELKKHPFFREINWPLIRWRKFSANQAHNANNVSSLDEGESDSGNAWEANGGSTQSFQDTF

SEQ ID NO: 10654 - protein, 539 aa, Magnaporthe grisea
MPSLGFLKKKRTRDGNNDNSSQPASPVTPTAAQSFEQAQVLGAPSAINNSHAHTQQQSYLVPQPGYSVGTEVQAQQPQMNSISQQQQQAFAPPAHTPSPGTIDPQQSLPSISNLMNPAVQQQNSQPSANFQPQSQSQSQSQSQFPLPPSHGNGDQSQQQNFQVQQQIQSQQDAMDIQPSQVQDQSHSQQAQPQHQPQHHVQHHVNHAHQGSQDQQTRVTKGKYSLTDFEILRTLGTGSFGRVHLVQSRHNQRFYAVKVLKKAQVVKMKQVEHTNDERKMLGEVKNPFLITLWGTFQDCRNLYMVMDFVEGGELFSLLRKSGRFPNPVAKFYAAEVTLALEYLHAKNIIYRDLKPENLLLDRHGHLKITDFGFAKRVPDKTWTLCGTPDYLAPEVVSNKGYNKSVDWWSLGILIYEMLCGYPPFWDSGSPMKIYENILKGKVRYPAYINPDAQDLLQRLITADLTKRLGNLYGGSQDVRNHPWFAEVTWDRLARKDIDAPYTPPVKAGAGDASQFDRYPEETERYGQTGHDEYGNLFPGF

SEQ ID NO: 10655 - protein, 919 aa, Emericella nidulans
MAAAQSGSENTELSKQPSPQNDGCQDDDNHDQIGSSTPSPSGIATPQPNPADRRLPSIMHNYFQVGSSSAVMLRSLKTRFSLSDPSPSSADTMQSGSLANGTRDAQSSGHTSSSSGSFVIMERDEARLESPTTPPDNEAETQEISQESRPPAALPTPPCSSACSLLQKESEEPEAGPDKGMGSIFNTLKNYLSPSRSVSCSDSQARRHTSHPVSSISDDPVLASHFFNPSLSQTPESLCLVEAPLLDHEKPHVSASSENAAKLTANVSNPSHLKNTPPHTPRAMSDEDLQSNGKAPASPPRSSNPTHSPRDEPSDSADEITGKLNEVFPSSMDTSSSPSSGPPVASLKGKLHVKISEGKGLQPGFDPYVVCVFEWNEVISKSVQDEEQESLKRQQKELEQSALDSGRPMAIPMNRQSSHNNTLESTDHRGHAPITDPHWNHEAVFDVFGDQSEIDVSVYDRNDSEAFLGHVRLCVNLKEDNSRLDGWFPLKGRAAGDSRVSGEIHMEMRFEKTEKKQVGPNDFQILKLIGKGTFGQVYQVKKKDTRRIYAMKVLSKKVIIQKKEVAHTVGERNILVRTAMAASPFIVGLKFSFQTPTDLYLVTDYMSGGELFWHLQKEGRFQEPRAKFYIAELIMALQHLHDHDIVYRDLKPENILLDANGHIALCDFGLSKANLTQNDTTNTFCGTTEYLAPEVLLDEQGYTKMVDFWSLGVLVFEMCCGWSPFYAEDTQQMYKNIAFGKVRFPRDALSTEGRNFVKGLLNRNPKHRLGAQNDAKELMAHPFFHDIDWEALGRKEVIPPFKPKLKSDTDTSNFDPEFTNALENSNSLNDRAAALANGFMAASTPLSPGMQANFQGFTFVNESSIDHHFKNEVGDRMDEDYEPMHRSHRSGNSIDHRMAGVQKTGDAGEIFNVDDNFDM

SEQ ID NO: 10656 - protein, 472 aa, Emericella nidulans
MPTLGGLLKKRRTRDSQDLSKELQAGSTTTGHTTTSPIAAEDSQSQQHHGHHGGHHFFHHNHHNHQPSNNSANSANSQNSHAAKHHQFDQSSATSNQPSDGQTASMQSPAQQPSSTSAHSNSGHHSNAASIHNIIHPSQQNTPQVSRAERTTKGKYTLDDFAIQRTLGTGSFGRVHLVQSKHNHRYYAIKVLKKAQVVKMKQIEHTNDERRMLNRVRHPFLVTLWGTWQDARNLYMVMDFVEGGELFSLLRKSQRFPNPVAKFYAAEVTLALEYLHSLNIIYRDLKPENLLLDRHGHLKITDFGFAKEVPDITWTLCGTPDYLAPEVVASKGYNKSVDWWSLGILIFEMLCGFTPFWDQGSPVKIYQNILAGRIKFPPYLHPDAVDLLSRLITSDLTKRLGNLHGGPDDIKNHPWFAEVTWDRLLRKEIDAPYVPPIRGGQGDASQYENYQEESEPYGQAGEDPHGHLFPDF

SEQ ID NO: 10657 - protein, 515 aa, Cryptococcus neoformans var. grubii
MFQKVSDKFHRKQQSSTSPGKTQQVPNSPSSVLAKANSQAQQAYSSQDHSPMEGIQSDSTHIQQPMATQKAPIVGPSTSTSLSTVPVQDGTLPLTPGAQGMLAGTTDGHRQVQSPVSRSSSAGEDKMREKARDAQEQAAQAQANLHRVTQQARVAAINAAATQAALETATQLPATARVPTSGTGAEPGQARRKTAGRYALSDFLIERTLGTGSFGRVHLVRSRHNGRFYAVKVLNKEKVIKMKQVEHTNSEREMLVRVRHPFLVNLWGTFQDVNNLYMVMDFVAGGELFSLLRKSQRFPNSVAKFYAAEVALALDYLHSLDIIYRDLKPENLLLGADGHVKVTDFGFAKYVPDITWTLCGTPDYLAPEVVQSKGYNKSVDWYALGVLIFEMLAGYPPFFTEDGNPMKLYEKIIAGKVRYPTYFDVLAKELLKNLLIGDLTKRYGNLRAGSSDIFAHGWFAEVDWDKLYRREIPAPYVPKIDGEGDASQFDRYQEADVSAYGKVGNGPYDHFFVEF

SEQ ID NO: 10658 - protein, 589 aa, Giardia lamblia ATCC 50803
MSRPILETGTLPNAKVGSYPASQTISMMEAFTGGSRLADVHNFHYTKRIGNMAHYRASDFQILCLLGIGDAGRVYLVKRSSEKVLIPTGRNETVFALKVCSQHDLTKRNKVNRFFTELHILMTSRHPFIMTLHASFADERNFYLLMEFCNGGEFAEVLKRQPNRCFPESTVQHYAAEILTAFEYLHYHGIIYRDLKTENVLLHHDGHIRLTDFDLAKRLTLGATVDHYKPVQLSVGKKTTTIFPTGFQETTASLVGTPECLPPEVLQGEHSQAADWWTLGIFIYECLYGVTPFMSKGASLDTISKKILRGVFTFPDGPYKVSKKCKDLIKRLLDINPKTRLGSKMGASELKNHPFFKNINFAIINDPPTIPNINLSKDLGSEEWDIELLKRNFEVFPREHQQIAQDFAGTGAILPKECDQFIKGVLSAYQRAKLPTHPKQVIFDANGDIVNLQSHHETLVTGLGDRRCGTGSSVTVSGVSDLSKLVGVKTGSFHEGSIAKLTSLFCPANQQAKKAKSNPNSIDNDEAVAEIKAPSEPAKSISAPYLEIPVLDGQSSGTAGVSAQLSLDELRKVALSLPTQNIVDECDWS

SEQ ID NO: 10659 - protein, 449 aa, Caulobacter crescentus CB15
MGAGRRPRSRTSTMAPCSTVSISPSNPILEGTRSGKSESAFVPRGGSLISAAAVSLPRHNLCWELDRIRYVERPRGGGSLALEDYSESRRAGERLAAGHGVDDPFAAAISATRMAMIVADATQPDIPIIFANDAFLRLTGYARDEVIGRNCRFLQGPDTDPKAIQAVRDALAAGEDVAVDLLNYRKDGSPFWNALNMSPVRNDAGQLVYFFGSQVDVTDKKVVELRARDHSDGLQQMVEERTRELTEALKQKTALLHEVDHRVKNNLQLISSLLLLQNRRVPDPAVKASLRGMLGRVNAIATVHRRLFQSEDVERFDVSAFIRDMVADLMGSAMRDDIRVELDLERVEIPAAKAAPLALVVNELLTNALRHGFPEGRGGRIFVGLSRLNGDFRIEITDDGVGQDRETRASGFGLTIVQLLCQQLKAKWETTDAEPGTRVVVLLPINGTQ

SEQ ID NO: 10660 - protein, 553 aa, Saccharomyces castellii
MFPRSDKDVDQLVGNLNQLGLNKPNARFVSVTPTRANKENRSSLSPSPSPNKTKRFTADETELKNSPKKLPHDFYKKALSNDTKRIVNVCQMYFLDYYCDMFDYVISRRQRTKSVLNYLERNQNSLSTEELNNEWTAYLQQEHDVLRKRRLKPKNKDFEMITQVGQGGYGQVYLARKRDTKEVCALKILNKKLLFKLNETNHVLTERDILTTTRSDWLVKLLYAFQDTESLYLAMEFVPGGDFRTLLINTRFLRNTHARFYISEMFCAVNALHELGYTHRDLKPENFLIDSEGHIKLTDFGLAAGTISTERIQSMKIRLEEVKNLEFPAFTEKSIEDRRKMYTHLRQTEVNYANSMVGSPDYMALEVLEGKKYDFTVDYWSLGCMLFESLVGYTPFSGSSTNETYENLRHWKKTLRRPVLDNGRPAFSDRTWDIITRLIADPINRLRSFEHIKRMPYFAEVNFNTLRQSAPPFTPQLDSETDAGYFDDFTNEADMAKYADVFKRQNKLSSMVDDSAVDSKLVGFTFRHRNGQKGLSGILYNGSEHSDPFATFY

SEQ ID NO: 10661 - protein, 573 aa, Saccharomyces castellii
MSERKMENLTGTMHQLNFNLPNQPNRGSTSQFASLDNFSTPTKYKNDKLNGSPIPPGARRYEIDDSDSKMDIDGSSYNDIDITNSPKKLPQGFQTMASNNKTQRLVSVCKMYFLDYYCDMFDYVISRRQRTKKVLEYLEQKKNENVDLNSLNNEWNGYIQREHQVLRKRRLKPKHKDFEMITQVGQGGYGQVYLPGKKDTNEVCALKILNKKLLFKLNETNHVLTERDILTTTRSQWLVKLLYAFQDTQNLYLAMEFVPGGDFRTLLINTRFLKSTHARFYISEMFLAVNALHDLGYTHRDLKPENFLIDAKGHIKLTDFGLAAGTISNDRIQSMKVRLEEVKNLEFPEFSDKSIEDRRQMYQKYRETEVNYANSMVGSPDYMALEVLEGKKYDFTVDYWSLSCMLFESLVGYTPFSGSSTNETYENLRHWKKTLRRPMLDNGRPAFSDRTWDFITRLIADPINRLRSFEHVKRMTYFESVDFNTLRDLSPPFIPQLDNETDAGYFDDFTNEADMAKYADVFKRQNKLSTMVNDADIDSKLVGFTFRHRYGKNGSSGVLYNGLEQSDPFSTFY

SEQ ID NO: 10662 - protein, 579 aa, Saccharomyces servazzii
MFSRTDKNVDTLAGDISQLSFDSPSSKLAYNANNNMTPLRQRDNNRFGVGAGMNMGTPTPSPTKSTVYDQENDSSAMMVDDEDNDDITNSPKKLPMDFYKKSSSNKTQRLVSVCKMYFLDYYCDMFDYVISRRQRTKKVMEYIEQQKVLNNVPVERLNTEWFGYLQQEHDVLRKRRLKPKHKDFEMITQVGQGGYGQVYLARKKDTKEVCALKILNKKLLFKLNETNHVLTERDILTTTRSEWLVKLLYAFQDPESLFLAMEFVPGGDFRTLLINTKYLKSAHARFYISEMFCAVNALHELGYTHRDLKPENFLIDAKGHIKLTDFGLAAGTVSNERIESMKIRLEEVKNLEFPGFKEKSIEDRRKIYHHMRETDVNYANSMVGSPDYMALEVLEGKKYDFTVDYWSLGCMLFESLVSYTPFSGSSSNETYENLRHWKQTLRRPRLDNGRPAFSDRTWDLITRLIADPISRLRSFEHVKRMPYFSDIDFDNLRNMSPPFIPQLDSETDAGYFDDFTNEADMAKYADVFKRQNKLSAMVDNSAVSSKLVGFTFRHRSGKQGSSGILYNGSEHSDPFATFY

SEQ ID NO: 10663 - protein, 520 aa, Kluyveromyces lactis
MFTRDANGRHKEVDALVDDMVNFSFDTDAKVMLDPPSTPTRIRGSPSPTRSIVKNPENSLMDIDDDTQGDLTADITKSPKKLPKDFYKKSSKTKSKRLVSVCQMYFLDYYCDMFDYVISRRERTRQVINYLEEQRRSNLMGTEQITNEWQGYLTKETNILRKRRLKPKHKDFEMITQVGQGGYGQVYLARKKDTKEICALKILNKKLLMKLEGTDHVLTERDILTTTRSEWLVKLLYAFQDPQSLYLAMEFVPGGDFRTLLLNTKFLQAPHARFYISEMFCAVNALHQLGYTHRDLKPENFLIDSKGHIKLTDFGLASGTVSMERIESMKIRLQEVKNLEFPEFRERSMDDRRRMYNKLREEEVRYAHSTVGSPDYMALEVLEAKNYDFTVDYWSLGCILFESLVGYTPFSGNSTNETYENLRNWKHVLQRPKCDNGRYAFSDRTWELITRLIADPINRLKSFEHVKRMRYFSEIDFNTLRTIHPPFIPQLDNEEDVGYFDDFTNEEHMARYVDVFKRQD

SEQ ID NO: 10664 - protein, 332 aa, Gonyaulax polyedra
MAGPQLDDFTLVKVLGKGSYGKVMLVRGAQDNRLYAMKMLRKENVIKRNQVEHTKTERSVLETVSHPFIVTLHYAFQTPKKLYMVMEYCPGGELFFHLSRAGRFSEGRTRFYVAETSSAVAYLHQLNVIYRDLKPENLLIDGEGHAKITDFGLRKEGIQDNHSAMTMCGTPEYLAPEILDKKGHGKAVDWYSVGALTYEMLTGLPPFYTKDLQKLFDRIRRGELTYPDYVSVLAKEFLRALLQRNPDARLAGGVPGGDEVKGHEFFGGLDWVALEKRAIPPPFKPTFGGQKEDDVVKYFEKDFVGQPVVNSEVGEGGRDLGHLEASTLTGKR

SEQ ID NO: 10665 - protein, 360 aa, Ancylostoma caninum
MLKFLKNKTSDEGPSSKESKSSSGFKEFLEKAREDFKQRWENPAQNTATLDDFDRIKTLGTGSFGRVMLVKHKQTGNYFAMKILDKQKVVKLKQVEHTLNEKRILQAIDFPFLVNMQYSFKDNSNLYMVLEFISGGEMFSHLRRIGRFSEPHSRFYAAQIVLAFEYLHSLDLIYRDLKPENLLIDSTGYLKITDFGFAKRVKGRTWTLCGTPEYLAPEIILSKGYNKAVDWSALGVLIYEMAAGYAPFFADQPIQIYEKIVSGKVKFPSHFSNELKDLLKNLLQVDLTKRFGNLKNGVADIKNHKWFGSTDWIAIYQRKVEAPFLPKCRGPGDASNFDDYEEEPLRISGTEKCSKEFAEF

SEQ ID NO: 10666 - protein, 336 aa, Euglena gracilis
MAQTIPDQTALPDTTNWQLSDLTLKETLGTGTFGRVRLCLHKSSGNYYAIKCLKKSEVLRMKQVEHILAEASILGSIRHPFIVNMLKTFQDDKRLYIVLEYVVGGELFSHLRKAGKFPNDVAKFYAAEVILAFEYIHSMDILYRDLKPENLLLDVGGHIKITDFGFAKKVPERTFTLCGTPEYLAPEIIQSKGHGKAVDWWALGILTYEMLVGYPPFFDESPFRIYEKILEGKVQFPKWVDGRAKDLIKGLLTTDHTKRLGTLKRGVTDIKKHKWFYGVDWDMLLARKIPAPIPVKVTTPGDSRYFDRYPESKEDKSQPLTPAQQELFKGFGPYST

SEQ ID NO: 10667 - protein, 749 aa, Chlamydomonas reinhardtii
MAGVPAPASQLTKVLAGLRHTFVVADATLPDCPLVYASEGFYAMTGYGPDEVLGHNCRFLQGEGTDPKEVQKIRDAIKKGEACSVRLLNYRKDGTPFWNLLTVTPIKTPDGRVSKFVGVQVDVTSKTEGKALADNSGVPLLVKYDHRLRDNVARTIVDDVTIAVEKAEGVEPGQASAVAAAAPLGAKGPRGTAPKSFPRVALDLATTVERIQQNFCISDPTLPDCPIVFASDAFLELTGYSREEVLGRNCRFLQGAGTDRGTVDQIRAAIKEGSELTVRILNYTKAGKAFWNMFTLAPMRDQDGHARFFVGVQVDVTAQSTSPDKAPVWNKTPEEEVAKAKMGAEAASLISSALQGMAAPTTANPWAAISGVIMRRKPHKADDKAYQALLQLQERDGKMKLMHFRRVKQLGAGDVGLVDLVQLQGSELKFAMKTLDKFEMQERNKVARVLTESAILAAVDHPFLATLYCTIQTDTHLHFVMEYCDGGELYGLLNSQPKKRLKEEHVRFYASEVLTALQYLHLLGYVYRDLKPENILLHHTGHVLLTDFDLSYSKGSTTPRIEKIGGAGAAGGSAPKSPKKSSSKSGGSSSGSALQLENYLLLAEPSARANSFVGTEEYLAPEVINAAGHGPAVDWWSLGILIFELLYGTTPFRGARRDETFENIIKSPLKFPSKPAVSEECRDLIEKLLVKDVGARLGSRTGANEIKSHPWFKGINWALLRHQQPPYVPRRASKAAGGSSTGGAAFDNY

SEQ ID NO: 10668 - protein, 750 aa, Chlamydomonas reinhardtii
MAGVPAPASQLTKVLAGLRHTFVVADATLPDCPLVYASEGFYAMTGYGPDEVLGHNCRFLQGEGTDPKEVQKIRDAIKKGEACSVRLLNYRKDGTPFWNLLTVTPIKTPDGRVSKFVGVQVDVTSKTEGKALADNSGVPLLVKYDHRLRDNVARTIVDDVTIAVEKAEGVEPGQASAVAAAAPLGAKGPRGTAPKSFPRVALDLATTVERIQQNFCISDPTLPDCPIVFASDAFLELTGYSREEVLGRNCRFLQGAGTDRGTVDQIRAAIKEGSELTVRILNYTKAGKAFWNMFTLAPMRDQDGHARFFVGVQVDVTAQSTSPDKAPVWNKTPEEEVAKAKMGAEAASLISSALQGMAAPTTANPWAAISGVIMRRKPHKADDKAYQALLQLQERDGKMKLMHFRRVKQLGAGDVGLVDLVQLQGSELKFAMKTLDKFEMQERNKVARVLTESAILAAVDHPFLATLYCTIQTDTHLHFVMEYCEGGELYGLLNSQPKKRLKEEHVRFYASEVLTALQYLHLLGYVYRDLKPENILLHHTGHVLLTDFDLSYSKGSTTPRIEKIGGAGAAGGSAPKSPKKSSSKSGGSSSGSALQLENYLLLAEPSARANSFVGTEEYLAPEVINAAGHGPAAVDWWSLGILIFELLYGTTPFRGARRDETFENIIKSPLKFPSKPAVSEECRDLIEKLLVKDVGARLGSRTGANEIKSHPWFKGINWALLRHQQPPYVPRRASKAAGGSSTGGAAFDNY

SEQ ID NO: 10669 - protein, 657 aa, Hypolepis punctata
TPLEFQIQELAEWLLGSSEEIASTGVTCTDSLAEAGYPGAAALGDAVCGLAAARITPNSDFLFWFRSHTAKEVFWGGAEHDPEARDDDSRMLPRSSFKAFLEIVKKRSLPWEEVEVDAIRSLQLILREELEKFCAAAAAAATASASDRDDVDSLVPSSKKLSLKENEEMGTGGGWGKMSLPPSLVQEWMEAIRGGAGDGRASGGGGGDFNWDPTCMFQQTSFVVVDALKPDLPIIFASTGFFNLTGYTSTEVIGANCRLLQGPDTNPEDVASIREALAQDTGTFCRKLLNYRKDGSSFWNLLTIAPIKDDRGSIVKLIGVQLEVSKYTEGSRANRLRPNGLPQSLIKYDVRHRDKVSVFVAELVAALTKPDKVELTKPSSTMQFSLTGQTIKPLSKTAAMPREGGGRRRHGSNTFLSLLGVEKKDPVEDQFPEPRLIMVDDNSVGRPESLDDPERTRRGIDLATTLERIGQSFVITDPRLPNNPIIFASDQFLELTEYSREEVLGNNCSFLQGRDTDANTVQLIRDAVAEQRDVTVQLLNYTRGGRPFWNLFHLHAMRDEKGELQYFIGVQQETVAPRVPEDMPDRVKQVHTTAQNVDVAARELPDANLSPDHLWVRHSKVITPLPHSKMNNSSWYAIRRVQRRVRLGLKHFRPIKP

SEQ ID NO: 10670 - protein, 692 aa, Onoclea sensibilis
TPSEFQIQDLVEWLLGSSEDIASSGVTCTDSLAEVGYPGAAALGDAVCGMAAARITPNSDFLFWFRSHTAKEVFWGGAEHDPQARDDDSRLLPRSSFKAFLEIVKRRSLPWEEVEVDAIRSLQLILREDLEEFCAAAAAGADGEDVDSLVPSSKKLSLKEREGSGAENSKKLERATSAAVGAAGGTGGRWEKMLLPSSLAQEWMEAIRGTGDGGASGGGGGVPFDWDAISVFQQTSFVVVDALKLDLPIIYASTGFFNLTGYTSREVIGGNCRFLQGPETNPAVIDSIREALVPQGTGTFCGRLLNYRKDGSSFWNLLTIAPIKDDSGTIVNLIGVQLEVSKYTEGSRENRLRPNGLPQSLIKYDVRHQDKVSALIAQLVAALTKPHKVEPPRPSYTMRFSLTGQTIEPLSPGQAAAAARPCSTSDVPQTTSIPREGRGRRRHRSSTFLSLLGMEEKDSEEDQFPEPELIMVADASVGRLRSSDDPERTRRGIDLATTLERIGHSFVITDPRLPGNPIIFASDQFLELTEYSREEVLGENCRFLQGRDTDRKAVQLIRDAVEEGRDVTVQLLNYTKGGRPFWNLFHLQAMRDKKGNLQYFIGVQQETDTPDRVEHEKAKVVRATAQNVDVAARELPDANLTLDHLWERHSKEVTPLPHSKINSPCWYAIRRVQRRLRRGERLGLKHFRPIKP

SEQ ID NO: 10671 - protein, 686 aa, Dryopteris filix-mas
TPSEFQVQDLAEWLLGSSEEIASSGVTCTDSLAEAGYPGATALGDAVCGMAAARITPNSDFLFWFRSHTAKEVFWGGAEHDPQARDDDSRLLPRSSFKAFLEIVKRRSLPWEEVEVDAIRSLQLILREDLEEFCAAAAGADVEDVDSLVPLSIKLSLKESEEMGGAEDSKKLERATSAAAGGTGGGGWEKMSLPSSLAQEWMEAIRGTGDGGASGGVPFDWDAISVFQQTSFVVVDALKPDLPIIFASTGFFNLTGYTSREVIGGNCRFLQGPDTNPEDVASIRDAVVPRGTGTFCGRLLNYRKDGSNFWNLLTIAPIKDDTGTIVKLVGVQLEVSKYTEGSRANRLRPNGLPQSLIKYDVRHQDKVSALVAQIVAALTKPYKVEPPRPSYAMRASLTGQTIQPLSPGRAAAARPYSASDVPQTAAIPREGGGRRRHRSSTFLSLLGMEEKDSEEDQFPEPELIMMDNASVGRPGSLDDRERTRRGIDLATTLERIGHSFVITDPRLPDNPIIFASDQFLELTEYSREEVLGENCRFLQGRDTDLKAVQLIRDAVKEGRDITVQLLNYTRGGRPFWNLFHLQAMRDKKGNLQYFIGVQQETDTLDRVEQEKAEVVRATAQNVDVAARELPDANLTPDHLWERHSKVVTPLPHSKINSPCWYAIRKVQRRLRRGERLGLKHFRPIKP

SEQ ID NO: 10672 - protein, 471 aa, Blumeria graminis
MPTFGFLKKRKKVSLGHRDLDSPASTLSQPASPITPSTSRGLGEPIDTTSSKITSPGQKLGSNITKDHRGTRTTVEDLPSMTDVSHLQQAYRNLSQGSTASKSNLLTIHNLINPPQHDGAGQSKVMPEKHMNNKTERPVQGKAAVAQVRQTKGKYSLSDFEILRTLGTGSFGRVHLVQSKHNQRFYAVKVLKKQQVVKMKQVEHTNDERSMLQEVKHPFLITLWGTFQDSKNLYMVMDFVEGGELFSLLRKSQRFPNPVAKFYAAEVTLALEYLHKKDIIYRDLKPENLLLDRHGHLKITDFGFAKKVTDITWTLCGTPDYLAPEVVSSKGYNKSVDWWSLGILIFEMLCGYTPFWDNGSPMKIYENILKGRVKYPPYIHPDAQDLIQRLITADLTKRLGNLHGGAEGIKSHQWFAEVTWERLAKKDIDAPYVPPVKAGSGDASQFDKYPEETERYGQTGPDEHGSLFENF

SEQ ID NO: 10673 - protein, 367 aa, Blumeria graminis
MGNSHVKPCFSDEVNLSHFRLLRVVGRGAFGKVRIVERRDTGLTFALKYIRKGDVIRTESVRNILRERRMLEQLNYQFICNLRYSFQDIEYMYLVVDLMNGGDLRFHISRKVFTEEAVRFWISELGLAIRYIHSQGIIHRDIKPDNVLLDAEGHVHLADFNVASDFTPGKLLTSKSGTLAYLAPEVYKGKGYSSSVDWWSLGVLFYECIYNKRPFEKISSSDLQEQILKADPKFPVTDPPVSIVCMHAISSALEQDPNKRMGCTKDEGFSSFTDNPFFRAIDFYALERKEIEPVFVPSSGKTNFDATYDLEEMLLEEAPLEARARRQKPREQLREDATEKQIREEEMYQMIEEHFTPFDYTTIAYER

SEQ ID NO: 10674 - protein, 572 aa, Mesembryanthemum crystallinum
SFDGNGNTDDEDDFYDDDDDDGRPDSVDDKVRKKEMRKGIDLATTLERIEKNFVITDPRLPDNPIIFASDSFLELTEFSRAEILARNRRFLQGPETDPATVAKIRDAIDNETDVTVQLINYTKTGKKFWNVFHLQPMRDQKGEVQYFIGVQLDGSEHVEPVQNSIPVASVMDSEKQVKETATNVDVAVRELPDANKKPEDLWANHSKVVQPKPHRKECSSWKAIEKIKESGEQIGLKHFRPVKPLGAGDTGSVHLVELCGTGEYFAMKAMDKNVMLNRNKVHRACAEREILDMLDHPFLPALYASFQTNTHICLITEYCPGGELFLLLDRQPTKVLKEDAVRFYAAEVIIALEYLHCQGIIYRDLKPENILLQSNGHVSLTDFDLSCLTSCKPQLLIPEIRDKKKQQKAQHQQTPIFMAEPMRASNSFVGTEEYIAPEIIAGAGIQGAVDWWALGILLYEMLYGFTPFRGKTRQKTFSNVLRKDLKFPATKQVSLDASQLIYQLLQKDPKDRLGACEGANEIKRHPFFRGANWALVRCMKPPVLDAPPLLGDPEKEANIVDPDMLDLQTNVF

SEQ ID NO: 10675 - protein, 724 aa, Spinacia oleracea
LTVTPIRDDKGCVIKFIGMQVEVSKFTEGINDKALRPNGLPKSLIRYDPRQKEAALGSIIEVVQTVKHPRSLSQPLSNNDADRREVAGKFNLDYMLPKLAEIDNVGTPGRLSSPSRLSTPGRQTPKIDASSRDSDKSSRKSARISLLGFKGRSSAKHERPPSPEPEFLIPKDIDRDDSWERAERERDVRQGIDLATTLERIEKNFVISDPRLPDNPIIFASDSFLELTEYTREEILGRNCRFLQGPETDQTTVQKIRDAIKEQRDITVQLINYTKSGRKFWNLFHLQPMRDQKGELQYFIGVQLDGSDHVEPLRNRLSERTEIQSAKVVKATAENVDEAVRELPDANSRPEDLWAIHSEPVYPRPHKRGSSSWAAIQKITAAGEKVGLEHFNPIKPLGCGDTGSVHLVELKVPENWFAMKAMDKSVMLNRNKVHRACVEREIISTLDHPFLPTLYASFQTSTHVCLITDFCPGGELFALLDKQPLKIFKEESARFYAAEVVIGLEYLHCLGIIYRDLKPENILLQKDGHLVLTDFDLSFLTSCNPHIINHPQPKKRRSRSQPPPTFIAEPVTQSNSFVGTEEYIAPEVITGASHTSAIDWWALGVLLYEMLYGRTPFRGKNRQKTFANIMHKDLTFPSSIPVSLSARQLIYALLNRDPATRLGTQGGASEIKEHPYFRGINWPLIRCMDPPTLEAPFKLIGRDPNAKEVKWDDDGVLASPMDFF

SEQ ID NO: 10676 - protein, 471 aa, Cucumis sativus
MEDDYSIFPPDSDLDFSFTSTTTDRTFTTSSSARTSLARSSLTLSFNESRLSAAAAALNLRPYHRSDSHWSAIRAATTLSSDGHLHLRHLKLIRHLGTGNLGRVFLCHLRDNDHASFALKVVDKEALSNKKLLQVQTEAEILASLDHPFLPTLYARLDVSHYTCLLIDYCPAGDLHSLLRKQPGSRFSVAAARFFAAEVLVALEYLHALGIVYRDLKPENVLLREDGHVMLSDFDLCFKSDVVPTFHTWTRPGPQATGSCFGWRTSPEFEEEIVGEFVAEPTSAFSKSCVGTHEYLAPELVTGGGHGNGVDWWAFGVFVYELLHGTTPFKGVNKEGTLRNIASSEGVKFRGGGEEEGGMGEARDLIERLLVKDPGRRLGWEKGATEIKRHPFFEGIKWPLIRTYRVPEVYGMMRKGRAQVSHVREVTERIRRRGWWNWRKVMRKRLIKNGSCSKSHSNTNYYSYSSKKKTG

SEQ ID NO: 10677 - protein, 996 aa, Arabidopsis thaliana
MEPTEKPSTKPSSRTLPRDTRGSLEVFNPSTQLTRPDNPVFRPEPPAWQNLSDPRGTSPQPRPQQEPAPSNPVRSDQEIAVTTSWMALKDPSPETISKKTITAEKPQKSAVAAEQRAAEWGLVLKTDTKTGKPQGVGVRNSGGTENDPNGKKTTSQRNSQNSCRSSGEMSDGDVPGGRSGIPRVSEDLKDALSTFQQTFVVSDATKPDYPIMYASAGFFNMTGYTSKEVVGRNCRFLQGSGTDADELAKIRETLAAGNNYCGRILNYKKDGTSFWNLLTIAPIKDESGKVLKFIGMQVEVSKHTEGAKEKALRPNGLPESLIRYDARQKDMATNSVTELVEAVKRPRALSESTNLHPFMTKSESDELPKKPARRMSENVVPSGRRNSGGGRRNSMQRINEIPEKKSRKSSLSFMGIKKKSESLDESIDDGFIEYGEEDDEISDRDERPESVDDKVRQKEMRKGIDLATTLERIEKNFVITDPRLPDNPIIFASDSFLELTEYSREEILGRNCRFLQGPETDLTTVKKIRNAIDNQTEVTVQLINYTKSGKKFWNIFHLQPMRDQKGEVQYFIGVQLDGSKHVEPVRNVIEETAVKEGEDLVKKTAVNIDEAVRELPDANMTPEDLWANHSKVVHCKPHRKDSPPWIAIQKVLESGEPIGLKHFKPVKPLGSGDTGSVHLVELVGTDQLFAMKAMDKAVMLNRNKVHRARAEREILDLLDHPFLPALYASFQTKTHICLITDYYPGGELFMLLDRQPRKVLKEDAVRFYAAQVVVALEYLHCQGIIYRDLKPENVLIQGNGDISLSDFDLSCLTSCKPQLLIPSIDEKKKKKQQKSQQTPIFMAEPMRASNSFVGTEEYIAPEIISGAGHTSAVDWWALGILMYEMLYGYTPFRGKTRQKTFTNVLQKDLKFPASIPASLQVKQLIFRLLQRDPKKRLGCFEGANEVKQHSFFKGINWALIRCTNPPELETPIFSGEAENGEKVVDPELEDLQTNVF

SEQ ID NO: 10678 - protein, 441 aa, Brassica napus
MVGAKPIENGSDGGASTGLLHGRYELGRLLGHGTFAKVYHARNVTTGKSVAMKVVGKEKVVKVGMVDQIKREISVMRMVKHPNIVELHEVMASKTKIYFAMELVRGGELFAKVAKGRLREDVARVYFQQLISAVDFCHSRGVYHRDLKPENLLLDEEGNLKVTDFGLSAFTEHLKQDGLLHTTCGTPAYVAPEVILKKGYDGAKADLWSCGVILFVLLAGYLPFQDDNLVNMYRKIYRGDFKCPGWLSSDARRLVTKLLDPNPNTRITIDKVMDSHWFKKSSTRSRNEPVAATPEAEEDVDVSVHKSKEETETLNAFHIIALSEGFDLSPLFEEKKKEEKMEMRFATSRPASSVISSLEEAAKVGNKFDVRKSECRVRIEGKQNGRKGKLAVEAEIFAVAPSFVVVEVKKDHGDTLEYNNFCSTALRPALKDIFWTSTTPA

SEQ ID NO: 10679 - protein, 439 aa, Brassica rapa
MLLESDGEMSLETTNSPISSGTESCSSFSRLSFDAPPSTTAIIPEEESCLSLKPHRSSDFAYAEILRRRKHSLTFRDFRLMRRIGAGDIGTVYLCRLAGDQEESRSSYFAMKVVDNEALAMKKKMHRAEMEKKILKMLDHPFLPSLYAEFEASHFSCIVMEYCSGGDLHSLRHRQPQHRFSLSSARFYAAEVLVALEYLHMLGIIYRDLKPENILVRSDGHIMLSDFDLSLCSDSIAAVESSSSTPENYPHSSPRRLTRLAKLFNRVLRSKKVQTLEPNRLFVAEPVTARSGSFVGTHEYVAPEVASGGSHGNAVDWWAFGVFLYEIIYGRTPFAAPTNDVILRNIVKRPLSFPTDSPATMFELHARSLISGLLNKDPSTRLGSRRGAAEVKVHPFFKGLNFALIRTMTPPEVPSDVRRPKKSATFGGRSSKPAAFDFF

SEQ ID NO: 10680 - protein, 905 aa, Glycine max
  unsure (1)..(905): unsure at all Xaa locations
ETHYRRSYNRRQLLEESSKREAVFWSKFCNXEATIAERTAEWGLVVIEEFQSIRGREYKCSFDGDRSRNLSDRFSNYGSESSSGVFPRVSQELKEALATLQQTFVVSDATKPDCPIMYASSGFFTMTGYSSKEIIGRNCRFLQGPETDKNEVAKIRDATRNGRSYCGRLLNYKKDGTPFWNLLTVTPIKDDHGNTIKFIGMQVEVSKYTEGMNEKALRPNGLPKSLIRYDARQKEKALGSITEVVQTVKDPKSIINDXXNGDTATMPEEQEKFNFDFVLPKSADIGNTNTPGRQASPLYIQRMSSSHSAEEKSIVEPEVLMTKEIEWSNNLEHSLRERDIRQGIDLATTLERIEKNFVISDPRLPDNPGSSASDSFLELTEYTREEILGRNCRFLQGPETDQATVSRIRDAIREQREITVQLINYTKSGKKFWNLFHLQPMRDQKGELQYFIGVQLDGSDHVEPLKNRLSETTEQQSAKLVKATAENVDEAVRELPDANLVXRPEDLWAIHSQPVFPRPHKKENPSWIAIQKVAARGEKIGLQHFVPIRPLGCGDTGSVHLVELKGTGELYAMKAMEKSVMLNRNKVHRSCIEREIISLLDHPFLPTLYTSFQTPTHVCLITDFFPGGELFALLDKQPMKIFKEESARFYAAEVVIGLEYLHCLGIIYRDLKPENILLQKDGHVVLADFDLSYMTSCKPQVVKQAIPGKRRSRSEPPPTFVAEPVTQSNSFVGTEEYIAPEIITGAGHTSGIDWWTLGILLYEMLYGRTPFRGKNRQKTFSNILHKDLTFPSSIPASLAARQLINALLQRDPTSRIGSTTGANEIKQHPFFRGINWPLIRNMTPPPLDVPLKLIGNDPVAKDIKWEDDGVLVSSIDMDIFXRFALFTQDLWSASYLISCCNDHGV

SEQ ID NO: 10681 - protein, 609 aa, Phaseolus vulgaris
MESSVNGVDSLSEVQNSVSGVHHHDPLPSGTPQPSRPPLRASRNYDGGHQTKAIHHHNSHVINQKHSHQEGKTLKQEGLPTKLSSKQPPLDDSKGCEPNGVLESEKKRVVDNHGKNYSQPDATFCASPQNSFYSATVYSEAKESFTNTEVSECASVDKSCESEVANSSDFNESRKTSICRASTGSDASDESSTSSLSSVLYKPHKANDIRWEAIQAVRTRDGMLEMRHFRLLKKLGCGDIGSVYLAELSGTRTSFAMKVMNKTELANRKKLLRAQTEREILQSLDHPFLPTLYTHFETEIFSCLVMEFCPGGDLHALRQRQPGKYFSEHAVRFYVAEVLLSLEYLHMLGIIYRDLKPENVLVREDGHIMLSDFDLSLRCSVSPTLVKSSNNLQTKSSGYCVQPSCIEPTCVMQPDCIKPSCFTPRFLSGKSKKDKKSKPKNDMHNQVTPLPELIAEPTNARSMSFVGTHEYLAPEIIKGEGHGSAVDWWTFGIFLYELLFGRTPFKGSANRATLFNVIGQPLRFPESPTVSFAARDLIRGLLVKEPQHRLAYRRGATEIKQHPFFQNVNWALIRCATPPEVPRQVINLPQTEKDLGVKPSGNYLDIDFF

SEQ ID NO: 10682 - protein, 976 aa, Pisum sativum
MEHLKKSPSSSSSSSMRPSFPRDPRGSLEVFNPTSNSSSPVRSPSNLKNWTEIEEPRNELSEQHNEFSDEVTNTSWMAIKEGETGAAVQRAAEWGLMLTTDAETGKPQGVAVRNSGGDEPSVKLETKRNSNNTVRTSGESSDGDDPRGFPRVSEDLKDALSAFQQTFVVSDATKPDYPILYASAGFFKMTGYTSKEVIGRNCRFLQGADTDPDDVARIREALEGGKSFCGRLLNYKKDGTPFWNLLTISPIKDDDGNVLKLIGMLVEVNKHTEGSKEKKLRPNGLPESLIRYDARQKEKATSSVSELLEAMKRPRALSESGQRPFIRKSGGGGGSEEDEEAVENKSRRKSDSVASFRPKPQGKIRHSMERISELPENKQKNSRRGSFMGFMRKSDSIDESIDNEVIVDVSSGSEDDERDDSFEFDDKEKLREKRKGLDLATTLERIEKNFVITDPRLPDNPIIFASDSFLELTEYSREEILGKNCRFLQGPETDPATVRKIREAIDNQTEVTVQLINYTKSGKKFWNLFHLQPMRDHKGEVQYFIGVQLDGSQHVEPLHNCIAEDTAKEGELLVKETAENVGEAVKELPDANQKPDDLWMNHSKVVRPKPHRKDDDAWRAIQKVLENGEQVGLKHFRPIKPLGSGDTGSVHLVELEGTGQYFAMKAMDKGVMLNRNKVHRACTEREILDMLDHPFLPALYASFQTKTHVCLITDYYSGGELFLLLDQQPTKVLKEDSVRFYAAEVVIALEYLHCLGIIYRDLKPENVLIQSNGHVSLTDFDLSCLTSCKPQLILPAIEEKKKRKKKKNKGQQKNQQVPMFMAEPMRASNSFVGTEEYIAPEIITGSGHTSAVDWWALGILLYEMLYGYTPFRGKTRQKTFANILHKDLKFPKSKPVSPHGKQLIYWLLHRDPKNRLGSLEGANEIKNHPFFKNINWALVRCTKPPELDGPILLDNDEKKEAKEIDPGLDDLQKNIF

SEQ ID NO: 10683 - protein, 976 aa, Pisum sativum
MEHLKKSPSSSSSSSMRPSFPRDPRGSLEVFNPTSNSSSPVRSPSNLKNWTEIEEPRNELSEQHNEFSDEVTNTSWMAIKEGETGAAVQRAAEWGLMLTTDAETGKPQGVAVRNSGGDEPSVKLETKRNSNNTVRTSGESSDGDDPRGFPRVSEDLKDALSAFQQTFVVSDATKPDYPILYASAGFFKMTGYTSKEVIGRNCRFLQGADTDPDDVARIREALEGGKSFCGRLLNYKKDGTPFWNLLTISPIKDDDGNVLKLIGMLVEVNKHTEGSKEKKLRPNGLPESLIRYDARQKEKATSSVSELLEAMKRPRALSESGQRPFIRKSGGGGGSEEDEEAVENKSRRKSDSVASFRPKPQGKIRHSMERISELPENKQKNSRRGSFMGFMRKSDSIDESIDNEVIVDVSSGSEDDERDDSFEFDDKEKLREKRKGLDLATTLERIEKNFVITDPRLPDNPIIFASDSFLELTEYSREEILGKNCRFLQGPETDPATVRKIREAIDNQTEVTVQLINYTKSGKKFWNLFHLQPMRDHKGEVQYFIGVQLDGSQHVEPLHNCIAEDTAKEGELLVKETAENVGEAVKELPDANQKPDDLWMNHSKVVRPKPHRKDDDAWRAIQKVLENGEQVGLKHFRPIKPLGSGDTGSVHLVELEGTGQYFAMKAMDKGVMLNRNKVHRACTEREILDMLDHPFLPALYASFQTKTHVCLITDYYPGGELFLLLDQQPTKVLKEDSVRFYAAEVVIALEYLHCLGIIYRDLKPENVLIQSNGHVSLTDFDLSCLTSCKPQLILPAIEEKKKRKKKKNKGQQKNQQVPMFMAEPMRASNSFVGTEEYIAPEIITGSGHTSAVDWWALGILLYEMLYGYTPFRGKTRQKTFANILHKDLKFPKSKPVSPHGKQLIYWLLHRDPKNRLGSLEGANEIKNHPFFKNINWALVRCTKPPELDGPILLDNDEKKEAKEIDPGLDDLQKNIF

SEQ ID NO: 10684 - protein, 428 aa, Pisum sativum
MRDQKGEVQYFIGVQLDGSQHVEPLHNRIAEDTAKEGENLVKKTAENVDDALRELPDANMKPEDLWMNHSKMVHPKPHRREDAAWRAIQKIMESGEQIGLKHFKPIKPLGSGDTGSVHLVELCGTDHQFAMKAMDKGVILNRNKEHRACTEREILDMLDHPFLPALYASFQTKTHICLITDYCPGGELFMLLDRQPAKVLKEDAVRFYATEVVVALEYLHCQGIIYRDLKPENVLLQSTGHVSLTDFDLSCLTSCKPQLLVPSTNDKKKGQHGPIFMAEPMRASNSFVGTEEYIAPEIITGSGHTSAVDWWALGILLYEMFYGYTPFRGKNRQRTFANILHKDLKFPKSKQVSLGAKQLIYYLLQRDPTSRLGSKGGANDIKNHSFFKGINWALVRCTKPPELDAPLFDTNKEEKEKEDKYVDNGQRI

SEQ ID NO: 10685 - protein, 443 aa, Pisum sativum
MRDHKGEVQYFIGVQLDGSQHVEPLHNCIAEDTRKEGELLVKETAENVGEAVKELPDANQKPDDLWMNHSKVVRPKPHRKDDDAWRAIQKVLENGEQVGLKHFRPIKPLGSGDTGSVHLVELEGTGQYFAMKAMDKGVMRNRNKVHRACTEREILDMLDHPFLPALYASFQTKTHVCLITDYYPGGELFLLLDQQPTKVLKEDSVRFYAAEVVIALEYLHCLGIIYRDLKPENVLIQSNGHVSLTDFDLSCLTSSKPQLILPAIEEKKKRKKKKNKGQQKNQQVPMFMAEPMRASNSFVGTEEYIAPEIITGSGHTSAVDWWALGILLYEMLYGYTPFRGKTRQKTFANILHKDLKFPKSKPVSPHGKQLIYWLLHRDPKNRLGSLEGANEIKNHPFFKNINWALVRCTKPPELDGPILLDNDEKKEAKEIDPGLDDLQKNIF

SEQ ID NO: 10686 - protein, 963 aa, Vicia faba
MEPFTRDHRGSLEVFNPSSSETNGTPNPNPNPNPSNSWNTGTSSRGTEAPPLRDSIISDEVPTATSWMALKETTPSPKSGESGSVAEQRAAEWGLVLKTDSETGKPQGVGVRGSGGGGGSRRDSNNSVRSSGESSDDGREGGRGIPRVSEDLRDALSAFQQTFVVSDATKPDYPIMYASAGFFSMTGYTSKEVIGRNCRFMQGADTDPNDVAKIREALAAGTSYCGRLLNYKKDGTTFWNLLTIAPIKDEHGKILKLIGMQVEVSKHTEGTKEKMLRPNGLPESLIRYDARQKEKANSSVTELVEAVSKRPRSLSESANRLPFNKKPTNGSNDHATPPNSESSSRKSGSTLRSFRRKSHSGAGNSNSMHPITELPENNNKSRRRSFMGFMRKSLSNNERFNHEQVIDRNSSEDEDRLDSFDEQNIAQKREKRKGFDLATTLERIEKNFVITDPRLPDNPIIFASDSFLELTEYSREEILGRNCRFLQGPETDPATVKKIRYAIDNQTEVTVQLINYTKTGKKFWNLFHLQPMRDQKGEVQYFIGVQLDGSQHVEPLHNGIAEDTAKEGENLVKKTAENVDDALRELPDANMKPEDLWMNHSKVVHPKPHRREDSAWRAIQKIMESGEQIGLKHFKPIKPLGSGDTGSVHLVELCGTDHHFAMKAMDKGVMPNRNKVHRACTEREILDMLDHPFLPALYASFQTKTHICLITDYCPGGELFMLLDRQPAKVLKEDAVRFYATEVVVALEYLHCQGIIYRDLKPENVLLQSTGHVSLTDFDLSCLTSCKPELIVPSTNDKKKGQHGPIFMAEPMRASNSFVGTEEYIAPEIITGSGHTCAVDWWALGILLYEMFYGYTPFRGKNRQRTFANILHKDLKLPKSKQVSLSAKQLIYHLLQRDPTSRLGSKGGANDIKHHSFFKGINWALVRCTKPPELDAPLFDTNKEEKEKDDKYVDNGQEDMSVF

SEQ ID NO: 10687 - protein, 970 aa, Vicia faba
MEKHLKKSPSSSSSSSMRPSFPRDPRGSLEVFNPTSNTSSPVRSPSNLKNWTETEEPRNEFPDKVTNTSWMAIKEGETGAAVQRAAEWGLVLTTDAETGKPQGVAVRHSGGDEPNAVELESKRNSNNTVRTSGESSDGGDPRGFPRVSDDLKDALSAFQQTFVVSDATKPDYPILYASAGFFKMTGYTSKEVIGRNCRFLQGADTDPNDVARIREALEGGKSFCGRLLNYKKDGTPFWNLLTISPIKDDDGNVLKLIGMLVEVNKHTEGSKEKKLRPNGLPESLIRYDARQKEKATSSVSELLEAMKRPRAMSESGHRPFIRKSGGGGSSEEDERLENKSRRKSDSVASFRPKPQGKIRHSMERISELPENKQKNSRRGSFMGFMRKSHSIDESIDNEVIVDVSSGSEDDERDDSFEFDDKEKLKEKRKGLDLATTLERIEKNFVITDPRLPDNPIIFASDSFLELTEYSREEILGKNCRFLQGQETDPATVRKIREAIDNQTEVTVQLINYTKSGKKFWNLFHLQPMRDHKGEVQYFIGVQLDGSQHVEPLHNCIAEESAKEGELLVKETAENVGEAVKELPDANQKPDDLWKNHSKVVRPKPHRKDDDAWRAIQNVVGNGEQVGLKHFRPIKPLGSGDTGSVHLVELEGTGHYFAMKAMDKGVMLNRNKVHRACTEREILDMLDHPFLPALYASFQTKTHVCLITDYYPGGELFLLLDQQPTKVLKEDSVRFYAAEVVIALEYLHCLGIIYRDLKPENVLIQRNGHVSLTDFDLSCLTSCKPQLILPATEEKKKRKNKKKKGQPKNQEVPMFMAEPMRASNSFVGTEEYIAPEIITGSGHTSAVDWWALGILLYEMLYGYTPFRGKTRQKTFGNILHKDLKFPKSKPVSPHGKQLIYWLLHRDPKNRLGSLEGANEIKNHPFFKNVNWALVRCMKPPELDAPILLDNDEKKEAKDIDPGLDDLQKNIF

SEQ ID NO: 10688 - protein, 921 aa, Oryza sativa (indica cultivar-group)
MASKGTGGGHGGVERKEQQQQRGYQLPRDSRGSLEVFNPSSASSFRTAAAAAKSASPFLAIPDREEDNVVAQQRAAEWGLVLQTDYHTGLPQGVSTRPSSCSARTSSEDTPQQQQSAAAIPRVSEELRAALSAFQQTFVVSDATRPNHPIMYASAGFFNMTGYTSKEVVGRNCRFLQGSGTDPHEIDKIRQALANGSNYCGRILNYKKDGTPFWNLLTIAPIKDEDGRLLKFIGMQVEVSKYTEGKKETVVRPNGLSESLIKYDARQKDHARSSVSELLLALKNPRSLSESSNNTLKRKSQESLSMSMSEVPSKRSSESGSRRNSRSGTRSSLQKINEVPDQVNRTRKSGLRAFMGFLGMGHGSVEKNMLKPRDEDPLIDSDDERPESFEDEFRRKEMRRGIDLATTLERIEKNFVITDPRLPDNPIIFASDSFLQLTEYNREEILGRNCRFLQGPETDRAIVRKIRDAIDNQAEVTVQLINYTKSGKKFWNLFHLQPMRDQKGDVQYFIGVQLDGTEHVQDDAAEEGVVLVKKTADNIDEAAKELPDANLRPEDLWANHSKVVLPNPHMKDTASWRAIQKVLESGESIGLKHFRPIKPLGSGDTGSVHLVELLNTGEYFAMKAMDKSIMLNRNKVHRATAERQILDLLDHPFLPTLYASFQTKTHICLITDYCPGGELFVLLDNQPLKVLHEDAVRFYVAEVVIALEYLHCQGIIYRDLKPENILLHRDGHISLTDFDLSCLTSCRPQVFLPEDADEKKGRKNRSYPIFFAEPMRASNSFVGTEEYIAPEIITGAGHTSAVDWWALGILLYEMLYGYTPFRGKTRQRTFANILHKDIRFPASILVSLAARQLMYRLLHRDPANRLGSYEGANEIKGHPFFRGINWPLIRATAPPKLEIPLFSKDDMEKKGLVTDNRTDIF

SEQ ID NO: 10689 - protein, 921 aa, Oryza sativa (japonica cultivar-group)
MASKGTEGGHGGVERKEQQQQRGYQLPRDSRGSLEVFNPSSASSFRTAAAAPKSASPFLAIPDREEDNVVAQQRAAEWGLVLQTDHHTGLPQGVSARPSSGSARTSSEDNPQQQQSAAAIPRVSEELRAALSVFQQTFVVSDATHPNHPIMYASAGFFNMTGYTSKEVVGRNCRFLQGSGTDPHEIDKIRQSLANGSNYCGRILNYKKDGTPFWNLLTIAPIKDEDGRLLKFIGMQVEVSKYTEGKKDTVVRPNGLSESLIKYDARQKDHARSSVSELLLALKNPRSLSESSNNTLKRKSQESLSMSMTEVPSKRSSESGSRRNSRSGTRSSLQKINEVPDQGNRTRKSGLRAFMGFLGMGHGSVEKNMLKPRDEDPLIDSDDERPESFEDEFRRKEMRRGIDLATTLERIEKNFVITDPRLPDNPIIFASDSFLQLTEYNREEILGRNCRFLQGPETDRATVRKIRDAIDNQAEVTVQLINYTKSGKKFWNLFHLQPMRDQKGDVQYFIGVQLDGTEHVQDDAAKEGVVLVKKTADNIDEAAKELPDANLRPEDLWANHSKVVLPNPHMKDTASWRAIQKVLESGESIGLKHFRPVKPLGSGDTGSVHLVELLNTGEYFAMKAMDKSIMLNRNKVHRATAERQILDLLDHPFLPTLYASFQTKTHICLITDYCPGGELFVLLDNQPLKVLHEDAVRFYAAEVVVALEYLHCQGIIYRDLKPENILLHRDGHISLTDFDLSCLTSCRPQVFLPEDADEKKGRKNGSYPIFFAEPMRASNSFVGTEEYIAPEIITGAGHTSAVDWWALGILLYEMLYGYTPFRGKTRQRTFANILHKDIRFPASISVSLAARQLMYRLLHRDPANRLGSYEGANEIKGHPFFRGINWPLIRATAPPKLEIPLFSKDDMEKKGLVTNTRTDMF

SEQ ID NO: 10690 - protein, 516 aa, Cryptococcus neoformans var. neoformans
MFQKVSDKFHRKQQSTTLPGKTQQVPNPTSPVLAKANSQAQQAYSLPQDHSPMEGIQRDSPPIQQPMATEKAPIVGSSASTSLPTLSVQDGTLPLTPGAQGMQTGTIDGHRQLQSPVSRSSSAGEDKMREKARDAQEQAAQSQANLHHATQQARVAAINAAATQAALETAAQLPATARVPVSGGGVEQGQARRKTAGRYALSDFLIERTLGTGSFGRVHLVRSRHNGRFYAVKVLNKEKVIKMKQVEHTNSEREMLVRVRHPFLVNLWGTFQDVNNLYMVMDFVAGGELFSLLRKSQRFPNSVAKFYAAEVALALDYLHSLDIIYRDLKPENLLLGADGHVKVTNFGFAKYVPDITWTLCGTPDYLAPEVVQSKGYNKSVDWYALGVLIFEMLAGYPPFFTEDGNPMKLYEKIIAGKVRYPTYFDALAKELLKNLLIGDLTKRYGNLRAGSSDIFAHGWFAEVDWDKLYRREIPAPYVPKIDGEGDASQFDRYQEADVSAYGKVGNGPYDHFFTEF

SEQ ID NO: 10691 - protein, 917 aa, Botryotinia fuckeliana
MPSLHGLWSHINVTLANLTNNRDEDGDHIDSDTPRSGVATPQPDPSDKRTPGILHSFYGQVGLGSSSSQNSAKHISRTSQNPNTSALEGHYTSPRQRFEAEGALLKATPSSLDERRIDGGVEKENSLLPPHELLGSSQISKQQYPYPTPPVSHPSSLHKVKLSDASFEDIGNNVQKTAAPTDRDCISESIPSHARRASSMTPLSNIVTPSNVHAAHFSNPSDTPSEHKLSTPPLSRLNSEFHKSPSYDRLKKLTCDGLKSIPSTPTRALSNQTSKSDQSVMSTNSEHVAQNGKSGASERPAVTPRTDSSMGGTVVPPKGKLTVKINEARGLRRSVDPYVVAVFQRNELVSKGPQSEEDDEDDGNSHSPGGIPIGGIPIGGIPITRSGSDSGRSMAIPMKSRQSSNTSLSEYRDFKNKGRKMFTHPKWDAEAVFDVVGSDTRVNITIYDRAQQAEEFLGHVDLQANLVENVDAPVSGWFQLRGKDMTSNAGNVGEVHVEISFQRTEKRHYGPDDFQILKLIGKGTFGQVYQVRKKDTKRIYAMKVLQKKVIVQKKEVAHTVGERNILVRTATADSPFIVGLKFSFQTPTDLYLVTDYMSGGELFWHLQKEGRFDEQRAKFYIAELILALEHLHKHDIVYRDLKPENILLDANGHIALCDFGLSKANLTKNATTNTFCGTTEYLAPEVLLDEAGYTKMVDFWSLGVLVFEMCCGWSPFYAEDTQQMYKNIAFGKVRFPRDTLTTEGRNFVKGLLNRNPKHRLGATDDAEELKRHPFFQDIDWHALTQKLITPPFKPKLKSETDTSNFDPEFTNALNGASSLNARAAALAAGMATSTPLSPGMQANFKGFTFVDESSIEENMKDRIKDEYEDRMDQDNNDPERDWEDTFDIPDKSRMDRMSGVVRNHNEDERMFNGDDFH

SEQ ID NO: 10692 - protein, 1170 aa, Botryotinia fuckeliana
MNSNDEEALNSVYKKIQRERALLNAANQMRQQTQNEQVRASIDIQMRDGRRNISYLEERMRELQLRTEGRTGSAGSSAGRPPSSGLRDDRAAPPPTPPPKDARGNPIETGDQAGYGDQEYSQIGGHGDMMPPRNPFAPPAPGSGMPRSRPNYTKLDLIKYDTPYLGPRIQLMLSQLEFKLNVEKQYLKGIEKMVQLYQMEGDRKSKADAAARRVESNQKIQILKQALKGYEDLHIDMESSADAPDDDSINTPNMRKPLTGQLVLRIQAVKDVDHATTSRFTRGPETLIAVKVEDNVVARTKNSRTDKWENEIHNIYVDKANEIELTVYDKAGDQALPIGLLWVRISDIVEEMRRKRIEAEINNSGWVSADRMASGGAPPAQFPMSGTSQFGPPPGSAGAGAQPAGANEFGGPGNTVVAPQPIDAWFALEPSGAVKLNISFTKQTKDRRPFDLALGRKGAIRQRKEEVHEMYGHKFISQQFYNIMRCALCGDFLTYTAGMQCEDCKYTCHTKCFSQVVTKCISKSNAETDPDEEKINHRIPHRFEKFNNMSANWCCHCGYVLPFGKKNCRKCTECFLTCHAHCVHLVPDFCGMSMAVANAILDGIRTQKRRQTTPVPLSAKTLREKKPETEGAQIDRNSYGSPEHTRPPRAESYGAPSSSEATQAAQAMYQQSTTSPQQRPAGPDRTSTSSSATAAAAAATAAMGGRQPIPPKDQYSRASTDYTNQVGAQRGSAGHAQPLDKHSEDSPYGATPSAQMPTQPTYNPALYANVDSGYSQPVPQLQNSPLPPPPPTATMYAPPSQGPPPEVPLPAQPGSQQVVPQGQQRKQVPAANDAGTGRRIGLDHFNFLAVLGKGNFGKVMLAETKQTKKLYAIKVLKKEFIIENDEVESTRSEKRVFLIANKERHPFLLTLHACFQTETRVYFVMEYISGGDLMLHIQRGQFGTKRAQFYAAEVCLALKYFHENGVIYRDLKLDNILLTLDGHIKIADYGLCKEDMWYGSTTGTFCGTPEFMAPEILLDKKYGRAVDWWAFGVLIYQMLLQQSPFRGEDEDEIYDAILADEPLYPIHMPRDSVSILQKLLTREPEQRLGSGPTDAQEIMSQPFFRSINWDDVYHKRIAPPFQPSITNATDTSNFDSEFTSVTPVLTPVQSVLSQAMQEEFRGFSYSADFV

SEQ ID NO: 10693 - protein, 526 aa, Nicotiana tabacum
MDSARGWFQKLSSTKKDPMASGREDGKPVSAEEASNITKQRVAAAKQYIEKHYREQMKNLQERRERRILLEKKLADADVSEEDQNNLLKFLEKKETEYMRLQRHKMGADDFELLTMIGKGAFGEPICMIGFSVITGQNCREKTTGQVYAMKKLKKSEMLRRGQVEHVKAERNLLAEVDSDCIVKLYYSFQDDDYLYLVMEYLPGGDMMTLLMRKDILTEDEARFYVAETVLAIESIHKHNYIHRDIKPDNLLLDRYGHLKLSDFGLCKPLDCSTLEEKDFSVGDNANGGSRSDSPPAPKRTQQEQLEHWQKNRRMLAYSTVGTPDYIAPEVLLKKGYGMECDWWSLGAIMYEMLVGYPPFYSDDPMSTCRKIVNWKNHLKFPEEAKLSPEAKDIISRLLCNVTERLGSNGADEIKVHSWFKGIDWDRIYQMEAAFIPEVNDELDTQNFEKFEESESHSQSGSRSGPWRKMLSSKDINFVGYTYKNFKVVNDYQVPGMVELKKTNTKPKKPTIKSLFGDESEASEDN

SEQ ID NO: 10694 - protein, 1136 aa, Tuber borchii
MADKLLQDVYRKIEREKVLINGARAMRQSTDNAAVQQKLDNQIRESQRNLSYLEGRYGELQNMVITSGVGDMHVNDGGGYGGGYQNPQMLPPNKPFAQGSGGSAQPKTRPNYSKLDLIKYDTPHLGPRIQLMLSQLEFKLSVEKQYKEGIEKMIKLYQMEGDRKSRQDAESKHTDIGQKIQLLKQALKRYEDLHVDMDFGDEDSINSPNIRRPLTGRLAIRVLAVKDVDHATTSRFARGPETFVIIKVEDVARVRTKFTRNDKWLDEAHDIDVDKANEIEMTVYDKPGDNHMPIGLLWIRISDIAEELRRKKIEQEISSSGWVSADKMANSGAGRPGEGAYNYSQGFGGPAAAGGGNTGMYVNNSGQAQAQGGSAGIDAWFALEPVGQIHLNLNFVKYNRNKRPLDLGLGRKGAVRARKEEVHEMYGHKFVQQQFYNIMRCALCSDFLKYSAGMQCSDCKYTCHKKCYPKVVTKCISKSNAETDPEEEKLNHRIPHRFEPMTNMGANWCCHCGYMLPVGKKNARKCTECGLTCHSQCAHLVPDFCGMSMEVANQILGEIKKTKKRGPSMTDRNLRTNVPPVPSSPLSGRPTSDPYVSALDPRNSVQGEPAQLSQRTHSYTPSSPTAVNAANVAYGTASSPARPQQPAPYSPEQRPNRVPEPTAVAAAAHAGQRPPSTVQSQTGYPPRQSADFYQGAPTSPTQPNHPTELPSSPSPYQQGQGYDNPYQQHHAPTPQQPPAAPPKASPAPSGYGQPQATQYDQRQSYGQPPPAPAKVAPPAHTPAAEKQPPPPPVLEPQHVVSRPTKIGLDHFNFLAVLGKGNFGKVMLAETKASKKLYAIKVLKKEFIIENDEVESTRSEKRVFLIANKERHPFLLNLHACFQTETRVYFVMEYISGGDLMLHIQRGPFGSRRAQFYAAEVCLALKYFHENGVIYRDLKLDNILLTLDGHIKIADYGLCKEEMWYGSTTSTFCGTPEFMAPEILMDKRYGRAVDWWAFGVLIYQMLLQQSPFRGEDEDEIYDAILADEALYPIHMPRDSVSILQKLLTKEPELRLGSGPTDAQEIMSHPFFANINWEDIYHKRIPPPFKPSIQSATDTSNFDQEFTSVTPVLTPVQSVLTQAMQEEFRGFSYVQDFS

SEQ ID NO: 10695 - protein, 923 aa, Avena sativa
MASKGAGGGGGGHEEPQRPKQQLPRDSRGSLEVFNPSSSSAAVEPPSAFRPAARSASPFIEEATGGIEDVGKATQRAAEWGLVLQTNEQTGRPQGVSARSSGGGGSARSSSDDKAVAGAIPRVSEELRAALSAFQQTFVVSDASRPGHPIMYASAGFFNMTGYTSKEVVGRNCRFLQGSGTDPAEIAKIRQALANGSNYCGRVLNYKKDGTAFWNLLTIAPIKDEEGRVLKFIGMQVEVSKYTEGNKDTVVRPNGLPESLIKYDARQKDQARSSVSELLLAIKNPRSLSESTNSTFKRKSQESVGALTGDRPGKRSSESGSRRNSKSGARTSLQKISEVPERGSKSRKSGLYSLMSLLGMGPGNIEKDMLKPRDEDPLLDSDDERPESFDDELRRKEMRRGIDLATTLERIEKNFVITDPRLPDNPIIFASDSFLQLTEYSREEILGRNCRFLQGPETDRATVRKIRDAIDNQTEVTVQLINYTKSGKKFWNLFHLQPMRDQKGDVQYFIGVQLDGTEHVRDAAEREGVMLIKKTAENIDEAAKELPDANLRPEDLWANHSKVVLPKPHMKDSASWRAIQKVLEGGENIDLKHFRPVKPLGSGDTGSVHLVELLNTGEYFAMKAMDKNVMLNRNKVHRANAEREILDMLDHPFLPTLYASFQTKTHICLITDYYPGGELFLLLDRQPLKVLREDAVRFYAAEVVIALEYLHCQGIIYRDLKPENILLHRDGHISLTDFDLSCLTSCRPQVFLPEEANKKSRRKSRSSPIFFAEPMRASNSFVGTEEYIAPEIITGAGHTSAVDWWALGILLYEMLYGYTPFRGKTRQRTFANILHKDIRFPASISVSLPARQLIYRLLHRDPSNRLGSYEGSNEIKEHPFFRGINWALVRGTAPPKLDAPLFPDDTDKGMGDAAAADTHTDMF

SEQ ID NO: 10696 - protein, 927 aa, Avena sativa
MASKGAGAGGGGGGGDGYDEPQRPKQQLPRDSRGSLEVFNPSSSAVEPPSAFRPAARSASPFIEEVAGGIEDVGKATQRAAEWGLVLQTNEQTGRPQGVSARSSGGGGSARSSSDDKAVAGAIPRVSEELRAALSAFQQTFVVSDASRPGHPIMYASAGFFNMTGYTSKEVVGRNCRFLQGSGTDPAEIAKIRQALADGSNYCGRVLNYKKDGTAFWNLLTIAPIKDEEGRVLKFIGMQVEVSKYTEGNKDTAVRPNGLPESLIKYDARQKDQARSSVSELLLAIKNPRSLSESTNSTFKRKSQESVGPLTGDRPGKRSSESGSRRNSKSGARTSLQKISEVPERGNKSRKSGLYSLMSLLGMGPGNIEKDMLKPRDEDPLLDSDDERPESFDDELRRKEMRRGIDLATTLERIEKNFVITDPRLPDNPIIFASDSFLQLTEYSREEILGRNCRFLQGPETDRATVRKIRDAIDNQTEVTVQLINYTKSGKKFWNLFHLQPMRDQKGDVQYFIGVQLDGTEHVRDAAEREGVMLIKKTAENIDEAAKELPDANLRPEDLWANHSKVVLPKPHMKDSASWRAIQKVLEGGENIDLKHFRPVKPLGSGDTGSVHLVELLNTGEYFAMKAMDKNVMLNRNKVHRANAEREILDMLDHPFLPTLYASFQTKTHICLITDYYPGGELFLLLDRQPLKVLREDAVRFYAAEVVIALEYLHCQGIIYRDLKPENILLHRDGHISLTDFDLSCLTSCRPQVFLPEEANKKSRRKSRSSPVFFAEPMRASNSFVGTEEYIAPEIITGAGHTSAVDWWALGILLYEMLYGYTPFRGKTRQRTFANILHKDIRFPASISVSLPARQLIYRLLHRDPSNRLGSYEGSNEIKEHPFFRGINWALVRGTAPPKLDAPLFPDGTDKGLGDATAAADNHTDMF

SEQ ID NO: 10697 - protein, 921 aa, Oryza sativa; identical to SEQ ID NO: 10689

SEQ ID NO: 10698 - protein, 924 aa, Oryza sativa
  unsure (1)..(924): unsure at all Xaa locations
MASKGTEGGHGGVERKEQQQQRGYQLPRDSRGSLEVFNPSSXASSFRTACXAAPKSASPFLAIPDREVDNVVAQQAEAAEWGLNLXTHEYIVMTQMMFLNKREGHILLLALRAXAKIKIMSCKYVMYRTDLVVFEPSMRSIILIRCNAAQCVPVNSNELDLSLXXSSIVSRGKKEYIVLTVRKLVKWVLFSIRQSLANGSNYCGRILNYKKDGTPFWNLLTIAPIKDEDGRLLKFIGMQVEVSKYTEGKKDTVVRPNGLSESLIKYDARQKDHARSSVSELLLALKNPRSLSESSNNTLKRKSQESLSMSMTEVPSKRSSESGSRRNSRSGTRSSLQKINEVPDQGNRTRKSGLRAFMGFLGMGHGSVEKNMLKPRDEDPLIDSDDERPESFEDEFRRKEMRRGIDLATTLERIEKNFVITDPRLPDNPIIFASDSFLQLTEYNREEILGRNCRFLQGPETDRATVRKIRDAIDNQAEVTVQLINYTKSGKKFWNLFHLQPMRDQKGDVQYFIGVQLDGTEHVQDDAAKEGVVLVKKTADNIDEAAKELPDANLRPEDLWANHSKVVLPNPHMKDTASWRAIQKVLESGESIGLKHFRPVKPLGSGDTGSVHLVELLNTGEYFAMKAMDKSIMLNRNKVHRATAERQILDLLDHPFLPTLYASFQTKTHICLITDYCPGGELFVLLDNQPLKVLHEDAVRFYAAEVVVALEYLHCQGIIYRDLKPENILLHRDGHISLTDFDLSCLTSCRPQVFLPEDADEKKGRKNGSYPIFFAEPMRASNSFVGTEEYIAPEIITGAGHTSAVDWWALGILLYEMLYGYTPFRGKTRQRTFANILHKDIRFPASISVSLAARQLMYRLLHRDPANRLGSYEGANEIKGHPFFRGINWPLIRATAPPKLEIPLFSKDDMEKKGLVTNNRTDMF

SEQ ID NO: 10699 - protein, 410 aa, Triticum aestivum
  unsure (1)..(410): unsure at all Xaa locations
XTRPTHASEKEGVMLIKKTAENIDEAAKELPDANLRPEDLWANHSKVVLPKPHMKDSASWRAVQKVREGGENIDLKHFRPVKPLGSGDTGSVHLVELLNTGEYFAMKAMDKNVMLNRNKVHRATAERQILDMLDHPFLPTLYASFQTKTHICLITDYYPGGELFLLLDRQPLKVLREDAVRFYAAEVVIALEYLHCQGIIYRDLKPENILLHRDGHISLTDFDLSCLTSCRPQVFLPEEGNKKSRRKSRSSPIFFAEPMRASNSFVGTEEYIAPEIITGAGHTSAVDWWALGILLYEMLYGYTPFRGKTRQRTFANILHKDIRFPASISVSLPARQLIYRLLHRDPANRMGSYEGSNEIKQHPFFRGINWALVRGTAPPKMDAPLLSDDVXDKGLGDAAAAAADNHTDMF

SEQ ID NO: 10700 - protein, 322 aa, Triticum aestivum
  unsure (1)..(322): unsure at all Xaa locations
XNYCGRVLNYKKDGTAFWNLLTIAPIKDEDGRVLKFIGMQVEVSKYTEGNKDTVVRPNGLPESLIKYDARQKDQARSSVSELLLALKNPRSLSESSNSTFKRKSQESVGVLTGDGTGHASAESGSRRTSRTGARSSLQKISEVPEGGNKTRKSGLFSLMGLLGMGHGNVEKNMLKPRDEDPLLDSDDERPESFDDELRRKEIRRGIDLATTLERIEKNFVITDPRLPDNPIIFASDSFLQLTEYSREEILGRNCRFLQGPETDRATVRKIRDAIDNQTEVTVQLINYTKSGKKFWNLFHLQPMRDQKGDVQYFIGVQLDGTX

SEQ ID NO: 10701 - protein, 454 aa, Asparagus officinalis
MGPPDVVPSEHVEFDFSDVFGPSPTPTSTGVNVFASDGSTPAASDDIVYTEPAVILARSHSLVGPTALVCQSPRLRKHILHEADLELVECPSGVEGEQDKPFSCVAEEHEVPSSENVERVGLEDFDFLKVVGQGAFGKVFQVMKKGTSEIYAMKVVRKDTILEKNHSEYMKAERDILTKIDHPFIVQLRYSFQTKYRLYLVLDFVNGGHLFYQLYHQGLFREDLARIYTAEIVSAVSHLHANGIMHRDLKPENILLDADGHVMLTDFGLAKEFEENTRSNSLCGTIEYMAPEIIQGKGHDKVADWWSVGILLFEMLTGKPPFIGGNRDKIQQKIVKDKLKLPAYLTSEAHSLLKGLLQKEASKRLGGGPAGSNEIKNHKWFKLINWRKLEAREIQPSFKPNVAGKICVANFEERWTSMPLTVSPVASPVAGSGNFSGFTYVKPSVFLQKPSPLG

SEQ ID NO: 10702 - protein, 424 aa, Blastocladiella emersonii
TLIDKLMEKTKKVVGSSDKDAPAPASPSSPSTAAGAGSASSTASSTTTAAASGNLSIPSPLVAGSTTSSSISHAQKMATAAHTNSDYSPSPAATPSAPLDAVAERRRRKTTLADLELRQTLGTGSFGRVHLVRLRSTGKYYAMKVLKKAEVVKHKQVEHTLNEKGILEQIDHPFLVALHSSFQDSANLYMVMEYVTGGELFTYLRRSQRFSNNVAKFYAAEVVLAFEYLHSKDIIYRDLKPENLLLDAQGHVKITDFGFAKHVPDITWTLCGTPDYLAPEIIQSRGYGRAVDWYALGVLIFEMLAGYPPFYDEDHVRMYEKILQGKVKWPSHFDPAAKDLLKRLLTTDLTKRYGNLKGGSKDIKMHKWFAGLDWTKLFNKQIPPPYTPPNRGDGDTSNFDAYPEETEPYGKVQPDPYAQLFKDF

SEQ ID NO: 10703 - protein, 425 aa, Blastocladiella emersonii
MTLIDKLMEKTKKVVGSSDKDAPAPASPSSPSTAAGAGSASSTASSTTTAAASGNLSIPSPLVAGSTTSSSISHAQKMATAAHTNSDYSPSPAATPSAPLDAVAERRRRKTTLADLELRQTLGTGSFGRVHLVRLRSTGKYYAMKVLKKAEVVKHKQVEHTLNEKGILEQIDHPFLVALHSSFQDSANLYMVMEYVTGGELFTYLRRSQRFSNNVAKFYAAEVVLAFEYLHSKDIIYRDLKPENLLLDAQGHVKITDFGFAKHVPDITWTLCGTPDYLAPEIIQSRGYGRAVDWYALGVLIFEMLAGYPPFYDEDHVRMYEKILQGKVKWPSHFDPAAKDLLKRLLTTDLTKRYGNLKGGSKDIKMHKWFAGLDWTKLFNKQIPPPYTPPNRGDGDTSNFDAYPEETEPYGKVQPDPYAQLFKDF

SEQ ID NO: 10704 - protein, 404 aa, Blastocladiella emersonii
APAPASPSSPSTAAGAGSASSTASSTTTAAASGNLSIPSPLVAGSTTSSSISHAQKMATAAHTNSDYSPSPAATPSAPLDAVAERRRRKTTLADLELRQTLGTGSFGRVHLVRLRSTGKYYAMKVLKKAEVVKHKQVEHTLNEKGILEQIDHPFLVALHSSFQDSANLYMVMEYVTGGELFTYLRRSQRFSNNVAKFYAAEVVLAFEYLHSKDIIYRDLKPENLLLDAQGHVKITDFGFAKHVPDITWTLCGTPDYLAPEIIQSRGYGRAVDWYALGVLIFEMLAGYPPFYDEDHVRMYEKILQGKVKWPSHFDPAAKDLLKRLLTTDLTKRYGNLKGGSKDIKMHKWFAGLDWTKLFNKQIPPPYTPPNRGDGDTSNFDAYPEETEPYGKVQPDPYAQLFKDF

SEQ ID NO: 10705 - protein, 605 aa, Mucor racemosus
MADFTDSLIKNIGVHSSSPVMTSVNMGQLGEKLRQARTTTLASLSQALSKKPEAAAAAATAPNAVNESTTTPTTMQLPASEKATSQLEINVVEARNLTIADARKADTYCIVHYEGNTTSTLDKVDDGILPSTPLVIKSQVASGAFKAFEIMMSASSPKWMHRVNFDVTAGNKEITVFVYDRGNKLPNGEDRFLGMSSIVPNLVNKKTVELIFPLHGRPDDDQEVTGDVRLQVTFIDPKKANLKPEDFRIVRMIGQGSVGKVYEVIKRDSGRTYAMKVLSKRLLLAENEVDTAFNERNVLVQSLSSPFIANLKYSFQTTNHLFLVMDYFPGGELFDFLERERCLSEKRCQFFAAEIVCAFDNIHARNIVYRNLKPESILLDAHGHIALTDFGLCKQLKNKMDLIQGVPQVITQEYLAPEMVMQKPYGMAADWWSLGVLMFELLTGSPPFHSVEQGELFRQILEAPIKFPAGGCITEEAKDFICQLLERDPAKRLGSHGDVAQVKAHPFFKDLNWDVVYKKQMQLPFVPEVEEQLREEAIAAAAAISIPVTNSKTESTNANVMPVADQSKFKGFSYIREDVMAKKGEHRLGVNPEDEDPEVDFWFRQ

SEQ ID NO: 10706 - protein, 526 aa, Schizosaccharomyces pombe
MARETEFNDKSPSSTDDGMSQSHFSDKLKNLFHFRRNRAATVSTSVRNDQRDNDSDDSTFDINVNQLNELDLNDSSDQLDSRPSLRRVSSAPDSHKGVEAPPPRPLINMSNIRKAQVKILKNPGNYIFGRTEYGKRTYSGNSTKISRVEVTPHSFEKIRLLGQGDVGKVYLVRQKSNHRLFAMKILNKREMIKRHKVNRVLAEQEILTKSKHPFIVTLYHSFQSRDYLYLCMEYCAGGEFFRALHSLPKHILPEKDACFYAAEVTAALEYLHLMGFIYRDLKPENILLHQSGHIMLSDFDLSKPISIVTHPTVVLPKHSTFSQEKPALDTNSYFSNFRTNSFVGTEEYIAPEVIRSCGHTVAVDWWTLGIFIYEILYGTTPFKGKNRHATFSNILYSDVSFPEYHGAPNVSSTCKSLIRRLLVKDESKRCGSVAGASDIKQHPFFRHIQWALLRSMKPPIIPKIEDGMEAVEPSDNDNEEEDFLNSQYLISANLPAVDMHSSTPVNEQSNPFDSFSSVTLHHAGDE

SEQ ID NO: 10707 - protein, 566 aa, Schizosaccharomyces pombe
MNELHDGESSEEGRINVEDHLEEAKKDDTGHWKHSGTAKPSKFRAFIRLHFKDSRKFAFSRKKEKELTSEDSDAANQSPSGAPESQTEEESDRKIDGTGSSAEGGDGSGTDSISVIKKSFFKSGRKKKDVPKSRNVSRSNGADTSVQREKLKDIFSPHGKEKELAHIKKTVATRARTYSSNSIKICDVEVGPSSFEKVFLLGKGDVGRVYLVREKKSGKFYAMKVLSKQEMIKRNKSKRAFAEQHILATSNHPFIVTLYHSFQSDEYLYLCMEYCMGGEFFRALQRRPGRCLSENEAKFYIAEVTAALEYLHLMGFIYRDLKPENILLHESGHIMLSDFDLSKQSNSAGAPTVIQARNAPSAQNAYALDTKSCIADFRTNSFVGTEEYIAPEVIKGCGHTSAVDWWTLGILFYEMLYATTPFKGKNRNMTFSNILHKDVIFPEYADAPSISSLCKNLIRKLLVKDENDRLGSQAGAADVKLHPFFKNVQWALLRHTEPPIIPKLAPIDEKGNPNISHLKESKSLDITHSPQNTQTVEVPLSNLSGADHGDDPFESFNSVTVHHEWD

SEQ ID NO: 10708 - protein, 573 aa, Saccharomyces bayanus
MLSKSEKHIDLLAGNMSNLSFDGPGTPSSTGLFNVNQNNTNRRMRPTGFNDSPSPIKSSLFPHEDSSNMDIDEVSQSDMDITNSPKKLPPKFYERATSNKTQRVVSVCKMYFLEYYCDMFDYVISRRQRTKQVLEYLQQQSQLPTADQAKLNEEWSSYLQKEHQVLRKRRLKPKNRDFEVITQVGQGGYGQVYLARKKDTKEVCALKILNKKLLFKLNETKHVLTERDILTTTRSEWLVKLLYAFQDLQSLYLAMEFVPGGDFRTLLINTRCLKSGHARFYISEMFCAVNALHDLGYTHRDLKPENFLIDAKGHIKLTDFGLAAGTISNERIESMKIRLEKIKDLEFPAFTEKSIEDRRKMYNQLREKEVNYANSMVGSPDYMALEVLEGKKYDFTVDYWSLGCMLFESLVGYTPFSGSSTNETYDNLRRWKQTLRRPRQSDGRAAFSDRTWDLITRLIADPINRLRSFEHVKRMSYFADINFSTLRSMIPPFTPQLDSETDAGYFDDFTSEADMAKYADVFKRQDKLTAMVDDSAVSSKLVGFTFRHRNGKQGSSGILFNGSEHSDPFATFY

SEQ ID NO: 10709 - protein, 726 aa, Saccharomyces cerevisiae
MTQQEYRSPSQRLSKGRSMSLPKIFARNLRSLQNNAPPGKNINVNCLNVNSCSLSASPSSQINMACNGNKQDLPIPFPLHVECNDSWSSSKLNKFKSMFNHNRSKSSGTTDASTSEKGTHKREPRSTIHTELLQSSIIGEPNVHSTTSSTLIPNEAICSTPNEISGSSSPDAELFTFDMPTDPSSFHTPSSPSYIAKDSRNLSNGSLNDINENEELQNFHRKISENGSASPLANLSLSNSPIDSPRKNSETRKDQIPMNITPRLRRAASEPFNTAKDGLMREDYIALKQPPSLGDIVEPRRSRRLRTKSFGNKFQDITVEPQSFEKIRLLGQGDVGKVYLVRERDTNQIFALKVLNKHEMIKRKKIKRVLTEQEILATSDHPFIVTLYHSFQTKDYLYLCMEYCMGGEFFRALQTRKSKCIAEEDAKFYASEVVAALEYLHLLGFIYRDLKPENILLHQSGHVMLSDFDLSIQATGSKKPTMKDSTYLDTKICSDGFRTNSFVGTEEYLAPEVIRGNGHTAAVDWWTLGILIYEMLFGCTPFKGDNSNETFSNILTKDVKFPHDKEVSKNCKDLIKKLLNKNEAKRLGSKSGAADIKRHPFFKKVQWSFLRNQDPPLIPALNDNGCELPFILSCNKHPKRNSVSEQETKMFCEKVANDDEIDEADPFHDFNSMSLTKKDHNILTYSENYTTEKFYTKQLVQGQGITAHIEVSLKTSYLNYNMFTER

SEQ ID NO: 10710 - protein, 720 aa, Saccharomyces cerevisiae
MTQQEYRSPSQRLSKGRSMSLPKIFARNLRSLQNNAPPGKNINVNCLNVNSCSLSASPSSQINMACNGNKQDLPIPFPLHVECNDSWSSSKLNKFKSMFNHNRSKSSGTTDASTSEKGTHKREPRSTIHTELLQSSIIGEPNVHSTTSSTLIPNEAICSTPNEISGSSSPDAELFTFDMPTDPSSFHTPSSPSYIAKDSRNLSNGSLNDINENEELQNFHRKISENGSASPLANLSLSNSPIDSPRKNSETRKDQIPMNITPRLRRAASEPFNTAKDGLMREDYIALKQPPSLGDIVEPRRSRRLRTKSFGNKFQDITVEPQSFEKIRLLGQGDVGKVYLMRERDTNQIFALKVLNKHEMIKRKKIKRVLTEQEILATSDHPFIVTLYHSFQTKDYLYLCMEYCMGGEFFRALQTRKSKCIAEEDAKFYASEVVAALEYLHLLGFIYRDLKPENILLHQSGHVMLSDFDLSIQATGSKKPTMKDSTYLDTKICSDGFRTNSFVGTEEYLAPEVIRGNGHTAAVDWWTLGILIYEMLFGCTPFKGDNSNETFSNILTKDVKFPHDKEVSKNCKDLIKKLLNKNEAKRLGSKSGAADIKRHPFFKKVQWSFLRNQDPPLIPALNDNGCELPFILSCNKHPKRNSVSEQETKMFCEKVANDDEIDEADPFHDFNSMSLTKKDHNILTYSENYTYGKILYKATCTRPRHNSSHRSFFKDIIPEL

SEQ ID NO: 10711 - protein, 893 aa, Saccharomyces cerevisiae
MAGHHHEHEQERDHEQEHEHDSLQRPTTGSERTRSISFSKLLTRSWKRNASSSNNMSVSSVNLYSDPENSRESDHNNSGSEGQSSRFSKLKSMFQSGNSSKNASAHNSSQSSLEGDSASSSSKLRYVKPMTSVANASPASPPLSPTIPETDVLQTPKMVHIDQHEHEREHSNCGSPIMLSSSSFSPTVARTGTGRRRSPSTPIMPSQNSNNSSSTSAIRPNNYRHHSGSQGFSSNNPFRERAGTVRSSNPYFAYQGLPTHAMSSHDLDEGFQPYANGSGIHFLSTPTSKTNSLTNTKNLSNLSLNEIKENEEVQEFNNEDFFFHDIPKDLSLKDTLNGSPSRGSSKSPTITQTFPSIIVGFDNEYEEDNNNDKHDEKEEQQTTTDNKTRNLSPTKQNGKATHPRIKIPLRRAASEPNGLQLASATSPTSSSARKTSGSSNINDKIPGQSVPPPNSFFPQEPSPKISDFPEPRRSRRLRTKSFSNKFQDIMVGPQSFEKIRLLGQGDVGKVFLVREKKTNRVYALKVLSKDEMIKRNKIKRVLTEQEILATSNHPFIVTLYHSFQSEDYLYLCMEYCMGGEFFRALQTRKTKCICEDDARFYASEVTAALEYLHLLGFIYRDLKPENILLHQSGHIMLSDFDLSIQAKDSKVPVVKGSAQSTLVDTKICSDGFRTNSFVGTEEYIAPEVIRGNGHTAAVDWWTLGILIYEMLFGFTPFKGDNTNETFTNILKNEVSFPNNNEISRTCKDLIKKLLTKNESKRLGCKMGAADVKKHPFFKKVQWSLLRNQEPPLIPVLSEDGYDFAKLSSNKKRQTSQDSHKHLDEQEKNMFEERVEYDDEVSEDDPFHDFNSMSLMEQDNNSMIYGNTNSYGKIAYTPNSNRSRSNSHRTFFKR

SEQ ID NO: 10712 - protein, 577 aa, Saccharomyces kluyveri
MFTRGVNGANRDIDALADNIGQLSFDASDPNKFIFEPTTPSKYKENGSTTGTPSPTKSTLYDDNAGDVSKLSMMDIDERTQDEIDVTKSPKKLPLNFYAKASSSKTKRLVNVCQMYFLDYYCDMFDYVISRRERTRQVMKYLEQQRGQGIQPQQISNEWQGYLNKETNTLRKRRLKPKNKDFEMITQVGQGGYGQVYLARKKDTKEICALKILNKKLLVKLNETNHVLTERDILTTTRSDWLVKLLYAFQDPQSLYLAMEFVPGGDYRTLLINTRFLQAPHARFYISEMFCAVDALHQLGYTHRDLKPENFLIDSKGHIKLTDFGLAAGTVSMERIESMKLRLEEVKNLEFPEFKERSMDDRRRMYKKLRESDVNYASSTVGSPDYMALEVLEAKSYDFTVDYWSLGCIMFESLVGYTPFSGSSTNETYENLRRWKQVLRRPRCENGRYAFSDRTWDLITRLIADPVNRVRSFEHVKRMKYFAEIHFDSLRSMSPPFIPQLDSETDAGYFDDFSNEADMAKYADVFKRQDRLTAMMDDSSADSKLVGFTYRHRKGKNGSSGVLYGGAEHADPFATFY

SEQ ID NO: 10713 - protein, 1185 aa, Leptosphaeria maculans
MASVDETVANVQRKIDRERALINAANAMRQSTNNPAVLSRLDGQIKDGHRNIEYFESKLRDLDVQRTSTGMENMSLQPGSGGSGARKPVNNPLTPPPKDGWSSYTQPDQGGYGGPQSQYSNLSGGDGLMPPRAPYAPPGPGTTNKRPNYSKLGKSHLIKYDTPHLGPRIQLMLSQLEFKLSVEKQYKDGIEKMVRLYQMEGDRKSKTDAEAKRIESAQKIQLLKHSLKRYEDLHVDIEGEGGDDDSLNIPSQRKPLSGHLSLRIHAVADVDHAATGRFSRGPETFVNIKVEDAIKGRTKPTRNDRWIDEQHEFAIDKANEIEITVYDKTGDHLLPIGMLWVRISDIAEEMRRKKIETELQNSGWVAADKMSGAAAGIQPDLQFQPPPGQNPAGTPGAPAPGGARPQGGPQPQTGPIMIDDWFSLEPVGRIHLTMSFAKNTGNKQPFDLGLGRKGAVRQRKEDVVEQYGHKFVQQQFYNVMRCALCGEFLKYAAGMQCSDCNYTCHKKCYPKVVTKCITQSNAETDPDEAKLNHRIPHRFENFSNMGANWCCHCGYVLPLGRKQTKKCAECNLTCHAHCVHFVPDFCGMSMEVANQILMEIKRTRRGQSASGPGVPPMAQRTLRPQSAKPLPPAQSQYPAQPGQEPSQTDRYSYGKEQMSPPPGPPRQPSYATSAASVDAARVSYSTSNSTPTPTSPTSSTTSRPSSGARTQSSVAAAQAAMSKTTPPAPGYGRSNTDYQPQGNRTSGGNYPADQRTPQQPQAPQQAPYDPSAYANIPSYPPAQAQQGGMQSYPPGKGSYALPQPSPQMQQPHQSPMSQKQPEAIAQIPPSKQLPPANPENKVTPSANTQGSGKRIGLDHFNFLAVLGKGNFGKVMLAETKSTKQLYAIKVLKKEFIIENDEVESTRSEKRVFLIANKERHPFLLSLHACFQTETRVYFVMEYISGGDLMLHIQRGQFGTKRAQFYAAEVCLALKYFHENGVIYRDLKLDNILLTLDGHIKIADYGLCKEEMWYGSTTSTFCGTPEFMAPEILLDKKYGRAVDWWAFGVLIYQMLLQQSPFRGEDEDEIYDAILADEPLYPIHMPRDSVSILQKLLTREPEMRLGSGPTDAQEIMSHAFFRNINWDDIYHKRVAPPFVPQISSPTDTSNFDTEFTSVTPVLTPVQSVLSQAMQEEFRGFSYSADFN

SEQ ID NO: 10714 - protein, 480 aa, Aspergillus niger
MPSLGGLLKKRRTKDSQTLSKELEAGSAQTQTSPNAAEDHHNHNHHQHHHHLFHHHHQPQPATNSGSAANTPPQPQDSVPQQSNRSSGAEKSSDGQVASMQSAVTQASPSAHHTSGLPQPNANAASIQNIINPSQQGAMHSASSGHTQSHHAGRSDARTTKGKYSLDDFSLQRTLGTGSFGRVHLVQSKHNHRFYAVKVLKKAQVVKMKQIEHTNDERRMLNRVRHPFLITLWGTWQDSRNLYMVMDFVEGGELFSLVRKSQRFPNPVAKFYAAEVTLALEYLHTQNIIYRDLKPENLLLDRHGHLKITDFGFAKEVPDITWTLCGTPDYLAPEVVSSKGYNKSVDWWSLGILIFEMLCGFTPFWDSGSPVKIYENILRGRVKYPPYLHPDAVDLLSQLITADLTKRLGNLHGGSDDVKNHPWFAEVTWDRLARKDIDAPYVPPIRGGQGDASQYDRYPEETEQYGMAGEDPHGHLFPDF

SEQ ID NO: 10715 - protein, 490 aa, Aspergillus fumigatus
MPTLGGLLKKRRTKDSHTLSKELESSSSPAAAQTQTSPNSADHDHHYQHYDQTHHHQHSASSNPSNNSATPSAAQPHRSSNDNPNRSSGTDQKSEGQTASMQFAVTQPHPSTHHNPRLHHLQQQQQQPQQQSHTSRLHNILHPSHHASSQASTEGHAHSQQANQTEARTTKGKYSLDDFTIQRTLGTGSFGRVHLVQSKHNHRFYAIKVLKKAQVVKMKQVEHTNDERRMLNRVRHPFLITLWGTWQDARNLYMVMDFVEGGELFSLLRKSQRFPNPVAKFYAAEVTLALEYLHSQQIIYRDLKPENLLLDRHGHLKITDFGFAKEVPDITWTLCGTPDYLAPEVVSSKGYNKSVDWWSLGILIFEMLCGFTPFWDSGSPVKIYENILRGRVKYPPYLHPDAVDLLSQLITADLTKRLGNLHGGSEDVKNHPWFAEVTWDRLARKDIDALYVPPIREGQGDASQYDRYPEETEQYGQQGEDVHGHLFPDF

SEQ ID NO: 10716 - protein, 502 aa, Aspergillus fumigatus
MPTLGGLLKKRRTKDSHTLSKELESSSSPAAAQTQTSPNSADHDHHYQHYDQTHHHQHSASSNPSNNSATPSAAQPHRSSNDNPNRSSGTDQKSEGQTASMQFAVTQPHPSTHHNPRLHHLQQQQQQQQQQQQQQQQQQPQQQSHTSRLHNILHPSHHASSQASTEGHAHSQQANQTEARTTKGKYSLDDFTIQRTLGTGSFGRVHLVQSKHNHRFYAIKVLKKAQVVKMKQVEHTNDERRMLNRVRHPFLITLWGTWQDARNLYMVMDFVEGGELFSLLRKSQRFPNPVAKFYAAEVTLALEYLHSQQIIYRDLKPENLLLDRHGHLKITDFGFAKEVPDITWTLCGTPDYLAPEVVSSKGYNKSVDWWSLGILIFEMLCGFTPFWDSGSPVKIYENILRGRVKYPPYLHPDAVDLLSQLITADLTKRLGNLHGGSEDVKNHPWFAEVTWDRLARKDIDAPYVPPIRGGQGDASQYDRYPEETEQYGQQGEDVHGHLFPDF

SEQ ID NO: 10717 - protein, 640 aa, Cryphonectria parasitica
MHRTVLLTLLSPSPELKKTHLSSPLSSFGRSPSQSTITDKDAKAQPQSGPSGTAPSPTPPDNNIASSEALTQTPVEFAPKPGILVVTLHEGRGFALPEPHKNIFSSHSTSASQGGGASIAGSVRTAPNGHRPNTSGGFGNVPTNHGRVSGKYMPYALLDFDKVQVFVNSVEGNPENPLWAGSNTQYKFDVSRVTDVTVHLYIRNPTAPPSVGRANDIFLGVVQIKPRFEEKHQFVEDPKANKKDREKAATEFAEKEKALGHSGVQWVPVGYGQGELKIGIEYVENRAGKLTIDDFDLLTVVGKGSFGKVIQVRKKDTSRIYALKTIRKAHIISRSEVTHTLAERSVLAQINNPFIVPLKFTFQSPEKLYFVLAFVNGGELFHHLQKEQRFDVNRSRFYTAELLCALECLHGFNVIYRDLKPENILLDYQGHIALCDFGLCKLDMKDEDRTNTFCGTPEYLAPELLMGQGYNKTVDWWTLGVLLYEMLTGLPPFYDENTNEMYRKILGEPLHFPSHDIVPPAAKDLLTKLLNRDPAQRLGANGSAEIKAHPFFHAIDWRKLLQRKYEPTFKPNVAGAMDTDNFDPEFTREAPQDSYVGGVPLSETMQNQFQGFSYNRPIAGLADGGGSVKDPSFIGSVTGR

SEQ ID NO: 10718 - protein, 623 aa, Neurospora crassa
MPSTKNANGEGHFPSRIKQFFRINSGSKDHKDRDAHTTSSSHGGAPRADAKTPSGFRQSRFFSVGRLRSTTVVSEGNPLDESMSPTAHANPYFAHQGQPGLRHHNDGSVPPSPPDTPSLKVDGPEGSQQPTAATKEELARKLRRVASAPNAQGLFSKGQGNGDRPATAELSKEPLEESKDSNTVGFAEQKPNNDSSTSLAAPDADGLGALPPPIRQSPLAFRRTYSSNSIKVRNVEVGPQSFDKIKLIGKGDVGKVYLVKEKKSGRLYAMKVLSKKEMIKRNKIKRALAEQEILATSNHPFIVTLYHSFQSEDYLYLCMEYCSGGEFFRALQTRPGKCIPEDDARFYAAEVTAALEYLHLMGFIYRDLKPENILLHQSGHIMLSDFDLSKQSDPGGKPTMIIGKNGTSTSSLPTIDTKSCIANFRTNSFVGTEEYIAPEVIKGSGHTSAVDWWTLGILIYEMLYGTTPFKGKNRNATFANILREDIPFPDHAGAPQISNLCKSLIRKLLIKDENRRLGARAGASDIKTHPFFRTTQWALIRHMKPPIVPNQGRGIDTLNFRNVKESESVDISGSRQMGLKGEPLESGMVTPGENAVDPFEEFNSVTLHHDGDEEYHSDAYEKR

SEQ ID NO: 10719 - protein, 662 aa, Hypocrea jecorina
MSWKLTKSMSLLFPLSPTFRPPTSPSPSPFDWQNETDWPCAELKDTHLGPLSAFSRSPSTSTITDKDEKGTSPGATTPTSENAIAASEALSQAPVVKKPGILVVTIHEGQGFSLPEQHRSAFASSHQSSRSSGGALAGSVRPDGQRVAGSYTNGARPHSSGGGFGSLPTNHGRISGKYMPYALIDFDKVQVFVNSVEGSPENPLWAGGNTQYKFDVSRVTELVIHLYMRNPAAPPGSGRSQDIFLGVARINPRFEERQPTTDDAKSSKKDREKAADAQRQKGEGHSGVEWVDVQYGTGRIKVGVEFVETRAGKLKIEDFELLKVVGKGSFGKVMQVRKKDTNRIYALKTIRKAHIISRSEVAHTLAERSVLAQINNPFIVPLKFSFQSPEKLYFVLAFVNGGELFHHLQKEHRFDVNRSRFYTAELLCALECSHGFSVIYRDLKPENILLDYQGHIALCDFGLCKLDMKDEDRTNTFCGTPEYLAPELLLGQGYNKTVDWWTLGVLLYEMLTGLPPFYDENTNEMYRKILSEPLHFSDVVPPAAKDLLTKLLNRDPKKRLGANGSAEIKAHPFFHDIDWRNVLQRKYEPTFKPSVTDAMDTANFDPEFTSEAPQDSYVEGPMLSQTMQDQFQGFSYNRPIAGLGDAGGSVRDPSFVGSLQDN

SEQ ID NO: 10720 - protein, 608 aa, Ustilago maydis
MSQAAHLQQQQIAASQQQGLQAPNSGYMQRAPGASPINRSPSPSARPLNAAPRSPQPHGQAQTYSQQQQQQQQQQQQQQFYQQQQQQQQQQQQQQQQQYTQSGGSTSPNPANEKPADYVYFERSTNGMQKSTIEAATGAKLKLENFYKVYVEQAVERIKRAAELEDRLTNPPDGVHLSDERKARQLAQLGRRESNFLRLRRTRLGLDDFRTVKVIGKGAFGEVRLVQKTDTGKIYAMKTLRKSEMFKKDQLAHVRAERDVLAESNSPWVVQLYYSFQDTAYLYLLMEFLPGGDLMTMLIKYDTFSEDVTRFYMAECVLALEGIHKLGFIHRDIKPDNILIDAKGHIKLSDFGLSTGFHKQHDSAYYQRLFEGTAAQNPAQTGRNSVAVNSINLTLSSKDTIATWKANRRKLAYSTVGTPDYIAPEIFLQQGYGNECDWWSLGAIMFECLCGYPPFCSENAHDTYRKILAWRETLQFPDDIHLSPEAEDMIRRLISAPENRLGRNSASEIKGHAFFAGVDWATIRQIDAPFIPQLKSITDTSYFPTEDYQDVPETPAALMSGSEARTSPCSATRIAGTRATRLSSSGTPRAHFNLPFVCHRKCELNPSS

SEQ ID NO: 10721 - protein, 405 aa, Ustilago maydis
MSAIPQQPVDYSATHEAAVAAAAAAAAKAATATAGGGASSSQHPAPAVVGATSVPTHVASANSTGTYSSASLPLAIAAQQRKLSGRYALTDFAVERTLGTGSFGRVHLVRSRHNHRFYAIKVLRKEQVVKMKQVEHTNSERAILSIVRHPFLVNLWGTFKDSTFLYMVMDYVPGGELFTLLRKSQRFPHPVAKFYAAEVALAIDYLHQNNIIYRDLKPENILLSADGHLKITDFGFAKYVPDVTWTLCGTPDYLAPEIVSSKGYNKSVDWWALGVLLYEMLAGHPPFFTEDGNPIKLYEKIIACKVRYPPYFETGVKDLLKNLLTADLSKRYGNLHRGSKDIFGHLWFAEVDWDRLYRREIPAPYLPTVTADGDSSQFERYPENDVTEYSRTDLPDSLGHLFPDF

SEQ ID NO: 10722 - protein, 530 aa, Colletotrichum trifolii
MPTLGFLKKKRTREGNQDPQGSLPTSPVTPTSSKPFDSSISTTLSSLSNNSQATSQPSGPGQKQQEDPASSEAAKNQQMYPVTVHPAPNQQHYNQQGEPQQNLPSISNLINPTQHDASSNGHNYLAHATQTSQPNPSPGTDPTRLQQQQAQSMLHPPTQPQQQQQQQQQQQQQQQQQQQQQQQQQQTQTQQPTAKERHAATGAGPAGRQTKGKYTLQDFDILRTLGTGSFGRVHLVQSKHNQRFYAVKVLKKAQVVKMKQVEHTNDERRMLGEVKHPFLITLWGTFQDSKNLYMVMDFVEGGELFSLLRKSGRFPNPVAKFYAAEVTLALEYLHSRDIIYRDLKPENLLLDRHGHLKITDFGFAKRVPDKTWTLCGTPDYLAPEVVSNKGYNKSVDWWSLGILIYEMLCGYTPFWDSGSPLKIYENILKGKVKYPAYINPDAQDLLSKLITADLTKRLGNLYGGPNDVKTHPWFQEVTWDRLARKDIDAPYTPPVKAGAGDASQFDRYPEDPERYGSSGHDEYGHLFTDF

SEQ ID NO: 10723 - protein, 442 aa, Candida albicans
MVNLLKKLHITKSHQSNHSNSDSNSLNSNTSMDNHQQQQQLQQYQQQFQQPQQQLYPGEQIVHPAAAQTGQNTTNVTAVSSSNITQSATSSLHSQQLQHVDVSKSAAEEAIRRSLLPERSTVSKGKYSLTDFSIMRTLGTGSFGRVHLVRSVHNGRYYAIKVLKKHQVVKMKQVEHTNDERRMLKLVEHPFLIRMWGTFQDSKNLFMVMDYIEGGELFSLLRKSQRFPNPVAKFYAAEVTLALEYLHSHDIIYRDLKPENILLDRNGHIKITDFGFAKEVSTVTWTLCGTPDYIAPEVITTKPYNKSVDWWSLGVLIFEMLAGYTPFYDSTPMKTYEKILAGKIHYPSFFQPDVIDLLTKLITADLTRRLGNLINGPADIRNHPWFSEVVWEKLLAKDIETPYEPPITAGVGDSSLFDHYPEEQLDYGSQGEDPYASYFLDF

SEQ ID NO: 10724 - protein, 411 aa, Candida albicans
  unsure (1)..(411): unsure at all Xaa locations
MDNHQQQQQLQQYQQQFQQPQQQLYPGEQIVHPAAAQTGQNTTNVTAVSSSNITQSATSSLHSQQLQHVDVSKSAAEEAIRRSLLPERSTVSKGKYSLTDFSIMRTLGTGSFGRVHLVRSVHNGRYYAIKVLKKHQVVKMKQVEHTNDERRMLKLVEHPFLIRMWGTFQDSKNLFMVMDYIEGGELFSLLRKSQRFPNPVAKFYAAXVTLALEYLHSHDIIYRDLKPENILLDRNGHIKITDFGFAKEVSTVTWTLCGTPDYIAPEVITTKPYNKSVDWWSLGVLIFEMLAGYTPFYDSTPMKTYEKILAGKIHYPSFFQPDVIDLLTKLITADLTRRLGNLINGPADIRNHPWFSEVVWEKLLAKDIETPYEPPITAGVGDSSLFDHYPEEQLDYGSQGEDPYASYFLDF

SEQ ID NO: 10725 - protein, 1097 aa, Candida albicans
MSTSQPSQQQNPEQVVNDIRQKIEKERKIIQGFNDVKRNTNNPEVIQKWKSKIIESQSMIDYYQETMNKLTRQMQRLNTNSSSRTASRSSVISEYKPSYSNFDLIKYECPSLGNKIQFMLQYLEFKLQVENKYSEANKKLSHLYLMDGDKSSSNAAEGGRAESDQRIQLLEKALKKYQKFSINDHEFDRDYEIMDSTKHSRKLLTGRLTVSITCIRDVDHIATALAKKRETVVVIKVDDLEKARTKPSKNDNWNEEMVIDVDKSHEIELAVMDKQNGIYVPVAVNWFSLFDLAEEIRKKKVAKDQGSSGWLPAANLPQTGGSGAGTGSSMTGGASYGATSPLPAHNDLRPSVSPSSDAKENKVSVSTWLSLEPGGQMLINLNFEKSITNGKQFRGPLGRHGAIRQKKEEVFEKHGHQFVQKQFYNIMSCALCGEFLRYTGYQCQDCKFLCHKKCYQKVVTKCISKSGSDYDAAQLNHRIPHRFEPITNHGTKWCCHCGYILPWGKKNVRKCTECGVMCHAQCTHLVPDFCGMSLQMANEILATIESTKVSPKKAQHQQSHAKPLPPKPPIESKPSMDSEETLHNEPSYKSLRPASVVHQDTNFVSKLPTTVQNKYQEPVELPPQQQNQVVPSTRRRGHGSTDLSFETGYGQQQHQHHRDVPQIVVEDHQHYNSNDNRDVEMEESKDEFDNFDYNNKYTENEILTDVQQDQVRSPFADQIQGVPETSHAKQQNQQVQQVQQQEELGHQRTHSSGKSGKSKRRKRKVGLDDFQFLAVLGKGNFGKVMLAESRHTSKLCAIKVLKKDFIVENDEAESVKSEKRVFLTANKEMHPFLLNLHCCFQTENRIYFVMEYISGGDLMWHIQKNRFTAKRAKFYACEVLLGLKYFHDNGIVYRDLKLDNILLTTKGHIKIGDYGLCKEDMWHKSTTSTFCGTPEFMAPEIVAGKAYDRSVDWWAFGVLLFQMLLCQSPFKGDDEDDIFNAIENDEVKYPINLSRQTVLVLQALLTKDPSQRLGSGPKDAEEIMEHPYFHDVNFDDVLNCRIPAPYIPEVQSEHDYSNFDKEFTSETPRLTPVETVLTSEMQEQFRGFSHISDNATI

SEQ ID NO: 10726 - protein, 1097 aa, Candida albicans
MSTSQPSQQQNPEQVVNDIRQKIEKERKIIQGFNDVKRNTNNPEVIQKWKSKIIESQSMIDYYQETMNKLTRQMQRLNTNSSSRTASRSSVISEYKPSYSNFDLIKYECPSLGNKIQFMLQYLEFKLQVENKYSEANKKLSHLYLMDGDKSSSNAAEGGRAESDQRIQLLEKALKKYQKFSINDHEFDRDYEIMDSTKHSRKLLTGRLTVSITCIRDVDHIATALAKKRETVVVIKVDDLEKARTKPSKNDNWNEEMVIDVDKSHEIELAVMDKQNGIYVPVAVNWFSLFDLAEEIRKKKVAKDQGSSGWLPAANLPQTGGSGAGTGSSMTGGASYGATSPLPAHNDLRPSVSPSSDAKENKVLVSTWLSLEPGGQMLINLNFEKSITNGKQFRGPLGRHGAIRQKKEEVFEKHGHQFVQKQFYNIMSCALCGEFLRYTGYQCQDCKFLCHKKCYQKVVTKCISKSGSDYDAAQLNHRIPHRFEPITNHGTKWCCHCGYILPWGKKNVRKCTECGVMCHAQCTHLVPDFCGMSLQMANEILATIESTKVSPKKAQHQQSHAKPLPPKPPIESKPSMDSEETLHNEPSYKSLRPASVVHQDTNFVSKLPTTVQNKYQEPVELPPQQQNQVVPSTRRRGHGLTDLSFETGYGQQQHQHHRDVPQIVVEDHQHYNSNDNRDVEMEESKDEFDNFDYNNKYTENEILTDVQQDQVRSPFADQIQGVPETSHAKQQNQQVQQVQQQEELGHQRTHSSGKSGKSKRRKRKVGLDDFQFLAVLGKGNFGKVMLAESRHTLKLCAIKVLKKDFIVENDEAESVKSEKRVFLTANKEMHPFLLNLHCCFQTENRIYFVMEYISGGDLMWHIQKNRFTAKRAKFYACEVLLGLKYFHDNGIVYRDLKLDNILLTTKGHIKIGDYGLCKEDMWHKSTTSTFCGTPEFMAPEIVAGKAYDRSVDWWAFGVLLFQMLLCQSPFKGDDEDDIFNAIENDEVKYPINLSRQTVLVLQALLTKDPSQRLGSGPKDAEEIMEHPYFHDVNFDDVLNCRIPAPYIPEVQSEHDYSNFDKEFTSETPRLTPVETVLTSEMQEQFRGFSHISDNATI

SEQ ID NO: 10727 - protein, 522 aa, Metarhizium anisopliae
MPSLGFLKKKRTRDSNPDPSTSTPTSPVAATSPSKPFDSSTLQQRTSGSQAKTAPGTAPAPSQGSAATAAPASQQQQMNPANAQGGTFVTPLPMQTNQADSQSLPSINNLIHQPQNGASTNNYSSFNPAALGAQISHPPSASPGTDPGHMQQQQQQAYPQPAMQPQQQAGHLPDQQQQQYQQQQHEQRVHHQHQGSVTRVTKGKYSLGDFDILRTLGTGSFGRVHLVQSKHNQRFYAIKVLKKAQVVKMKQVEHTNDERRMLSDVKHPFLITLWGTFQDWKNLYMVMDFVEGGELFSLLRKSGRFPNPVAKFYAAEATLALEYLHSKNIIYRDLKPENLLLDRHGHLKITDFGFAKRVPDKTWTLCGTPDYLAPEVVSNKGYNKSVDWWSLGILIYEMLCGYTPFWDSGSPMRIYENILKGKVKYPAYINTDAQNLLERLITSDLTKRLGNLYGGSQDVKNHPWFSEVTWDRLARKDIDAPYTPPVKAGTGDASQFDRYPEDPEKYGGIGGSDEYGHMFTDF

SEQ ID NO: 10728 - protein, 763 aa, Suberites domuncula
MSAFLRVRLSEAIVDHTKPNDPFCAVNIKEAVKGDDGTLSLQQKKKTFYPVWGRCFDSHLKPGRRMQIIVMDRADVPGADVTPVAEVTVETEQLAHECMDEEPGVAVKLALDLRPSGKVIMQVKLYGTAPGSDESSGIDFATRTPEKLSSLPKNATALRGRRGAVNRRQAEAKEFKGHMFIKKFFRRPTYCSLCREFLWGYTRHGYQCQVCQYTSHKRCIDSILGKCTGAAGTSNHSKYLKERFKIDVPHRFKKYTFLGPTFCDMCGQLMHGIFRQQLKCDACGTNCHTKCAQNMPPLCGVNEKLLSEALKNVDEIKRNRRLSAGGDPSQNGKKSTPALPPVSEGGLIEEDEYQEITEAMSQASLLVKLQQEQSASHVPSPQNGNKHRPLSSTSEAAPPVPPRTYSQKSHMNGQSSSFSRHMPVSKPMRRFKLEEFQFLKLLGKGSFGKVLLAQQIGSNKYYAIKALKKDVVLEDDDVEATMVEKRILALGSECPFVTHLHSTFQSSSHLFFVMEYLNGGDLMFHIQLHHKFKLPRARFYAAEILAGLQFLHSKGIIYRDLKLDNILLDSEGHCKIADFGMCRENIFGSSTAGTFCGTPDYISPEIIKGKRYTFSVDFWSYGVLCYEMITGQPPFGGEDEDELFDSICNSQIPFSRYLDAYTIDFLDKLLQREPIQRLGYMGDRQPIRKHPFFRSIDFARLEKREIAAPYKPVVKSAQDASNFDDDFTFQPAQLTPTDTQLVLSIDQTNFNGFSFTSEAFNKP

SEQ ID NO: 10729 - protein, 673 aa, Suberites domuncula
MSDSGQVRRPKRRNAVRQRQVVEIRGHKFVLNYFKQFTFCGHCTRFLWGVTGPQGYKCLLCDLAIHRRCMEYVSFICPGTSLPEGIEPRPHKFRATTYHTPTWCDHCGSLLYGIIRQGVQCSDCGINVHHRCKGLVPKTCGLGQSEKRGRIKVTFSTLQLDDAHIRVNIMIHECRNLPPMDANGLADPYVKLRLYPEPTDTPNIKQKTERKEKTLEPKFEEDFFYDVNMNHLDTFLVIEVWDWDKFTANDYVGGFALRIGEIIELTKMEPHSSWYKLLDEKRSKTHHERILADEEATKLIEEFRKATILDKAKNLVTDVPIMRRGSELVPGAKDMPKMKLEDFNLLVVLGKGSFGKVFLAEQKTTKDVYAIKSLKKDLIVQEDDVECTLNERKVLALQEKPPFLTGLHSCFQTRDHLFFVMEYINGGDLMFHILELGRFPENQTKFYAGEIVLGLRFLHKRGIIYRDLKLDNVMLDADGHIKIADFGLCKEGILGGNKTRTFCGTPDYIAPEIISYQPYDAAVDWWALGVLTYEMLVGRPPFDGDDDDQLFNNIMEKPVHYPRGMSDPAKKIIQGFLTKHPSRRLGCHPETGEQDIKGAPFFKSIDWDRLGRRELKPPYKPKIRGKKSVSNFDPEFTKEPCRLSPVDPTVIGAIEPEVFEGFSFTNPEMYHEP

SEQ ID NO: 10730 - protein, 724 aa, Sycon raphanus
MAEAGDDSFLRIKILQATSLRGNASDPHLAVNIKESIRTPGGKDVQVVQKKDTFHPEWGKCFDSHLNDGRRMQVMVTDIVGDGVMESTQLGEVTVLLASIADQCRSQGSGVSKMSLDMQPCGELTLQAKVYHSQKSGQPESAPPVPGGIESAQCMEENPEELHKNITMLRNRRGAIRHAKLHEINGHGYKARFFRQPTFCGFCKEFLWGFGKQGYQCSYCDQVVHKKCHAKVLGKCPGSKETKDKNVIKKSSQLDLKARFNIDMPHRFKTHNYLHPTFCDHCGTLLYGLFRQGLQCEVCKANCHKRCQGSMPNLCGINEKMMAEMLADVSKEVEAKRSSPATKKKGMGRQASTPVSPLSQAPKFGQANRFEPMAMSLDESMARAAIASSKRYTLSDFHLLKVLGKGSFGKVMLAQVKKSKQYLAIKVLKKDVVLEDDDVECTMIEKRVLSSTSIHPFLVHLHSAFQTEGHLYFVMEYVNGGDLMFHIQQQGRFSEDRTRFYVSEIICGLQHLHSRGIIYRDLKLDNVMLSSRGHIKIADFGMCKENICGENTTSTFCGTPDYIAPEIIQGEQYNHSVDWWALGVLTYEMLLGQSPFSGDDEESLFQSIMNDQVVYPVWLTREAAAFISKLLVREPDKRLGSDPKQSNPRGEAFFKTIDWAKLERAEIAAPFVPNVKSAGDACNFDVDFTMEPAVITPTDEKLLKSMDQEPFNGFSYVNDYFPDQ

SEQ ID NO: 10731 - protein, 756 aa, Sycon raphanus
MSRVSRNSSSSEVNYRDDAPAGAAFARGRRGAVKKKNIVNVRDHEFEPRFFKQPTFCAHCKEFIWGVGRQGYGCRVCQFAVHRRCHEFVSFTCPGAEKPDEGASSPHKFKVTSYGQPTFCDHCGSMLYGLVKQGLKCQACEMNVHKRCERFVPQLCGCDHTEKRGRLFLGLKLTETTPVLKSLEVVVKEAKNLPPMDANGLADPYVKLWLSDDPQKATKKKTETKMKTLNPVWGEKFSFNLTQGDLKRSLIIEVWDWDRTTRNDFIGKMTFTLDEITKMEKDPASGFNDQWFKLLNESEGSAYNVPIMEGPLDSRASTRSGGSSTSPTGDEDLSVGVGALDVSGGPGNGGMPMDALKGRKPKLSDFSFLKVLGKGSFGKVMLAQLKGQEQYYAIKVLKKDVIVQDDDVECTMIEKRVLALSGKPPFLTALHSTFQTKDRLFFVMEFVNGGDLMYHIQQQGRFKENVAVFYSAEIVLGLFFLHRHGVIYRDLKLDNVMLDHEGHIKIADFGMCKEGVLGAKQTRTFCGTPDYIAPEIVAYQPYNGSVDWWALGVLVYEMLSGQPPFDGEDEDELFSSILGDEVRFPKSMTREACSICKSFLAKHPAVRLGCGPNGEADIQGHPFYRTIDWTRLGRRELPPPFKPRIKSKNAANNFDKEFTDEHPKLTPCDRTVIAAIKDDVFGGFSYVNPDPVANGQVGLAGLAPRRLCPHRQAFLDAAMIIATGVHVAGSRPSATTVTRLVQFFAVILTVLSSSYF

SEQ ID NO: 10732 - protein, 332 aa, Leishmania major
MITKAEASQWRLSDLEMRETVGTGTFGRVRLVKHKGTGQYAALKILKKQEILRMKQVDHVMAEASLLQEIDHPFIVSMLRGYMDKNRLYILLEYVVGGELFSHLRKAGKFPNDVSKFYCAEVILAFDYLHNKTIVYRDLKPENILLDQDGNIKITDFGFAKRVTERTFTLCGTPEYLAPEIIQSKGHNKAVDWWALGILLYEMLVGYPPFFDDSPMKIYEKILVGKVLFPRWVDSKARDFIKGLLSLDPTKRLGNLPNGTEDIKNHKYFAEVDWNVVLSKKIPAPIPVRQHKEGDTHYFDKYPDSPLNPLRTLTPAQQDCFANFCNGQYTDE

SEQ ID NO: 10733 - protein, 437 aa, Trypanosoma brucei
MSDVPKSQVGTDAKVAVAKKYTGEYYVKGMVGDKKSFAIEHSRGRQKKHTVNEFCVGDAIGRGAFAEVFQCWRPEEPHIVYAMKKIRKDLIVKRKQSLNVHTERDLLSDAKLRQKRVSCPWITDLVVAFQDQDFLYIVTEYCSGGDLISWLIRYDVFPEETARFYFVELVLALNALHKMGYVRRDVKPDNVLIDREGHVKLADFGLSKRDPDQAESTSVADDSYLTEDVTVDDDVKKRFRDKKERKVMFFSTVGSPAYIAPEVLIGRGYDYSCDWWSAGVILYEMIFGYPPFFNDNNTATAKKIIQFKEHLEFPKDQTTVSKEAIDLISHLIADSKERYGFEEIIRHPFCKGVPLTDSIRNEEAPFSVVLNDPKDLQYFEPAPDNADIQKQPMTAVSREDQSVFVGFTSKLCDRNQSTTCSRALGRFHELQNFSDDD

SEQ ID NO: 10734 - protein, 440 aa, Trypanosoma brucei
MSDVPKSQVGTDAKVAVAKKYTGEYYVKGMVGDKKSFAIEHSRGRQKKHTVNEFCVGDAIGRGAFAEVFQCWRPEEPHIVYAMKKIRKDLIAKRKQSLNVHTERDLLSDAEHRKLRQKRVSCPWITDLVVAFQDQDFLYIVTEYCSGGDLISWLIRYDVFPEETARFYFVELVLALNALHKMGYVHRDVKPDNVLIDREGHVKLADFGLSKRDPDQAESTSVADDSYLTEDVTVDDDVKKRFRIKRKERSWFFSTVASPAYIAPEVLIGRGYDYSCDWWSAGVILYEMIFGYPPFFNDNNTATAKKIIQFKEHLEFPKDQTTVSKEGIDLISHLIADSKERYGFEEIIRHPFCKGVPLTDSIRNEEAPFSVVLNDPKDLQYFEPAPDNADIQKQPMTAVSREDQSVFVGFTSKLCDRNQSTTCSRALGRFHELQNFSDDD

SEQ ID NO: 10735 - protein, 428 aa, Trypanosoma cruzi
MLCYWKRRPSGPHVSPTGTIDLTNARFVENPKDPRSWTIEGDHLSKTFTLTADTEEQREAWVREMSKVKPENREQPSTAVQSSGDVHAVTLYTGGRHKVSLDDFELKATIGAGSFSNVFVAREKSTDKVYAIKEMGKELIQQHNMLSNIAAEKHILQTISHPFIVSLHYAFETKKCLYLVLDFLPGGELFFHLAKEKVFDEYRAKFYCGEIALAIGYLHSLDIIFRDLKPENIVLDEDGHACLTDFGLAKMNVSNASNFTFCGTTEYIAPEFLLGQPHGRAVDWWALGILLYEMTEGIPPFFNENSNEMYEEILKGELKFGDVGGEESGLPVVSENAKALLRRLLDRNPQTRLQDLEEFKKHPFFEDIDWEKLSRREIQPPFRPSSNILCNFDEDFTSKEPRAGFQEEDGGEHGNIACFSFDGQMGPA

SEQ ID NO: 10736 - protein, 309 aa, Trypanosoma cruzi
MSGEANYEKPDTSNWKLADFEMGDTLGTGSFGRVRIAKLKGTNDYYAVKCLKKREILKMKQVQHISQEKQILMELSHPFIVNMMCSFQDDRRVYFVLEFVVGGEMFTHLRSAGRFPNDVAKFYHAEIVLAFEYLHSKDIIYRDLKPENLLLDSKGHVKVTDFGFAKKVPERTFTLCGTPEYLAPEVIQSKGHGKAVDWWTMGVLLYEFIAGYPPFYDDTPFRTYEKILSGRFKFPSWFDARARDLVKGLLQTDHTKRNWEKLYARYYPAPIPVKAKSPGDTSNFERYPESQEDRAVPLTATQQAEFIGF

SEQ ID NO: 10737 - protein, 337 aa, Trypanosoma brucei brucei
  unsure (1)..(337): unsure at all Xaa locations
MKSDGCLTRKDVSSWKLQDLEIRETIGTGTFGRVRLCRHRASGQYVVLKILKKQEILRMKQVDHILAESSILQELSHPFIVTMYKGFMDDDRLYLLLEYVVGGELFSHLRKAGKFPNDVAKFYSAEVVLAFEYIHECGIVYRDLKPENVLLDKQGNIKITDFGFAKRVRDRTYTLCGTPEYLAPEIIQSKGHDRAVDWWTLGILLYEMLVGYPPFFDESPFRTYEKILEGKLQFPKWVEMRAKDLIKSFLTIEPTKRLGSVKRGVQDVKRHKFYSGVNWNVLLQRGVAAPIHVRLNNDGDTRYFDRYPESPRHPLQPLTEAQQELFSGFCDGEYTRX

SEQ ID NO: 10738 - protein, 858 aa, Trypanosoma brucei brucei
MLSKLFRYDTKLQGKQELSTADHRSLLELSMTDNITSVEIPQYRVRGTFVENVIECTKRNMTWQVFRRYQQFKALDQSLKQLCSRGSSRHCDYGVIPVLCGSHWTEVTNQSIDLVEKRRRHLEIYLRQLLVPGNVFYVAKTVIYDFLHDGAVPAQHQRRAIRPLIGFATPDSLADLHLENRNGEGSASRLGAASTLNDKSISMLGPSAVGESDRVDDGVGDEEEEPCKSPPGETVESGEECEDLPSADNSEAEDVRVPPPGSLCRQCNAEFSSVLYPHRCFFCRQQFCRDCLHPVELEEGEVARSCVQCYENFARKTCKPQYPPTPMASTPILQCAPAGGALDPLNLLGSTSHVRTDVTLSDFKLVTTVGRGTFGKVMKVIFREDGKVYAMKVLNKCVIHKRRMIEYIREEKNIMSSLPSHPYIVTCHFAFQTDYHLFFVLDYLPGGDMHSRVYPKLKLTESDVRLYIAELVLALQHLHRHDIAHRDVKLENIVLGEDGHLKLTDFGLARMNFSRQRRRSFVGSPEYLPPETIQGKYQTKAVDWWSAGVMLYEMLSGKTPFYSAYNCEIYNNVLKAELDLTAPCFTPEAASLIEQLLQSHPKARLQDAGAIKAHPYFASIDWAALEGKKISAPIQLDLMGNDMKYIKWKFTAEWAVIYKPPGVTRATIDLLINRFSNFAHVSEGTPPTPHLPIGQQQEEVSDGVTNPPDITGVWNVVKVEMQTEDGKITHPWGSAVCGVLAYFPEGQFSMQLTSYMRPHLRQQFVDRAVREDLVEMCNSYAGSFGKYQIKPGSNIITHRLHGCLCPNLTGSTQKYFFEVRERKENGAKVLKLFTACNALPGEDISAQTVLTWERTGSC

SEQ ID NO: 10739 - protein, 586 aa, Giardia intestinalis
MSDTDVRIKYAVTKTSSRGKKQPRSLVLTSKSVQNVMGNSIQWERPVQEIYGIHRSTKEPKAFVISFLQTYRFDVESADQVSSIVSAFQRLNLGEVFVDDKIGAYGLQTDKGKGYKKGHVNVSSDEDGDIGATGAVSQAADAPASSGQKDRPRTTILEDDLDENIEYVEDTRVLAHQIETLPETEVLETFCNPVAAYKFVRPPIFPQVPPSHAKVMRPQNFELVSVVGKGSFGKVFLVRRVEDNRFFAMKVLKKRNVLDRRQLEHLKAEHNILQSFNHPNMIKLYHSFQTRTRLFLVTTFATGGELFYHLKKIGRFPEPLAVFYLAQIVLVIEYLHKHDIVFRDMKPENLLLDNHGNILLTDFGLSKTGISADNSGGAGVCSGSFCGTPDYLSGEIISGVPHGKMVDIWALGALLFEMLVGSAPFSYASSTSTHGGNARSELYRRILKNIIVFPVFISAECKSFIAKCLSRRPKDRPNFDEIKKHEVFRKNKIDFDKLYRKEIQPPFKPKLEQSCILAVDGKLLKNPLDNIYRYIAPEALVVNFDAKFTSESPILPPSTQTDSVTMQEDKNFKDFAWTAQDAFDKL

SEQ ID NO: 10740 - protein, 347 aa, Entamoeba histolytica
MSTQEYDQLYSQTGKKIGFDDFSLVKVVGRGSFGKVLQVKKKDDGKIFAMKILDKSKVMKTKQQKHTNDEKKILQHVNHPFIVQLYYAFQTPEKLYMVMEFINGGELFHRLDLEECINEEQTKFYTSELCLALIHLHSLGIVYRDLKPENILIDASGNIKLTDFGLSKQLSSEDDQTSTFCGTPDYLAPEILTAKGYGIEVDWWSLGVVVYEMLSGYTPFAADDDGNQNETYQNILNKEPEFLPSISSDAQDFITCCLKKDPTQRIKDDQIKGHQWFAGIDWDLLLQKKVPVPWKPKVSGADDVSNIDEEFTNEDAQKMTPSENVALKGDEFAGFTFQDDAALNGQL

SEQ ID NO: 10741 - protein, 409 aa, Entamoeba histolytica
MGNSNHKPEKKNNKGKKEKGKRKNEKIKDETNEKEAIEEPTPNEEKEPCTDTKPNEDNQIVKGKEGEKEEYIELYNEGKKKVTQDDFELLKVIGRGSFGKVMMVKKKDDGRIFAMKILRKDIVKERKQVDHTKAEKNVLMQLHHPFIVKLYYAFQTTDKLYMVMDFVNGGELFYHLKNENCFSEERAKFYAAEIATVLIHIHSLGIIYRDLKPENILLDNTGNIVITDFGLSKQLAAGEETQTFCGTPDYLAPEILKGVGHGPGVDWWSLGILIYEMIVGIPPFYDDDVSLMYQKILKSQPHFPRNISYDAKSVIMGLLEKDPAERLGGEDVIHMAWFDSIDFEKLKRKELTPPWIPPVKSQTETSQIDEEFVQEAAVDTPPSEEQEQNKDNTFEGFTFVQTNAMEEQQ

SEQ ID NO: 10742 - protein, 648 aa, Dictyostelium
MSNSNNNSSSGNHNSTTINNPKVNVYSNIPNSTTYTYGSGGGGTLSGNNTNNNNTNNNNNNNNNSSGDNKNHSPVTSATDRLTKMDIEEKWDNKNYEKDEREKSPLFHILASNLNSFGNFKVPSTFSLTPPEPNKQQQPQQQPQQQQPQQQQPQQQQPQQQQQQQPQQQQQPQQQLQQNNQQQQQQLQQQQLQQQLQQQQQQQQQQQQQQQQKQQKQQQQQQQHLHQDGIVNTPSTTQTSTTTTTTTTTTNPHTSGLSLQHAHSSYTPSNVLHSPTHFQSSLPTRLDTNPITTPIRQQQQSQQQLQQQQLQQIPPPTVNSFFLPPPVNARERLKEFKQIRVIGTGTFGKVYLIQNTKDGCYYAMKCLNKAYVVQLKQVEHLNSEKSILSSIHHPFIVNLYQAFQDEKKLYLLFEYVAGGEVFTHLRKSMKFSNSTAKFYAAEIVLALEFLHKQNIVYKDLKPENLLIDNQGHIKITDFGFAKRVEDRTFTLCGTPEYLAPEIIQSKGHGKAVDWWALGILIFEMFGRLSPFYDDDTFAIYNKILAGRITFPLGFDVDAKDLIKRLLTADRTRRLGALKDGALDVKNHRWFSDINWERLYQRRDNGPFIPKIQHQGDSSNFEMYDEEEMVEEPPSSNYVDPYAHLFKDF

SEQ ID NO: 10743 - protein, 770 aa, Paramecium tetraurelia
MGVCISNTQQTTTEIAGDQMIPGQLNKPSLSLSSLAVEPRRGDRKRQTKIEVVEEQIHENVMKQQKEKSPFDFQMILNAFGNHFMFAQLDNNDKAKLIEEMYYVTSKDQEFVFKQGDKATLFFIIERGQCQITINEEKKRVLKPSEFFGELALMCHAPRSASVIAIGDCGFWVLERYKFRKAVEDIQQKAYETNREFLAQVKFFDSMTEEQRDSIANVLITLKFKQGESIVNEGDMANSFYIIFQGTVQVTKQGQFLRYMNQGDSFGEQALFGNCVRGATVKAHDSDVNLLSLSREDITTILGEKIQLIIYTNMQKWAFEKHPKLRDLTKMQIQKIVSNFKIKSYESNDCIFKMNQLVDKLIIILDGQLEFEGQLYNNGQLFGDKYLQMEEQKRKINHDIKTNRKTTLSELPFRQFFECIGGELETVVKKNKDRAGSSSLLEKKQKSNYSLLTLEDFIGLKLLGEGTFGNAYLVKDIPQQNMHVMKCVPKVNVIANNTERHIKNEKQVLELLNHPNLVCFRRSFKDQNYIYLLTEYVKGKELFHVIREIGLLNSYETQFYIAQMINILEKLHSQHIIYRDVKPENFIVMENGYIKLIDMGTAKVLKSRASKTYTLVGTPHYMAPEILKGKGYSFSTDLWSLGICFYELMCGEVPFAGDEEDDPFIIEEAILNGKLEYPQILKDFKAIKLMDQLMNRTPELRLGGSFEALKVHPWFDGFQWEELEAFQLKPPYYPKLQQMIFEEMPFLDLIQRDTSPEMICTQFVDWDQDF

SEQ ID NO: 10744 - protein, 819 aa, Paramecium tetraurelia
MGCGSSQPAAEPDKKSKSLKSASTSEIEDLIGKKIPKLLIQAEMKHRFTADEEAIKSDLISLQPPQENDNVVARAQKKMQKKYRGGEDVEGQIIENVKRVEREMQQSDVDLIIKSFKSHFVFFSLPQDSLQKLIENMFYCTIKAGEFVFKQGNQASAYFVIERGQVEIIINENPIRVLKQGDQFGEIALLYNATRSASTKALTNCGFWSLERATFKKTIEEITLKEYDENRKFIDQVQFFSFMTSEQRDMIGNALITTKFNPGQNIVNEGDQADSFYVIKSGQVQILKGDKLIRKMGAKDSFGEQALYEKSVRGATVKAETEVRCVALGRENLTKILGDKIQLIIFNNIMRWSFEKSEILKQLTKIQLEKISQKAKIENFKKGQVIFEAKKPCDKLVVVLEGVLINSKQESVTKGSCFGDQFLQKERYGSPLECAFTMVGDGVLATITFQALFKIFGGDLETALKKNENSHEKKIQQIGKREDASHIVLEDLIYIKKLGEGQFGIVYLVKHKETKKVFALKSVSKASIIEQNLEKHITQEKTVLEQINFPFIMGFVRTFKDDMSIYFLVDFIRGMELFDVIRDIGLLQKPETQFYIGTMILCIEYLHSKSIVYRDLKPENIMVNAQGFMYLIDLGTAKPLLKTKACRTYTIIGTPHYMAPEIIAGKGYTFSVDLWSIGICMYEFMCGGVPFGEELEDPYQIYEEIMNTQIKYPTFLKDRHAKKFMEQLMNRQPETRLGASYSALKAHQWFDDFDFDKLFSRELKPPYLPKPENMVSEQDIQKRFNQNKLVLQEIKNEQDSHKIKYNKHLAKDPNWDKDF

SEQ ID NO: 10745 - protein, 423 aa, Euplotes octocarinatus
MGLVEAIKMDVLNLTPHEKELIKQDVLHKEAELNRKSRKKMYPSDFEPLTIIGKGAFGEVRICRHIETGDIVAVKKVVNKEMLYKNQVAHVRSERDILVKAKNPWIVGLKYSFQDDENLYLVMEYLPGGDLMNLLIKKDILSEEESRFYTAEMILAIESVHSLNYIHRDLKPDNVLLGVDGHIKLTDFGPCKHAEIKASQKVDTDKYELKHSENFNALKNMLNKRLGYKRDRKLAFSTVGTPDYIAPEVFGTKGYDETVDWWSVGVILFEMLVGYPPFFSDDSTVTCQKILHWKRTLVIPPEANLTPEATDLIEKLVCDAEDRLGRNGAIEIKEHPWFEGFDWDSLSSLKAPYIPEVSSPTSAENFDKFKEETPFFPLSQSKLQKQKMKRRKKDLDFVGYTYKADVEEEKQMFVSALQELDHL

SEQ ID NO: 10746 - protein, 414 aa, Euplotes octocarinatus
MEVLNLTPHEKELIKQDVLHKEAELNRKARKKIYPSDFEPLTIIGKGAFGEVRICRHIESGDIVAVKKVVKEMLYKNQVVHVRSERDILVKAKNPWIVALKFSFQDDENLYLVMEYLPGGDLMNLLIKKDILSEEESRFYTAEMILAIESVHNLNYIHRDLKPDNVLLGADGHIKLTDFGLCKHAEIKASQKADTDKYEMKHSENFNALKNILNKRLGYKRDRKLAFSTVGTPDYIAPGVFGTKGYDETVDWWSIGVILFEMLVGYPPFFSDDSTVTCQKILHWKRTLVIPPEANLSAEATDLIEKLICDAEDRLGRNGAQEIKEHPWFEGFDWDNVKEDKAPFIPEVSSPTSAENFDKFKEEAPFFPSSQSKFQKTKMKRKKKDLDFVGYTYKADVEEEKQKFVSALQELDHL

SEQ ID NO: 10747 - protein, 865 aa, Encephalitozoon cuniculi
MERERINIIGDCLEAVYHEISEKRINVPVDRLKEVVEAKTKPSDYEIVKNVAKGGYGEVFLVRREKIYAMKRVSKELVLKQPHTALFMAEKEAMVDCIGSEWLVCAHMTMQDEEYLYYLMDFIPGGDFMGLLSKEDVLEEDWVRFYAAEIVAALDELHKLGWIHRDLKPDNVLIGIDGHVKLADFGSCIKMKDGKARSSITVGTPDYVSPDVLCSVNEECEYGEDVDFWTLGVIIYEMIYGTTPFYSDTLMETYRRITRVEFGFPFKVSPELTSLIEGLIAAKDRRMRIEEIKSHAFFEGVDWSRLKELKPPFVPEVNGDSDTSHFVDTQFDAEKRKLNVKGNYMPFVGFTFDPEFVSRFSSMIEGKAAPTSDRVDSMIKENRQILEDLLVKISENKESIDLQNQELADMNAELESTRVKLEISRDEAQRYQKELKEVLTQLLVEKEELEVAKAELQRYRKWLKNITEEVNSKAFLSEEYSIAERKSAETAGLDMSIEDLGKRGVLFKDLSMPIYEVRKEAEEMADILSDLQESMSRLSTENKGLRSEAEVYKEKYHEILGIKAMIESENKSLTEKLKSGGLDGLKRQLRLKAAEIKEYEQKLNQEILFRKSVEEELNFLKREKSKVHRVAVKQSFSCHLTNGEPTVVKVEEDRLWVGDEAHYISNVYVGELRPNELHHLPQKKISMTLKIVFMNEEVKSVSSSGRRSLKSLEEDLNTEMAIKEGIEKIRALLQGKTLEEANMQLEGSNRKISQLKAEIERCRKSTMVENIPEDPIRIYEFNNHLFAPKTVPQGVLCDFCNEVLYGLVNQGFECKDCKMVVHKSCYVLGDISCELYSALKTGRAYYVTMRTIEEKEKLLSTCKGY

SEQ ID NO: 10748 - protein, 677 aa, Geodia cydonium
MADGGSLDVEPRRPVRRNAVRQARVVEVKGHKFVLTYFKTFTFCGHCGRFLWGVTGPQGYQCKLCDFVMHKRCLDYVSFICPDVHIGNGAPSPRKFKTTSFRHPTWCDHCGSFIYGLMNQGKTCGDCGVNVHHRCHEMVPKTCGQQVKETRGRLEMSVRSEDIDDDHIRLHIGIIQGANLPPMDANGYADPYVKLRLLPEASNAAKQKTERQTKTLSPVWEETFFFDVNKADTSFELSRLVIEVWDWDRYTANDLIGGFSIPVPEIVEWSKGGATVCNWYRLLDSKSLKQKYEHVIDTVKLRTDRGVQEEDEDRQGAGTPEGIPDLRRGSEMVPESHGLPKMSLGEFKLIVVLGKGSFGKVFLAEHKESKEVYAIKSLKKDLIVQEDDVECTLNERKVLALQSKPPFLINLHSCFQTEEHLFFVMEYVSGGDLMFHILELGRFSESQTRFYAAEIVLGLVYLHNLGIIYRDLKLDNVLLDSEGHVKIADFGLCKDGISGTSKARTFCGTPDYIAPEIIQYHPYDAAVDWWALGVLIYEMLVGRPPFDGDDDDQLFMNIVQKQVHYPRGLSEPCRKIISGLLTKNASKRLGSHPEAGVDMIKAQPFFKNMDWEKLARREVKPPYRPKNKGKKNRDNFDPEFTKEPCRLSPVDSNIIAAIDPGAFEGFSFTNPELFIEP

SEQ ID NO: 10749 - protein, 1030 aa, Hydra vulgaris
MADFSDKVLKNVPTKAFRNTSSPLIKSSNKQIPFQRISNTPLKIVVAETNNQKPISTVNCQENKLRLNRIKLNERSSPEVRAKNTKEESIISSSLSKVNHKRNTLPKAPISQQKPLSYSNKLNKVAEANNVRPRSKFQTTSVKKVLCDEIVIEDKEKNNCTIKKTKSSRKPTRHATYVSELNKSIRDKYLNKKESDSLKNISLVEPIINRKPCVNNAKSLNVSDQSSVTSDCDSEKSKIAVHHRTVHCPLHSKFVNKAFIHARCIEECPEFKKVTSVPKTTQRVSSGQSGQKTLDVKRSILTYPKPVVNNFIKSSKPYEQKKSDLNNKSRSSLISSSTNRTGRASVLSQQFQPNSVFLNKNTKCVKPVAYRGGLLPEKKIVTEKPIAIVMPRRKVRQKSFKLQPSRSRSKSFTMKKKLVLLKRNISDESILSDDTNNDFIEDSLNNSSGSEDGSNLPEDDGIEDECESDVYDEKLADYYFELFRNEFPEIVKETHLTKEELVTFFNPMVNRRSKLQRQKQLFPKAKGKHFLRAGEMNTNIATWARLLKIAVPPATSSYSPNAHNTTVTITNNNLSTSEPTLITSSSPNQSNNLLYREVNQLEINDALKYSSDDNLSKSQNAIQKVENLKEEIKPPPPVQGYTTPTFEQRPEQNSNDIRISVVPPNGQLSPRLDSRRTSGRKSAGRSPPIQRKNKHSGLSMENFRCISVLGRGHFGKVLLAEYKTTKELFAIKALKKGDIISRDEVDSLMSEKRIFETANSVRHPFLVNLFSCFQTKDHVCFVMEYAPGGDLMMHIHEEVFSEPRTIFYSGCVILGLQYLHEHDIVYRDLKLDNLLLDAEGYVKIADFGLCKEGMGFGQKTGTFCGTPEFLAPEVLTETSYTRAVDWWGLGVLIFEMLVGESPFPGDDEEEVFDSIVNDEVRYPRFLSNDSIALMRRLLRKNPERRLGSSIKDAEDIKKQPFYKDMKWDSLIQRKLKTPFIPTVKHPEDVSNFDSEFTSEDPVLTPAKEKRGLSQGEQALFSGFEYTADWC

SEQ ID NO: 10750 - protein, 674 aa, Hydra vulgaris
MSSKSKKKSTKKEGGDGGGFHRRGAVREKHVFKVMEHEFIPKFFREPTYCAHCTSFIWGIVGNNGFQCKVCSFGVHKRCHEYVSFKCPGADTGPESDAPQNPHKFKVHTYSSPTFCDHCGTLLYGLFHQGLKCGACDMNVHKRCEKSGCIPKLCGADHTEKRGRIRLKINFSQKGEEGALTIDIFEAKNLIPMDPNGQSDPYVKLKLLPDTTQNKQKTKTIRKCLNPVWNEKFVYKIGPNDKDKRLCIEVWDWDLATSNDFMGSMSFGVSELMKDEVDGWYKLLNAEEGEYYNVPIQDDAAVAALAKKFKFMDPEELDKRQQVLPEQKEIITDEVNSALKEHWKLEDFTFLKVIGKGSFGKVMLAEKKGSDKVYAIKILKKDVVLQNDDLECVLTEKRVLALQGKPTFLTALHSCFTTVDRLYFVMEFVNGGDLMFHIQQVGKFKEPQAVFYAAEIVEGLLFLHKRGIIYRDLKLDNVMLDQSGHIKIADFGMCKENIFPPKTTRTFCGTPDYIAPEIIAYQPYNASVDWWALGVLIYEMLAGQPPFDGEDEDELFNSVLEQTVSFPRSLSKEAISIIKGFLTKNPSRRLGSGDTGEQDIRDHAFFKYIDWIKLFKMEVQPPFKPKVKSKRSHDNFDTEFTDEATRLTPVDRNFIQQIDQRAFENFSFVNTNFS

SEQ ID NO: 10751 - protein, 670 aa, Hydra vulgaris
MTSVKINEETMKGFNRRGAIREKNVFEVKDHKFVPKFFTSPTFCAHCKDFIWGIVGNNGFQCKVCSFGVHKRCHEYVSFKCPGADTGPESDAPQNPHKFKVHTYSSPTFCDHCGTLLYGLFHQGLKCGACDMNVHKRCEKSGCIPKLCGADHTEKRGRIRLKINFSQKGEEGALTIDIFEAKNLIPMDPNGQSDPYVKLKLLPDTTQNKQKTKTIRKCLNPVWNEKFVYKIGPNDKDKRLCIEVWDWDLATSNDFMGSMSFGVSELMKDEVDGWYKLLNAEEGEYYNVPIQDDAAVAALAKKFKFMDPEELDKRQQVLPEQKEIITDEVNSALKEHWKLEDFTFLKVIGKGSFGKVMLAEKKGSDKVYAIKILKKDVVLQNDDLECVLTEKRVLALQGKPTFLTALHSCFTTVDRLYFVMEFVNGGDLMFHIQQVGKFKEPQAVFYAAEIVEGLLFLHKRGIIYRDLKLDNVMLDQSGHIKIADFGMCKENIFPPKTTRTFCGTPDYIAPEIIAYQPYNASVDWWALGVLIYEMLAGQPPFDGEDEDELFNSVLEQTVSFPRSLSKEAISIIKGFLTKNPSRRLGSGDTGEQDIRDHAFFKYIDWIKLFKMEVQPPFKPKVKSKRSHDNFDTEFTDEATRLTPVDRNFIQQIDQRAFENFSFVNTNFSIQ

SEQ ID NO: 10752 - protein, 387 aa, Hydra vulgaris
MPDEITTVKEGWLMKRGEYIKNWRPRYFVLRSNGLFLGYKEKVKGGDGGCEPINTFSIERCQIMRQSKPKPNVFIIRCFQLTTLVERTFAVDSNFDREEWISALEEISRRLAKEEINRRSTSIIDFTDSIHRPKMTLEDFEMLKVLGKGTFGKVMLGKEKKTGNVFAIKLLRKDVILAKDEVEHTLTENRVLQNMKHPFLTELKYSFQTNDRLVFVMEYVNGGELFFHLSRDKVFSEARARFYGAEITLALKYLHENKIVYRDLKLENLLIDSEGHIKITDFGLCKEEISFTDTTKTFCGTPEYLAPEVLEDNDYGHAVDWWGFGVVLYEMLCGRLPFYNRDHEVLFELILSEPVRFPSRLSLSSKSILSGLLEKNPDKRYVMHFFF

SEQ ID NO: 10753 - protein, 661 aa, Hydra vulgaris
MNGIQSGFTGFMKIRILEALDLNKTNVKSQFVTSMKVSSLDPYLQAYVDDQVIAKTSKKTATYCPVWEEDFSIDLHKAKMLSLTVFHSSIVGSDSFVANSSVLIQDIIDEGQSDLWIQLEPAGKLHIFIELKSGEDGEPRATSNQFKQRDSTYLNKRGRRNAVRRRIHQIGGHKFMATYLRQFTFCSHCKEFIWGVIGKQGYQCQVCSIVTHKKCHHLIVSKCPGVKIKEETSSEQRYGLNIPHKFLTHSYRFPTFCQHCGSLLYGIIKQGVQCKNCALNVHRRCQANVANDCGVDRRELAERLKEINNKTANDIMKSPKPTNIIQHTQNGMTCITHDKTKPSIQDITASPVDVCRKVASETKYSLDSFTFLKVIGKGSFGKGYLAERKGSSELFAIKILKKINIIRDDDVDCIQTEKRVLTISGQHPYLTSLHSCFQTPERLFFFMEYVNGGDLMFQIQKARKFDENRSRFYAAEITLALQFLHKNGIIYRDLKLDNILLDSDGHVKLADFGMCKDNLAPSDTTSTFCGTPDYIAPEIVCDLPYGSSVDWWALGVVMYEMMAGQPPFEADNEDELFERIQSSEVLYPVWLSREASSILKGLLTKNYEKRLGCVPDIGEVAINKHPFFASIDWRKLENRQIHPPFQPQIKSPTDVANFDTD

SEQ ID NO: 10754 - protein, 697 aa, Rhabdocalyptus dawsoni
MAVVDPEEEISGRRVDIARRRAIREKKRVVIKDHSFEQHFFKQPTYCSHCRNFIYGVGRQGFECVQCGYVLHRHCVDLVAFNCPKSVKGIAVLKKGEGKVHDFQVHSYGKFTFCDHCGQMLYGLYRQGYQCGDPDCGINVHSYCKPFVANLCGTHSNEKYGRLQMNIRFNEMNERDPVIVIDIKQGKNLLPSDADGMSNPYCQVSMLDKKAKVVITHKTEVAEQSLAPIFNESFVIPFNPSKCERMSVEVMDFSGKFLGGMSFGLSELTNFKKPEDIWFTLYNDNVAKHLNNRTIIESDEAEIKRLIDQVATVRYSSSPTKSLPLTQSLGACVIPGMTSDDVMVLEQYKLLGVLGKGAFGKVFMAESSDLTEEIFALKVMHKELVFDFDAVDCTMMEKLVLALEDKNKPPFLTALKASFQDQENLYMVMEFLSGGDLLFHLLKSIRFTDERSKFYIAEISLAIFFLHSKEIIYRDLKPDNVLLSAEGHIKLADFGLCKEGIKNGKSTTRTYCGTLDYMAPEILQRKDYDNAVDMWSLGVMLYEMLAGRTPFDARTEEMVVTNIKNRAPSFPNNFSKEAIKLITVLLKKVPKERLGFDPVDGQKQFQANKYFSDIDWDMLNKQQVEPPFIPTIKGKKSTANFDKEFTQASNKITKSASRNTIMQHEDFDGFEYTSPDLRQAMRIKREATEQIENEATN

SEQ ID NO: 10755 - protein, 337 aa, Ascaris suum
MENREQEEIEPCVSITIDPNNNKLNVDDFDRICTIGTGSFGRVYLVQHRASEQYFALKKMAIREVVSMRQTEHVHSEKRLLSRLSHPFIVKMYCASWDKYNLYMLFEYLAGGELFSYLRASRTFSNSMARFYAAEIVCALQYLHSKNIAYRDLKPENLMLNKEGHLKMTDFGFAKEVIDRTWTMCGTPEYLAPEVIGNKGHDTAVDWWSLGVLIYEMMIGIPPFRGKTLDEIYEKIILGKLRFTRSFDLFAKDLVKKLLQVDRTQRLGNQKDGAADVMNHKWFTDIDWDDVQNMKLTPPIIPTLYSNGDTGNFDSYDECSDDEIAAPQHELELFEDW

SEQ ID NO: 10756 - protein, 472 aa, Blumeria graminis f. sp. hordei
MPTFGFLKKRKKVSLGHRDLDSPASTLSQPASPITPSTSRGLGEPIDTTSSKITSPGQKLGSNITKDHRGTRTTVEDLPSMTDVSHLQQAYRNLSQGSTASKSNLLTIHNLINPPQHDGAGQSKVMPEKHMNNKTERPVQGKAAVAQVRQTKGKYSLSDFEILRTLGTGSFGRVHLVQSKHNQRFYAVKVLKKQQVVKMKQVEHTNDERSMLQEVKHPFLITLWGTFQDSKNLYMVMDFVEGGELFSLLRKSQRFPNPVAKFYAAEVTLALEYLHKKDIIYRDLKPENLLLDRHGHLKITDFGFAKKVTDITWTLCGTPDYLAPEVVSSKGYNKSVDWRWSLGILIFEMLCGYTPFWDNGSPMKIYENILKGRVKYPPYIHPDAQDLIQRLITADLTKRLGNLHGGAEGIKSHQWFAEVTWERLAKKDIDAPYVPPVKAGSGDASQFDKYPEETERYGQTGPDEHGSLFENF

SEQ ID NO: 10757 - protein, 522 aa, Aplysia californica
MSNMTGAFDLELTEDGGRTEDVSDEEYFEADESSGRQQEYGGDGLPNEEIMETIELSAQTVNPSNVRKIGRERFEIISLLGKGGYGKVLLAEMLDESKSKYDPPRLYAMKVLKKATIARNQKDTAHTRAERNILEAVKHPFIVDLHYAFQTDGKLYLILEYLPGGELFTHLEREGIFMEDMASFYLGEILLAIEHLHTLGVIYRDLKPENVLLDCKGHIKLTDFGLCKESISLGEVTHTFCGTIEYMAPEIVQRSGHGKGVDWWSLGALMYDMLTGQPPFSGENRKKTIDKILRAKLSLPPYLTNEARALLKKLLKKNPSDRLGSGPDDAAPIKSHMFFRHTNWDDLLNKRIEPPIKIGVTSAYDVSLFDTKFTKQTPCDSPVDMTVFSPSINIFDGFTYVAPSVLTEMATQPWISERGPRSPRKSYKNESLLLNNGLEGFYQANAAAAHAIATQRGNHPGHVNQGPTTVVASSRAVNGYDTSAQEDMDTSGGAAAAATASTSGGGVTSSQGGATGGVHHRP

SEQ ID NO: 10758 - protein, 689 aa, Loligo pealei
MADLEAVLADVSYLMAMEKSKSSPAARASKKIVLPDPSIRSVMHKHLLKNGVVTFDHIFDQRIGFVLFKDYCNNGSDVPILEINFYEEIKKFQGMDKDEDRIKQARDIYDQFIMRELLAQCHDFTKTAVNNVQDALTKARKTKKLDVVVFNKYKEELRRKLNKEVFSKFIESDRYTRYLQWKNLELNINLTMNDFSVHRIIGRGGFGEVYGCRKADTGKMYAMKCLDKKRIKMKGGETLALNERIMLSLVSTGECPFIVCMTYAFQTPEKLCFILDLMNGGDLHYHLSQHGVFSEQEVKFYAAEVILGLEHMHVRGVVYRDLKPANILLDESGHVRISDLGLACDFSKKKPHASVGTHGYMAPEVLAKGVAYDSSADWFSFGCMLYKLLKGHSPFRQHKTKDKHEIDRMTMTMNVELPDSMSTEMKSLLEGLLKREVEERLGCKGKGAKELKEHEFFKDMDWNQVYQLRYPPPLIPPRGEVNAADAFDIGSFDEDDTKGIKLLDADQQLYENFTLTVSDRWQQEITETVFETVNNETDKLETKKKPKREEPCEKDVIVEGEILKLGGPFLNSWQKRHLRLYPNRLEFYQKNRDGGIQKNKVELITMYDLKEVCHEFQKLNKADNCIVMILKNETKLVITSQDKVLINQWKEEILGGFRASTKMQSKMNKKASKLYGADVPIEHRNSNGS

SEQ ID NO: 10759 - protein, 689 aa, Octopus dofleini
MADLEAVLADVSYLMAMEKSKSSPAARASKKIVLPDPSIRSVMHKHLLKNGVVTFEHIFDQRIGYLLFKDFCNNGSDVPIAEINFYEEIKKFQTMDTDEDRIKQARDIYDQFIMRELLAQCHEYTKTAINNVQDALTKARKTKQLGNHVFNKYKDEIRKKLNKEEFNKFLESDRYSRYLQWKNLELNINLTMNDFSVHRIIGRGGFGEVYGCRKADTGKMYAMKCLDKKRIKLKTGETLALNERIMLSLVSTGECPFIVCMTYAFQTPEKLCFILDLMNGGDLHYHLSQHGVFSEQEVRFYAAEVILGLEHMHVRGVVYRDLKPANILLDESGHVRISDLGLACDFSKKKPHASVGTHGYMAPEVLAKGVAYDSSADWFSFGCMLYKLLKGHSPFRQHKTKDKHEIDRMTMTMNVELPDSMSVEMKSLLEGLLKREVEERLGCGGKGAEELKENDFFKDLDWNQVYQLHYTPPLIPPRGEVNAADAFDIGSFDEDDTKGIRLSESDQQLYENFTLTVSDRWQQEITETVFDTVNAETDKLELKKKPKREDQIEKDVIVEGEILKLGGPFLNSWQKRHLRLYPNRLEFYQKNRDGGIQKNKVELITMYDIKEVCQEFQKLNKTDNCIVMVLKNETKLVITSPDKVIINQWKEEILGGYRASTKMQSKMNKKASKLYGADVPIEHRNSNGS

SEQ ID NO: 10760 - protein, 690 aa, Homarus americanus
MADLEAVLADVSYLMAMEKSKSTPAARASKKIVLPDPSVRSVMHKHLEKMGEVNFDKIFNQKLGYLLYKDFSENVCEDPVHQLKFYEEIKTYEKIENKEERRKVAREIYDNFIMKELLSNTHAYNKESVAFVQKHLTKNEVPTDLFEPYIEEIFTHLRGDLFNKFVESDKYTRFCQWKNLELNIQLTMNDFSVHRIIGRGGFGEVYGCRKADTGKMYAMKCLDKKRIKMKQGETLALNERIMLSLVSTGVDCPFIVCMTYAFHTPDKLCFILDLMNGGDLHYHLSQHGVFNEQEMRFYAAEVILGLEHMHRRYIVYRDLKPANILLDEHGHVRISDLGLACDFSKKKPHASVGTHGYMAPEVLSKGTAYDSSADWFSFGCMLYKLLKGHSPFRQHKTRDKHEIDRMTLTMNVELPDTFTQELRGLLEGLLHRDVDKRLGCKGKGADEVKEHPFFGGLDWQQVYLQKYQPPLIPPRGEVNAADAFDIGSFDEEDTKGIKLTEADQELYKNFPLVISERWQTEVAETVFDTVNLEADKVEHKRRAKHKFKFKLDADEKGSDCIIHGYIKKLGGPFTSAWQTRYAKLYPNRVELHSESSSGKPELIFMDQLDDVSSDFVQIKGENCIVLKTKDSKIVLTNPDEIGLKEWSMSLRSAHKMSLELLSNMAKKAGKIYGTEGNNKPSLMARNGNGN

SEQ ID NO: 10761 - protein, 754 aa, Limulus polyphemus
MPNFSGTLKLKLCEAIDLKPTEYATRHANVVGKQQLAIDPYVSIDIDEVHVDRSSTKQKTFKPIWNEFFTSEVHNGQNLGLTVFHDAAIPPDDFVANCTISFEEILTSSKEANSNESDIWVDLEPEGKIHVIVELQSQENAAQKPREFKERPGLNRRRGAMRRRVHQVNGHKFMATILRQPTFCSHCREFIWGLGKQGYQCQVCTCVVHKRCHEFVVTKCTGMKDTTNDEIGGSRFNINIPHRFMVHNYKRPTFCDHCGSMLYGLIRQGLQCEACKMNVHKRCQRNVANNCGVNPKQMAEILNAMGFSGDKLTKRKKKTSITESCNKLLHPITERSLTTPLPGTCEEQELSGNATRLEVQAAAEEFKRLCLQLPQGGILPVDRSPIGGSSSSDVIFEQSYRTEEWDSKKFGLSEFTFIKVLGKGSFGKVMLGERKGTDEVYAIKVLRKDVILQDDDVDCTMTEKRILTLAAKHPFLTALCCSFQTEDRLFFVMEYVNGGDLMFQIQKARKFDEARARFYAAEVTLALMFLHRHGVIYRDLKLDNILLDSEGHCKIADFGMCKEGIAGGATTTTFCGTPDYIAPEILQELEYGPSVDWWALGVLMYEMMAGQPPFEADNEDDLFESILHEDVVYPVWLSKEAVSVLKGFMTKNPAKRLGCVPSQGLEQAILNHIFFKEIDWDALESRKVKPPFRPKIKTKRDVNNFDQDFTKEDPVLTQVNPDVIRTINQEEFRGFSVVNEDYCPNRNMVEGPAT

SEQ ID NO: 10762 - protein, 744 aa, Bombyx mori
MRVCFDNLCFGSSQRGAADDEPRALVNTGGGALTVAPTVNGERRALDETYREIELNGIMGTPTAMNAESENCVANATMANDMQPLIERIKELEALLKQRDQEMLELRSQLDKLQSVFPYQQYARGSRGPRKQRAQGISAEPQNSASLQDLTHQTFPIYDKSETSRELIKTAILDNDFMKNLEMTQIREIVDCMYPVEYAAGSIIIKEGDVGSIVYVMEEGRVEVSRENKYLSTMAPGKVFGELAILYNCKRTATIKAATDCRLWAIERQCFQTIMMRTGLIRQAEYTDFLKSVPIFKNFPEDTLIKISDVLEETHYQNGDYIIRQGARGDTFFIISKGQVKVTQKLPNSNDEKFIRTLTKGDFFGEKALQGDDLRTANIVCDSPDGTTCLVIDRETFNQLISTLDEIRTKYKDLGDDRQRLNEEFANLRLSDLRIIATLGIGGFGRVELVQIQGDSSRSFALKQMKKAQIVETRQQQHIMSEKEIMSEMNCEFIVKLYKTFKDRKYLYMLMETCLGGELWTILRDRGQFDDATTRFYTACVVEAFHYLHSRNIIYRDLKPENLLLDSKGYVKLVDFGFSKKLQASRKTWTFCGTPEYVAPEVIMNRGHDISADYWSLGVLMFELLTGSPPFTGSDPMKTYNKILKGIDAVEFPRCITRNAANLIKKLCRDNPAERLGYQRGGITEIQKHKWFDGFNWEGLAQRSLEPPIVPTVNSAIDTHNFDQYPADADEPPPDDLSGWDANF

SEQ ID NO: 10763 - protein, 738 aa, Bombyx mori
MRVCFDNLCFGSSQRGAADDEPRALVNTGGGALTVAPTVNGERRALDETYREIELNGIMGTPTAMNAESENCVANATMANDMQPLIERIKELEALLKQRDQEMLELRSQLDKLQSVFPYQQYARGSRGPRKQRAQGISAEPQNSASLQDLTHQTFPIYDKSETSRELIKTAILDNDFMKNLEMTQIREIVDCMYPVEYAAGSIIIKEGDVGSIVYVMEEGRVEVSRENKYLSTMAPGKVFGELAILYNCKRTATIKAATDCRLWAIERQCFQTIMMRTGLIRQAEYTDFLKSVPIFKNFPEDTLIKISDVLEETHYQNGDYIIRQGARGDTFFIISKGQVKVTQKLPNSNDEKFIRTLTKGDFFGEKALQGDDLRTANIVCDSPDGTTCLVIDRETFNQLISTLDEIRTKYKDLGDDRQRLNEEFANLRLSDLRIIATLGIGGFGRVELVQIQGDSSRSFALKQMKKAQIVETRQQQHIMSEKEIMSEMNCEFIVKLYKTFKDRKYLYMLMETCLGGELWTILRDRGQFDDATTRFYTACVVEAFHYLHSRNIIYRDLKPENLLLDSKGYVKLVDFGFSKKLQASRKTWTFCGTPEYVAPEVIMNRGHDISADYWSLGVLMFELLTGSPPFTGSDPMKTYNKILKGIDAVEFPRCITRNAANLIKKLCRDNPAERLGYQRGGITEIQKHKWFDGFNWEGLAQRSLEPPIVPTVNSAIDTHNFDQYPSEVRSSVSIFDV

SEQ ID NO: 10764 - protein, 486 aa, Asterina pectinifera
  unsure (1)..(486): unsure at all Xaa locations
MLASNLPHIGDAEDSTCTVVKEGWVSKRGEYIKXWRPRYFRLMSNGNFLGYKDKPTTRADLDQKVLNNFSVADCECQVLASEKKDKNIFYVRCLQWTTIVDRTFQVDSATDRDEWMAAIRDVVERVSKTNEEKTAEQNARITDSKSMPKRHTKTLQDFEFLKMLGKGTFGKVLLVREKTGGELYAIKILKKAVIVAKDEVAHTLTESHVLQRTCHPFLTSLKYSFQTTDRLCFVMEYVNGGELFFHLSRERVFSEDRTRFYGAEIISALTYLHECNVIYRDLKLENLLLDQFGHIKITDFGLCKEDLSYGNTTSTFCGTPEYLAPEVLEDSDYGRAVDWWGTGVVMYEMMCGRLPFYSRDHEVLFELILVEEVKFPARLSESARSLLTGLLAKDPTKRLGGGQEDAKEIMEHPFFACINWEDLFNKKIEPPFKPSVKSDTDTRYFDEEFTAEPVELTPPDDNKLSTDSGLPQFEKFSYSGDKGGHL

SEQ ID NO: 10765 - protein, 738 aa, Asterina pectinifera
MPLHQLADPWQKVAVKEQAEGKSSEEMLVDSTNETEDQEMREINITSMAAEGLQKSDPSQFELLKVLGQGSFGKVFLVRKVFGEDSGTLYAMKVLKKATLKVRDRMRTKMERNILVDVNHPFIVKLHYAFQTEGKLYLILDFLRGGDLFTRLSKEVMFTEDDAKLYPAELALALDHLHSLGIIYRDLKPENILLDASGHIKLTDFGLSKESVDNSKTYSFCGTVEYMAPEVVNRRGHTTAADWWSFGVLMFEMLTGALPFQGQHRKETMAMIPKAKLGMPQFLSPEAQSLLRQLFKRNPANRLGAAENGVEDIKKHAFFAHIDFEKLLRKEISPPFKPAVSNADDTFYFDTEFTSRTPKDSPGLPPSASAHQLFRGFSYIAPVLLQEDEMKAATNNTHTQPAKETLPVKHARVTSIAEEYELQDVIGLGSFSKCLRCLHKSSGQQYAVKIIKKGKKEVQEEIEVMLRYGHHPNIITLRDVYDDGQNVYMVMELMKGGELLDKILKKKCLSEREACEIMHVVTKTVDYLHQQRVVHRDLKPSNILYADDSGNPSSLRISDFGFAKQMRADNGMLMTPCYTANFVAPEVLKRQGYDAACDIWSLGVLLYTMLAGYTPFAHGPEDSAEIILARIGEGKFPLNGGNWDHVSPMAEELVRWMLHVDPFKRPSAAKVLQHPWMQHCESLSQNRLTTQDYDLVKGAMKATYLALNNQPKVENLEPVTSSMLAQRRKLKKLSSTTL

SEQ ID NO: 10766 - protein, 963 aa, Pisaster ochraceus
AGFQQNLEYIKEQIKKDIRKELKLKEGAENIRKVTTDKKSIANINNMVKQANIKLHELRQELNELNAHIVVNTDEITAASGDASPMSPVKSDGSTSDDTGAIRTGPTTNSRVFALEKQLAIEMKVKQGAENMIQMYTSGTKDRKLLAEAQQMLQDSKVKIEVIKMEIIKVQQMAGNSFIGDSSNVDGADLGYRRASAADLQLSPLEFRIEELRHHFKIELAVVEGFKNVTKMLSESRSSDKKGLAEAEKGMVESAHKLDILRLALEKRITELPPDHLDKMQQIRDELTSGKSVSYGTLPKPAALTGRLEVRLMGCQDLIESIPNRSKSNSISGGAFSPGESRGLLKGKASFHGRTGSRSSSTRRDELSNDICAILKLDNNPVAQTSFKPISNQCWNQRFSVELDKSRELEISVLYKDWRSLCAVKFLRLEHFLDNQRHGLCLNLEPGGMLFAEITFFNPSIERRTKLQRQRKIFPKYKGKNFLRANQMNINVATWGRLMKRAIPPNCTSPSTLGPAGLGSSLPPPVRERPAIPMQRLSFEGDLPEINQNMETSPKKTNGDPGDKRRVPENELEDVLSAFDFLKSPGSGSAPPTPDLPESESRPIVPSPSTPVPQPSNAVAQHEISSSSFVSMENFRCISVLGRGHFGKVLLAEYKNTGELFAIKALKKGDIIAREEVESLMCESRILETANSMRHPFLVNLFACFQTDAHVCFVMEYAIGGDLMMHIHTDVFSEPRTVFYAACVVLGLQYLHENNIVYRDLKLDNLLLDQEGFLKIADFGLCKEGMGFGDRTSTFCGTPEFLAPEVLTEASYTRAVDWWGLGVLIFEMLVGESPFPGDDEEEVFDSIVNDEVRYPRFLSTEAIAIMRRLLRRNPERRLGSSRRDAEDVKKQAFFRNVQWEELLMRKTTPPFVPNINHPEDVSNFDEEFTQERPVLTPPTRDPRAITDQEQNLFKDFNYTADWC

SEQ ID NO: 10767 - protein, 433 aa, Squalus acanthias
MTIKSSSSGSALTYSKMRGVVAILTAFMKQKRMGLNDLIQKLAASQSYACKHSSEVPAMLHISPAETEMNGTGASPPPSPTTAQINLGPSSNPQAKPSDFNFLKVIGKGSFGKVLLAKHKADDQFYAVKVLQKKAILKKKEEKHIMSERNVLLKNVEHPFLVGLYYSFQTADKLYFVLDYINGGELFYHLQRERCSLEPRARFYAAEIASALGYLHSLKIVYRDLKPENILLDRQGHIVLTDFGLCKENIEPNGTTCTFCGTPEYLAPEVLHKQPYDRTVDWWCLGAVLYEMLYGLPPFYSRNTAEMYDNILNKPLLLKPNISNSARDLLEGLLQKDRTKRLGAKEDFMDIKAHIFFSSINWVDLNAKKLTPPFNPNVSGPADLQHFDPEFTEEPVPNSIGRSPDNALITASVKAASDAFLGFSYAPPMDSFL

SEQ ID NO: 10768 - protein, 594 aa, Squalus acanthias
MKNRTIAGFSVTKCSAFQFLKKRVRRWIRSPKVNVDKHQHTHLNNSDTFVKATPQKDADPQLRCQSTCQECHVCQVMANTQDIEVGVRANGRSCKVKRWKKSDRFNPEKMLAIKTDDPDSCASQMGKVPKLAAQSSIMECHCCQGNITHKTDGSWETRKSAKAKKQCQGELQKHPSAKLFTSNCNPAFMKQKRMGLNDLIQKLAASQSYACKHSSEVPAMLHISPTETEMNGTGASPPPSPTTAQINLGPSSNPQAKPSDFNLLKVIGKGSFGKVLLAKHKADDQFYAVKVLQKKAILKKKEEKHIMSERNVLLKNVKHPFLVGLYYSFQTADKLYFVLDYINGGELFYHLQRERCFLEPRARFYAAEIASALGYLHSLKIVYRDLKPENILLDRQGHIVLTDFGLCKENIEPNGTTCTFCGTPEYLAPEVLHKQPYDRTVDWWCLGAVLYEMLYGLPPFYSRNTAEMYDNILNKPLLLKPNISNSARDLLEGLLQKDRTKRLGAKEDFMDIKAHIFFSSINWVDLNAKKLTPPFNPNVSGPADLQHFDPEFTEEPVPNSIGRSPDNALITASVKAASDAFLGFSYAPPMDSFL

SEQ ID NO: 10769 - protein, 563 aa, Cyprinus carpio
MDIGGLTTVVANSAYISARGSFDGTANPAANRDKKYHAKLKLPHITVCEGLRETLDLQFKSICVEQPIGKRLFQEFLETTNEYKGPCRLWKDIETYDTAEDKDRAQKAAKILQRYMEPSAKHFCPFLPENDITKVKERHEEAADDLFVQIQASVFDFLKEVPFTFYLETMYFKRFLQWKWLEMQPVAEDWFLDFRVLGKGGFGEVSACQMKATGKLYACKKLNKKRLKKRKGYEGAMVEKRILARVHSRFIVSLAYAFQTKTELCLVMTIMNGGDLRYHIYNVDENNPGFSEARACYYAAQIIQGLEHLHQKRIIYRDLKPENVLLDNEGHVRISDLGLAVELADDQLKTKGYAGTPGFMAPELLKGEEYDYSVDYFTLGVTLYEFIAAKGPFRTRGEKVENKEVKKRILNDPVTYPESFSEKAKSVCEGLLAKEVDKRLGFKNGSCDELRTHPFFSEINWRKLDAGILPPPFVPDSKTVYAKNLDDVGAFSTVKGVCLEDDDKTFYDEFASGNISIPWQEEMIETGIYGELNVWGPNGTVPNDLRRESILEQPPKSSTCSIS

SEQ ID NO: 10770 - protein, 563 aa, Oryzias latipes
MDIGGLTTVVANSAYISARGSFDGTANPAANRDKKFHSRLKLPHITVCEGLRETLDLGFQTVCVEQPIGKRLFQEFLDSINEYKGPSRLWKDIEEYNMAEDEDRAKKASKILSRYMEPDAKHYCPFLPENGITKVKEKHKEAGDELFSETMDSVMDFLKEVPYTFFLESMYLKRFLQWKWLEMQPIGEDWFLDFRVLGKGGFGEVSACQMRATGKLYACKKLNKKRLKKRKGYEGAMVEKRILARVHSRFIVSLAYAFQSKTELCLVMTIMNGGDLRYHIYNVDENNPGFDEPRACYYAAQIIQGLEHLHQKRIIYRDLKPENVLLDNEGHVRISDLGLAVELADDQFKIKGYAGTPGFMAPELLNGEEYDYCVDYFTLGVTLYEFLAAKGPFRTRGEKVENKVVKKRILNDPVTYPEKFSENGKSICEGLLCKEADKRLGFKNGSCDELRTHPFFSQINWRKLNAGILPPPFVPDSKTVYAKDLDDVGAFSTVKGVQLEDVDTVFFDEFASGNIAIPWQEEMIETGIYGELTVWGPGGALPNDLRRESILEQPPKSSTCCAS

SEQ ID NO: 10771 - protein, 353 aa, Apis mellifera carnica
MGNNAATANKKVDAAESVKEFLDKAKKEFEDKWKRNPTNTAGLDDFERIKTLGTGSFGRVMIVQHKPTGEYYAMKILDKQKVVKLKQVEHTLNEKRILQAISFPFLVSLRFHFKDNSYLYMVLEYVPGGEMFSHLRKVGRFSEPHSRFYAAQIVLAFEYLHYLDLIYRDLKPENLLIDSQGYLKVTDFGFAKRVQGRTWTLCGTPEYLAPEIILSKGYNKAVDWWALGVLVYEMAAGYPPFFADQPIQIYEKIVSGKPRFPSHFGSDLKDLLRNLLQVDLTKRYGNLKAGVNDIKGHKWFASTDWIAVFQKKIEAPFIPKCKGPGDTSNFDDYEEETLRISLTEKCAKEFAEF

SEQ ID NO: 10772 - protein, 350 aa, Canis familiaris
MGNAAAKKGSEQESVKEFLAKAKEDFLKKWENPAQNTAHLDQFERIKTLGTGSFGRVMLVKHKETGNHFAMKILDKQKVVKLKQIEHTLNEKRILQAVNFPFLVKLEFSFKDNSNLYMVMEYVPGGEMFSHLRRIGRFSEPHARFYAAQIVLTFEYLHSLDLIYRDLKPENLLIDQQGYIQVTDFGFAKRVKGRTWTLCGTPEYLAPEIILSKGYNKAVDWWALGVLIYEMAAGYPPFFADQPIQIYEKIVSGKVRFPSHFSSDLKDLLRNLLQVDLTKRFGNLKNGVNDIKNHKWFATTDWIAIYQRKVEAPFIPKFKGPGDTSNFDDYEEEEIRVSINEKCGKEFCEF

SEQ ID NO: 10773 - protein, 350 aa, Sus scrofa
GNAAAAKKGSEQESVKEFLAKAKEDFLKKWENPAQNTAHLDQFERIKTLGTGSFGRVMLVKHKETGNHFAMKILDKQKVVKLKQIEHTLNEKRILQAVNFPFLVKLEYSFKDNSNLYMVMEYVPGGEMFSHLRRIGRFSEPHARFYAAQIVLTFEYLHSLDLIYRDLKPENLLIDQQGYIQVTDFGFAKRVKGRTWTLCGTPEYLAPEIILSKGYNKAVDWWALGVLIYEMAAGYPPFFADQPIQIYEKIVSGKVRFPSHFSSDLKDLLRNLLQVDLTKRFGNLKDGVNDIKNHKWFATTDWIAIYQRKVEAPFIPKFKGPGDTSNFDDYEEEEIRVSINEKCGKEFSEF

SEQ ID NO: 10774 - protein, 350 aa, Sus scrofa
GNAAAAKKGSEQESVKEFLAKAKEDFLKKWENPAQNTAHLDQFERIKTLGTGSFGRVMLVKHKETGNHFAMKILDKQKVVKLKQIEHTLNEKRILQAVNFPFLVKLEYSFKDNSNLYMVMEYVPGGEMFSHLRRIGRFSEPHARFYAAQIVLTFEYLHSLDLIYRDLKPENLLIDQQGYIQVTDFGFAKRVKGRTWTLCGTPEYLAPEIILSKGYNKAVDWWALGVLIYEMAAGYPPFFADQPIQIYEKIVSGKVRFPSHFSSDLKDLLRNLLQVDLTKRFGNLKNGVNDIKNHKWFATTDWIAIYQRKVEAPFIPKFKGPGDTSNFDDYEEEEIRVSINEKCGKEFSEF

SEQ ID NO: 10775 - protein, 480 aa, Bos taurus
MNDVAIVKEGWLHKRGEYIKTWRPRYFLLKNDGTFIGYKERPQDLEQRESPLNNFSVAQCQLMKTERPRPNTFIIRCLQWTTVIERTFHVETPEEREEWTTAIQTVADGLKRQEEETMDFRSGSPGENSGAEEMEVSLAKPKHRVTMNEFEYVKLLGKGTFGKVILVKEKATAAYYAMKILKKEVIVAKDEVAHTLTENRVLQNSRHPSLTALKYSFQTHDRLCFVMEYANGGELFFHLSRERVFSEDRARFYGAEIVSALDYLHSEKEVVYRDLKLENLMLDKDGHIKITDFGLCKEGIKDGATMKTFCGTPEYLAPEVLEDNDYGRAVDWWGLGVVMYEMMCGRLPFYNQDHEKLFELILMEEIRFPRTLSPEAKSLLSGLLKKDPKQRLGGGSEDAKEIMQHRFFASIVWQDVYEKKLSPPFKPQVTSETDTRYFDEEFTAQMITITPPDQDDSMEGVDSERRPHFPQFSYSASATA

SEQ ID NO: 10776 - protein, 350 aa, Bos taurus
  unsure (1)..(350): unsure at all Xaa locations
GNAAAAKKGSEQESVKEFLAKAKEDFLKKWENPAQNTAHLDQFERIKTLGTGSFGRVMLVKHMETGNHYAMKILDKQKVVKLKQIEHTLNEKRILQAVNFPFLVKLEFSFKDNSNLYMVMEYVAGGEMFSHLRRIGRFSEPHARFYAAQIVLTFEYLHSLDLIYRDLKPENLLIDQQGYIQVTDFGFAKRVKGRTWXLCGTPEYLAPEIILSKGYNKAVDWWALGVLIYEMAAGYPPFFADQPIQIYEKIVSGKVRFPSHFSSDLKDLLRNLLQVDLTKRFGNLKDGVNDIKNHKWFATTDWIAIYQRKVEAPFIPKFKGPGDTSNFDDYEEEEIRVXINEKCGKEFSEF

SEQ ID NO: 10777 - protein, 351 aa, Bos taurus
MGNAAAAKKGSEQESVKEFLAKAKEDFLKKWENPAQNTAHLDQFERIKTLGTGSFGRVMLVKHMETGNHYAMKILDKQKVVKLKQIEHTLNEKRILQAVNFPFLVKLEFSFKDNSNLYMVMEYVPGGEMFSHLRRIGRFSEPHARFYAAQIVLTFEYLHSLDLIYRDLKPENLLIDQQGYIQVTDFGFAKRVKGRTWTLCGTPEYLAPEIILSKGYNKAVDWWALGVLIYEMAAGYPPFFADQPIQIYEKIVSGKVRFPSHFSSDLKDLLRNLLQVDLTKRFGNLKNGVNDIKNHKWFATTDWIAIYQRKVEAPFIPKFKGPGDTSNFDDYEEEEIRVSINEKCGKEFSEF

SEQ ID NO: 10778 - protein, 350 aa, Bos taurus
  unsure (1)..(350): unsure at all Xaa locations
GNAAAAKKGXEQESVKEFLAKAKEDFLKKWENPAQNTAHLDQFERIKTLGTGSFGRVMLVKHMETGNHYAMKILDKQKVVKLKQIEHTLNEKRILQAVNFPFLVKLEFSFKDNSNLYMVMEYVPGGEMFSHLRRIGRFSEPHARFYAAQIVLTFEYLHSLDLIYRDLKPENLLIDQQGYIQVTDFGFAKRVKGRTWXLCGTPEYLAPEIILSKGYNKAVDWWALGVLIYEMAAGYPPFFADQPIQIYEKIVSGKVRFPSHFSSDLKDLLRNLLQVDLTKRFGNLKNGVNDIKNHKWFATTDWIAIYQRKVEAPFIPKFKGPGDTSNFDDYEEEEIRVXINEKCGKEFSEF

SEQ ID NO: 10779 - protein, 682 aa, Bos taurus
RPLFCRKGALRQKVVHEVKSHKFTARFFKQPTFCSHCTDFIWGIGKQGLQCQVCSFVVHRRCHEFVTFECPGAGKGPQTDDPRNKHKFRLHSYSSPTFCDHCGSLLYGLVHQGMKCSCCEMNVHRRCVRSVPSLCGVDHTERRGRLQLEIRAPTSDEIHVTVGEARNLIPMDPNGLSDPYVKLKLIPDPRNLTKQKTRTVKATLNPVWNETFVFNLKPGDVERRLSVEVWDWDRTSRNDFMGAMSFGVSELLKAPVDGWYKLLNQEEGEYYNVPVADADNCNLLQKFEACNYPLELYERVRTGPSSSPIPSPSPSPTDSKRCFFGASPGRLHISDFSFLMVLGKGSFGKVMLAERRGSDELYAIKILKKDVIVQDDDVDCTLVEKRVLALGGRGPGGRPHFLTQLHSTFQTPDRLYFVMEYVTGGDLMYHIQQLGKFKEPHAAFYAAEIAIGLFFLHNQGIIYRDLKLDNVMLDAEGHIKITDFGMCKENVFPGSTTRTFCGTPDYIAPEIIAYQPYGKSVDWWSFGVLLYEMLAGQPPFDGEDEEELFQAIMEQTVTYPKSLSREAVAICKGFLTKHPAKRLGSGPDGEPTIRAHGFFRWIDWDRLERLEIAPPFRPRPCGRSGENFDKFFTRAAPALTPPDRLVLASIDQAEFQGFTYVNPDFVHPDARSPISPTPVPVM

SEQ ID NO: 10780 - protein, 343 aa, Ovis aries
MASNPNDVKEFLAKAKEDFLKKWENPAQNTAHLDQFERIKTLGTGSFGRVMLVKHTETGNHYAMKILDKQKVVKLKQIEHTLNEKRILQAVNFPFLVKLEFSFKDNSNLYMVMEYVPGGEMFSHLRRIGRFSEPHARFYAAQIVLTFEYLHSLDLIYRDLKPENLLIDQQGYIQVTDFGFAKRVKGRTWTLCGTPEYLAPEIILSKGYNKAVDWWALGVLIYEMAAGYPPFFADQPIQIYEKIVSGKVRFPSHFSSDLKDLLRNLLQVDLTKRFGNLKNGVNDIKNHKWFATTDWIAIYQRKVEAPFIPKFKGPGDTSNFDDYEEEEIRVSINEKCGKEFSEF

SEQ ID NO: 10781 - protein, 351 aa, Ovis aries
MGNAAAAKKGSEQESVKEFLAKAKEDFLKKWENPAQNTAHLDQFERIKTLGTGSFGRVMLVKHTETGNHYAMKILDKQKVVKLKQIEHTLNEKRILQAVNFPFLVKLEFSFKDNSNLYMVMEYVPGGEMFSHLRRIGRFSEPHARFYAAQIVLTFEYLHSLDLIYRDLKPENLLIDQQGYIQVTDFGFAKRVKGRTWTLCGTPEYLAPEIILSKGYNKAVDWWALGVLIYEMAAGYPPFFADQPIQIYEKIVSGKVRFPSHFSSDLKDLLRNLLQVDLTKRFGNLKNGVNDIKNHKWFATTDWIAIYQRKVEAPFIPKFKGPGDTSNFDDYEEEEIRVSINEKCGKEFSEF

SEQ ID NO: 10782 - protein, 259 aa, Mus musculus
MAPAEARGALPGWISVLGWGLALCSLCGAGPLWSGSHEWKKLILTQHWPPTVCKEVNSCQDSLDYWTIHGLWPDRAEDCNQSWHFNLDEIKDLLRDMKIYWPDVIHRSSNRSQFWKHEWVKHGTCAAQVDALNSEKKYFGKSLDLYKQIDLNSVLQKFGIKPSINYYQLADFKDALTRIYGVVPKIQCLMPEQGESVQTVGQIELCFTKEDLHLRNCTEPGEQLSSRQEAWLAMEASTHGMMVCEDGPIFYPPPTKTQH

SEQ ID NO: 10783 - protein, 214 aa, Rattus norvegicus
MAEARSTFQGWVSVLGWGLALRCLCGAGPLWSGSHDWKKLILTQHWPPTVCKEVNRCRDSLDYWTIHGLWPDRAEDCNQSWHFNLDEIKDLLRDMKIYWPDVIHPSSNRSQFWKHEWDKHGTCAAQVDALNSERKYFGKSLDLYKQIDLNSVLQKFEIKPSINYYQLADFKDALTRIYGVVPKIQCLMPEQGENVQTIGQIELCFTKEDFHLRN

SEQ ID NO: 10784 - protein, 162 aa, Rattus norvegicus
MKIYWPDVIHPSSNRSQFWKHEWDKHGTCAAQVDALNSERKYFGKSLDLYKQIDLNSVLQKFEIKPSINYYQLADFKDALTRIYGVVPKIQCLMPEQGENVQTIGQIELCFTKEDFHLRNCTEPEEQPSSGQEARLAREASTHGMMVCEDGPIFYPPPKSQH

SEQ ID NO: 10785 - protein, 224 aa, Prunus mume
MAMLKSSLAFLVLAFAFFVCFIMSTGDGSYDYFQFVQQWPPTTCRVRGKCSNPRPIQIFTIHGLWPSNYSNPTTPSNCIGSQFKESMVSPRLRSKLKRSWPNVEGSNDTRFWEGEWNKHGRCSQQTLNQYQYFERSHEMWHFHNITNILKNASIVPHPTQTWTYSDIVSTIKAVTQTTPLVRCKQHKKTQLLHEVVLCFEYKALKQIDCNRTAGCPNQQAISFQ

SEQ ID NO: 10786 - protein, 180 aa, Prunus mume
GFAFFFCYVMSSGSYDYFQFVQQWPPTNCRVRTKCSKPRPLQMFTIHGLWPSNYSNPTMPSNCNGSQFDARKVSPQLRNKLKRSWPDVESGNDTKFWEGEWNKHGTCSEQTLNQFQYFERSQDMWRSYNITEILKNASIVPSATQTWTYSDIVAPIKTATKRTPLLRCKYDKKTQLLHEV

SEQ ID NO: 10787 - protein, 221 aa, Prunus mume
MAILKSTLAFLVLAFAFFFCCVMSTGSYDYFQFVQQWPPTNCKFRKCSKPRPLQRFTIHGLWPSNYSNPTRPSNCTGLQFEARKVYPQLQSDLKISWPDVESGNDTKFWEDEWNKHGKCSEQTLNQRQYFERSHAMWTSFNITEILKNASIVPHPKKTWSYSDIVAPIKTATERTPLLRCKLDKKTQLLHEVVFCYEYKAKKQIDCNRTAGCGHQPAISFQ

SEQ ID NO: 10788 - protein, 183 aa, Prunus mume
GFAFFVCFIMSTGDGSYDYFQFVQQWPPTTCRVRGKCSNPRPIQIFTIHGLWPSNYSNPTTPSNCIGSQFKESMVSPRLRSKLKRSWPNVEGSNDTRFWEGEWNKHGTCSQQTLNQYQYFERSHEMWHFHNITNILKNASIVPHPTQTWTYSDIVSTIKAVTQTTPLLRCKQHKKTQLLHEVV

SEQ ID NO: 10789 - protein, 181 aa, Prunus mume
GFAFFFCYVMSSGSYDYFQFVQQWPPTNCRARRRPCSKPRPLQNFTIHGLWPSNYSNPTMPSNCKGSQFEARKVYPQLQSNLKIAWPDVESGNDTRFWEGEWNKHGRCSEQTLNLMQYFERSYGMWKSYNITEILKNASIVPHPTQTWTYADIVSPIKTATKRTPLLRCRQDKNTQLLHEV

SEQ ID NO: 10790 - protein, 226 aa, Prunus mume
MTTLKSSTALLVLAFAFFFCFIMSTTGSYVYFQFVQQWPPTTCRFSSKPSNQQRRLQIFTIHGLWPSNYSNPRMPSNCTGSQFNFTKVYPQLRSKLKKSWPDVESGNDTRFWESEWNKHGTCSEEKLNQMQYFERSHEMWNFHNITKILENASIVPSATQKWSYSDIVSAIKARTQTTPSLRCKRDKKTQLLHLHEVVLCYEYNALKQIDCNRTATCGNQQAIWFQ

SEQ ID NO: 10791 - protein, 154 aa, Prunus mume
RMPSNCTGSQFNFTKVYPQLRSKLKKSWPDVESGNDTRFWESEWNKHGTCSEEKLNQMQYFERSHEMWNFHNITKILENASIVPSATQKWSYSDIVSAIKARTQTTPSLRCKRDKKTQLLHLHEVVLCYEYNALKQIDCNRTATCGNQQAIWFQ

SEQ ID NO: 10792 - protein, 87 aa, Prunus mume
FVQQWPPTNCRVRTKCSKPRPLQMFTIHGLWPSNYSNPTMPSNCNGSQFDARKVSPQLRNKLKRSWPDVESGNDTKFWEGEWNKHGT

SEQ ID NO: 10793 - protein, 87 aa, Prunus mume
FVQQWPPTTCRVRGKCSNPRPIQIFTIHGLWPSNYSNPTTPSNCIGSQFKESMVSPRLRSKLKRSWPNVEGSNDTRFWEGEWNKHGT

SEQ ID NO: 10794 - protein, 89 aa, Prunus mume
FVQQWPPTNCRVRIKRPCSKPRPLQNFTIHGLWPSNFSNPTKPSNCNGSKYEDRKVYPKLRSKLKRSWPDVESGNDTRFWEDEWNKHGT

SEQ ID NO: 10795 - protein, 142 aa, Antirrhinum graniticum
PYSYCSLKKSHCKRAHLPSEFTIHGLWPDNKSYPLLNCPHTYTVLKIENKGLVKKLRVNWPDLTRLKKFQGQKFWITQWKKHGSCALPLYSFEDYFIKALDLKKKSNVLNMLERKSLVPGDQPVDIGDVTAAVVKVTGGFPL

SEQ ID NO: 10796 - protein, 145 aa, Antirrhinum graniticum
PKSFCSLKTSTCLRSPLPKIFTIHGLWPDNYSWPLRDCKYKVYQLPKLQDGVLLEDLDKKWPDLTKRRRKGEPPDKDFWISQWKKHGSCALSVYKFRDYFDEALNLKNKYNFLTILRENGVIPGDVYDTKRVAGIIHAATKHDPA

SEQ ID NO: 10797 - protein, 144 aa, Antirrhinum graniticum
PKSFCLVNSRKCQRNPLPSNFTIHGLWPDNYTRQAPQSCTTNNFQRFTDTDIEQRMEESWPDLKQPSIAGLSYNFWQDQWRKHGSCCFPPHESEIYFLKALELKDRLDVLTILENNNFNPGTPQPFSVLRVFNTISRAIGKTPI

SEQ ID NO: 10798 - protein, 145 aa, Antirrhinum graniticum
PKSYCSLTTTTCRRNPLPSRFTIHGLWPDNYSWPLNECGFDFDLPVIKDKGLLRKLDKKWPDLTKRKRKPIRDADKKFWMSQWVKHGTCALSVYTFDDYFQETLKLKSRFNLLKILQDSQIRPGDLVDPALVVQAIKKYTKHVST

SEQ ID NO: 10799 - protein, 145 aa, Antirrhinum graniticum
PKSFCSLKTSTCVRTPLPAKFTIHGLWPDNYSWPLRDCKYTIQLPKLEDIDLLKTLDKEWPDLMKRRPRLNEIPKKKFWISQWEKHGSCALSVYSFEEYFQETLKLKRRFNILKILRKNSMRPGDDVDPKKVVSSIAEVTQHDPA

SEQ ID NO: 10800 - protein, 145 aa, Misopates orontium
PKSYCSLTTTTCRRNPLPSRFTIHGLWPDNYCWPLNECGFDFDLPVIKDKGLLRKLDKNWPDLTKRKRKPIRDADKKLWMSQWVKHGTCALSVYTFDDYFQETLKLKSRFNLLKILQDSQIRPGNLVDPALVVQAIKKYTKHVST

SEQ ID NO: 10801 - protein, 144 aa, Antirrhinum majus subsp. cirrhigerum
PKSFCLVNSRKCQRNPLPSNFTIHGLWPDNYTRQAPQSCTTNNFQRFTDTDIEQRMEESWPDLKQQSIAGLSYNFWQDQWRKHGSCCFPPHESEIYFLKALELKDRLDVLTILENNNFNPGTPQPFSVLRVFNTISRAIGKTPI

SEQ ID NO: 10802 - protein, 145 aa, Antirrhinum majus subsp. cirrhigerum
PKSYCSLTTTTCRRNPLPSRFTIHGLWPDNYSWPLNECGFDFDLPVIKDKGLLRKLDKNWPDLTKRKRKPIRDADKKFWMSQWVKHGTCALSVYTFDDYFQETLKLKSRFNLLKILQDSQIRPGNLVDPALVVQAIKKYTKHVST

SEQ ID NO: 10803 - protein, 145 aa, Antirrhinum majus subsp. cirrhigerum
PKSYCSLTTTTCRRNPLPSRFTIHGLWPDNYSWPLNECGFDFDLPVIKDKGLLRKLDKNWPDLTKRKRKPIRDADKKFWMSQWVKHGTCALSVYTFDDYFQETLKLKSRFNLLKILQDSQIRPGNLVDPALVVQVIKKYTKHVST

SEQ ID NO: 10804 - protein, 146 aa, Antirrhinum majus subsp. cirrhigerum
PKSYCSLETSRCLRKPLPSKFTIHGLWPDNYSWPLRDCKYTIQLPKLEDTAGLLDELDKDWPDLTKRRPRPNETPNKKFWISQWEKHGSCALSVYTFEEYFTETLKMKRRFNILGILGKNSMRPGDNVDPKKVVRSISKYTKHDAA

SEQ ID NO: 10805 - protein, 143 aa, Antirrhinum majus subsp. linkianum
PNSYCSLKTSTCRRNPLPLKFTIHGLWPDNYSWPLSDCGYDFTLPDITDKSLLKRLDRNWPDLTKRKNIRKPDKTFWLTQWEKHGTCALSVYTFDDYFRETLNMKRRFNILDMLQRKSMRPGDRVDPQEVARAISKVTKHEPE

SEQ ID NO: 10806 - protein, 225 aa, Malus transitoria
MSRMVYVVTMVFLLIVLILSSSTVGYDYFQFTQQYQLAVCNSNRTLCKDPPDKLFTVHGLWPSSMVGPDPSKCPIKNIRKREKLLEPQLEIIWPNVFDRTKNNLFWDKEWMKHGSCGYPTIDNENHYFETVIKMYITKKQNVSEILSKAKIEPDGKKRTLLDIENAIRNGADNKKPKLKCQKKGRMTELVEVTLCSDKSGEHFIDCPHPFEPISPHFCPTNNIKY

SEQ ID NO: 10807 - protein, 226 aa, Malus transitoria
MGTGIIYMVMMVFSLILLILSSSTVGFDYYQFTQQYQPAVCHSNPTPCKDPPDKLFTVHGLWPSDSNGNDPKYCKAPPYQTIKILEPQLAIIWPNVLNRNDHEGFWRKQWEKHGSCASSPIQNQKHYFDTVIKMYTTQKQNVSEILSKANIKPGRKNRTLVDIENAIRNVINNMTPKFKCQKNTRTSLTELVEVGLCSDSNLTQFINCPRPFPQGSRYFCPTSIQY

SEQ ID NO: 10808 - protein, 118 aa, Witheringia maculata
NWSGRLLHCIPNYTFVKIEIGEKSDILDKSWPQLENTKTDGLKRQTFWERQYKKHGTCCKNKYTKEAYFNLAINLKDRFDILKILSDQGIIPGKKYVVQKVHDAIETVTRQPPKLTCT

SEQ ID NO: 10809 - protein, 226 aa, Syncephalastrum racemosum
ADSCPADALSCSATSGDSCCSPTNGLLVLVQQWLKDYGPNTAFTLHGLWPDTCSGGIPGSGNTGCDSSRNVDDVGSVIKSGDSSLYSQMSQYWPSYTGDNSEFWTHEWNKHGTCVTTLDPDCFGASYTDNEDMFTYFQQAIDLRAKYNLYTILKDAGITPGGSYSVSALESAIEKSTGSTPKITCSSGAISEIWLYFHVKGTDSYVPTDAVDKSTCSGTVIYPAKS

SEQ ID NO: 10810 - protein, 237 aa, Prunus cerasus
MVTLKSSLAFLVLAFALFLCFIMSTGDGSYDYFQFVQQWPPATCSLSRTPCYKPRPPQIFTIHGLWPSNYSNPKRPSNCRGSLFDSRKVYPQLRLNLKISWPNVKSGNDTEFWESEWNKHGRCSEQTLNQMQYFERSDEMWNSYNITEILKKAQIVPNATRTWKYSDILSPIKAATNTTPILRCKPDPAQSKSQPSQPKSPQKPQLLHEVVFCYDYHAKKQIDCNRTGCLNKDISFQ

SEQ ID NO: 10811 - protein, 150 aa, Crataegus monogyna
AVCNSSTTPCKDPADKLFTVHGLWPSNWNGSHPQNCTNKTMNSLTIGNLTAQLETIWPNVLNRNDHLGFWNRQWNKHGTCGAPTINDSLQYFRTVINMYITQKQNVSQILAKANIKPEGKNRTLVDIVTAIRSATNNKAPKLKCQKKAST

SEQ ID NO: 10812 - protein, 139 aa, Crataegus monogyna
AVCNSNPTPCNDPTDKLFTVHGLWPSNKNGPDPEKCKTTALNSQKIGNMTAQLEIIWPNVLNRSDHVGFWEKEWIKHGTCGYPTIKDDMHYLQTVIRMYITQRQNVSAILSKAMIQPNGTNRPLVDIENAIRRGTNNTK

SEQ ID NO: 10813 - protein, 149 aa, Crataegus monogyna
AVCNSNPPPCKDPPDKLFTVHGLWPSNWNGTDPDYCKKTTFDAKRITNLHAELDIIWPNVYDRTDNAGFWGRQWEKHGICGSPTIQDDVNYFETVVNMYITEKQNVSEILSKGTIEPEGKQRAREDILKAIRKGTKGKRPKLKCKKNNR

SEQ ID NO: 10814 - protein, 150 aa, Crataegus monogyna
  unsure (1)..(150): unsure at all Xaa locations
AVCNSNPTPCNDPPDKMFTVHGLWPSNKNGPDPEKCKNIQMNSQKIGNMTAQLEIIWPNVLNRTDHVGFWEREWLKHGTCGYPTIRDDMHYLKTVIKMYITQKQNVSAILSKAMIQPNGKNRSLVAIENAIRSGTNXMKPKFKCQKNTRT

SEQ ID NO: 10815 - protein, 149 aa, Crataegus monogyna
  unsure (1)..(149): unsure at all Xaa locations
AVCYFNPTPCKDPPDKLFTVHGLWPSNLNGHHPENCTNATVNSQRLTNIQAQLKTIWPNVLDRTNNVGFWNKQWIKHGSCGNPPIMXDTHYFQTVINMYITQKQNVSGILSKAKIEPVGGKRPLVDIENAIRKSINNKKPKFKCQMKNK

SEQ ID NO: 10816 - protein, 140 aa, Crataegus monogyna
AACKFHHTPCKDPPDKLFTVHGLWPSNFNGPDPENCKVKPTASQTIDTSLKPQLEIIWPNVFNRADHEGFWQRQWDKHGTCGSPTIIDKNHYFETVIRMYITEKQNVSYILSKANINPDGKGRTRKDIQIAIRNSTNDKE

SEQ ID NO: 10817 - protein, 150 aa, Crataegus monogyna
AVCNSNSIPCKDPPDKLFTVHGLWPSDSNGHDPVNCSKTTVDAQKLGNLTTQLEIIWPNVYKRTDHISFWNKQWTKHGSCGHPTIMNDIHYFQTAIKMYITQNQNVSKILSQAKIEPEGKPRKQVDIVNAIRKGIDDKEPKLKCQKHNQV

SEQ ID NO: 10818 - protein, 139 aa, Crataegus monogyna
AVCNSYRIPCKDPPDKLFTVHGLWPSNWNGYDPIYCKQTNLDANKIAYLQAQLDIIWPNVYNRSDNVGFWSRQWEKHGICGSTTIHDDVNYFETVINMYIAQKQNVSEILSKAKIEPEGKNRTRVEIIKAIRNGTNGKR

SEQ ID NO: 10819 - protein, 150 aa, Crataegus monogyna
AACNSNPTPCNDRTDKLFTVHGLWPSKVKGPDPHDCKTKTNKSQTIDTSLKPQLGIIWPNVFNRADNESFWETQWEKHGTCGSPTIKDKNHYFETVIRMYITEKQNVSHYLSKANINPDGIARKRKDIEIAIRNSTNDKEPKLRCHTKNG

SEQ ID NO: 10820 - protein, 149 aa, Crataegus monogyna
AVCNSSRTPCKDPPDKLFTVHGLWPSSMVGPDPSNCPIKNIRKREKLLEPQLEIIWPNVFDRTKNKLFWDKEWMKHGSCGYPTIDNENHYFETVIKMYITKKQNVSRILSKAKIEPDGKKRALLDIENAIRNGADNKKPKLKCQKKGTT

SEQ ID NO: 10821 - protein, 139 aa, Crataegus monogyna
AVCSSNPTPCKDPPDKLFTVHGLWPSNVNGSEPKKCKTTILNPQTITNLIAQLKIIWPNVLNRKAHVRFWRKEWRRHGTCVYPTIADDMHYFSTVIEMYITKKQNVSEILSKANIKPEKKFRTRDDIVNAISPSIDYKK

SEQ ID NO: 10822 - protein, 138 aa, Crataegus monogyna
  unsure (1)..(138): unsure at all Xaa locations
AVCHFNPTPCXDPPDKLFTVHGLWPSNSTGNDPIYCKNTTLNSTKIANLTAQLEIIWPNVLDRTDHITFWNKQWIKHGSCGHPAIQNDMHYLQTVIKMYITQKQNVSEILSKAKIEPVGRFWTQKEIEKAIRKGPTIR

SEQ ID NO: 10823 - protein, 138 aa, Crataegus monogyna
AVCNSNPTPCNDPPDKMFTVHGLWPSSMVGPDPSNCPIRKFWKREKLLEPQLEIIWPNVFDRTKNKVFWDKEWMKHGTCGYPTIDNENHYFETVIKMYITKKQNVSEILSKAKIEPDGKKRTLLDIENAIRNGADNKK

SEQ ID NO: 10824 - protein, 150 aa, Crataegus monogyna
AVCNSNPTPCNDPPDKLFTVHGLWPSNKNGPDPKKCKNIQMNSQKIGNMTAQLEIIWPNVLNRTDHVGFWEREWLKHGTCGHPTIKGDMHYLKTVIKMYITQKQNVSAILSKAMIQPSGRNRSLVDIENAIRSSTNNMKPKFKCQKNTRT

SEQ ID NO: 10825 - protein, 139 aa, Crataegus monogyna
AVCNSKPTPCKDPTDKLFTVHGLWPSNFNGPHPENCTNTTVNLQRIQNIHAQLKIIWPNVLDRTNHVGFWNKQWIKHGSCGNPPIMNDTHYFQTVINMYVTQKQNVSEILSRAKIEPLGIQRPLVHIEKAIRNSINKKK

SEQ ID NO: 10826 - protein, 142 aa, Antirrhinum meonanthum
PNSYCSLEKSNCRRSRLPLEFTIHGLWPDNKSWPLLNCPYKSIPKIEDKELVKKLDIHWPDLTRRRKRIPEQKFWITQWKKHGTCAFPRYSFKDYFIQAIELKKKNNVLHMLEDKSLVPGDQPVDISDVHAAVLKVTGGAPI

SEQ ID NO: 10827 - protein, 145 aa, Antirrhinum meonanthum
PKSFCSLKTSTCVRTPLPAKFTIHGLWPDNYSWPLRDCKYTIQLPKLEDIDLLKTLDKEWPDLMKRRPRLNEIPKKKFWISQWEKHGSCALSVYSFEEYFQETLKLKRRSNILKILRKNSMRPGDDVDPKKVVSSIAEVTQHDPA

SEQ ID NO: 10828 - protein, 146 aa, Antirrhinum meonanthum
PKSYCSLETSRCLRKPLPSKFTIHGLWPDNYSWPLRDCKYTIQLPKLEDTAGLLDELDKDWPDLTKRRPRPNETPNKKFWISQWEKHGSCALSVYTFEEYFTETLKMKRRFNILGILGKNSMRPGDNVDPKKVVRSISKYTKHDVA

SEQ ID NO: 10829 - protein, 125 aa, Physalis longifolia
EKKGVDKLTFCSAQPNYTLFKDKKMLDDLDKHWIQLMYSKEKGLQKQEFWKRQYEKHGTCCLNRYNQTAYFSLALHLKEKIDLLSTLHNSGIDPGENYTFQEIAKAIKTVTNADSLFKCVKRTTQ

SEQ ID NO: 10830 - protein, 124 aa, Physalis longifolia
DTGRRLIYCIPNYVFLKIEQGEKSDILDKSWPQLEYNKTDGLDKQAFWERQYKKHGTCCKNKYTQEAYFNLAIKLKDRFDVLKILGDQGIIPGNKYAFQKVHDAIKKVIRRPPKLMCTEASQVL

SEQ ID NO: 10831 - protein, 276 aa, Antirrhinum mollissimum
MAVLTARPLNPAAIQCACFVILWIGLLCVNVGINGSGDLGEKLGANQRDFDYFHLALQWPGTFCRRTRHCCPTNGCCRGSNAPAEFTIHGLWPDYNDGSWPSCCTGKKFEEKEISTLLGDLNKYWPSLSCGSPSNCHGGKGLFWEHEWEKHGTCSSSVTGAEYNYFVTALKVYFKYNVTEVLREAGYVASNSEKYPLGGIVTAIQNAFHATPELKCSGDAVEELYLCFYKNFEPRDCATKSNKKSCPRYVSLPEYSSLKMANDGNEVSESALDSDI

SEQ ID NO: 10832 - protein, 232 aa, Antirrhinum mollissimum
LSLIVVGIVLLSKSCTITTAYFQYFRLVLHWPFSYCSLPDSKCKRTPLPSIFTIHGLWPNNYSQPLSDCNILVPFTNIYDQPLLQRMMRSWPDLNQPMNTGPSHNFWSYQWKKHGSCSLPRYSQTSYLFKALELYDRFNVLQILTDGRLAPGDNYTVSQINITIIQEIGAIPTVKCRSGFLTEVVICFDRRGKAVINCPFQFSYPCTDAKVEFPISGPPVTPLLHINIKDRI

SEQ ID NO: 10833 - protein, 235 aa, Antirrhinum mollissimum
MSTNKQTHIFFLVVCLVLFPDYAFTGRPPVGFEYLKLWLQWPPSFCSLSRVACGRDPVPAEFTIHGLWPDNYSHELNYCKSNKQLSVQIEDIGEWLDKDWPDLMKQATVNPDKGFYEEQWRKHRICSSNIFTPKEYFTLGMKLKKARNLLQVFHQNEIYESQFSSISRINKAIKIITGRQSPIVKCSRHPQKGSLLTEVILCFDLKGDYFKNCTDPFGRACPKSTNVFFPKKVIV

SEQ ID NO: 10834 - protein, 314 aa, Anopheles gambiae str. PEST
TELMHTITDRVASSSLRLSNRPSEDGIDRTEHFFGAMKLSIRIICALLFVQLCFAAPNSNRYDDEDSRENSIADVEQDTQVHQFDLLIFTQRWPITACYEWRETGKEHICGLPTPATVWTIHGIWPTKLNTIGPAFCNKSAIFDVSQLSPIEPQLEAHWVNVEKNKPDDSLWEHEWLKHGTCAAEAIEQLNTEAKYFGQGLSWLEQHSVSAAFATNGDIKPGFNYSLPTLNKALYDYYGKNVAIECFFDRKTHQQFLNEVRICFDKQLQSADCDGIVGLERIALPNSRVGTVISNCNAAKPIFYPDAVPKKQEE

SEQ ID NO: 10835 - protein, 238 aa, Aspergillus saitoi
TIDTCSSDSPLSCQTDNEASCCFNSPGGSLLQTQFWDYDPSDGPSDSWTIHGLWPDNCDGSYQEYCDDSREYSNITSILEAQDRTELLSYMKEYWPDYEGADEDESFWEHEWNKHGTCINTIDPSCYTDYYAQEEVGDFFQQVVDLFKTLDSYTALSDAGITPSEDATYKLSDIEDALAAIHDGYPPYVGCEDGALSQLYYYFNVKGSAIGGTYVASERLEDSNCKGSGIKYPPKSSS

SEQ ID NO: 10836 - protein, 200 aa, Magnetospirillum magnetotacticum
MLASTAAQADQCGPVRGRTGNFDYYLLSLSWSPSYCATTSGKQNPRQCGAEQRYGMVVHGLWPQHSDGTWPQCCQPVSAVKSSAATSQASKVMIGSSLLQHEWSKHGSCVTDQQDLYFGKINSAVSSLGLAPNLPGSRLERIKVSDLKRNWAVPADAITVHCKGKRLSEVHICLDKALAPIACPAAEVKNDNCPGTVRLD

SEQ ID NO: 10837 - protein, 215 aa, Petunia integrifolia subsp. inflata
MFNSTFSSVLFILLFSLSPIYGAYYEYMQLVLQWPTAFCHASPTCKVTPNNFTIHGLWPDNVSTTLNYCKSKTGKYNNIKDPTIKNELYKRWPDLTTSETDCLGNQNFWKREYNKHGTCCSGRYNLQQYFHLAMALKDKFNLLTSLTNHGIIPGSNYNVQKINSTIKTITRGYPNLSCTEEMELWEIGICFDSTVKNVIDCPHPKTCNPTIIKFP

SEQ ID NO: 10838 - protein, 221 aa, Petunia integrifolia subsp. inflata
MFRLQLLSALFILLFSLSPVSANFDYFQLVLTWPASFCYPKNFCKRKSNNFTIHGLWPENKHFRLEFCTGDKYSRFKEDNIINVLERHWIQMRFDEKYASTKQPLWEHEYNRHGICCKNLYDQEAYFLLAIRLKDKLDLLTTLRTHGITPGTKHTFGEIQKAIKTVTNNKDPDLKCVENIKGVKELNEIGICFNPAADSFHDCRHSKTCDETDSTQTLFRR

SEQ ID NO: 10839 - protein, 163 aa, Petunia integrifolia subsp. inflata
DNTSRRLNFCSGDKFNTIQDEDKQNALEYRWPNLTTTEAVSKKAQIFWENQYNKHGTCCSELYDKEAYFDLAIELKDKFDLLKILRMHGITPGTSHHTSNQIKNAVKAVTKGVPNVSCFDNFRGTLTELLEIGICFNRAADRVIDCPLPKSCRPKGTKGITFP

SEQ ID NO: 10840 - protein, 222 aa, Petunia integrifolia subsp. inflata
MFKSQLISALFISLFAFSPVCANFDYIQLVLTWPASFCYRPKNICRRIPNNFTIHGLWPEKEHFRLEFCDGDKFVSFSLKDRIVNDLERHWVQMKFDEKFAKIKQPLWTHEYNKHGICSSNLYDQRAYFLLAMRVKDKFDLLTTLRTHGITPGTKHTFGEIQKAIKTVTNNKDPDLKCVEHIKGVKELKEVGICFTPAADSFHDCRHSNTCDETDSTKILFR

SEQ ID NO: 10841 - protein, 163 aa, Petunia integrifolia subsp. inflata
DNTTTRLNFCGGEKFNTIEGDNKRNALEYRWPNLTTTEAVSKQGQVFWENQYNKHGTCCSDLYDQDAYFELAIDLKDKFDLLKILGKHGITPRTSYHTSNNIKMAIRAVTKAVPNISCLDNFRGSLTELSEIGICFNREADRVIDCPLPKSCRPKGTKGITFP

SEQ ID NO: 10842 - protein, 222 aa, Petunia integrifolia subsp. inflata
MVKSRIISVFFIFLFSFSPVYGNFEYLQLVLTWPASFCFRPKNICKRPAKNFTIHGLWPEITGFRLEFCTGSPKYETFKDNNIVDYLERHWVQMKFDENYAKYHQPLWSYEYRKHGMCCSKIYNQKAYFLLATRLKEKFDLLTTLRTHGITPGTKHTFGDIQKAIKTVTNQVDPDLKCVEHIKGVQELNEIGICFNPAADNFYPCHHSYTCDETDSKMILFR

SEQ ID NO: 10843 - protein, 162 aa, Petunia integrifolia subsp. inflata
DNVSVALYNCYPNRKFRPMTDKKDQAELEKRWPDLTSTEYASMRYQSFWKYQYEKHGTCCSDFYSQRAYFDFAINLKDRTDLLTIFRSQGVTPGSTYTGDKINSSIASVTRALPNLKCLYYQGNLELTEIGLCFNRTTVAMMSCPRISTSCKFGTNKAVTFR

SEQ ID NO: 10844 - protein, 163 aa, Petunia integrifolia subsp. inflata
ENKHFRPEYCTGDKFTRFPKEDKIINDLENHWIQMRFDEKYAKDKQPLWGHEYTKHGICCKSLYDQRAYFLLAMRLKDKLDLLTTLRTHGITPGTKHTFGEIQKAIKTVTNNKDPDLKCVQHIKGVKELNEIGICFNQAADSFHDCRHSNTCDETDTTKTLFR

SEQ ID NO: 10845 - protein, 160 aa, Petunia integrifolia subsp. inflata
DKEKHRLQFCTSDKYEIFEGSIRSSLDHHWIQLRYDKEYGLEHQPLWHDQYKKHGTCCSNLYDQRAYFLLAMRLKDKFDLLGTLRTHGITPGRRYTFQSIHSAIKTVTQKDPDLKCVEHIKGVLELNEIGICFTPNADGPYDCPQSRSCQKRGYTGILFR

SEQ ID NO: 10846 - protein, 160 aa, Petunia integrifolia subsp. inflata
DKERQRLQFCTSDKYEIFEGSIRSSLDHHWIQMRYEKEYGLQHQPLWRDQYKKHGTCCKNLYDQTPYFLLAMRLKDKFDLLGTLRTHGITPGKRYTFQKLHSAIKTVTRMDPDLKCVEHIKGVLELNEIGICFTPNADSPYDCPQSRSCQKRGYTGILFR

SEQ ID NO: 10847 - protein, 161 aa, Petunia integrifolia subsp. inflata
DNWSKPLQNCDPLATIDGVLDIEKRSQLDVRWPQLKHSKDDGMNLQPLWKGEYKKHGTCCNNMYNEQAYYDLAMNLKDRFDLLKILSSQGITPGKSYIVQKVQDAIRTVTHQLPRLKCVEYPGLELSEIVICFEPKGKNVVSCRRPGTCFKNGKMGTILYR

SEQ ID NO: 10848 - protein, 164 aa, Petunia integrifolia subsp. inflata
EKEHYRLEFCTGKKYAPFSEKDRIVNDLERHWVQMKFDEHYAKINQPLWNHEYKRHGICCSNLYDQRAYFLLAMRLKEKFDLLTTLRTHGITPGTKHTFGEIQNAIKTVTNNVDPDLKCVQHIKGVPELKEIGICFNPAADSFFQCRHSNTCDETGNTRILFRR

SEQ ID NO: 10849 - protein, 163 aa, Petunia integrifolia subsp. inflata
EKKRYRLEFCPGDKFSRFKEDNIINVLERHWIQMRFDEDYANSKQPLWEHEYNRHGICCKNLYDQKAYFLLAMRLKDKLDLLTTLRTHGITPGTKHTFGEIQKAIKTVTNNNDPALKCVENIKGVMELNEIGICYTPAADRFERCRHSNTCDETSSTKILFRG

SEQ ID NO: 10850 - protein, 161 aa, Petunia integrifolia subsp. inflata
DNQHVMLNNCAKTFQKITNVRKIKELDDRWPDLQKSKSEATRTQSFWQYEYNKHGTCCTERYDRQAYFDLAQNLKDKYDALQILKNHGIIPGKSYAVDKIEEAIRDATQAYPNLNCIGDPQKTMELKEIGICFVPDATKATACHRRRTCNPINNKEIDFPL

SEQ ID NO: 10851 - protein, 161 aa, Petunia integrifolia subsp. inflata
DNESNLLNDCLPKSYQDITDMPTKIKLDNRWPDLKTTKQLCMQDQEFWRYEYNKHGSCSLGPYNQKTYFDLAIKLKDKFDLLAALQNHGINPGSTHTVKEIGSAIESVTKVYPNMKCIGNPAGTMVLLEIGICFVPDATRVIPCYRPVICHNNENKRINIP

SEQ ID NO: 10852 - protein, 164 aa, Petunia integrifolia subsp. inflata
EKKRFRLEFCAGDEYSRFLKEDSIVNDLERHWIQMRFHENCAKDKQPLWEHEYTKHGICCSNLYKQREYFLLAMRLKDKLDLLTTLRTHGITPGTKHTFGEIQKAIKTVTNNNDPDLKCVQNIKGVMELNEIGICYTPAADRLDRCRHSNTCDETSSTKILFRG

SEQ ID NO: 10853 - protein, 236 aa, Bradyrhizobium japonicum USDA 110
MFHSRLHSFSRLMISLTLTFALPLAAGLVLPAGVAKAQDRRQNAPGEFDFYVLSLSWSPSFCEEAAERGGRSQIQCSGRPYSFVVHGLWPQYENGFPEYCQRPAPRLNRSIVSSMLDLMPAPGLIFNEWDKHGTCSGLADRSYFETIRKARAAIKIPAEYLELSQAKTVAPADVEEAFIKANPGLGSAAVSVTCNRTRLSEVRICLSKDLQFRACEEMDRRACRRDQVTMPPIRGG

SEQ ID NO: 10854 - protein, 213 aa, Crassostrea gigas
KDWNYFTFAQQWPIAVCAEHKSCFIPDSVVGWGIHGLWPSSDTESKGPENCNGSWPFDINNVMPLVPELKKYWPNLYPDTKANSFWEHEWSKHGTCATSLPATSNELKYFGMGLKLHAKYNISRILVNQGILPSKTAGYMINETEAAVKRELGVDAVIECVYDKEKTKKQLLYEISICLTKEFELISCNKKEVSETTCPRKEPFFYPPVHDNN

SEQ ID NO: 10855 - protein, 256 aa, Volvox carteri
MVSCLRLLALTSLLCIASGARPLSSISWSGDATSSAIPTAQRDFDYFMFVRQWAGSFCSTHACPLVPNRGFHFTIHGLWPNYSNGSWPQFCTPEDKFDEDQLEDLMDDLEVEWPSVYDSDETFWEHEWSKHGTCALDIFPSEHSYFGHILKLHWRYDLSAALRRADIVPSRTSVYRTKDLIAAIEDMYGARPLVHCGRKRQLSEIWMCLDKDLKAFDCDTSQEGNACQEVVIPPFKSRLDVDQLSSKDEEERDGVQ

SEQ ID NO: 10856 - protein, 68 aa, Atropa belladonna
VAIEDGVGHTPFIECNVDSQGNHQVYQVYLCVDSSASNFIDCPVFPHGGRCGSKIEFPPFSSTDHDEF

SEQ ID NO: 10857 - protein, 222 aa, Petunia axillaris
MFKLQLASVLCVFLFACSPISGSFDHWQLVLTWPAGYCKVKGCPRPVIPNDFTIHGLWPDSISLIMNNCDPTKTFATITEIKQITELEKRWPELTTTAQFALTSQSFWRYQYEKHGTCCFPVYSQSAYFDFAIKLKDKTDLLSILRSQGVTPGSTYTGERINSSSASVTRVKPNLKCLYYRGKLELTEIGICFDRTTVAMMSCPRISTSCKFGTNARITFRQ

SEQ ID NO: 10858 - protein, 219 aa, Petunia axillaris
MLKSQLTSVLSILLLVLSPVYGYFEYFQLVLTWPPYFCHFNNCNRPTPDNFTVHGLWPDNWSKPLQNCDPLATIDGVLDIEKRSQLDERWPQLKHSKDDGMNLQPLWKGEYKKHGTCCNNMYNEQAYYDLAMNLKDRFDLLKILSSQGITPGKSYIVQKVQDAIRTVTHQLPRLKCVEYPGLELSEIVICFEPKGKNVVSCRRPGTCFKNGKMGTILYR

SEQ ID NO: 10859 - protein, 222 aa, Petunia axillaris
MFKWRIVSALIILNFALFKVYGEFDYLQLVLTWPASFCYQPKDICKRTVNNFTIHGLWPEKKGFRLEFCSGGTKYKIFEDNMVKDLERHWLQMKFDENYAKKHQPLWSYQYRKHGMCCYKLYNQNAYFLLAMRLKDKLDLLTTLRTHGITPGTKHTFSEIQKAIKTVTNNKDPDLKCVEHIKGVKELNEIGICFNPAADSFHDCRHSYTCDETDSTKTLFRL

SEQ ID NO: 10860 - protein, 218 aa, Petunia axillaris
MLSSQLMSVAFILFLALSPVYGSFDQLQLVLTWPPSFCHEKSCNRIPRNFTIHGLWPDNQHVMLNDCAKTFKKITDVLKSKELDDRWPDLKYSRNNAIQTQSFWRYEYNKHGTCCSQRYNQQAYFDIAKNLKDKFDLLQILKKKGIIPGKTYTVDKIEEAIREVTQAYPNLNCIGDPQNTMELKEVGICFEPDATTVTACHRRRTCNPQNKKEISFPL

SEQ ID NO: 10861 - protein, 229 aa, Zinnia elegans
MKMQSNYPFMLIKLLTLHSLLALSAAQDFDFFYLVQQWPGSYCDTKQGCCYPSTGKPASDFGIHGLWPNRNDGSYPSNCDSSNPFDASKISDLTSHMQSEWPTLLCPSNNGLAFWGHEWDKHGTCSESVLNQHDYFATTLSLKNEINLLQALRSAGIQPNGQKYSLSSIKTAIKQASGYTPWVECNNDSSGNSQLYQIYLCVDSSASGFIECPVFPKGSCGSSIEFPSF

SEQ ID NO: 10862 - protein, 239 aa, Zinnia elegans
MMKLHGSTLLVIFLVTQSVAILTVAKEFDFFYFVQQWPGSYCDSRRGCCYPKTGKPAEDFSIHGLWPNYVDGTYPSNCDSSNQFDDSKVSNLESELQVHWPTLACPSGDGLKFWRHEWEKHGTCAESIFDERGYFEAALSLKKKANLLNALENAGIRPADGKFHTLDQIKDAITQAVGYEPYIECNVDSSGYHQLYQVYQCVDRSASNFIKCPVLLTGRACGNKVEFPSFSSASSRDEL

SEQ ID NO: 10863 - protein, 229 aa, Nicotiana glutinosa
MASDSATSVFLTLFLITQCLSVLAAAQDFDFFYFVQQWPGSYCDTKQSCCYPKTGKPASDFGIHGLWPNNNDGSYPSNCDSNSPYDQSQVSDLISRMQQNWPTLACPSGTGSAFWSHEWEKHGTCAENVFDQHGYFKKALDLKNQINLLEILQGAGINPDGGFYSLNSIKNAIRSAIGYAPGIECNVDESGNSQLYQIYICVDGSGSNLIECPIFPRGKCGSSIEFPTF

SEQ ID NO: 10864 - protein, 236 aa, Nicotiana glutinosa
MMKPQKSLLVKIFVVQCLLVLCVAQDFDFFYFVQQWPASYCDTRRSCCYPTTGKPDEDFSIHGLWPNYENGKWPQNCDRESSLDESEISDLISTMEKNWPSLACPSSDGVRFWSHEWLKHGTCSALGERAYFQAALDFRKKSNLLENLKNAEITPRNGEHYTLESIKKAIEEGVGHSPYIECNVDTQGNHQIYQVYLCVDKTATDFIDCPIFPHGRGCGSKIEFPPFSSESDHDEF

SEQ ID NO: 10865 - protein, 167 aa, Prunus armeniaca
WPSNYSNPTMPSNCNGSKFDDRNVSPQLRAKLKRSWPDVESGNDTRFWEGEWNKHGTCSEQTLNQMQYFERSQNMWRSYNITEILKNASIVPSATQTWTYSDIVSPIKTATQRTPLLRCKPDPAQNKSAPKPQLLHEVVFCYEYNALKQIDCNRTAGCKNRQAISFQ

SEQ ID NO: 10866 - protein, 160 aa, Prunus armeniaca
WPSNYSNPTMPSNCNGTKFDDRKVYPHMRSKLKISWPDVESGNDTNFWEREWNKHGTCSERTLNQFQYFERSYEMWRSHNITEILKNASIVPHPTQTWTYSDIVSPIKAATKRTPLLRCKYDKNTQLLHEVVFCYEYHALKQIDCNRTAGCKNPQAISFQ

SEQ ID NO: 10867 - protein, 139 aa, Prunus armeniaca
WPSNYSNPTMPSNCNGTKFDDRKVYPQLRSKLRRSWPDVESGNDTKFWESEWNKHGTCSEQTHNQMQYFERSHAMWYSHNITEILKNASIVPHPTQTWTYSDIVSAIKAATKRTPLLRCKPDPAQNKSAPKPQLLHEVV

SEQ ID NO: 10868 - protein, 160 aa, Prunus armeniaca
WPSNYSNPTKPSNCNGTKFDDRKVYPHMRSKLKISWPDVESGNDTNFWEREWNKHGTCSERTLNQFQYFERSYEMWRSHNITEILKNASIVPHPTQTWTYSDIVSPIKAATKRTPLLRCKYDKNTQLLHEVVLCYEYHVLKQIDCNRTAGCENPQAISFQ

SEQ ID NO: 10869 - protein, 151 aa, Sorbus aucuparia
AVCNSNPTPCNDPPDKLFTVHGLWPSNRNGPDPEKCKTTALNSQKIGNMTAQLEIIWPNVLNRSDHVGFWEREWIKHGTCGYPTIKDDMHYLKTVIRMYITQKQNVSAILSKATIQPNGTNRPLVDIENALRRGTNNTKPKFKCQKNSRTT

SEQ ID NO: 10870 - protein, 150 aa, Sorbus aucuparia
AACNSNPIPCKDPPDKLFTIHGLWPSDSNGHDPVNCSQSTVDAQKLGNLTTQLEIIWPNVYNRKDHISFWNKQWNKHGSCGHPTIMNDIHYFQTAIKMYITQKQNVSKILSNAKIEPEGKPRKQIDIVNAILKGTGDKEPKLKCQKNNQV

SEQ ID NO: 10871 - protein, 149 aa, Sorbus aucuparia
AVCHFNPTPCKDPPDKLFTVHGLWPSNSSGNDPIYCKNTTLNSTKIANLTAQLEIIWPNVLDRTDHITFWNKQWNKHGSCGHPAIQNDMHYLQTVINLYITQKQNVSEILSKAKIEPVGKFRTQKEIEKAIRKGTNNKEPKLKCQKNTQ

SEQ ID NO: 10872 - protein, 150 aa, Sorbus aucuparia
AVCYFNPTPCKDPPDKLFTVHGLWPSNLNGPHPENCTNATVNSQRITNIQAQLKIIWPNVLDRTNHVGFWNKQWIKHGSCGNPPIMNDTHYFQTVINMYITKKQNVSGILSKAKIEPVGGKRPLVDIENAIRKSINNKKPKFKCQMKNKV

SEQ ID NO: 10873 - protein, 148 aa, Sorbus aucuparia
AVCNSSRTRCKDPPDKLFTVHGLWPSSMVGPDPSNCPIKNIRKREKLLEPQLEIIWPNVFDRTKNKLFWDKEWMKHGSCGYPTIDNENHYFETVIKMYITRKQNVSGILSKAKIEPDGRKRTLLDIENAIRNGADNKKPKLKCQKKGT

SEQ ID NO: 10874 - protein, 150 aa, Sorbus aucuparia
AVCNSNPTPCKDPPEKLFTVHGLWPSNKNGPDPEKCKNIQMNSQKIGNMAAQLEIIWPNVLNRTDHVGFWEREWLKHGTCGYPTIRDDMHYLKTVIKMYITQKQNVSAILSKAMIQPNGQNRSLVDIENAIRSGTNNMKPKFKCQKNTRT

SEQ ID NO: 10875 - protein, 150 aa, Sorbus aucuparia
AVCNSNPTPCNDPPDKLFTVHGLWPSNVNGSEPKKCKTTILNPQTITNLTAQLEIIWPNVLNRRAHVRFWRKQWRKHGTCAYPTIADDMHYFSTVIEMYITKKQNVSEILSKAKIKPEKKFRTRDDIVNAISQSIDYKKPKLKCKNNNQM

SEQ ID NO: 10876 - protein, 151 aa, Sorbus aucuparia
AVCNSNPTPCKDPADKLFTVHGLWPSNWTGPQPQNCTNTTVNSLTIKLLKAQLEIIWPNVLNRADHVLFWRKQWAKHGTCGSPAIRDDMHYFQTVIKMYITQKQNISKILSKAKIEPEGRSRKVVDIENAIRNGNNNTKPKLKCQNNNNGA

SEQ ID NO: 10877 - protein, 139 aa, Sorbus aucuparia
AVCNSNPTPCKDPPDKLFTVHGLWPSNKNGPDPEKCKNIKMNSQKIGNMTAQLEIIWPNVLNRTDHVGFWEREWLKHGTCGYPTIKDDMHYLKTVIRMYITQKQNVSAILSRATIQPNGQNRSLVDIENAIRSGTNNMK

SEQ ID NO: 10878 - protein, 149 aa, Sorbus aucuparia
AACNSNPTPCKDPPDKLFTVHGLWPSNKIGRDPEYCKTRNRRKRAKTLEPQLGIIWPNVLDRTNHTGFWRRQWKKHGTCGYPTIQNENDYFETVIKMYITEKQNVSRILSNAKIEPDGQSRPLVDVENAIRNGTHNKKPKFKCQKNNGV

SEQ ID NO: 10879 - protein, 143 aa, Sorbus aucuparia
AVCNSNPTPCKDPPEKLFTVHGLWPSNSNGPDPVNCKRKTKVPQAPQPIDATLKPQLEIIWPNVFNRADNESFWNKQWDKHGTCGYPTIKDKNHYFQTVIKMYITQKQNVSQILSKANINPDGLGRTRKLIESAIRNGTNDKE

SEQ ID NO: 10880 - protein, 150 aa, Sorbus aucuparia
AVCNSKPTPCKDPPDKLFTVHGLWPSNLNGPHPENCTNATVNSHRLKNIQAQLKIIWPNVLDRTNHVGFWNKQWIKHGSCGYPAIMNDTHYFQTVINMYITQKQNVSEILSKAKIEPLGIQRPLVHIENAIRNSINNKKPKFKCQKNSGV

SEQ ID NO: 10881 - protein, 148 aa, Sorbus aucuparia
AVCNSNPTPCKDPPDKLFTVHGLWPSTKVGRDPEYCKTKRYRKIQRLEPQLEIIWPNVTDRTANRGFWRKQWYKHGSCASPALPNQEHYFETVIRMFLGEKQNVSRILSKATIEPEGKNRTLLEIQNAIRAGTNNMIPKLKCQKVNGV

SEQ ID NO: 10882 - protein, 150 aa, Sorbus aucuparia
AVCRSNPTPCKDPTDKLFTVHGLWPSNLNGPHPQNCTNATVNSHRIKNIQAQLKIIWPNVLDRTNHLGFWNKQWIKHGSCGNPPIMNDTHYFQTVINMYITQKQNVSEILSKAKIEPLGIQRPLVDIEKAIRNSINKKKPKFKCQNNGGV

SEQ ID NO: 10883 - protein, 150 aa, Sorbus aucuparia
AVCRSNPTPCKDPTDKLFTVHGLWPSNLNGPHPENCTNATVNAHRIKNIQAQLKIIWPNVLDRTNHVGFWNKQWIKHGSCGNPPIMNDTHYFQTVINMYITQKQNVSEILSRAKIEPLGIQRPLVHIDKAIRNSINNKKPKFKCKKNAGV

SEQ ID NO: 10884 - protein, 149 aa, Sorbus aucuparia
AVCNFNPTPCKDPTDKLFTVHGLWPSNSNGNDPKYCNAQQYQTMKILEPQLVIIWPNVLNRNDHEGFWRKQWEKHGSCASSPIQNQKHYFDTVIKMYTTKKQNISEILSKANIKPGRKNRTLVDIENAIRNVINNMTPQFKCQKNTRTS

SEQ ID NO: 10885 - protein, 150 aa, Sorbus aucuparia
AACNSNPTPCKDPPDKLFTVHGLWPSNWILPDPIFCKNTTITPQQIGHIEAQLEIIWPNVFNRTNHLAFWNKQWNKHGSCGYRTINDEIQYFESVIKMYIAKKQNVSKILSKAKIKPEGKNWTRAEIIDAILISTNNMTPKLKCQKNNGT

SEQ ID NO: 10886 - protein, 146 aa, Sorbus aucuparia
AVCNSNPTPCKDPPDKLFTVHGLWPSDSNGNDPKYCKAPPYQTIKILEPQLVIIWPNVLNRNDHEGFWRKQWEKHGSCASSPIQNQKHYFDTVIKMYKTQKQNVSEILSKANIKPGRKNTTLVDIENAIRNVINNMTPKFKCQKNP

SEQ ID NO: 10887 - protein, 214 aa, Luffa cylindrica
MAMAKREIVLVFVLTILFPMVKSQTFDSFWMVQHWPPAVCSFQQGRCVGQGLRSFTIHGVWPQKGGTSVINCPGPTFDFTKISHLESTLNVDWPNVITGNNKWFWGHEWNKHGICSVSKFDQQAYFQMAINMRNSIDLLSALRVGGVVPNGRSKARQRVQSAIRAQLGKEPVLRCRGTGRQSRLLEIVMCFDDDGVTLINCNPANSNCPNSFIF

SEQ ID NO: 10888 - protein, 214 aa, Luffa cylindrica
MATKVLLLATIVLLLTILFLGAESQTFDHFFFVQQWPPTTCQQQQKPCFQPPPATFKIHGLWPQKGPNSVVYCNKNFDRTQISSLENQLDVVWPDVVTGNNTGFWEHEWNKHGSCSESQFNQTLYFQTAINMMNKVNLLKALGKGGITSDERTKSSQTMQKVLLAQFGNQPFLRCKKVGQQFWLLEIVMCFKDDGVTMINCQPSKVSCPPNFIF

SEQ ID NO: 10889 - protein, 191 aa, Momordica charantia
FDSFWFVQQWPPAVCSFQKSGSCPGSGLRTFTIHGLWPQGSGTSLTNCPQGSPFDITKISHLQSQLNTLWPNVLRANNQQFWSHEWTKHGTCSESTFNQAAYFKLAVDMRNNYDIIGALRPHAAGPNGRTKSRQAIKGFLKAKFGKFPGLRCRTDPQTKVSYLVQVVACFAQDGSTLIDCTRDTCGANFIF

SEQ ID NO: 10890 - protein, 190 aa, Momordica charantia
FDSFWFVQQWPPAVCSFQKSGSCPGSGLRTFTIHGLWPQQSGTSLTNCPGSPFDITKISHLQSQLNTLWPNVLRANNQQFWSHEWTKHGTCSESTFNQAAYFKLAVDMRNNYDIIGALRPHAAGPNGRTKSRQAIKGFLKAKFGKFPGLRCRTDPQTKVSYLVQVVACFAQDGSTLIDCTRDTCGANFIF

SEQ ID NO: 10891 - protein, 222 aa, Arabidopsis thaliana
MKFFIFILALQQLYVQSFAQDFDFFYFVLQWPGAYCDSRHSCCYPQTGKPAADFGIHGLWPNYKTGGWPQNCNPDSRFDDLRVSDLMSDLQREWPTLSCPSNDGMKFWTHEWEKHGTCAESELDQHDYFEAGLKLKQKANLLHALTNAGIKPDDKFYEMKDIENTIKQVVGFAPGIECNKDSSHNSQLYQIYLCVDTSASKFINCPVMPHGRCDSRVQFPKF

SEQ ID NO: 10892 - protein, 230 aa, Arabidopsis thaliana
MKILLASLCLISLLVILPSVFSASSSSEDFDFFYFVQQWPGSYCDTQKKCCYPNSGKPAADFGIHGLWPNYKDGTYPSNCDDSKPFDSSTISDLLTSMKKSWPTLACPSGSGEAFWEHEWEKHGTCSESVIDQHEYFQTALNLKQKTNLLGALTKAGINPDGKSYSLESIRDSIKESIGFTPWVECNRDGSGNSQLYQVYLCVDRSGSGLIECPVFPHGKCGAEIEFPSF

SEQ ID NO: 10893 - protein, 230 aa, Arabidopsis thaliana
MKILLASLCLISLLVILPSVFSASSSSEDFDFFYFVQQWPGSYCDTQKKCCYPNSGKPAADFGIHGLWPNYKDGTYPSNCDASKPFDSSTISDLLTSMKKSWPTLACPSGSGEAFWEHEWEKHGTCSESVIDQHEYFQTALNLKQKTNLLGALTKAGINPDGKSYSLESIRDSIKESIGFTPWVECNRDGSGNSQLYQVYLCVDRSGSGLIECPVFPHGKCGAEIEFPSF

SEQ ID NO: 10894 - protein, 228 aa, Arabidopsis thaliana
MGAKGCVNVLLKLLVFQGLFVSRPQEDFDFFYFVLQWPGAYCDTSRACCYPTSGKPAADFGIHGLWPNYNGGSWPSNCDPDSQFDRSQISDLVSSLKKNWPTLSCPSNEGFNFWEHEWEKHGTCSESVMDQHEYFENALKLKQKANLLQILKNSGINPDDGFYNLDKITNAIKDGIGFTPGIECNKDPERNAQLHQIYICVDTSGTEFIECPVLPRGSCPSQIQFSKF

SEQ ID NO: 10895 - protein, 247 aa, Arabidopsis thaliana
MRGIIIVSLLILQSLVVSSSQTEPDFNFFYWVNYWPGAICDSQKGCCPPTKGNTASDFIIHGLWPQFNNGTWPAFCDQTNLFDISKISDLVCQMEKKWTEWGVWACPSNETNLWEHEWNKHGTCVQSIFDQHSYFRTNLKFKHKVHLLNILIQKGIKPNDGFYSLDEIKNAIKCAIGFAPGIECNEDVKGNKQLFQIYICLDNYAKEFVECPYVPDKSCASKIKFPSLPERDSLNESLSVMSSVSTT

SEQ ID NO: 10896 - protein, 248 aa, Arabidopsis thaliana
MRGIIIVSLLILQSLVVSSSQTEPDFNFFYWVNYVMFPTTLTYIYWPGAICDSQKGCCPPTKGNTASDFIIHGLWPQFNNGTWPAFCDQTNLFDISKKWTEWGVWACPSNETNLWEHEWNKHGTCVQSIFDQHSYFRTNLKFKHKVHLLNILIQKGIKPNDGFYSLDEIKNAIKCAIGFAPGIECNEDVKGNKQLFQIYICLDNYAKEFVECPYVPDKSCASKIKFPSLPERDSLNESLSVMSSVSTT

SEQ ID NO: 10897 - protein, 64 aa, Malus x domestica
FTIHGFWPNYNDGSYPSNCDSDNPYDESKDLISRLQADWPTLACPSGNGSKFWAHEWNKHGTCS

SEQ ID NO: 10898 - protein, 227 aa, Malus x domestica
MGITGMIYMFTMVFSLIVLILSSSTVGYDYFQFTQQYQPAVCNSNPTPCNDPPEKLFTVHGLWPSNKNGPDPEKCKNIQMNSQKIGNMAAQLEIIWPNVLNRTDHVGFWEREWLKHGTCGYPTIRDDMHYLKTVIKMYITQKQNVSAILAKAMIQPNGQNRSLVDIENAIRSGTNNMKPKFKCQKNTRTTTELVEVTLCRDRDLTKFINCPQPPQGSRYLCPADVQY

SEQ ID NO: 10899 - protein, 200 aa, Malus x domestica
YDYFQFTQQYQPAVCNSNPTPCNDPPEKLFTVHGLWPSNKNGPDPEKCKNIQMNSQKIGNMAAQLEIIWPNVLNRTDHVGFWEREWLKHGTCGYPTIRDDMHYLKTVIKMYITQKQNVSAILAKAMIQPNGQNRSLVDIENAIRSGTNNMKPKFKCQKNTRTTTELVEVTLCRDRDLTKFINCPQPPQGSRYLCPADVQY

SEQ ID NO: 10900 - protein, 228 aa, Malus x domestica
MGTTRMVYIVTMLFSLIVLILSSSTVGYDYFQFTQQYQPAACNSNPTPCKDPPDKLFTVHGLWPSNMNRSELFNCSSSNVTYAKIQNIRTQLEMIWPNVFNRKNHLGFWNREWNKHGACGYPTIRNDLHYFQTVIKMYITQKQNVSDILSKAKIEPDGNIRTQKEIVDAIRKGIHGKEPNLKCQKNTQMTELVEVTLCSDGNLKQFIDCPHHFPNGSRHNCPTNHILY

SEQ ID NO: 10901 - protein, 227 aa, Malus x domestica
MGITGITYVVTMVFSLIVLILSSYTAGYDYFQFTQQYQPAVCNSNPTPCKDPPDKLFTVHGLWPSNSTGRDPKYCNPSNVTSHMLKNIQAQLEIIWPNVLNRTDHIGFWERQWKKHGSCGRPAITNEVDYFQTVIKMYITQKQNVSKILSKAKIEPEGRIRMLKDIEDAIRNGTNNKKPKLKCQKNSRMTELVEVTLCRDSNLTQFINCPSPILPGSPFLCPANIRY

SEQ ID NO: 10902 - protein, 227 aa, Malus x domestica
MGITRMIYMVTMLFSLLVSILSSSTVGFDYFQFTQQYQPAACNSNPTPCKDPTDKLFTVHGLWPSNKIGRDPEYCKTRNRRKRAKTLEPQLEIIWPNVLDRTNHTGFWRRQWKKHGTCGYPTIQNENDYFETVIKMYITEKQNVSRILSNAKIEPDGQSRPLVDIENAIRNGTHNKKPKFKCQKNNGVTELVEITLCSDKNRAHFIDCPNPFLPGSPYLCPNISIRY

SEQ ID NO: 10903 - protein, 228 aa, Malus x domestica
MGITGMIYMVTMVFSLIVLILSSPTVGYDYFQFTQQYQPAVCHFNPTPCRDPPDKLFTVHGLWPSNSSGNDPIYCKNTTMNSTKIANLTARLEIIWPNVLDRTDHITFWNKQWNKHGSCGHPAIQNDMHYLQTVIKMYITQKQNVSEILSKAKIEPVGKFRTQKEIEKAIRKGTNNKEPKLKCQKNSQRTELVEVTICSDRNLNQFIDCPRPILNGSRYYCPTNNILY

SEQ ID NO: 10904 - protein, 228 aa, Malus x domestica
MGITGMIYMVTIVFSLIVLLLSSSAARYDYFQFTQQYQLAACNSKPIPCKDPPDKLFTVHGLWPSDSNGHDPVNCSKSTVDAQKLGNLTTQLEIIWPNVYNRTDHISFWDKQWNKHGTCGHPTIMNDIHYFQTVIKMYITQKQNVSKILSRAKIEPEGKPRKQVDIVNAIRKGTNDKEPKLKCQKNNQVTELVEVTLCSNRNLTGFINCPRHIPNGSRYSCPTKNILY

SEQ ID NO: 10905 - protein, 228 aa, Malus x domestica
MGITGMIYMVTMVFSLIVLMLSSSAVKFDYFQFTQQYQPAVCNSNPTPCKDPPDKLFTVHGLWPSNVNGSDPKKCKATILNPQTITNLKAQLEIIWPNVLNRRAHVRFWRKQWRKHGACGYPTIADDMHYFSTVIEMYITKKQNVSEILSKAKIKPEGRFRTRDDIVNAISQSIDYKKPKLKCKINNQTTELVEVGLCSDNNLTQFINCPNPFPQGSPYFCPTNNIRY

SEQ ID NO: 10906 - protein, 228 aa, Malus x domestica
MGITGMIYMVTMVFSLIVLMLSSSAVKFDYFQFTQQYQPAVCNSNPTPCKDPPDKLFTVHGLWPSNVNGSDPKKCKATILNPQTITNLKAQLEIIWPNVLNRRAHVRFWRKQWRKHGACGYPTIADDMHYFSTVIEMYITKKQNVSEILSKAKIKPEGRFRTRDDIVNAISQSIDYKKPKLKCKINNQTTELVEVGLCSDNNLTQFINCPNPFPQGSPYFCPTNNIQY

SEQ ID NO: 10907 - protein, 228 aa, Malus x domestica
MGITGMIYMVTMVFSLIVLILSSSAVKFDYFQFTQQYQPAVCSSNPTPCKDPPDKLFTVHGLWPSNVNGSDPKKCKTTILNPQTITNLTAQLEIIWPNVLNRKAHARFWRKQWRKHGTCGYPTIADDMHYFSTVIEMYITKKQNVSEILSKAKIKPEKKFRTRDDIVNAISQSIDYKKPKLKCKNNNQITELVEVGLCSDNNLTQFIDCPRPFPQGSPFFCPTNNIQY

SEQ ID NO: 10908 - protein, 227 aa, Malus x domestica
MGITGMISMITMVFSLLVLILSSSTVGFDYFQFTQQYQPAVCNFNPTPCKDPTDKLFTVHGLWPSNNVGGDPESCKIRNHRTRAKALEPQLEIIWPNVLDRTNHTAFWRRQWIKHGTCGYPTIQNENDYFETVVKMYITEKQNVSKILSNAKIEPDGIKRTLADLEIAIRSGTDNKKPKFKCQKKRRVTELVEVTLCSDKNRAHFIDCPNPFQPGSPYLCPTNNILY

SEQ ID NO: 10909 - protein, 228 aa, Malus x domestica
MGIMGMIYMVMMVFSLIVLILSSSTVGFDYFQFTHQYQPAVCNSNRTPCKDPPDKLFTVHGLWPSNRNGPDPEYCKNTTLDVTKIGNLQAQLDIIWPNVYDRTNNVGFWSKQWAKHGICGSPTIQDDVNYLETVINLYIIKKQNVFEILSNAKIEPEGKNRTRKDIVKAIRSGTKGKRPKLKCQKNNRTTELVEVTLCSDRNLTQLINCPNLIKPKSPYFCPLKSIQY

SEQ ID NO: 10910 - protein, 179 aa, Malus x domestica
DPPDKLFTVHGLWPSNFNGPDPENCKVKPTASQTIDTSLKPQLEIIWPNVFNRADHESFWQKQWDKHGTCGSPTIIDKNHYFETVIRMYITEKQNVSYILSKANINPDGKGRTRKDIQIAIRNSTNDKEPKLKCQTKNGITELVEVSLCSNYFGKNFINCPNKTPGKTRYSCPTNDIHY

SEQ ID NO: 10911 - protein, 169 aa, Malus x domestica
HGLWPSNSSGNDPIYCKNTTMNSTKIANLTARLEIIWPNVLDRTDHITFWNKQWNKHGSCGHPAIQNDMHYLQTVIKMYITQKQNVSEILSKAKIEPVGKFRTQKEIEKAIRKGTNNKEPKLKCQKNSQRTELVEVTICSDRNLNQFIDCPRPILNGSRYYCPTNNILY

SEQ ID NO: 10912 - protein, 226 aa, Malus x domestica
MGTGMIYMVMMVFSLILLILPSSTVGFDYYQFTQQYQPAVCNSNPTPCKDPTDKLFTVHGLWPSNSNGNDPKYCNAQQYQTMKILEPQLVIIWPNVLNRNDHEGFWRKQWEKHGSCASSPIQNQKHYFDTVIKMYTTQKQNISEILSKANIKPGRKNRTLVDIENAIRNVINNMTPQFKCQKNTRTSLTELVEVGLCSDSNLTQFINCPRPFPRGSRYFCPTNIQY

SEQ ID NO: 10913 - protein, 179 aa, Malus x domestica
KDPPDKLFTVHGLWPSDSNGHDPVNCSKSTVDAQKLGNLTTQLEIIWPNVYNRTDHISFWDKQWNKHGTCGHPTIMNDIHYFQTVIKMYITQKQNVSKILSRAKIEPEGKPRKQVDIVNAIRKGTNDKEPKLKCQKNNQVTELVEVTLCSNRNLTGFINCPRHIPNGSRYSCPTKNILY

SEQ ID NO: 10914 - protein, 226 aa, Malus x domestica
MGTGIIYMVMMVFSLILLILSSSTVGFDYYQFTQQYQPAVCHSNPTPCKDPPDKLFTVHGLWPSDSNGNDPKYCKAPPYQTIKILEHQLAIIWPNVLNRNDHEGFWRKQWEKHGSCASSPIQNQKHYFDTVIKMYTTQKQNVSEILSKANIKPGRKNRTLVDIENAIRNVINNMTPKFKCQKNTRTSLTELVEVGLCSDSNLTQFINCPRPFPQGSRYFCPTSIQY

SEQ ID NO: 10915 - protein, 226 aa, Malus x domestica
MVTGMIYVVMMVFSLILLILSSSTVGFDYYQFTQQYQPAVCNSNPTPCKDPPDKLFTVHGLWPSNSNGNDPEYCKAPPYHTIKMLEPQLVIIWPNVLNRNDHEGFWRKQWDKHGSCASSPIQNQKHYFDTVIKMYTTQKQNVSEILSKANIKPGRKNRPLVDIENAIRNVINNMTPKFKCQKNTRTSLTELVEVGLCSDSNLTQFINCPRPFPQGSRNFCPTNIQY

SEQ ID NO: 10916 - protein, 193 aa, Malus x domestica
MGFTGMIYMVTMVFSLIVLILSSSTVGFDYFQFTQQYQPAVCNFTATPCKDPPDKLFTVHGLWPSNAKGNDPEGCKTQKYQKMQILEPQLEIIWPNVYNRTANEVFWRKQWYKHGSCASPPLQNQTHYFETVIKMYRTQKQNVSYILSKANIEPKGEKRTRVDIENAIRSGTNNMVPKLKCQTNGRMTELVEV

SEQ ID NO: 10917 - protein, 152 aa, Malus x domestica
ACNSNPTPCKDPPAKLFTVHGLWPSNWNLPDPIFCKNTTITPQQIGHIEAQLEIIWPNVFNRTNHLVFWNKQWNKHGSCGYPIINDEIQYFETVIKMYIIKKQNVSKILSRAKIKPEGKNRTRTEIINAISISTNNMTPKLKCQKNNGTIEL

SEQ ID NO: 10918 - protein, 226 aa, Prunus dulcis
MKSNSSTLIKLLVLGCLSVVCVAEDFDFFYFVQQWPGSYCDTKKSCCYPTTGKPAADFGIHGLWPNYKDGSYPSNCDPSNPFDQSEISDIRSSMQKEWPTLACPSGSGIEFWTHEWEKHGTCSESVIDQHGYFAAALNLKKKLSLLQALESAGIQPNGDSYSLGNIKDAVKSATGFTPFIECNVDESGNSQLYQVYFCVDTSGSDLIECPVFPHGKCGSQIEFPSF

SEQ ID NO: 10919 - protein, 227 aa, Prunus dulcis
MRFSTSLILIKLFVIQYLSVLCVSQDFDFFYFVQQWPGAYCDTKQTCCYPKSGKPSADFGIHGLWPNYKDGSYPSNCDPDSVFDKSEISELTSNLEKNWPSLTCPSSNGFRFWSHEWEKHGTCSESELDQKDYFEAALKLKQKVNLLQILKTAGIVPDDGMYSLESIKEAIKEGAGYTPGIECNKDSAGNSQLYQVYLCVDTSGQDIIECPVLPKGRCASDVQFAKF

SEQ ID NO: 10920 - protein, 227 aa, Prunus dulcis
MAMLKLSLAFHVLAFVLFLCFTMSTGSYQYFQFVQQWPPTTCAVSKQPCYQNPPSIFTIHGLWPSNYSKKAWVANCTRTRFNNSLAPKLEAKLKISWPNVENANYTEFWEREWNKHGTCSEQTLDQEEYFQRSHDIWNAYNITNILKKANILPNGAIWNYSDIVSPIKTVTRKMPALRCKPDPTKPKNHKISHQLLHEVVLCLHYKGRALIDCNRTACDNNLKILFQ

SEQ ID NO: 10921 - protein, 227 aa, Pyrus pyrifolia
MRYSNTLILIKLLIIQYLSVLCVSQDFDFFYFVQQWPGAYCDTKHTCCYPKSGKPTADFGIHGLWPNYKDGGYPSNCDPDSVFDKSQISELLTSLNKNWPSLSCPSSNGYRFWSHEWEKHGTCSESELDQKEYFEAALKLREKVNLLQILKNAGIVPNDELYNLESIVEAIKVGVGHTPGIECNKDSAGNSQLYQIYLCVDTSGQDIIECPLLPKGRCASKIQFPKF

SEQ ID NO: 10922 - protein, 228 aa, Pyrus pyrifolia
MGITGMIYMVTMVFSLIVLILSSSKAQQYDYFQFTQQYQPAVCNSNPTPCKDSPDKLFTVHGLWPSNSSGPHPHNCTNTTVKSQTIRSLKAQLEIIWPNVLNRNDHVGFWSRQWGKHGTCASPALKSDMQYFQTVINMYTTQKQNVSRILSKANIKPNGTTKALTDIQNAIRNGNNNTMPKLKCKNNSGIPELVEVSFCSDSNLTRFINCPHPFLPGSPYFCPGHVQY

SEQ ID NO: 10923 - protein, 228 aa, Pyrus pyrifolia
MGVTGMTYMFTMVFSLIVLILSSSTVGYDYFQFTQQYQPAVCNSNPTPCNDPTDKLFTVHGLWPSNRNGPDPEKCKTTALNSQKIGNMTAQLEIIWPNVLNRSDHVGFWEKEWIKHGTCGYPTIKDDMHYLQTVIRMYITQKQNVSAILSKAAIQPNGTNRPLVDIENAIRRGTNNTKPKFKCQKNTRTTTELVEVTLCSDRDLKKFINCPHGPPQGSRFSCPSSVQY

SEQ ID NO: 10924 - protein, 226 aa, Pyrus pyrifolia
MGITGMIYIVTMVFSLIVLILSSSTVGYDYFQFTQQYQPAVCNSKPTPCKDPPDKLFTVHGLWPSNLNGPHPENCTNATVNPHRIKNIQAQLKIIWPNVLDRTNHVGFWNKQWIKHGSCGYPAIMNDTHYFQTVINMYITQKQNVSEILSKAKIEPLGIQRPLVHIENAIRNSTNNKKPKFKCQKNSGVTELVEVGLCSDGSLTQFRNCPHPPPGSPYLCPADVKY

SEQ ID NO: 10925 - protein, 227 aa, Pyrus pyrifolia
MGITGMVYVVTMVFLLIVLILSSSTVGYDYFQFTQQYQLAVCNSNRTPCKDPPDKLFTVHGLWPSSMAGPDPSNCPIRNIRKREKLLEPQLAIIWPNVFDRTKNKLFWDKEWMKHGTCGYPTIDNENHYFETVIKMYISKKQNVSRILSKAKIEPDGKKRALLDIENAIRNGADNKKPKLKCQKKGTTTELVEITLCSDKSGEHFIDCPHPFEPISPHYCPTNNIKY

SEQ ID NO: 10926 - protein, 228 aa, Pyrus pyrifolia
MGITGMTYMFTMVLSLIVLIFSASTVGFDYFQFTQQYQPAVCNSNPTPCNDPTDKLFTVHGLWPSNRNGPDPEKCKTTTMNSQKIGNMTAQLEIIWPNVLNRSDHVGFWEREWLKHGTCGYPTIKDDMHYLKTVIKMYITQKQNVSAILSKATIQPNGNNRSLVDIENAIRSGNNNTKPKFKCQKNTRTTTELVEVTLCSNRDLTKFINCPHGPPKGSRYFCPANVKY

SEQ ID NO: 10927 - protein, 223 aa, Pyrus pyrifolia
MTYMFTMVLSLIVLIFSASTVGFDYFQFTQQYQPAVCNSNPTPCNDPTDKLFTVHGLWPSNRNGPDPEKCKTTTMNSQKIGNMTAQLEIIWPNVLNRSDHVGFWEREWLKHGTCGYPTIKDDMHYLKTVIKMYITQKQNVSAILSKATIQPNGNNRSLVDIENAIRSGNNNTKPKFKCQKNTRTTTELVEVTLCSNRDLTKFINCPHGPPKGSRYFCPANVKY

SEQ ID NO: 10928 - protein, 222 aa, Pyrus pyrifolia
MVHVVMMVFLLIVLILCSSTVGYDYFQFTQQYQLAVCNSNRTLCKDPPDKLFTVHGLWPSNMVGPDPSKCPIKNIRKREKLLEHQLEIIWPNVFDRTKNNLFWDKEWMKHGSCGYPTIDNENHYFETVIKMYISKKQNVSRILSKAKIEPDGKKRALLDIENAIRNGADNKKPKLKCQKKGTTTELVEITLCSDKSGEHFIDCPHPFEPISPHYCPTNNIKY

SEQ ID NO: 10929 - protein, 227 aa, Pyrus pyrifolia
MGITGMVHVVMMVFLLIVLILCSSTVGYDYFQFTQQYQLAVCNSNRTLCKDPPDKLFTVHGLWPSNMVGPDPSKCPIKNIRKREKLLEHQLEIIWPNVFDRTKNNLFWDKEWMKHGSCGYPTIDNENHYFETVIKMYISKKQNVSRILSKAKIEPDGKKRALLDIENAIRNGADNKKPKLKCQKKGTTTELVEITLCSDKSGEHFIDCPHPFEPISPHYCPTNNIKY

SEQ ID NO: 10930 - protein, 200 aa, Pyrus pyrifolia
YDYFQFTQQYQLAVCNSNRTLCKDPPDKLFTVHGLWPSNMVGPDPSKCPIKNIRKREKLLEHQLEIIWPNVFDRTKNNLFWDKEWMKHGSCGYPTIDNENHYFETVIKMYISKKQNVSRILSKAKIEPDGKKRALLDIENAIRNGADNKKPKLKCQKKGTTTELVEITLCSDKSGEHFIDCPHPFEPISPHYCPTNNIKY

SEQ ID NO: 10931 - protein, 226 aa, Pyrus pyrifolia
MRITGMIYIFTMVFSLNVLILSSSAARYDYFQFTQQYQQAFCNSNPTPCKDPPDKLFTVHGLWPSTKVGRDPEYCKTKRYRKIQRLEPQLEIIWPNVSDRKANRGFWRKQWYKHGSCASPALPNQKHYFETVIRMFLAEKQNVSRILSMATIEPEGKNRTLMEIQNAIRAGTNNMIPKLKCQKVNGMTELVEVTLCHDSNLTQFINCPRPLPQASPYFCPIDDIQY

SEQ ID NO: 10932 - protein, 221 aa, Pyrus pyrifolia
MIYIFTMVFSLNVLILSSSAARYDYFQFTQQYQQAFCNSNPTPCKDPPDKLFTVHGLWPSTKVGRDPEYCKTKRYRKIQRLEPQLEIIWPNVSDRKANRGFWRKQWYKHGSCASPALPNQKHYFETVIRMFLAEKQNVSRILSMATIEPEGKNRTLLEIQNAIRAGTNNMIPKLKCQKVNGMTELVEVTLCHDSNLTQFINCPRPLPQASPYFCPIDDIQY

SEQ ID NO: 10933 - protein, 226 aa, Pyrus pyrifolia
MRITGMIYIFTMVFSLNVLILSSSAARYDYFQFTQQYQQAFCNSNPTPCKDPPDKLFTVHGLWPSTKVGRDPEYCKTKRYRKIQRLEPQLEIIWPNVSDRKANRGFWRKQWYKHGSCASPALPNQKHYFETVIRMFLAEKQNVSRILSMATIEPEGKNRTLLEIQNAIRAGTNNMIPKLKCQKVNGMTELVEVTLCHDSNLTQFINCPRPLPQASPYFCPIDDIQY

SEQ ID NO: 10934 - protein, 229 aa, Pyrus pyrifolia
MGITGMIYMVPMVFSLIVLISCSSTMGYNYFQFTQQYQPAVCNSNPTPCKDPPDKLFTVHGLWPSNDVGDDPIYCKNKTIKSQQIGNLTAQLIIIWPNVLDRTDHVGFWNRQWNKHGSCGKAPTIKDEMHYFKTVIKMYITQKQNVSEILSRAKIEPEGKIRRRDDIINAIRLGTKDKKPKLKCQKNNQTTELVEITICSDRNLTQFIDCPRSSFKGSPFHCPTNHILY

SEQ ID NO: 10935 - protein, 310 aa, Mesorhizobium loti
MSGTFVADAACPATQAIKNGKNPGNVSTEAGQSYQLLAGNKDAPTHYLILVPRADPERRWVKVTCGHLSGSSAATVPAAPGGQGKPAASGKPEYVFALSWQPAFCETKSSKTECRAQNPSEFDATNFTLHGLWPQPNGNFYCQVAASDKANDNPAHWKDLPPVNLDAGTRKELDQVMPGTASQLERHEWIKHGTCYGKSQQEYFSDALGLMRQVNASPVRDLFAKTIGGKLTADQIRGAFDTAFGAGAGDRVRVSCVIDPSNGRRLIGELTLGLAGPIGPNASLKDLLLASVPTNKAGCPIGTVDAIGFQ

SEQ ID NO: 10936 - protein, 229 aa, Cicer arietinum
MEFQGSILIKAILVLQCFSILCASQSQDFDFFYFVQQWPGSYCDSKKACCYPTTGKPDADFGIHGLWPNYKDGTYPSNCDPSKPFDESQISGLTSSLQKNWPTLACPSGDGITFWTHEWEKHGTCSESVLNQHDYFETTLNLKQKANLLKALTSAGINADGGSYSLSNIKTAIQDGVGFAPFIECNRDSSGNSQLYQVYLCVDNSGSDFIDCPVFPHGKCGPEIEFPTF

SEQ ID NO: 10937 - protein, 226 aa, Glycine max
MESKESIFVKLLLILHLSVLCVSQDFDFYYFVQQWPGSYCDTKNSCCYPTTGKPAADFGIHGLWPNYKDGSYPSNCDSNNRFQPSQISDLTSSLQRNWPTLACPSGNGVQFWTHEWEKHGTCSQSVLKQHDYFETALDLKQRANLLQALTNAGIQPDGGFYSLSSIKGAIKNAIGYTPYIECNVDTSRNNQLYQVYLCVDTSGSNFIECPVFPRGKCGSQVEFPTF

SEQ ID NO: 10938 - protein, 241 aa, Glycine max
ERNREIEGKKASKISESANFSFLSKLLILQYLSVLCISQEFDFFYFVQQWPGAYCDTKQSCCYPKTGKPAADFSIHGLWPNFKDGSWPSNCDPDSVFDKSQISDLISNMEKDWPSLSCPSSNGMRFWSHEWEKHGTCAESELDQREYFETTLKLKQKVNLLRILKNAGIEPDDEIYTLERVTEAIKKGTGFTPGIECNRDSARNSQLYQVYMCVDTSGSNLIECPVLPRSRCGEQIQFPKF

SEQ ID NO: 10939 - protein, 229 aa, Glycine max
  unsure (1)..(229): unsure at all Xaa locations
MISISTIAIKLLMLLSFGNIWISRDFDFFYFVQQWPGSFCDTKKSCCFPLTXGKPVSNFSIHGLWPNFSNGSFPSNCNIAENPFNQSKITDLIPRAEKGWASLSCAGSKKTEFWKHEWDKHGTCSDLILDQHAYFEATLNLKDRVDLLQILQYNGIKPDGNLYSIVNITKAITQAIGLEPGITCNTDPSGNRQLNEIYLCADKYASSFIECPILPSRKSCTDMVEFPIF

SEQ ID NO: 10940 - protein, 130 aa, Glycine max
MEFKGSVFIKLLLLLHFFSVLCASQDFDFFYFVQQWPGSYCDTQKSCCYPTKGKPAADFGIHGLWPNYNDGKYPSYCDPNNPFNPSGISDLTSSLESNWPTLACPSGDGIEFWTHEWDIHGTCSESVLKH

SEQ ID NO: 10941 - protein, 306 aa, Pisum sativum
MISIIPIILIHTLFYVGFSDDMPLTTTLPQSPTSPLPHFHLYNQNSNSYPSSTPLEESKRRSPPPRRRSPPPPPRRSPPPPPRRSSPPPPPPRIRSPPPPRPPPPPPPPLLFDHFKLSQTWPPTYCKLKNNDCVSPLPQKFTIHGLWPSKEGVEIRDCNKEGINVNDFVPIKTRLNENWPALFKKDHQEDANIQLWVNQWYAHGTCSDQLFKFISYFEETLNVYDRHIILDILEKNGTKPGGTYPKQNILNANQTHTLFRPQIRCERIDNLDYLYEIRLCLTPTLKLEYKDCEIPYSGCRDTEVYF

SEQ ID NO: 10942 - protein, 218 aa, Oryza sativa (japonica cultivar-group)
MAAAARATARVGLALLLAVVGVGAQDYDFFFLVLQWPGSYCDTKQSCCYPRSGKPAADFGIHGLWPNRDDGSYPQNCDPDSEFDPSKVSDLLGSMRSEWPTLACPSNDGIRFWAHEWEKHGTCAAAALGDEHGYFEAALRLRSRLPVLAALRDGGVSPDGGYYTLSQIKGAIQRGVGAEPFVECNRDESGNSQLYQLYFCVDAAGERFVDCPASPGGR

SEQ ID NO: 10943 - protein, 269 aa, Capsicum annuum
MKMKNLSLLLLTLTLLFISVCSQVQQTQFVYRWPETYCEKATPTVACTKIPLQFTLVGFWGTDSSGGIQQGCQDTGKYDWAKVFTTETANKLTAFWPSLSTQDPTEMWKAAWTTYGTCLISKFKTPTQYFNRAIRLSDAIGGGNLFQGQLIGKDGIVPCDSATYTNAEILKSLTAVTTVNNQKEKKVSFTCNSIYSTHAYLNQVTFCYTNNAQYYTDCPTTVISKRCNVPNIIVPRPPTPTARASSLQDLLTGEKIGPNVLWETLGQLF

SEQ ID NO: 10944 - protein, 230 aa, Lycopersicon esculentum
MASNSAFSLFLILLIITQCLSVLNAAKDFDFFYFVQQWPGSYCDTKQSCCYPTTGKPAADFGIHGLWPNNNDGTYPSNCDPNSPYDQSQISDLISSMQQNWPTLACPSGSGSTFWSHEWEKHGTCAESVLTNQHAYFKKALDLKNQIDLLSILQGADIHPDGESYDLVNIRNAIKSAIGYTPWIQCNVDQSGNSQLYQVYICVDGSGSSLIECPIFPGGKCGTSIEFPTF

SEQ ID NO: 10945 - protein, 208 aa, Lycopersicon esculentum
ASGSKDFDFFYFVQQWPGSYCDTKQSCCYPTTGKPAADFGIHGLWPNNNDGTYPSNCDPNSPYDQSQISDLISSMQQNWPTLACPSGSGSTFWSHEWEKHGTCAESVLTNQHAYFKKALDLKNQIDLLSILQGADIHPDGESYDLVNIRNAIKSAIGYTPWIQCNVDQSGNSQLYQVYICVDGSGSSLIECPIFPGGKCGTSIEFPTF

SEQ ID NO: 10946 - protein, 233 aa, Lycopersicon esculentum
MMKSQKKLLIKIIVVQCLLVLCVTSQDFDFFYFVQQWPASYCDTRRSCCYPTTGKPDEDFSIHGLWPNYKDGKWPQNCDRESSLDESEFSDLISTMEKNWPSLACPSSDGLKFWSHEWLKHGTCSALNQHAYFQTALDFKTKSNLLQNLNNAGIKPRNGDYYGVESIKKAIEKGVGHTPFIECNVDSQGNHQLYQVYLCVDSSASKFIDCPIFPHGGKCGSKIEFPSFSTNDD

SEQ ID NO: 10947 - protein, 237 aa, Lycopersicon esculentum
MMKSQKKLLIKIIVVQCLLVLCVTSQDFDFFYFVQQWPASYCDTRRSCCYPTTGKPDEDFSIHGLWPNYKDGKWPQNCDRESSLDESEFSDLISTMEKNWPSLACPSSDGLKFWSHEWLKHGTCSALNQHAYFQTALDFKTKSNLLQNLNNAGIKPRNGDYYGVESIKKAIEKGVGHTPFIECNVDSQGNHQLYQVYLCVDSSASKFIDCPIFPHGGKCGSKIEFPSFSTNDDHDEF

SEQ ID NO: 10948 - protein, 198 aa, Lycopersicon esculentum
MASNSAFSLFLILLIITQCLSVLNAAKDFDFFYFVQQWPGSYCDTKQSCCYPTTGKPAADFGIHGLWPNNNDGTYPSNCDPNSPYDQSQISDLISSMQQNWPTLACPSGSGSTFWSHEWEKHGTCAESVLTNQHAYFKKALDLKNQIDLLSILQGADIHPDGESYDLVNIRNAIKSAIGYTPWIQCNVDQSGNSQLYQ

SEQ ID NO: 10949 - protein, 215 aa, Lycopersicon peruvianum
FILFFGLSPISVHGSFDHWQLVLTWPPGFCEIKHCPKKPIPKNFTIHGVWPDHTDYIMYDCNPNKEFKKIYDKHLLNKLESRWPQLTSHEYAGLNDQTFWKYEYEKHGLCCEKVYDQSQYFDIAMKLKDSIDLLNILTTNRIVPGFQYSYTGDQISSAIKRVTQKDPNPKCTYSKGGLELTEIGICFNRTTNALMRCPRNSNSCKLGTTTKVVFR

SEQ ID NO: 10950 - protein, 210 aa, Lycopersicon peruvianum
FFALSTISIYGSFDHWQLVLTWPAGFCKTKDCPRKDIPNNFTIHGVWPDHTSFVMYDCDPLKKYKTIDDTNILTELDARWPQLTSTKIIGLQFQRFWEYEYRKHGTCCADVFNQSMYFDISMKLTDSIDLLKILRTKGIKPGYTYTGDQISRAIKSVTQNNPNPKCTYIGRSLELIEIGICFNRTTNALMPCPRISTSCKLGTLEGVKFR

SEQ ID NO: 10951 - protein, 205 aa, Lycopersicon peruvianum
RPLVFSPVCGDFDYFQLVLQWPRSFCKTRYCPNPVPRNFTIHGLWPDKQRIMPINCPRKESYKSITDSKKIKLLEQHWPDLTSNQGSAEFWRYQYKKHGTCSVDLYNQEQYFDLAIELKEKFDLLKTLKNHGITPSKTNTVIDVEEAIKAVTKEVPNLNCIGDSSQTMELLEIGICFNKEGTTVIACRRRWNNHPNGNQKITLPP

SEQ ID NO: 10952 - protein, 220 aa, Lycopersicon peruvianum
MSVLFTLLFSLAPVLGYFEYLQLVLQWPTTFCHTKPCPTWPPPNNFTIHGLWPDSKGKMLNDCGSGDDYDDIPDAHMRKQLESDWPNLTSRAGEIKKYQEFWGYEFNKHGTCSMDRYNQDQYFELALKLKNQFDLLNILRNHGIIPGKTCTVKDVEDAIKAVTAHVPNLNCIVRSSQRSSHIMELLEIGICFDREATQMIDCRRRWKSHPDINQPITLPR

SEQ ID NO: 10953 - protein, 217 aa, Lycopersicon peruvianum
MIKPQLMSVLFLFLFVFSPVCGDFDYLQLVLQWPRSFCKTRYCPNPVPRNFTIHGLWPDKQRIMPINCPAKESYKSITDSKKIKLLEQHWPDLTSNQGSAEFWRYQYKKHGTCSVDLYNQEQYFDLAIELKEKFDLLKTLKNHGITPSKTNTVIDVEEAIKAVTKEVPNLNCIGDSSQTMELLEIGICFNREGTTVIACRRRWINHPNGNQKITLPP

SEQ ID NO: 10954 - protein, 195 aa, Lycopersicon peruvianum
DFDYLQLVLQWPRSFCKTRYCPNPVPRNFTIHGLWPDKQRIMPINCPAKESYKSITDSKKIKLLEQHWPDLTSNQGSAEFWRYQYKKHGTCSVDLYNQEQYFDLAIELKEKFDLLKTLKNHGITPSKTNTVIDVEEAIKAVTKEVPNLNCIGDSSQTMELLEIGICFNREGTTVIACRRRWINHPNGNQKITLPP

SEQ ID NO: 10955 - protein, 212 aa, Lycopersicon peruvianum
FMFLFALSPIYGDFELLELVSTWPATFCYAYGCSRRPIPKNFTIHGLWPDNRSTILHDCDVPPEVDYVQIEDHKILNALDKRWPQLRYDYWYGIDKQYQWKNEFLKHGTCGINRYKQPAYFDLAMKIKDKFDLLGTLRKHGINPGSTYELNDIERAIKTVSIEVPSLKCIRKPPGNVELNEIGICLDPEAKYTVPCPRIGSCHEMGHKIKFR

SEQ ID NO: 10956 - protein, 213 aa, Lycopersicon peruvianum
MFRPQIIGFFIMLCAFYHVYGTFDQLQLVLRWPTSFCNGKNCKRTPKDFTIHGLWPDSEAGELNFCNPRASYTIVRHGTFEKRNKHWPDLMRSKDNSMDNQEFWKHEYIKHGSCCTDLFNETQYFDLALVLKDRFDLLTTFRIHGIVPRSSHTVDKIKKTIRSVTGVLPNLSCTKNMDLLEIGICFNREASKMIDCTRPKTCNPGEDNLIGFP

SEQ ID NO: 10957 - protein, 189 aa, Lycopersicon peruvianum
QLQLVLRWPTSFCNGKNCKRTPKDFTIHGLWPDSEAGELNFCNPRASYTIVRHGTFEKRNKHWPDLMRSKDNSMDNQEFWKHEYIKHGSCCTDLFNETQYFDLALVLKDRFDLLTTFRIHGIVPRSSHTVDKIKKTIRSVTGVLPNLSCTKNMDLLEIGICFNREASKMIDCTRPKTCNPGEDNLIGFP

SEQ ID NO: 10958 - protein, 209 aa, Lycopersicon peruvianum
LTAALFIVLFYLSPAYGDFDSLQLVLTWPASFCNLNNCKRIVPRNFTIHGLWPDKQGTLLQNCKPKLKYVNFKDMMFNDLDKNWIQLKFDEDYGKDEQPLWQYQYLKHGSCCQKMYNQNAYFSLALRLKDRFDILRTLQLHQIFPGSSYTFKEIFDAVKTATQMDPDLKCTKGAPELYEIGICFTPKADALIPCRPSNTCAKTGKIFFR

SEQ ID NO: 10959 - protein, 214 aa, Lycopersicon peruvianum
MFKTQHTLAFFILLCALPDVYGTFNQLQLVLRWPASFCKGKKCERTPNNFTIHGLWPDIKGTILNNCNPDAKYASVTGGKFVKRNKHWPDLILTEAASLNSQGFWAYQFKKHGTCCSDLFNQEKYFDLALILKDKFDLLTTFRNKGIIPKSTCTINKIQKTIRTVTGVVPNLSCTPTMELLEVGICFNRDASKLIDCDQPKTCDTSGNTEIFFP

SEQ ID NO: 10960 - protein, 214 aa, Lycopersicon peruvianum
MFKTQHTLAFFILLCALSDVYGTFNQLQLVLRWPASFCKGKKCERTPNNFTIHGLWPDIKGTILNNCNPDAKYASVTGGKFVKRNKHWPDLILTEAASLNSQGFWAYQFKKHGTCCSDLFNQEKYFDLALILKDKFDLLTTFRNKGIIPKSTCTINKIQKTIRTVTGVVPNLSCTPTMELLEVGICFNRDASKLIDCDQPKTCDTSGNTEIFFP

SEQ ID NO: 10961 - protein, 218 aa, Lycopersicon peruvianum
LTSVFFMFLFALSPIYGYFELLELVSTWPATYCYAYGCSRRPIPNNFTINGLWPDNKSVILNNCNFAKKEDRYTKITDPKKKSELDKRWPQLRYEKLYGIEKQDLWEKEFLKHGSCSINRYKQEAYFDLAMKIKDRFDLLGTLRNQGIIPGSTYELDDIERAVKTVSIEVPSLKCIQKPLGNVELNEIGICLDPEAKYTVPCPRIGSCHKMGHKIKFR

SEQ ID NO: 10962 - protein, 140 aa, Lycopersicon peruvianum
IHGVWPDHTDYIMYDCNPNKEFKKIYDKHLLNKLESRWPQLTSNEYAGLNDQTFWKYEYEKHGLCCEKVYDRSQYFDIAMKLKDSIDLLNILTTNRIVPGFQYSYTGDQIRSAIKRVTQKDPNPKCTYSKGGLELLEIGI

SEQ ID NO: 10963 - protein, 140 aa, Lycopersicon peruvianum
IHGVWPDHTDYIMYDCNPNKEFKKIYDKHLLNKLESRWPQLTSNEYAGLNDQTFWKYEYEKHGLCCEKVYDQSQYFDIAMKLKDSIDLLNILTTNRIVPGFQYSYTGDQISSAIKRVTQKDPNPKCTYSKGGLELKEIGI

SEQ ID NO: 10964 - protein, 181 aa, Lycopersicon peruvianum
PASFCDSNNCKRIAPKNFTIHGLWPDKEGTVLQKCKPKPNYVNFKDKMLNDLDKNWIQLKFDEDYGRDKQPLWVYQYLKHGSCCQKMYNQNTYFSLALRLKDRFDLLRTLEMHKIFPGSSYTFQEIFDAVKTATQMDPDLKCTKGAPELYEIGICFTKKADALIPCRPSNTCDRTGNIFFR

SEQ ID NO: 10965 - protein, 138 aa, Lycopersicon peruvianum
IHGVWPDHTSFIMYDCDPLKKYKTIDDTDILTKLDARWPQLTSIKSIGLKSQSFWDYEYRKHGTCCADVFNQSVYFDISMKLTDSIDLLKILRTKRIIPGYTYTGDQISRAIKSVTQNNPNPKCTYIGRSLELKEIGI

SEQ ID NO: 10966 - protein, 162 aa, Lycopersicon peruvianum
HGLWPDIKGTILNNCNPDAKYASVTGGKFVKRNKHWPDLILTEAASLNSQGFWAYQFKKHGTCCSDLFNQEKYFDLALILKDKFDLLTTFRNKGIIPKSTCTINKIQKTIRTVTGVVPNLSCTPTMELLEVGICFNRDASKLIDCDQPKTCDTSGNTEIFFP

SEQ ID NO: 10967 - protein, 162 aa, Lycopersicon peruvianum
HGLWPDIKGTILNNCNPDAKYASVTGGKFVKRNKHWPDLILTEAASLNSQGFWAYQFKKHGTCCSDLFNQEKYFDLALILKDKFDLLTTFRNKGIIPKSTCTINKIQKTIRTVTGVVPNLSCTPTMELLEVGICFNRDASKLIDCDQPKTCDTSGNTEIFFG

SEQ ID NO: 10968 - protein, 139 aa, Lycopersicon peruvianum
IHGLWPDNKSIMLNNCDSDVKYNRITNPDMLIQLEYHWPDLTSTVGDTRKLQDFWRYEFNKHGTCSINRYNQVQYFDLALKLKNQLDLLKTLRSHGIIPGKDCTVKDVEDAIKAVSAHVPNLNCIGRSSHTMELQEIGI

SEQ ID NO: 10969 - protein, 214 aa, Lycopersicon chilense
MVKPQLTAALLIVLFALSPAYGDFDSLQLVLTWPASFCDSNNCKRIAPKNFTIHGLWPDKEGTVLQQCKPKPNYVNFKDKMLNDLDKNWIQLKFDEDYGRDKQPLWVYQYLKHGSCCQKMYNQNTYFSLALRLKDRFDLLRTLEMHKIFPGSSYTFQEIFDAVKTATQMDPDLKCTKGAPELYEIGICFTKKADALIPCRPSNTCDRTGNIFFR

SEQ ID NO: 10970 - protein, 135 aa, Lycopersicon chilense
IHGVWPDKEGTLLQYCKPKPKFRLIKDQLLDDLDKNRIQLKYPQTHARNKQPLWEHEYLKHGTCCQKVYDQNTYFRLALRLKDRFDLLRTLQIHRIVPGSSYTFKEIFDAVKTVTQTHPDIKCTKGALELTEIGI

SEQ ID NO: 10971 - protein, 134 aa, Lycopersicon chilense
IHGVWPDSEAGELNFRNPRASYTIVRHGTFEKRNKHWPDLMRSKDNSVDNQEFWKHEYIKHGSCCTDLFDETQYFDLALVLKDRFDLLTTFRIHGIVPRSSHTVDKIKKTIRSVTGVLPNLSCTKNMELQEVGI

SEQ ID NO: 10972 - protein, 138 aa, Lycopersicon chilense
IHGAWPDNVSTELNYCGRKKDNYRIITDDRETNDLYDRWPDLTIEKDICLDKQNFWRYEYNKHGTCCEATYNQEQYFHLAVALKDKFDLLKSLGNHGIIPGSKYTVQKINNTIKTVTQGYPNLSCTRGKLMELQEIGI

SEQ ID NO: 10973 - protein, 231 aa, Nicotiana alata
MKMASNSATSLFLTLFLITQCLSVLTAAQDFDFFYFVQQWPGSYCDTKQSCCYPKTGKPASDFGIHGLWPNNNDGSYPSNCDSNSPYDQSQVSDLISRMQQNWPTLACPSGTGSAFWSHEWEKHGTCSESIFDQHGYFKKALDLKNQINLLEILQGAGINPDGGFYSLNSIKNAIRSAIGYTPGIECNVDDSGNSQLYQVYICVDGSGSNLIECPVFPRGKCGSSIEFPTF

SEQ ID NO: 10974 - protein, 196 aa, Nicotiana alata
AFEYMQLVLQWPAAFCHTTPSPCKRIPNNFTIHGLWPDNVSTMLNYCSGEDEYEKLDDDKKKKDLDDRWPDLTIARADCIEHQVFWKHEYNKHGTCCSKSYNLTQYFDLAMALKDKFDLLTSLRKHGIIPGNSYTVQKINSTIKAITQGYPNLSCTKRQMELLEIGICFDSKVKNVIDCPHPKTCKPMGNRGIKFP

SEQ ID NO: 10975 - protein, 218 aa, Nicotiana alata
MLNSPLTSVLFVLLFVLSPIYGAFEYMQLVLQWPTAFCHTTPCKRIPNNFTIHGLWPDNVSTTLNYCAAKENFKNIEDDTKKDDLYKRWPDLTTAETYCKQHQNFWRHEYNKHGKCCSESYNREQYFDLAMALKDKFDLLSSLRNHGIIPGRGMKYTVQKINSTIKKITQGYPNLSCTKGIMELVEIGICFDSMVKNVINCPHPKTCKPTGSNEIKFP

SEQ ID NO: 10976 - protein, 223 aa, Nicotiana alata
MLNSQITSAVLFLLFALSPIYGDFDYMQLVLTWPASFCYPKNFCSRIAPKNFTIHGLWPDKVRGRLQFCTSEKYVNFAQDSPILDDLDHHWMQLKYHRDFGLENQFLWRGQYQKHGTCCIPRYNQMQYFLLAMRLKDKFDLLATLRTHGITPGTKHTFNETRDAIKTVTNQVDPDLKCVEHIKGVRELYEIGICFTPTADSFFPCPHSNTCDETGITKILFRR

SEQ ID NO: 10977 - protein, 218 aa, Nicotiana sylvestris
MFRSQLVSIFFILSFALSPVFGDFDQMQLVLTWPPTYCHEKSCARIPTNFRIHGLWPDNQHELLNNCKKSFTTITNSSKSNALDDRWPDLKYSKMKTIQTQDFWKYQYNKHGTCCTELYSQEAYFDLAMKLKDKFDLLQMLKSQGVIPGKTYTVNKIEEAIREVTQVYPNLNCIGNPLKTMELKEIGICFNREATEVVACHRRKTCNPLNKNEISFPL

SEQ ID NO: 10978 - protein, 229 aa, Nicotiana tabacum
MASNSATSLFLTLFLITQCLSVLTAAQDFDFFYFVQQWPGSYCDTKQSCCYPKTGKPASDFGIHGLWPNNNDGSYPSNCDSNSPYDQSQVSDLISRMQQNWPTLACPSDTGSAFWSHEWEKHGTCAENVFDQHGYFKKALDLKNQINLLEILQGAGINPDGGFYSLNNIKNAIRSAVGYTPGIECNVDESGNSQLYQVYICVDGSGSDLIECPVFPRGKCGSSIEFPTF

SEQ ID NO: 10979 - protein, 219 aa, Petunia x hybrida
RLQLLSALFILLFALSPVSANFDYFQLVLTWPASFCYPKNKCQRRSNNFTIHGLWPEKKHFRLEFCPGDKFSRFKEDNIINVLERHWIQMRFDEDYANAKQPLWQHEYNRHGICCKNLYDQKAYFLLAIRLKDKLDLLTTLRTHGITPGTKHTFGEIQKAIKTVTNNKDPDLKCVENIKGVKELNEIGICFNPAADSFHDCRHSYTCDETDSTQTLFRR

SEQ ID NO: 10980 - protein, 222 aa, Petunia x hybrida
MFKLQLASVLCVFLFACSPISGSFDHWQLVLTWPAGYCKVKGCPRPVIPNDFTIHGLWPDSISVIMNNCDPTKTFVTITEINQITELEKRWPELTTTAQFALTSQSFWRYQYEKHGTCCFPVYSQSAYFDFAIKLKDKTDLLSILRSQGVTPGSTYTGERINSSIASVTRVKPNLKCLYYRGKLELTEIGICFDRTTVAMMSCPRISTSCKFGTNARITFRQ

SEQ ID NO: 10981 - protein, 222 aa, Petunia x hybrida
MFKLQLASVLCVFLFACSPISGSFDHWQLVLTWPAGYCKVKGCPRPVIPNDFTIHGLWPDSISVIMNNCDPTKTFATITEIKQITELEKRWPELTTTAQFALTSQSFWRYQYEKHGTCCFPVYSQSAYFDFAIKLKDKTDLLSILRSQGVTPGSTYTGERINSSIASVTRVKPNLKCLYYRGKLELTEIGICFDRTTVAMMSCPRISTSCKFGTNARITFRQ

SEQ ID NO: 10982 - protein, 222 aa, Petunia x hybrida
MFQFQLTSVFCIFLFAFSPIYGAFDHWQLVLTWPAGYCKIKGCPRTVIPDNFTIHGLWPDSVSVMMYNCDPPTRFNKIRETNIKNELEKRWPELTSTAQFALKSQSFWKYQYEKHGTCCLPFYSQSAYFDFAIKLKDKTDLLTILRNQGVTPGSTYTGEKLNSSIASVTRVAPNLKCLYYQGKLELTEIGICFNRTTVAMMSCPRISTSCKFGTNAGITFRQ

SEQ ID NO: 10983 - protein, 216 aa, Petunia x hybrida
LISAFFILLFSLSPVSANFDYFQLVLTWPASFCYPKNKCQRRSNNFTIHGLWPEKKRFLEFCTGDKYKRFLEEDNIINVLERHWIQMRFDETYANTKQPLWEHEYNRHGICCKNLYDQKAYFLLAMRLKDKLDLLTTLRTHGITPGTKHTFGEIQKAIKTVTSNNDPDLKCVENIKGVMELNEIGICYTPAADRFDRCRHSNTCDETSSTKILFRG

SEQ ID NO: 10984 - protein, 222 aa, Petunia x hybrida
MFRLQLISAFFILLFSLSPVSANFDYFQLVLTWPASFCYPKNKCQRRSNNFTIHGLWPEKKRFRLEFCTGDKYKRFLEEDNIINVLERHWIQMRFDETYANTKQPLWEHEYNRHGICCKNLYDQKAYFLLAMRLKDKLDLLTTLRTHGITPGTKHTFGEIQKAIKTVTSNNDPDLKCVENIKGVMELNEIGICYTPAADRFDRCRHSNTCDETSSTKILFRG

SEQ ID NO: 10985 - protein, 214 aa, Petunia x hybrida
MFRSQLTSVIFVLFFSLPPIYGYFEYMQLVLTWPPAFCHIKRCRRTPNNFTIHGLWPDNYSTMLNFCTDDEFVKFTDDDKKDKLDKRWPDLITDEADCKGTQDFWKREYEKHGTCCLSSYNQEQYFELAMVLKDRFDLVKSFRNHGIIPGTAGHTVQKINNTVKAITQGFPNLACTKALELKEIGICFDRTGKNVINCPHPRTCKQTRTGIKFP

SEQ ID NO: 10986 - protein, 220 aa, Petunia x hybrida
MFKSHLTAVIFILLFSLPPIYGDFDYMQLVLTWPASFCYRPRYLCKRTAPNNFTIHGLWPDNEQRRLQFCTSTEYSLFDGDILDDLDRHWIQLKFDKETGMQDQPLWHEQFRKHGTCCENRYKQMPYFLLAMRLKNKFDLLTTLRTHGIIPGTKHTFDEIQKAIKTVTNQVDPDLKCVQHIQGVPELNEIGICFTPAADRFFPCPQSKSCPKTGTKILFR

SEQ ID NO: 10987 - protein, 218 aa, Petunia x hybrida
MFKSQLTSALFVVLFFLSPTYGEFELLQLVLTWPASFCYANHCERIAPNNFTIHGLWPDNVTIRLQYCKPKPTYTTFAGKMLNDLDKHWIQLKYKEAYARREQPTWKYQYQKHGSCCQTKYKQIPYFSLALRLKDRFDLLTTLRTHHIVPGSSYTFDDIFDAVKTVTQMNPDLKCTEVTKGTQELDEIGICFTPKADKMFPCRQSDTCEKTRKILFRG

SEQ ID NO: 10988 - protein, 208 aa, Solanum chacoense
LLFSLSSCYGTFEHLQLVLTWPTSFCHKERCIRSSSNFTIHGLWPDNTSTRLNFCKIVKYNKIEDEHKIDALEYGWPNLTTTEAVSKEDQVFWGKQYTKHGSCCTDLYDKDAYFDLAMNLKDRFDLLKILAMHGITPGTSHHTSSNIQNAVKSVTQGVPHVTCFNNRFKGTSELLEIALCFDPQAQNVIHCPRPKTCNSKGTKGITFP

SEQ ID NO: 10989 - protein, 223 aa, Solanum chacoense
MFKSQLTSVFFMLLFALSPIYGDFELLELVSTWPATFCYAYGCSRRRPIPNNFTIHGLWPDNKSIILNNCNVANKERYIKIEDPKKLTELDKRWPQLRYDKLYGIDKQYLWEKEFLKHGTCSINRYKQAAYFDLAMNIKDRFDLLGTLRNHGINPGSTYDLDDIERAIKTVSIKVPSLKCIEKPPGNVELNEIGICLDPEAKYTVPCPRTGSCHELGPRIKFR

SEQ ID NO: 10990 - protein, 216 aa, Solanum chacoense
MFKSLASILIILLHLSPGNGTFEQLQLVFTWPTAFCHKVNCVRIPNNFTIHGLWPDNKSRRLNFCKSTKYIKSTDEGKKAYLEYRWPNLTTTEVESKKNQFFWEKEYIKHGTCCLPLYDQNAYFKLAVDLKDKFDLLNLLGKHGIRPGTTHLTSQKIANAIRTETRGIPNISCYDDFQGTSELLEIGICFDPNAIVKNCFRPKSCLPKGTTGVTFP

SEQ ID NO: 10991 - protein, 216 aa, Solanum chacoense
MFKSLLTSTLFIVLFSLSSTYGDFDKLQLVLTWPPSFCHANNCQRIVPKNFTIHGLWPDKEGPQLLKYCKPKLTYNYFSDKMLNDLDKHWIQLKIDQASARKDQPAWKYQYLKHGSCCQKIYNQNTYFSLALRLKDRFDLLRTLQIHRIVPGSSYTFEEIFDAVKTVTQMDPDIKCTEGAPNLYEIGICFTPNGDSLVRCRQSETCDKTGKIFFRP

SEQ ID NO: 10992 - protein, 211 aa, Solanum chacoense
EFFVLFFCLSPVYGTFDYMKLVLQWPPMYCRNKFCERIPRNFTVHGLWPDNKKYLLNNCRSYAYNALTNVREQSKLDDRWPDLTSNKSMTMKEQKFWEYEYNKHGTCCEKLYNQAQYFNLTMNLKDKFDLLRILRNHGIVPGSLALLSNSGRPLRQLTNKVFPSLKCIDNNGIMELLEVGICFDPAATKVIPCHRPWICHADENTRIELVK

SEQ ID NO: 10993 - protein, 245 aa, Solanum chacoense
MFKSLLTSTLFIVLFSLSSTYGDFDKLQLVLTWPPSFCHANNCQRIVPKNFTIHGLWPDKEGPQLLKYCKPKLTYNYFSVSSFIIFFRTGSFSVLFNLLKSLFLNFLQDKMLNDLDKHWIQLKIDQASARKDQPAWKYQYLKHGSCCQKIYNQNTYFSLALRLKDRFDLLRTLQIHRIVPGSSYTFEEIFDAVKTVTQMDPDIKCTEGAPNLYEIGICFTPNGDSLVRCRQSETCDKTGKIFFRP

SEQ ID NO: 10994 - protein, 223 aa, Solanum tuberosum
MAKSQLVSALFVFFFSLSPIYGDFDYMQLVLTWPRSFCYPRGFCNRIPPNNFTIHGLWPDKKPMRGQLQFCTSDDYIKFTPGSVLDALDHHWIQLKFEREIGIRDQPLWKDQYKKHGTCCLPRYNQLQYFLLAMRLKEKFDLLTTLRTHGITPGTKHTFKKIQDAIKTVTQEVPDLKCVENIQGVLELYEIGICFTPEADSLFPCRQSKSCHPTENPLILFRL

SEQ ID NO: 10995 - protein, 226 aa, Prunus avium
MAMLKSSLALLVLAFAFFFCYVMSSGSYDYFQFVQQWPPTNCRVRTKCSNPRPLQYFTIHGLWPSNYSNPKMPSNCIGSQFNESKVYPRLRSKLRISWPDVESGNDTKFWGDEWNKHGTCSQRILNQFQYFERSQQMWRSYNITNILKKAQIVPNATQTWSYSDIVSPIKTATNRTPLLRCKSQPKSQANFQLLHEVVLCFDYNALVHIDCNRTAGCWNNVDIKFQ

SEQ ID NO: 10996 - protein, 229 aa, Prunus avium
MAMLKSSLSFLVLGFAFFLCFIISAGDGSYVYFQFVQQWPPTTCRVQKKCSKPRPLQNFTIHGLWPSNYSNPTMPSNCNGSRFKKELLSPRMQSKLKISWPNVVSSNDTKFWESEWNKHGTCSEQTLNQVQYFEISHEMWNSFNITDILKNASIVPHPTQTWKYSDIVSAIQSKTQRTPLLRCKTDPAHPNANTQLLHEVVFCYGYNAIKQIDCNRTAGCKNQVNILFP

SEQ ID NO: 10997 - protein, 226 aa, Prunus avium
MAMLKSSLAFLVLAFAFFFCYVMSSGSYDYFQFVQQWPPTNCRVRIKRPCSKPRPLQNFTIHGLWPSNYSNPTKPSNCNGSKYEDRKVYPKLRSKLKRSWPDVESGNDTRFWEGEWNKHGRCSEQTLNQMQYFEISHDMWVSYNITEILKNASIVPHPTQKWSYSDIVSPIKTATKRTPLLRCKTDPATNTELLHEVVFCYEYHALKQIDCNRTAGCKNPQAISFQ

SEQ ID NO: 10998 - protein, 226 aa, Prunus avium
MGMLKSSLAFLVLALAFFLCFIMSTGDGSYDYFQFVQQWPPTNCRVRIKRPCSNPRPLQYFTIHGLWPSNYSNPTKPSNCNGSQFDGRKVSPQLRAKLKRSWPDVESGNDTRFWEGEWNKHGRCSEQTLNQMQYFERSQNMWRSYNITEILRNASIVPHPTQTWTYSDIVSPIKKATKRTPLLRCKQDKKTQLLHEVVFCYEYNALKQIDCNRTAGCQNQPAISFQ

SEQ ID NO: 10999 - protein, 208 aa, Prunus avium
LCFIMSTGDGSYDYFQFVQQWPPTNCRVRIKRPCSNPRPLQYFTIHGLWPSNYSNPTKPSNCNGSQFDGRKVSPQLRAKLKRSWPDVESGNDTRFWEGEWNKHGRCSEQTLNQMQYFERSQNMWRSYNITEILRNASIVPHPTQTWTYSDIVSPIKKATKRTPLLRCKQDKKTQLLHEVVFCYEYNALKQIDCNRTAGCQNQPAISFQ

SEQ ID NO: 11000 - protein, 223 aa, Prunus avium
MAILKSTLAFLVLAFAFFICYVMSSGSYDYFQFVQQWPPTNCRVRNKPCTKPRPLQNFTIHGLWPSNYSNPRMPSKCTGSLFNFRKVYPQLRSDLKISWPDVESGNDTRFWESEWNKHGRCSEASLNQMQYFERSHAMWISYNITEILKNASIVPSATKNWTYSDIVSPIKRATKRTPLLRCKYDKSTQLLHEVVFCYEYDALKQIDCNGTAGCPNQKVISFQ

SEQ ID NO: 11001 - protein, 223 aa, Prunus avium
MAMLKSSPAFLVLAFAFFLCFIMSNGSYVYFQFVQQWPPTNCRVRIKRPCSSPRPLQYFTIHGLWPSNYSNPRMPSNCTGPQFKRILSPQLRSKLQTSWPDVESGNDTKFWESEWNKHGTCSKETLNQMQYFERSYAMWMSYNITEILKNASIVPHPTQTWKYSDIVAPIKAATKRTPLLRCKQDKNTVLLHEVVFCYEYNALKQIDCNRTSGCQIQPAILFQ

SEQ ID NO: 11002 - protein, 223 aa, Prunus avium
MAMLKSSPAFLVLAFAFFLCFIMSNGSYVYFQFVQQWPPTNCRVRIKRPCSSPRPLQYFTIHGLWPSNYSNPRMPSNCTGPQFKRILSPQLRSKLQTSWPDVESGNDTKFWESEWNKHGTCSKETLNQMQYFERSYAMWMSYNITEILKNASIVPHPTQTWKYSDIVAPIKAATKRTPLLRCKQDKNTVLLHEVVFCYEYNALKQIDCNRTSGCQNQPAISFQ

SEQ ID NO: 11003 - protein, 132 aa, Prunus avium
LCFIISAGDGSYVYFQFVQQWPPTTCRVQKKCSKPRPLQNFTIHGLWPSNYSNPTMPSNCNGSRFKKELLSPRMQSKLKISWPNVVSSNDTKFWESEWNKHGTCSEQTLNQVQYFEISHEMWNSFNITDILK

SEQ ID NO: 11004 - protein, 132 aa, Prunus avium
FCYVMSSGSYDYFQFVQQWPPTNCRVRIKRPCSKPRPLQNFTIHGLWPSNYSNPTKPSNCNGSKYEDRKVYPKLRSKLKRSWPDVESGNDTRFWEGEWNKHGRCSEQTLNQMQYFEISHDMWVSYNITEILK

SEQ ID NO: 11005 - protein, 131 aa, Prunus avium
ICYVMSSGSYDYFQFVQQWPPTNCRVRNKPCTKPRPLQNFTIHGLWPSNYSNPRMPSKCTGSLFNFRKVYPQLRSDLKISWPDVESGNDTRFWESEWNKHGRCSEASLNQMQYFERSHAMWISYNITEILK

SEQ ID NO: 11006 - protein, 131 aa, Prunus avium
LCFIMSNGSYVYFQFVQQWPPTNCRVRIKRPCSSPRPLQYFTIHGLWPSNYSNPRMPSNCTGPQFKRILSPQLRSKLQTSWPDVESGNDTKFWESEWNKHGTCSKETLNQMQYFERSYAMWMSYNITEILK

SEQ ID NO: 11007 - protein, 241 aa, Nelumbo nucifera
MASASSFQLMILVIQCLAALSVSHATSVHFFHHAQVWAGSFCASEKGSCFPNTGMVSQEFTVHGLFPCSSSGTRLMNCDRGNSLDLSQITGLLHTMQRKWPSYSCPSSDSTPFWAHEWSKHGTCSLSVFDGQYDYFKAGLDLKDKVNILQILKKEGINPDGQYYSSERITRVLQIATGVTPALDCTVDKFGKYQLYQVMFCVDKSGSEFMDCPVYPEPTCPSIIRFPPFRGSAAEGIYLRS

SEQ ID NO: 11008 - protein, 198 aa, Dictyostelium discoideum
SSKPGDFDFYLFVQQWIYSYCDSQTCIQNKEREAFTIHGLWPENSDGSYPSFCSGPSFNVNAIQDLEDQLNFDWPSLTGPNTDFWTHEFSKHGTCSITGPITDIHDYFATGIKLYTEFNITAALESENIYPSDSNTYKPVDITNAITTHFGGKPGIQCSSGQLSTVAVCIDKNSLSIMDCPDLQGWSCSGSVKFPSTA

SEQ ID NO: 11009 - protein, 227 aa, Hordeum vulgare
MRPCCLSLALLVALSAVGSAAAQAADYDFFYLVLQWPGSYCDTKKSCCYPRTGKPAADFGIHGLWPNRDDGSYPQNCNPANAFDPSKVSDLLSSLRAEWPTLACPASDGLQFWAHEWEKHGTCAQNLFHEHGYFQTAAPPRPAPLLDALASAGVAPDGGYYTLSAVKGAIQQGTGFEPFVECNRDESGNSQLYQLYFCVDARASGFVECPVQPGGRPCGDRIEFPAF

SEQ ID NO: 11010 - protein, 229 aa, Oryza sativa
MAAAARATARVGLALLLAVVGVGAQDYDFFFLVLQWPGSYCDTKQSCCYPRSGKPAADFGIHGLWPNRDDGSYPQNCDPDSEFDPSKVSDLLGSMRSEWPTLACPSNDGIRFWAHEWEKHGTCAAAALGDEHGYFEAALRLRSRLPVLAALRDGGVSPDGGYYTLSQIKGAIQRGVGAEPFVECNRDESGNSQLYQLYFCVDAAGERFVDCPASPGGRPCGNRIEFPAF

SEQ ID NO: 11011 - protein, 229 aa, Oryza sativa; identical to SEQ ID NO: 11010

SEQ ID NO: 11012 - protein, 229 aa, Triticum aestivum
  unsure (1)..(229): unsure at all Xaa locations
MMRSCLSLALLVALSAAGCAAAQAADYDFFYLVLQWPGSYCDTKQSCCYPRSGKPAADFGIHGLWPNRDDGSYPQNCNPANAFDPSKVSDLLSSLRTEWPTLACPTSDGLQFWAHEWEKHGTCAQNLFNEHGYFQTALXPPRPAPLLDALAAAGVSPDGGYYTLSAIKGAIQQGTGFAPHVDCNRDESGNSQLFQLYFCVHADASRFVECPVQPXGGRPCGNRIEFPAF

SEQ ID NO: 11013 - protein, 230 aa, Triticum aestivum
  unsure (1)..(230): unsure at all Xaa locations
MMRSCLPLALLVALSAAGCAAAQAADYDFFYLVLHWPGSYCDTKXQSWCYPRSGKAAADFGIHGLWPNRDDGPYPQNCNPANAFDPSKVSDLLSSLRTEWPTLACPTSDGLQFWAHEWEKHGPCAQNLFNEHGYFQTALXPPRPAPLLDALAAAGVSPXDGGYYTMGAIKGAIQEGTGFAPHVDCNRDESGNSQLFQLYFCVHADASRFVECPVQPGGRPCGNRIEFPAF

SEQ ID NO: 11014 - protein, 253 aa, Calystegia sepium
MASSLPALQIILPLLLLLGTCSANLIRGGHKEFDYFTLALTWSGTECLSVKDSCPTNACSRSEVETGFTIKGLWPDYDDGTWPSCCEGAKYDENEISILSNDLSKYWPSYSCMSSSACGSFDASDLAYEWAKHGTCSSPVLGNQYEYFSTALMLYFKYNISEILSESGYLPSNTAEYKLEGIMSAIQSALRVTPVVKCKSDAVEQVQICFDKTLQLQECPSTASTCPSLVSLPIKNTIKPLETNNLSFRGMRA

SEQ ID NO: 11015 - protein, 212 aa, Calystegia sepium
GHKEFDYFTLALTWSGTECLSVKDSCPTNACSRSEVETGFTIKGLWPDYDDGTWPSCCEGAKYDQNEISILSNDLSKYWPSYSCPSSSACGSFDASDLAYEWAKHGTCSSPVLGNQYEYFSTTLMLYFKYNISEILSESGYLPSNTAEYKVEGIMSAIQSALRVTPVVKCKSDAVEQVQICFDKTLQLQECPSTASTCPSLVSLPIKNTIKP

SEQ ID NO: 11016 - protein, 222 aa, Rhizopus niveus
SSCSSTALSCSNSANSDTCCSPEYGLVVLNMQWAPGYGPDNAFTLHGLWPDKCSGAYAPSGGCDSNRASSSIASVIKSKDSSLYNSMLTYWPSNQGNNNVFWSHEWSKHGTCVSTYDPDCYDNYEEGEDIVDYFQKAMDLRSQYNVYKAFSSNGITPGGTYTATEMQSAIESYFGAKAKIDCSSGTLSDVALYFYVRGRDTYVITDALSTGSCSGDVEYPTK

SEQ ID NO: 11017 - protein, 238 aa, Rhizopus niveus
MKAVLALATLIGSTLASSCSSTALSCSNSANSDTCCSPEYGLVVLNMQWAPGYGPDNAFTLHGLWPDKCSGAYAPSGGCDSSLYSSSIASVIKSKDSSLYNSMLTYWPSNQGNNNVFWSHEWSKHGTCVSTYDPDCYDNYEEGEDIVDYFQKAMDLRSQYNVYKAFSSNGITPGGTYTATEMQSAIESYFGAKAKIDCSSGTLSDVALYFYVRGRDTYVITDALSTGSCSGDVEYPTK

SEQ ID NO: 11018 - protein, 238 aa, Rhizopus niveus
MKAVLALATLIGSTLASSCSSTALSCSNSANSDTCCSPEYGLVVLNMQWAPGYGPDNAFTLHGLWPDKCSGAYAPSGGCDSNRASSSIASVIKSKDSSLYNSMLTYWPSNQGNNNVFWSHEWSKHGTCVSTYDPDCYDNYEEGEDIVDYFQKAMDLRSQYNVYKAFSSNGITPGGTYTATEMQSAIESYFGAKAKIDCSSGTLSDVALYFYVRGRDTYVITDALSTGSCSGDVEYPTK

SEQ ID NO: 11019 - protein, 260 aa, Antirrhinum hispanicum
MATVQKSQHSHFFLLVGCIVHLSNFCSTTTAQFDYFKLVLQWPNSYCSLKTTHCPRTRLPSQFTIHGLWPDNKSWPLSNCRDTSADVLKITDKGLIQDLAVHWPDLTRRQRKVPGQKFWVTQWKKHGACALPMYSFNDYFVKALELKKRNNVLDMLSRKSLTPGDQRVDVSDVNGAITKVTGGIAILKCPEGYLTEVIICFDPSGFPVIDCPGPFPCKDDPLEFPSSVKKKVPRSVSIGGSTLGLEKGASFSLTNTNTGY

SEQ ID NO: 11020 - protein, 235 aa, Antirrhinum hispanicum
MATVQKSQHSHFFLLVGCIVHLSNFCSTTTAQFDYFKLVLQWPNSYCSLKTTHCPRTRLPSQFTIHGLWPDNKSWPLSNCRDTSADVLKITDKGLIQDLAVHWPDLTRRQRKVPGQKFWVTQWKKHGACALPMYSFNDYFVKALELKKRNNVLDMLSRKSLTPGDQRVDVSDVNGAITKVTGGIAILKCPEGYLTEVIICFDPSGFPVIDCPGPFPCKDDPLEFQVLSRRKFQDL

SEQ ID NO: 11021 - protein, 233 aa, Antirrhinum hispanicum
MAMIKKNRKVNPLSLLVVCVVPLNCCSTIIAKCDYLKLVLQWPKSFCLINSRKCQRNPLPSNFTIHGLWPDNYTRQAPQSCTTNNFQRFTDTDIEQRMEESWPDLKQQSIAGLSYNFWQDQWRKHGSCCFPPHESEIYFLKALELKDRLDVLTILENNNFNPGTPQPFSVLRVFNTISRAIGKTPILKCAQSYLKEVVICVDNNGASVVHCPRSRPRPRPRRDPCPFSDVKFP

SEQ ID NO: 11022 - protein, 233 aa, Antirrhinum hispanicum
MVAKKSHDHGQFSFLVLFVILLSSYCFTANAKYFEILKLVLQWPNSYCSLKTSTCRRNPLPLKFTIHGLWPDNYSWPLSDCGYDFTLPDITDKSLLKRLDRNWPDLTKRKNIRKPDKTFWLTQWEKHGTCALSVYTFDDYFRETLNMKRRFNILDMLQRKSMRPGDRVDPQEVARAISKVTNHEPEVKCREGFLTEIIICFDTGRDASVIDCPGPLCTDPMVDFPRSVVRTIR

SEQ ID NO: 11023 - protein, 223 aa, Antirrhinum hispanicum
MATRRNSHYRPFPSLIACVVLLLHYSSAQFDHFKLVLTWPHSFCLVYPGKCHRTPLPLNFTIHGLWPDKQKGKTSPCKKYPVSPLNDKNLELRLEESWPDLRRDSKLGFSTIFWKEQWDKHGSCAWPLYNYEKYFLKALEFKDKFDVLGHLVQDSLGPGTSPTVSRNLVNKTISQATTGIPILKCPSNYLTEVVICFKPTGVVVVACPQPPKDPCPNENVNFP

SEQ ID NO: 11024 - protein, 161 aa, Antirrhinum hispanicum
PDSNGQHLYNCKLDLDEESLGLNSSSTERLEASWPDLLKPEGEDMSFWISQYHKHGSCSQPLYDPQEYFLKALELKDRFDILTILEQGGIYPGKENSRSRVMSVINQATRGNPRLLCNMPKKKILREIVICTNIGGTRVIPCPFPNFRTCGPESNLHDLSN

SEQ ID NO: 11025 - protein, 124 aa, Physalis crassifolia
KKGVDKLTFCSAQPNYTLFQDKKMLDDLDKHWIQLKYSRENGLRKQEFWKRQYEKHGSCCLNRYNQTAYFSLALRLKDKIDLLSTLHNSGIDPGENYTFQEIAKAIKTVTTADSLFKCVKGTTQ

SEQ ID NO: 11026 - protein, 126 aa, Solanum carolinense
NKSQMLNDCSSKKRYHNILEPDKRKQLEDEWPDLTAMAGDTEKHQKFWGYEFNKHGTCSIDLYNQEAYFDLAIKLKNQFDILKTLRNHGIIPGKVSTTVKNVEDAIKAVSAHVPNLNCIGRSSKTM

SEQ ID NO: 11027 - protein, 120 aa, Solanum carolinense
IKGTVLNNCNSQARYTPVTGNDFDKRNKNWPDLFRTEADARKNQGFWRYEFVKHGTCCSDLFNEEKYFDLAVGLKDRFDLLKIFRNKGIIPGSNYTVNKIEKTIRTVTGVVANLSCTGAM

SEQ ID NO: 11028 - protein, 124 aa, Solanum carolinense
HTSFIMYDCNKTIKFKKIEDAAMLNKLDLRWPQLTSTESDASNDQPFWKYQFEKHGTCCSDVYSQSVYFEIAVKLKDSIDLLKILLTKRIIRGFRYTGDQISGAIKSVTQNDPNPKCTYIKRTL

SEQ ID NO: 11029 - protein, 127 aa, Solanum carolinense
WPDNVSTTLNYCKSKTGKYNNIKDPTIKNELYKRWPDLTTSETDCLGNQNFWKRHYNKHGTCCSGRYNLQQYFHLAMALKDKFWLLTSLTNHGIIPGSNYNVQKINSTIKTITRGYPNLSCTEEMEL

SEQ ID NO: 11030 - protein, 122 aa, Solanum carolinense
NVSRTLNFCSGKDDYKKFTEEKEKNDLDERWPDLKTDKIDCIGGQVFWKNEYNKHGTCCSETYNREQYFDLAINLKDKFDLLASLKKHGIIPGNKYTVQKINSTIKTITRGYPNLSCTKGFM

SEQ ID NO: 11031 - protein, 276 aa, Aspergillus oryzae
MGMLALGAMQLAAGAVFEFPSCPKDIPFSCQNSTAVADSCCFNSPGGALLQTQFWDTNPPSGPSDSWTIHGLWPDNCDGSYGQFCDKSREYSNITAILQEQGRTELLSYMKKYWPNYEGDDEEFWEHEWNKHGTCINTIEPSCYKDYSPQKEVGDYLQKTVDLFKGLDSYKALAKAGIVPDSSKTYKRSEIESALAAIHDGKKPYISCEDGALNEIWYFYNIKGNAITGEYQPIDTLTSPGCSTSGIKYLPKKSENSTASAWKFRSDKASQSVRFN

SEQ ID NO: 11032 - protein, 276 aa, Antirrhinum majus X Antirrhinum hispanicum
MALLTARPLNPAAIQCACFVILWIGLLCVNVGINGSGDLGEKLGANQRDFDYFQLALQWPGTFCRRTRHCCPNNGCCRGSNAPAEFTIHGLWPDYNDGSWPSCCTGKTFEEKEISTLLGDLNKYWPSLSCGSPSNCHGGKGLFWEHEWEKHGTCSSSVTGAEYNYFVTALKVYFKYNVTEVLREAGYVASNSEKYPLGGIVTAIQNAFHATPELKCSGDAVEELYLCFYKNFEPRDCATKSNKKSCPRYVSLPEYSSLKMANDGNEVSESALDSDI

SEQ ID NO: 11033 - protein, 411 aa, Irpex lacteus
MVASLVVLGSLAALVSAGPLSLYSPALGPMDIFKRVNSGCGTSGAESCSNSDDGTCCFEAPGGLLLQTQFWDTDPSTGPSDSWTIHGLWPDNCDGTFESSCDSSRAYTGIGDLLTAQGASDTLDFMNQYWVDINGQNEQFWEHEWSKHGTCYSTLETSCLPSGSPKGAEAVAFFQQVVTLFKTLPTYQWLAKAGITPDSSKTFTLSEITSALKSAAGVTPALDCDGKNLNQISWYFHLKGSLLDGKFVPIDAPKAGSCASSGLKYPPKSGSSSGGSSGGSTTTTSSGSSSTGNPGSLPSKATLHASTGGLLSAGTWSTQTLATYTISGSSSSFTLKTSKGSCGVVSSGQFECGSGVSATTFSAVTSGSSLLLASGGSTKWSSDGTPSGTTQEAIFTGSGHGTSLTLSIVSA

SEQ ID NO: 11034 - protein, 250 aa, Irpex lacteus
VNSGCGTSGAESCSNSDDGTCCFEAPGGLLLQTQFWDTDPSTGPSDSWTIHGLWPDNCDGTFESSCDASRAYTGIGDLLTAQGASDTLDFMNQYWVDINGQNEQFWEHEWSKHGTCYSTLETSCLPSGSPKGAEAVAFFQQVVTLFKTLPTYQWLAKAGITPDSSKTFTLSEITSALKSAAGVTPALDCDGKNLNQISWYFHLKGSLLDGKFVPIDAPKAGSCASSGLKYPPKSGSGSSSGGSSGGTSGS

SEQ ID NO: 11035 - protein, 234 aa, Trichoderma viride
ASKTCPSNTPLSCHNTTVVQDTCCFIPSGQLLQTQFWDTDPSTGPSDSWTIHGLWPDNCDGSFPQTCDASRAYTNITDILTAMGADDTLQYMQTYWKDYQGNDESFWEHEWGKHGTCITTLDPGCYDDYVPTEEAADFFSKTVSLFKTLPTYQWLADAGITPDGSKSYALDDIQSALSQQHGAEVTLGCDGKTLNEVWYHFNVKGSLQDGQFVAAEPDGAKSTCPDDVYYDPKK

SEQ ID NO: 11036 - protein, 220 aa, Petunia axillaris subsp. axillaris
MFKSQLTSAHFILLFAISPIYGDFDYMQLVLTWPATFCYPKGFCQRIPPKNFTIHGLWPDKERQRLQFCAKDYKYVNFEGDIKSSLDHHWIQLRFNKEVGLKYQPLWHDQYKKHGTCCSNLYDQTAYFLLAMRLKNKFDLLGTLRTNGITPGRRYTFQRIHGAIKTVTQMDPDLKCVEHIKGVLELNEIGICFTPNAESPYHCPQSHSCEKRGYTGILFR

SEQ ID NO: 11037 - protein, 221 aa, Petunia axillaris subsp. axillaris
MFESRLMSVLFIFLFALSPVYGTFEYMQLVLTWPISFCHTKHCERIPTNFTIHGLWPDNKNALLNNCVPDATYNKITNPELLKQMDYRWPELTSKEIDGKKKQGLWGHEFLKHGTCCTGYDTEEAYFKLAMGLKDRFDLLKILSARGIIPGTTHTLDNIQKAIKAVTRALPNLYCSSDPKRPRMELLEIGICFDPKATSVIVCRRYKTCHTDGTTLIDFPG

SEQ ID NO: 11038 - protein, 180 aa, Physarum polycephalum [sequence omitted]

SEQ ID NO: 11039 - protein, 409 aa, Pholiota nameko
MFFSVVVSSLAAIALATPFFSPNDPTSQLFDRANLISSGYSTTGTQSCHNTSSVSNLCCFEAPGGLLLQTQFWDTNPSTGPSDSWTIHGLWPDHCDTTFSENCDSSRDYTGIGTLLSNNGASDTLAFMQTHWVDINGQNEQFWEHEWATHGTCMSTLKPSCLPSGSVKGAEAVAFFQTVVKLFQTLPTFTFLSNEGITPSTTKTFTLSQLTTALKAQTGFTPALDCSSGALNQISWYFNLKGSIIDGTFVPINAPETGSCPSSGIKYPPKSGGSSTTTTGGSSPTGTPGSLPGKATIHAISSSGTVGGLLSAGTWSTQTLATYTITGTASSFTMTSSKGNCGVSGTTFSCGSGVTTTSFSAVTSGSDLLLASGGSTSFSSDGVPSGSTVFTVFTGTSHTDRYTLSIIST

SEQ ID NO: 11040 - protein, 409 aa, Pholiota nameko
MFFSVVVSSLAAIALATPFFSPNDPTSQLFDRANLISSGCSTTGTQSCHNTSSVSNLCCFEAPGGLLLQTQFWDTNPSTGPSDSWTIHGLWPDHCDTTFSENCDSSRDYTGIGTLLSNNGASDTLAFMQTHWVDINGQNEQFWEHEWATHGTCMSTLKPSCLPSGSVKGAEAVAFFQTVVKLFQTLPTFTFLSNEGITPSTTKTFTLSQLTTALKAQTGFTPALDCSSGALNQISWYFNLKGSIIDGTFVPINAPETGSCPSSGIKYPPKSGGSSTTTTGGSSPTGTPGSLPGKATIHAISSSGTVGGLLSAGTWSTQTLATYTITGTASSFTMTSSKGNCGVSGTTFSCGSGVTTTSFSAVTSGSDLLLASGGSTSFSSDGVPSGSTVFTVFTGTSHTDRYTLSIIST

SEQ ID NO: 11041 - protein, 279 aa, Caenorhabditis elegans
MKLLLLLCISCIPLAYSHDGEPFDYLMFTTIYPTAVCRADDDSVPESCEIPSGTPQWSIHGLWPNFENGSYPQNCRGTPRHFDENLIKSIEDRLVVVWPNLYPKKTIQSFWKHEYDKHGTCAQSEKLFESELAYFTEVMKVFDSIDVAGGLKSVGPSEKPITSSDLKNALSGVTSGKTFQFHCLRDKKTKQFLLGDIRLCLNKDLTIRDCPTDGKHPNRVSRFERSIGRNRRGPPLPSFQPCPAEFIYLPEMSSISKSSDSTSPSIFGRIWSAIKNIGN

SEQ ID NO: 11042 - protein, 137 aa, Caenorhabditis elegans
MKLLLLLCISCIPLAYSHDGEPFDYLMFTTIYPTAVCRADDDSVPESCEIPSGTPQWSIHGLWPNFENGSYPQNCRGTPRHFDENLIKSIEDRLVVVWPNLYPKKTIQSFWKHEYDKHGTCAQSEKLFESELAYFTE

SEQ ID NO: 11043 - protein, 139 aa, Lycopersicon hirsutum
IHGVWPDNKSTMLNNCDFDGEYDDITEPHKLKELEDQWPDLTSMDGDIKKHQDFWGYEFTKHGSCSIDLYNQEAYFDLALKLKNMFDLLKILKNHGIIPGKIYTVKNVEDAIKAVSTKAPNLNCIGRYTQTMELPEIGI

SEQ ID NO: 11044 - protein, 134 aa, Lycopersicon hirsutum
IHGVWPDNEQYMLNDCYGRMYTTIELPGEQNKMNDRWPDLRYTKEFSLEKQKFWEYEYNKHGTCCQPRYNQQQYFNLTMKLRDKFDLLSALQNHGITPGSTTTVKKIGLAIATVTKEFPSLKCIPTMELPEIGL

SEQ ID NO: 11045 - protein, 214 aa, Lycopersicon parviflorum
MVKPQLTAALFIVLFAISPAYGDFDSLQLVLTWPASFCHMNDCVRIAPKNFTIHGLWPDKEGTVLQNCKPKPNYSNFKEKMFNDLDKHWIQLKYDEDYGEKEQPLWFYQYLKHGSCCQKMYNQNTYFSLALRLKDKFDLLRTLQTHKIFPGSSYTFKEIFDAVKTATQMDPDLKCTKGAPELYEIGICFTPKADALIPCRQSNTCARTGKIFFR

SEQ ID NO: 11046 - protein, 221 aa, Todarodes pacificus
KDTHFDFFVFTQQWPPAVCVEAQAHGHLCSIPSDVKGWVVHGLWPSRKTDRMGPFFCNNTYSFDENKIKPIEAEMRKYWPNLFADSPDLSFWKHEWKKHGTCSLSDKLTPDEFGYFNTALNLFKKYNITSILGHSGVIPNTYTAYEVNDFSTAVENALNIVPVITCIYDKMSKHHYIMQVEICIDKELNAISCPDDHSEASSARNCPASKGIWYPPIIPQD

SEQ ID NO: 11047 - protein, 257 aa, Drosophila melanogaster
MSVQDHNWDVLIFTQQWPVTTCYHWREENPDQECSLPQKKEFWTIHGIWPTKLHQMGPNFCNNSANFDPSKLNPIEDRLETFWPDLKGMDSTEWLWKHEWQKHGTCAMLVEELDNELKYFEQGLTWREEYIMSRILDASDIHPDSNNTVAAINNAIVKALGKNPSIHCLYDGKHGISYLSEIRICFSKSLELIDCDGIKQGDAVPVGVPGGTIITNCHIGSLVHYPSLVPPLQRKSHWKLPLVNVYKLLQFLMWFTL

SEQ ID NO: 11048 - protein, 325 aa, Drosophila melanogaster
MQSQRFLFVAILACFLVTIKSTPLSDISDSDESTSVDEKTQKRPDDDSEFDGFPFREDDDSLQDSSREMSVQDHNWDVLIFTQQWPVTTCYHWREENPDQECSLPQKKEFWTIHGIWPTKLHQMGPNFCNNSANFDPSKLNPIEDRLETFWPDLKGMDSTEWLWKHEWQKHGTCAMLVEELDNELKYFEQGLTWREEYIMSRILDASDIHPDSNNTVAAINNAIVKALGKNPSIHCLYDGKHGISYLSEIRICFSKSLELIDCDGIKQGDAVPVGVPGGTIITNCHIGSLVHYPSLVPPLQRKSHWKLPLVNVYKLLQFLMWFTL

SEQ ID NO: 11049 - protein, 325 aa, Drosophila melanogaster
MQSQRFLFVAILACFLVTIKSTPLSDISYSDESTSVNEKTQKRPDDDSEFDGFPFREDDDSLQDSSREMSVQDHNWDVLIFTQQWPVTTCYHWREENPDQECSLPQKKEFWTIHGIWPTKLHQMGPNFCNNSANFDPSKLNPIEDRLETFWPDLKGMDSTEWLWKHEWQKHGTCAMLVEELDNELKYFEQGLTWREEYIMSRILDASDIHPDSNNTVAAINNAIVKALGKNPSIHCLYDGKHGISYLSEIRICFSKSLELIDCDGIKQGDAVPVGVPGGTIITNCHIGSLVHYPSLVPPLQRKSHWKLPLVNVYKLLQFLMWFTL

SEQ ID NO: 11050 - protein, 243 aa, Oncorhynchus keta
MKSLALVVLLCLGCGLMSSSFVLASPHMWSKLILTQHWPSTFCSMEHCDPKFDYWTLHGLWPDKGQECNSSWHFNVTLIQDLLPDMQKWWPDLITPASSEFWQYEWQKHGTCAAKAESLNSQHKYFGKVLELYHMVDLDGVMKKFNIVPSEAYYTFDHIEGIILNFYNVKPKIQCIHPKGGKVQILGQIEICFNSDFQLANCEHSETDTLRLIDFLNVKGTEFSVCDHATPVYYPPLKGKPSM

SEQ ID NO: 11051 - protein, 182 aa, Rana catesbeiana
TPEWKKLILTHHWPVTVCKMAEQKCDDIPNYWTLHGLWTDKEAQMCNISWPFDYSEIKDILADMNKWWPDVLHPNSSQLLKHEWQKHGTCAASLPSLNTQHKYFSKGLELYTRVSLSSALEKSGIKPANTYKVEEIENVILNVYGVIPKIQCIPPQQGEDAQTLGIEICFTKDFDLLNCTVE

SEQ ID NO: 11052 - protein, 117 aa, Lycium andersonii
IQGTVLNNCDSQAKYTTVTDDKFDKRDKHWPDLKLSKADALKHQDFWEYQFKKHGTCCADLFNEEKYFDLALGLKDRFDLLTTFRSHGIIPRSTHLLIKSLKPSGQSLGVIPNLYCT

SEQ ID NO: 11053 - protein, 118 aa, Lycium andersonii
NWSTTLQDCNRRVIINGVKDEQKRIYLDTRWPQLQHTKQFGMENQPFWRSEYRKHGTCCDNLYNEEAYFDLAMNLKDRFDILRILGNKGITPGQTYMVQKVQDAIRAVTHKLPKLKCV

SEQ ID NO: 11054 - protein, 118 aa, Lycium andersonii
NYSTTLNHCDHTKTYKKFKDNKEKSDLYKRWPDLTITEFDCLDKQAFWSREYMKHGTCCSDKFDRVQYFALAMALKDKFDLLKSLRNHGINRGYSYTVQKINSTIKAITRGYPNLTCA

SEQ ID NO: 11055 - protein, 188 aa, Prunus salicina
LCFIMSTGDGSYDYFQFVQQWPPTNCRVRTKCSNPRPLQIFTIHGLWPSNYSNPTMPSNCIGSQFNESKLYPHLRSKLKRSWPDVEGGNDTNFWGKEWNKHGKCSEQTLNLMQYFQRSHEMWNSFNITDILKNASIVPSPNQTWTYTDIVSALKTRTKRTPLLRCKPDPKAKSQPTRQAKSQPTSQPK

SEQ ID NO: 11056 - protein, 207 aa, Prunus salicina
FCYVMSSGSYDYFQFVQQWPPTNCRVRNKPCSKPRPLQNFTIHGLWPSNYSNPTMPSKCTGSRFKKENVYPQLRSKMKISWPDVGSGNDTRFWESEWNKHGTCSEGTLNQVQYFQRSHAMWRSHNVTEILRNASIVPHPTQTWSYSDIVSPIKTATKRTPLIRCKYDKKTQLLHEVVFCYEYNALKQIDCNRTAAAGCKNPQAISFQ

SEQ ID NO: 11057 - protein, 208 aa, Prunus salicina
FCYVMSSGSYDYFQFVQQWPPTNCRVRVKRPCSNPRPLQYFTIHGLWPSNYSNPRMPSNCTGSQFKKQNLYPYMQSKLKISWPDVESGNDTKFWEGEWNKHGTCSERTLNLMQYFQRSHAMWKSHNITEILKNASIVPHPTQTWKYSDIESPIKRATKRTPVLRCKRDPVQANTQLLHEVVFCYEYDALKLIDCNRTDCWKNVDIKFQ

SEQ ID NO: 11058 - protein, 175 aa, Prunus salicina
FCYVLSSGSYDYFQFVQQWPPTNCKIRKKCSKPRPLQMFAIHGLWPSNHSNPTTPSNCNGAQFDDRKVYPRLRSKLKISWPDVENGNDTKFWEGEWNKHGRCSEQTLNQMQYFERSYEIWNLFNITNILKNASIVPSATQTWTYSDIVSNIKAVTQRTPLLRCRRNPAYNKSGPN

SEQ ID NO: 11059 - protein, 212 aa, Prunus salicina
MCFIMSTGDGSYDYFQFVQQWPPATCRLSGKSCSKPRLQIFTIHGLWPSNYSNPKIPSNCKGALFEARKVYPQLQLNLKISWPDVKSGNETNFWQSEWNKHGTCSERTLNQMQYFERSDEMWNSYNITEILKNASIVPHPTQTWKYADIELPIKTATKRTPVLRCKRDPAQNKTGPKTQLLYEVVFCYDYHAKRQIDCNRTECWNKVDIKFH

SEQ ID NO: 11060 - protein, 169 aa, Prunus salicina
FCYVMSSGSYDYFQFVQQWPPTNCRVRNKPCSKPRPLQNFTIHGLWPSNYSNPTMPSKCTGSRFKKENVYPQLRSKMKISWPDVGSGNDTRFWESEWNKHGTCSEGTLNQVQYFQRSHAMWRSHNVTEILRNASIVPHPTQTWSYSDIVSPIKTATKRTPLIRCKYDKK

SEQ ID NO: 11061 - protein, 170 aa, Prunus salicina
FCYVMSSGSYDYFQFVQQWPPTNCRVRIKRPCSNPRPLQYFTIHGLWPSNYSNPTMPSNCNGTQFKIQNLFPYLRSRLKMSWPDVESGNDTKFWEGEWNKHGTCSERILNIMQYFQRSQSMWKSHNITEILKNASIVPHPTQTWKYSDIASPIKSATGRTPLLRCKQDKS

SEQ ID NO: 11062 - protein, 187 aa, Prunus salicina
LSFIMSAAHGSYDYFQFVQQWPPTNCRVRKQPCSKPRPLQIFTIHGLWPSNYSNPTKPSNCNGSQFDDRKVYPQLRTKLKRSWPDVEDGNDTKFWEREWNKHGTCSEGRLNQMQYFERSHNMWMSYNITEILKNASIVPHPTRTWSYSDIVSPIKTATKRTPLLRCKPDPAQPKKGKRAQPNSPPQS

SEQ ID NO: 11063 - protein, 171 aa, Prunus salicina
LCFVMSTGSYVYFQFVQQWPPTTCRVRWKPCSQPRPLQFFTIHGLWPSNYSNPKMPSNCIGSQFNFTKVYPHMRSKLKISWPDVESGNDTKFWEGEWKKHGTCSEERLNQMQYFERSFLMWKSYNITEILKNASIVPSATQTWKYSDIVSPIKAVTKTTPALRCKRDRATN

SEQ ID NO: 11064 - protein, 203 aa, Prunus salicina
LCFIMSTGSHVYFQFVQQWPPTTCRLSSKPRYKHRPLQNFTIHGLWPSNYSNPTKPSNCNGSQFKILPPQLISKLKISWPDVESGNDTRFWEGEWNKHGTCSEQTLNQLQYFEQSYSMWKSYNITEILKNASIIPSATQTWKYSDIVSAIKTATKRTPLLRCKWDKNTQLLHEVVFCYGYNAIKQIDCNRTAGCKNNVGISFQ

SEQ ID NO: 11065 - protein, 173 aa, Prunus salicina
FCYVMSSGSYDYFQFVQQWPPTNCRVRIKRPCSKPRPLQNFTIHGLWPSNYSNPKMPSNCNGSQFDARKVYPHMRSKLKRSWPDVESGNDTRFWEGEWNKHGRCSEQTLNQMQYFETSHDIWMSYNITEILKNASIVPSPSATQTWKYSDIVSPIKAATKRTPLLRCKRDKNN

SEQ ID NO: 11066 - protein, 173 aa, Prunus salicina
FCYVMSSGSYDYFQFVQQWPPTNCRVRVKRPCSNPRPLQYFTIHGLWPSNYSNPRMPSNCTGSQFKKQNLYPYMQSKLKISWPDVESGNDTKFWEGEWNKHGTCSERTLNLMQYFQRSHAMWKSHNITEILKNASIVPHPTQTWKYSDIESPIKRATKRTPVLRCKRDPVQAN

SEQ ID NO: 11067 - protein, 133 aa, Prunus salicina
  unsure (1)..(133): unsure at all Xaa locations
LCFIMSTGDGSYDYFQFVQQWPPTNCKVRTKCSNPRPLQIFTIHGLWPSNYSNPPMPSNCNGSKFEDRKVSPQLRSKLKRXWPDVESGNDTKFWEGEWNKHGTCSEQTLNQMQYFERSHSMWYSFNITEILRN

SEQ ID NO: 11068 - protein, 177 aa, Prunus salicina
LCFIMSTGDGSYDYFQFVQQWPPATCRLSGKSCSKPRLQIFTIHGLWPSNYSNPKIPSNCKGALFEARKVYPQLQLNLKISWPDVKSGNETNFWQSEWNKHGTCSERTLNQMQYFERSDEMWNSYNITEILKNASTVPHPTQTWKYADIELPIKTATKRTPVLRCKRDPAQNKTGPK

SEQ ID NO: 11069 - protein, 167 aa, Prunus salicina
LCFIMSTGSHVYFQFVQQWPPTTCRLSSKPRYKHRPLQNFTIHGLWPSNYSNPTKPSNCNGSQFKILPPQLISKLKISWPDVESGNDTRFWEGEWNKHGTCSEQTLNQLQYFEQSYSMWKSYNITEILKNASIIPSATQTWKYSDIVSAIKTATKRTPLLRCKWDKN

SEQ ID NO: 11070 - protein, 132 aa, Prunus salicina
LCFIMSTGSYVYFQFVQQWPPATCIRSNKPCTKHRPLPIFTIHGLWPSNYSNPRMPSNCRGSLFETRKLSPELQSKLKRAWPNVETDNDTKLWEHEWNKHGRCSEGTLNQTQYFQRSYSMWRSHNITEILRN

SEQ ID NO: 11071 - protein, 199 aa, Gallus gallus
EWSKLYLAHHWPVTVCKDCQDPPEYWTIHGLWPDKGEECNRTWHFNVTEIKDLMSDMRRYWPDVIHSSLNRTQFWKHEWEKHGTCAATLPILNSQKKYFSKTLELYQLVNLGFLLKAGIKPGSTTYYQMAAIKEVLTEFYGITPKIQCLPPEEGEEAQTLGCIEFSFTKELELRTCTEPKEELSVCNDTLPVYYPSQVK

SEQ ID NO: 11072 - protein, 408 aa, Hericium erinaceum
MLRAFLTTSAILASVVLANARLPGFSSADSHSLFKRISSGCSTSGAASCSSGSVGNTCCTESPGGLLLQTQFWDTNPSTGPSNSWTIHGLWPDNCDGTFEENCDSSRDYTNIAGLLQAQGASDTLSFMQEFWVDINGQNEQFWEHEWATHGTCMSTLEPSCLPSGSPTGAEAVAFYQTVVKLFKSLPTYDWLSQEGITPSSSKTYTLSDFTSALNKASGFTPALNCNGNTVNQISWYFHLKGSIIDGNFVAIDTPASGSCPSSGLKYPLKSGSSTSTSAGTSPTGSPGGLPSKATISALTSSGSSLGGLLSAGKWSTQTPGTYTISGSSNSFTLTSSKGACAVTSGEFACGGSSSSTFSAVTSGSNLLLAFQGSTAFSSDASPSGQAQETVFTGSSHSVQFSLTLIST

SEQ ID NO: 11073 - protein, 256 aa, Homo sapiens
MRPAALRGALLGCLCLALLCLGGADKRLRDNHEWKKLIMVQHWPETVCEKIQNDCRDPPDYWTIHGLWPDKSEGCNRSWPFNLEEIKDLLPEMRAYWPDVIHSFPNRSRFWKHEWEKHGTCAAQVDALNSQKKYFGRSLELYRELDLNSVLLKLGIKPSINYYQVADFKDALARVYGVIPKIQCLPPSQDEEVQTIGQIELCLTKQDQQLQNCTEPGEQPSPKQEVWLANGAAESRGLRVCEDGPVFYPPPKKTKH

SEQ ID NO: 11074 - protein, 189 aa, Homo sapiens
MRPAALRGRLLGCLCLALLCLGGADKRLRDNHEWKKLIMVQHWPETVCEKIQNDCRDPPDYWTIHGLWPDKSEGCNRSWPFNLEEIKDLLPEMRAYWPDVIHSFPNRSRFWKHEWEKHGTCAAQVDALNSQKKYFGRSLELYRELDLNSVLLKLGIKPSINYYQVADFKDALARVYGVIPKSSASTKPG

SEQ ID NO: 11075 - protein, 150 aa, Homo sapiens
MRPAALRGALLGCLCLALLCLGGADKRLRDNHEWKKLIMVQHWPETVCEKIQNDCRDPPDYWTIHGLWPDKSEGCNRSWPFNLEEIKDLLPEMRAYWPDVIHSFPNRSRFWKHEWEKHGTCAAQVDALNSQKKYFGRSLELYRELDLNRW

SEQ ID NO: 11076 - protein, 200 aa, Sus scrofa domestica
HEWKKLIMVHHWPMTVCNEKNCEHPPDYWTIHGLWPDKSGECNRSWPFNPDEIKGLLPDMRLYWPDVLHSSPNHSVHFWRHEWEKHGTCAAQLDALNSQRKYFGKTLDLYKELALNSTLQKLGIKPSISYYQISDIKHALVGVYGVVPKVQCLPPKSGEKVQTLGQIELCLTRDLQLQDCPEPGLEICEDGPVFYPPPKE

SEQ ID NO: 11077 - protein, 198 aa, Bos indicus
LEWSKLIMVHHWPATVCQEVARHCKDPPNYWTIHGLWPDKSEACNRSWPFNPHEIKDLLPDMKMYWPDLLHPSNSSLQFWSHEWKKHGTCAAQLNSQRKYFGKSLDLYKALALTSMLQKLGIEPSTDHYYQVSDIRDALVTVYKVVPKVQCFLLEKGQEVQLLGQVELCFSKDLQLQNCSHADLLVCNDGPVLYPPLL

SEQ ID NO: 11078 - protein, 511 aa, Rattus norvegicus
MEDIKDSKVKRFCSKNILIILGFSSVLAVIALIAVGLTHNKPLPENVKYGIVLDAGSSHTNLYIYKWPAEKENDTGVVQLLEECQVKGPGISKYAQKTDEIAAYLAECMKMSTERIPASKQHQTPVYLGATAGMRLLRMESKQSADEVLAAVSRSLKSYPFDFQGAKIITGQEEGAYGWITINYLLGRFTQEQSWLNFISDSQKQATFGALDLGGSSTQVTFVPLNQTLEAPETSLQFRLYGTDYTVYTHSFLCYGKDQALWQKLAQDIQVSSGGILKDPCFYPGYKKVVNVSELYGTPCTKRFEKKLPFNQFQVQGTGDYEQCHQSILKFFNNSHCPYSQCAFNGVFLPPLQGSFGAFSAFYFVMDFFKKMANDSVSSQEKMTEITKNFCSKPWEEVKASYPTVKEKYLSEYCFSGTYILSLLLQGYNFTGTSWDQIHFMGKIKDSNAGWTLGYMLNLTNMIPAEQPLSPPLPHSTYISLMVLFSLVLVAMVITGLFIFSKPSYFWKEAV

SEQ ID NO: 11079 - protein, 449 aa, Rattus norvegicus
MRLSWKERVFMVLLGVAAASGLTMLILILVKATNVLLPADTKFGILFDAGSSHTSLFVYQWPANKEKDTGVVSQALACQVEGPGISSYTSDPTQAGESLKSCLQEALALIPQTQHPVTPTFLGATAGMRLLSQKNSSQAQDILAAVSQTLSRAPVDFWGARILAGQDEGAFGWITVNYVLGMLLKYSSGQWILPEDGTLVGALDLGGASTQISFVPQGPILDQSTQVTFRLYGANYSVYTHSYLCFGRDQILRRLLAELVQSSQVARVRHPCYHSGYQATLSLASLYDSPCVHTPDSLNYTQNLTVEGIGNPGNCVAALRGLFNFSSCKGQEDCAFNGVYQPPVHGQFYAFSNFYYTFQFLNLTSRQPLNIVNDTIWKFCQKPWRLAGGTDIGWTLGFMLNLTGMIPAEALTQWRAQSYSIWIAGVVFAVLTLVAILGAAAVQLFWTQD

SEQ ID NO: 11080 - protein, 827 aa, Plasmodium falciparum 3D7
MENLIGTPLIEKKKKESHISIRKDKKLNDIEGEKKEKKIKERLFLCLICLLVIIWLIYFCYKNHIFLSYLQNEKEYGIIIDAGSNGTRIHLFEWKKREYELSNKKEENNLIELKEIFNAKVKKSISTISYNEIKDILIYLINKVIDHLIEKKIYVYNKQKWKSYPFYFQATGGMRNLKQEDRNLRMKYIKNILSNDNYNPFYFLNEYARILSGEEEGIYGWLAVNNLLNSIFSKPNNTYGAIDLGGSSTQITFYPMDHNILENYNSILLNNILIRLYSHSFIGYGWIDSLFRVNIYLCLEIIKKLSTRNIKNIYQLENYYDDYINDYFYNNLPNYNWFFYSTKKIINNNKENYNHHNYENINYDVNKRNYPYNNFQQKYIHTNPKKGNYTKGNINNSNKSYKNLSNILLQEIVKYIQHSQNDYPYSSLTDIYDYTYNIYDEKPYDIENFIKTIKNFNRHSKEDTIMLVQNPCLPYPYEMKITFPTYNLVTSQFVILKKNSRNEIGNINDIKNDGNNYTQNDDNNYTQNDGNYYRQNVGNYYRHNHNINDVYELNSSESYDNFISNFVLKLKIINNNMSLMDNIYEDFKNKGYLNNVLKKVNDNKISNTLKNEIIKRLFEKIINEKIKKLYINITVRIVGSNDFKKCLENTKKLFYEQPCFLSSCSFNGIYQPNLENNKFVLHGQFKKVITYLGFKKYVDLNQMKIYIQKLCNMNLYELTYNMSNKIMHNQIPTFCWKSIWSYSLLFYGFKFKETTKLLIINDNTNISYDSSSTSQASKQFYKSTLKKYKLYSEVFFVLFLIIFIILIILGGYIFKFKEILNKKYRFL

SEQ ID NO: 11081 - protein, 692 aa, Arabidopsis thaliana
MVFGRITELFTAASSRLPAGSQSSVPYMPTGSSPDVGTSVSDSISIGNGGRKNCLRHSASLQDFSSYHGFDPEESILPREAISWGQNGSSFSKEKGSVPNGTNPSTRRKLIRAVMIVMCLFLFAFLVYIVSMYIYTNWSRGASRYYVVFDCGSTGTRAYVYQASINYKKDSSLPIVMKSLTEGISRKSRGRAYDRMETEPGFDKLVNNRTGLKTAIKPLIQWAEKQIPKNAHRTTSLFVYATAGVRRLRPADSSWILGNVWSILAKSPFTCRREWVKIISGTEEAYFGWTALNYQTSMLGALPKKATFGALDLGGSSLQVTFENEERTHNETNLNLRIGSVNHHLSAYSLAGYGLNDAFDRSVVHLLKKLPNVNKSDLIEGKLEMKHPCLNSGYNGQYICSQCASSVQGGKKGKSGVSIKLVGAPNWGECSALAKNAVNSSEWSNAKHGVDCDLQPCALPDGYPRPHGQFYAVSGFFVVYRFFNLSAEASLDDVLEKGREFCDKAWQVARTSVSPQPFIEQYCFRAPYIVSLLREGLYITDKQIIIGSGSITWTLGVALLESGKALSSTLGLKSYETLSMKINPIALISILILSLLLLLCALSRVSNCLPRFFRKSYLPLFRHNSTSASSVLNIPSPFRFQRWSPMSTGNSICIILSYGQFFCSQFLTLSFFVSLIFFLGRYLFLELIFFQG

SEQ ID NO: 11082 - protein, 1052 aa, Arabidopsis thaliana
MTAPMILTGSGSAAERDARMAHTAMAFVQLFNGGYHVITKVALNVGVNQLVFCVCRDLLALSILAPLAYFRERSLLFQLGIWEPVVISYRSYIHKSHLCCCHSTIHPGLHLSLGCHDGFWFFDVSYLVCSTERVNLLRIEGQTKVGGTLVCVMGAVFMVVFRGPALLGDKDADFAMNNEISAKGQPEPTGWLVSGFLDLGFEQWHIGVLCLIGNCMCLDQRINCSLLTSVHVSFNVDIMETLQAPLLKKYPANLSVAALSYFFGTVLMCTTAFFMVKEPLDWKLTQSEVLAVIYAGVIASALNYGLLTWSNKIIGPALVALYNPLQPAASAFLSRIFLGSPIYLGRLDTFSGIFFNHPQSSLAKLNTFTFQHLVPFHSFHLQNFLTRFLFLYAALWAREMVFGRITELFTAASSRLPAGSQSSVPYMPTGSSPDVGTSVSDSISIGNGGRKNCLRHSASLQDFSSYHGFDPEESILPREAISWGQNGSSFSKEKGSVPNGTNPSTRRKLIRAVMIVMCLFLFAFLVYIVSITGTRAYVYQASINYKKDSSLPIVMKSLTEGISRKSRGRAYDRMETEPGFDKLVNNRTGLKTAIKPLIQWAEKQIPKNAHRTTSLFVYATAGVRRLRPADSSWILGNVWSILAKSPFTCRREWVKIISGTEEAYFGWTALNYQTSMLGALPKKATFGALDLGGSSLQVTFENEERTHNETNLNLRIGSVNHHLSAYSLAGYGLNDAFDRSVVHLLKKLPNVNKSDLIEGKLEMKHPCLNSGYNGQYICSQCASSVQGGKKGKSGVSIKLVGAPNWGECSALAKNAPCALPDGYPRPHGQFYAVSGFFVVYRFFNLSAEASLDDVLEKGREFCDKAWQVARTSVSPQPFIEQYCFRAPYIVSLLREGLYITDKQIIIGSGSITWTLGVALLESGKALSSTLGLKSYETLSMKINPIALISILILSLLLLLCALSRVSNCLPRFFRKSYLPLFRHNSTSASSVLNIPSPFRFQRWSPMSTGNSICIILSYGQFFCSQFLTLSFFVSLIFFLGRYLFLELIFFQG

SEQ ID NO: 11083 - protein, 385 aa, Glycine max
VTFESDQQLNSETSLYVRIGSVSHHLTAYSLPGYGLNEAFGKSVVYLFRKEFGSGNVDVGSGGNAELKHPCLQDGALAKVAVNLSEWTDLGAVDCGAQPCALGDNLPHPYGHFYVISGFYVVYRFFNLTSEATLDDVLAKGKGFCEKRWDVAKRSVAPQPFIEQYCFRAPYIASLLREGLHINDNQITVGSGNITWTLGVALLEAGKAFSTRFGLRDLEFFQMKINPLVLVPILLLSFILLLCALSCVGNWMPRFFRRQYLPISRHNSAGASVLNIPSPFRFQRWSPMYSGDGRLKMPLSPKIASSQQSQFGLGHSLDGGGIELMESSSSANNVSHSYSSNNLGQMQFDSGIWSPHRSQMRLQSRRSQSREDLNSSLAEVHLMKP

SEQ ID NO: 11084 - protein, 362 aa, Glycine max
  unsure (1)..(362): unsure at all Xaa locations
XERYSCSHCSNAVKKGGESPTVEGNGNVLGKKDGGLRTVVTLIGAPNWLECSALAKVAVNLSEWSDVSGMDCEVHPCALRDNLPRPMGHFYVISGFFVVYRFFNLTAEATLEDVLEKGREFCEKRWDVARKSVAPQPFIEQYCFRAPYIASLLREGLHITDKHITVGSGSITWTLGVALLEAGKAYSVRFGLRGFYLLQMKMNPLILIPILILSFILLLCALSWVVNWMPRFFRRQYLPFFRHNSASSACINIPSPFRFQRWSPMNSGDGRTKTPLSPTIAGSQDRPFSLGHGLSGGNIQLMESSFQASSVSHSYSSNNLGQMQFDSSIWSPHRSQMHLQSRRSQSREDLNSSLAETHMVKA

SEQ ID NO: 11085 - protein, 211 aa, Glycine max
  unsure (1)..(211): unsure at all Xaa locations
PASVSIESLKDGLRKNPSSGRAYDRMETEPGLDKLLHNRTGLKTALEPLLKWAQKQIPKTSHKTTSLFLYATAGVRRLPFDDSKWLLDNAWSFLKSSSPFVCKRDWVKIISGTEEAYLGWIALNYDSGILGVKPRKETYGALDLGGSSLQVTFEGNRNKEQQNQQLLNSETRLYVRIGSMNHHLTGYSLAGYGLNEAFEXSGAYVFKKYGY

SEQ ID NO: 11086 - protein, 702 aa, Oryza sativa (japonica cultivar-group)
MRLSSSLQDLPTFSRIDALERGSSTGSDLVSGRAKPIRTLQRDGAVASFSKEKTPPSSPTNRKKCMRAAGCAIALFLLVFFIYASLRYFHVFLSEGSPEYYVILDCGSTGTRVYVYEWSVNHDDGNTFPIALKPLGNAPKKKSGKLTGRAYQRMETEPGLNKLVHNETGLKMTIEPLLRMAEKLIPRRAHKHTPAFLYATAGVRKLPSADSEWLLDKAWDILKNSSFLCSRDRVKIISGMDEAYYGWIALNHHLNMLGTSSSKMTYGSLDLGGSSLQVTFETDNSIQDETSMSLRIGSISHQLSAYSLSGYGLNDAFDKSVAHLVKKLGGAAGNGKVQVKHPCLQTGYKEDYICSYCHPLKLDGSPSVGGKTTGKEKQGMAVELIGMPQWNECSALAKLTVNLSEWSNASSVDCNTKPCALPSTFPQPHGQFYAMSGFYVVFKFFNLTADATLIDVLNRGQEFCEKTWKVAKSSVPPQPFIEQYCFRAPYITSLLREGLQIKDNQVIIDSGSITWTLGVALLEAGQVLSTRIDIQGYRILHREINPNILIVLFLISIVLVICAILCVSNSIPRSFRKSYLPLFRQNSAGSPVLSMGSPFRFHLWSHITSGDARTKTPLSPTVAGSEPHPFSMSHGLGGSSVQLMESSRQSLGVYHSYSVGSLGQMQFSSGMWKPGQTTLQSRRSQSREDLTSSLADLHLPKV

SEQ ID NO: 11087 - protein, 681 aa, Oryza sativa (japonica cultivar-group)
MRLSSSLQDLPTFSRIDALERGSSTGSDLVSGRAKPIRTLQRDGAVASFSKEKTPPSSPTNRKKCMRAAGCAIALFLLVFFIYASLRYFHVFLSEGSPEYYVILDCGSTGTRVYVYEWSVNHDDGNTFPIALKPLGNAPKKKSGKLTGRAYQRMETEPGLNKLVHNETGLKMTIEPLLRMAEKLIPRRAHKHTPAFLYATAGVRKLPSADSEWLLDKAWDILKNSSFLCSRDRVKIISGMDEAYYGWIALNHHLNMLGTSSSKMTYGSLDLGGSSLQVTFETDNSIQDETSMSLRIGSISHQLSAYSLSGYGLNDAFDKSVAHLVKKLGGAAGNGKVQVKHPCLQTGYKEDYICSYCHPLKLDGSPSVGGKTTGKEKQGMAVELIGMPQWNECSALAKLTVNLSEWSNASSVDCNTKPCALPSTFPQPHGQFYAMSGFYVVFKFFNLTADATLIDVLNRGQEFCEKTWKVAKSSVPPQPFIEQYCFRAPYITSLLREGLQIKDNQVIIDSGSITWTLGVALLEAGQVLSTRIDIQGYRILHREINPNILIVLFLISIVLVICAILCVSNSIPRSFRKSYLPLFRQNSAGSPVLSMGSPFRFHLWSHITSGDARTKTPLSPTVAGSEPHPFSMSHGLGGSSVQLMESSRQSLGVYHSYSVGSLGQMQFSSGMWKPELLYDTM

SEQ ID NO: 11088 - protein, 563 aa, Oryza sativa
  unsure (1)..(563): unsure at all Xaa locations
XNFIRIKFTYTNFTSPTNRKKCMRAAGCAIALFLLVFFIYASLSTGTRVYVYEWSVNHDDGNTFPIALKPLGNAPKKKSGKLTGRAYQRMETEPGLNKLVHNETGLKMTIEPLLRMAEKLIPRRAHKHTPAFLYATAGVRKLPSADSEWLLDKAWDILKNSSFLCSRDRVKIISGMDEAYYGWIALNHHLNMLGTSSSKMTYGSLDLGGSSLQVTFETDNSIQDETSMSLRIGSISHQLSAYSLSGYGLNDAFDKSVAHLVKKLGGAAGNGKVQVKHPCLQTGYKEDYICSYCHPLKLDGSKEKQGMAVELIGMPQWNECSALAKLTPCALPSTFPQPHGQFYAMSGFYVVFKFFNLTADATLIDVLNRGQEFCEKTWKVAKSSVPPQPFIEQYCFRAPYITSLLREGLQIKDNQVIIDSGSITWTLGVALLEAGQVLSTRIDIQGYRILHREINPNILIVLFLISIVLVICAILCVSNSIPRSFRKSYLPLFRQNSAGSPVLSMGSPFRFHLWSHITSGISILKKLLLFSFYINYYVGLNFLIXLIYYYRKVVFVTXLYXQX

SEQ ID NO: 11089 - protein, 583 aa, Oryza sativa
  unsure (1)..(583): unsure at all Xaa locations
MPVAVSLDRTTSAVACKSIEAAAASKTSSPPPPSATTPPXTSVRADPTLPHTARSSTMRLSSSLQDLPTFSRIDALESAKPIRTLQRDGAVASFSKEKXXPPSSPTNRKKCMRAAGCAIALFLLVFFIYASLRYFHVFLSEGSPEYYVILDCGSTGTRVYVYEWSVNHDDGNTFPIALKPLGNAPKKKSGKLTGRAYQRMETEPGLNKLVHNETGLKMTIEPLLRMAEKLIPRRAHKHTPAFLYATAGVRKLPSADSEWLLDKAWDILKNSSFLCSRDRVKIISGMDEAYYGWIALNHHLNMLGTSSSKMTYGSLDLGGSSLQVTFETDNSIQDETSMSLRIGSISHQLSAYSLSGYGLNDAFDKSVAHLVKKLGGAAGNGKVQVKHPCLQTGYKEDYICSYCHPLKLDGSKEKQGMAVELIGMPQWNECSALAKLTVNLSEWSNAXXSVDCNTKPCALPSTFPQPHGQFYAMSGFYVVFKFFNLTADATLIDVLNRGQEFCEKTWKVAKSSVPPQPFIEQYCFRAPYITSLLREGLQIKDNQVIIDSGSHWASITAILLEAXVRCSFLVECGSQNCCTTPCX

SEQ ID NO: 11090 - protein, 435 aa, Oryza sativa
  unsure (1)..(435): unsure at all Xaa locations
XRAAGLGNAPKKKSGKLTGRAYQRMETEPGLNKLVHNETGLKMTIEPLLRVAEKLIPRRAHKHTPAFLYATAGVRKLPSADSEWLLDKAWDILKNSSFLCSRDRVKIISGMDEAYYGWIALNHHLNMXLGTSSSKMTYGSLDLGGSSLQVTFETDNSIQDETSMSLRIGSISHQLSAYSLSGYGLNDAFDKSVAHLVKKLGGAAGNGKVQVKHPCLQTGYKEDYICSYCHPLKLDGSKEKQGMAVELIGMPQWNECSALAKLTVNLSEWSNAXXSVDCNTKPCALPSTFPQPHGQFYAMSGFYVVFKFFNLTADATLIDVLNRGQEFCEKTWKVAKSSVPPQPFIEQYCFRAPYITSLLREGLQIKDNQVIIDSGSITWTLGVALLEAGQVLSTRIDIQGYRILHREINPXIFLMGLFLISIGLVICAILCVSNS

SEQ ID NO: 11091 - protein, 260 aa, Triticum aestivum
  unsure (1)..(260): unsure at all Xaa locations
XNLTPDATLVDVLKRGQEFCEKPWDVARSSVPPQPFIEQYCFRAPYITSLLREGLQIKDNQVIIGSGSITWTLGVALLEAGQALSRMDIQGYILLHREINPNILIVLFLISIVLVICAILCVSNSIPRSFRKSYLPLFRPNSGGSSALXGMGSPFRFHLWRHINSGDGRTKTPLSPTVAGSEPHPFSMTHGLGGSSVQLMESSRQSLGVYHSYSVGSLGQMQFSSELRNPTRGQTTLQSRRSQSREDLTSSLADLHIPKV

SEQ ID NO: 11092 - protein, 572 aa, Schizosaccharomyces pombe
MVRKYGIFIDAGSSGSRLLIYSWDYDTDSSLSDKVKKLPLIETGIGDGGKWSLKVQPGISSFANNPKHVGKKHLKELLDFAAHAIPKDVHKETPVFLSATAGMRLLGVDAQNKILSHACRYIKKNYDFDIPNCSNSIRVIDGKAEGMYGWLATNYLLKTLEEKDTSTVGFLDMGGASVQIAFELPPSQLKNYKDSISTVHIGLQNGQQLEYPLFVTTWLGFGANEAYRRYLGLLIESENGKVGNTLSDPCSLRGRTYDIDGIEFAGTGDLKQCLKLTYNLLNKDKPCSMDPCNFDGISIPPVDFANTEFVGVSEFWYTTNDVFDMGGSYHFPNFYKKVDEYCGTEWETMLSRLYNKELTPSTDENKLEKLCFKASWALNVLHEGFDVPKSNTSSNDAKDGLSVIPAYHSPFTSLEKIERTEVSWTLGQVLLYASNQQLLAKPEYANYYMDPYGKLIASPSKHWMRLFPNKLFFILSFIFCLFFLFSLVLFGYDPKRRQRFKKFLLRLQRRKAPYIMSANGSYEDIADFSDDLEMSSPSKWHGPPIRTTSSHVLADRLSFTASRERTPRSPFP

SEQ ID NO: 11093 - protein, 750 aa, Neurospora crassa
MTGRWGVILDAGSSGTRLHIYRWKDPEKALVDATPEELRSLPKITTKKKWTKKIRPGISTFGEKAGVVGQDYLKELIDHALDIIPADKIHDTPIFLMATAGMRLLPQVQQNAITGAVCTYLRKNTNFSLPDCDLHIQVIPGETEGLYGWIASNYLLGGFDHPEQHAHGQDHHTYGFLDMGGASAQIAFAPNSTEAQKHANDLKLLRLRTLDGSPAEYKVFTTTWLGFGVNRAREAYVQSLSDLYTTSDAGELPDPCLPKGLRLSLDGTPVSKPKKGETTLIGTGAFDECLRKTYPLLGKDKPCADDPCLINGQHVPAIDFDVNHFVGVSEYWHTTHGVFGGKENEAYDFTTYQKRVKDFCGRDWNSIEPSLDAHKKFAVKDAQEACFKASWLINILHEGIGVPRIGVEELPAPGLNASKGAIETAKQKGFLDPFHPVDKIDGIEVSWTLGKMVLYAAGQVPPKTGDDRFPVGFGTNIPSAGATELPPDFQYAGSTWTPLSGGASHNDSPYRPAVNGTTDDGSDWDLEAENLLGKTKAKTTHSLLIVFFIFLALLFFFRKKDRRMRFYGRVNNLFHKPRRSGLFGKMASSGHNNGPLSSLTNKLFGRRSLSSGSYERVLEEGEAAEFELNDSHFRNSASSYFDHNNDLNGFYSDSSDSSSSGGGRSKLGITSGLATPKLNLDGRFADLGCGNGLMTPGGSALDRAGLVVRTDSRERLGLTPTTTTMSLQGRRSRAGSPTRLKSPLMSPLQG

SEQ ID NO: 11094 - protein, 690 aa, Leishmania major
MPMTDGRVPGGKLRRSMSRVVLAFFAAVLFVVFLTAYEVGVGTANPLQSRHMQLTQNAVKKSEENLVNCREVNTDLRSGGDVNVARAMAEMRRQREELMNIVALERERVVSARSLLQVCEDELASDLSVLFGVADHNFTARLRSLEKKRKHLEGLHSMLNTDPFGAVQLRSSSEIRALQAALFHEMRASKKKAENGVASGAACAKSSVKYSVVFDIGSTGNRVHVYKYRVAPATRTAAAAGSELSDIDLVEELFELNHKALSELENSVQDAPEALWELFVKAKDFVPAELHACTAAEFKATAGLRMLGMEKANEILAGIRARYRNETFWLRGNASVRILDACEEGPMAWLTVNYLLGAFSRGATATDSTVAVIDLGGGSTQIVFEPGESTFHGMRTDFRYAATLGSRSVRAYQHSYEGYGLHAATKKLLYHIQGKSQEKPGGGTATNTAMTTTTTAPANGGDEVLPVWKALRNLGADGRSERGDIVTKRAPPMPPPDAEAMEAFPCFAVGYEDPLGVKNVKRNNAEEPVMPPNFQACANLFRDRLLKPVGLTCEAVNCGIAGVMQPPLTNFTGEIYAFSFIFDLLVLANSSLVPAGAAVSKEKFEVKLPDLAKIAEGHCAAFSLTRIAEATAKGGLGSLKPEYECMYYSYVYALLRYGYEVPEDRVLHVAKKIRGYETAWSLGASLLSLT

SEQ ID NO: 11095 - protein, 513 aa, Bos taurus
MEDRRESELKVFCSKNILSILGFSCIIAVIALLALGLTQNKALPENVKFGIVLDAGSSHTSLYIYRWPAEKENDTGVVTQIEESNVKGPGISGFAKKVNEINVYLTACMERAQKVIPSIQHMETPVYLGATAGMRLLRMENKQMADKILAAVASSISEYPFDFQGARIISGQEEGAYGWITVNYLLGKFTQKLSWFNLKPSKDDTQETYGALDLGGASTQITFVPQNETTESPNNNLYFRLYGKNYSVYTHSFLCYGKDQALLQKLALGLQGTNGIIHEPCFHSRYMRKIKMSVLNEGFCTKRHELNSSFYPLVDIEIRGAGNFQRCRQSIIQLFNTSYCPYSSCSFNGVFLPPLHGQFGAFSAFYYVMEFLNLTSEESVSVEQLTEKLEEFCAQRWEEVQKNFGEVKEKYLSEYCFSGTYILVLLLNGYHFTAESWKNIHFMNKVRSTDVGWTLGYMLNLTNKIPAEEPMSPPLPHSTYVFLMVLFSLILLAVIIVGIVVFHKPSYFWKDMV

SEQ ID NO: 11096 - protein, 479 aa, Aspergillus awamori
MPRTSLLTLACALATGASAFSYGAAIPQSTQEKQFSQEFRDGYSILKHYGGNGPYSERVSYGIARDPPTSCEVDQVIMVKRHGERYPSPSAGKDIEEALAKVYSINTTEYKGDLAFLNDWTYYVPNECYYNAETTSGPYAGLLDAYNHGNDYKARYGHLWNGETVVPFFSSGYGRVIETARKFGEGFFGYNYSTNAALNIISESEVMGADSLTPTCDTDNDQTTCDNLTYQLPQFKVAAARLNSQNPGMNLTASDVYNLMVMASFELNARPFSNWINAFTQDEWVSFGYVEDLNYYYCAGPGDKNMAAVGAVYANASLTLLNQGPKEAGSLFFNFAHDTNITPILAALGVLIPNEDLPLDRVAFGNPYSIGNIVPMGGHLTIERLSCQATALSDEGTYVRLVLNEAVLPFNDCTSGPGYSCPLANYTSILNKNLPDYTTTCNVSASYPQYLSFWWNYNTTTELNYRSSPIACQEGDAMD

SEQ ID NO: 11097 - protein, 467 aa, Aspergillus awamori
MGVSAVLLPLYLLAGVTSGLAVPASRNQSTCDTVDQGYQCFSETSHLWGQYAPFFSLANESAISPDVPAGCRVTFAQVLSRHGARYPTESKGKKYSALIEEIQQNVTTFDGKYAFLKTYNYSLGADDLTPFGEQELVNSGIKFYQRYESLTRNIIPFIRSSGSSRVIASGEKFIEGFQSTKLKDPRAQPGQSSPKIDVVISEASSSNNTLDPGTCTVFEDSELADTVEANFTATFAPSIRQRLENDLSGVTLTDTEVTYLMDMCSFDTISTSTVDTKLSPFCDLFTHDEWIHYDYLQSLKKYYGHGAGNPLGPTQGVGYANELIARLTHSPVHDDTSSNHTLDSNPATFPLNSTLYADFSHDNGIISILFALGLYNGTKPLSTTTVENITQTDGFSSAWTVPFASRLYVEMMQCQAEQEPLVRVLVNDRVVPLHGCPIDALGRCTRDSFVRGLSFARSGGDWAECSA

SEQ ID NO: 11098 - protein, 443 aa, Trametes pubescens
MAFSILASLLFVCYAYARAVPRAHIPLRDTSACLDVTRDVQQSWSMYSPYFPAATYVAPPASCQINQVHIIQRHGARFPTSGAAKRIQTAVAKLKAASNYTDPLLAFVTNYTYSLGQDSLVELGATQSSEAGQEAFTRYSSLVSADELPFVRASGSDRVVATANNWTAGFALASSNSITPVLSVIISEAGNDTLDDNMCPAAGDSDPQVNQWLAQFAPPMTARLNAGAPGANLTDTDTYNLLTLCPFETVATERRSEFCDIYEELQAEDAFAYNADLDKFYGTGYGQPLGPVQGVGYINELIARLTAQNVSDHTQTNSTLDSSPETFPLNRTLYADFSHDNQMVAIFSAMGLFNQSAPLDPTTPDPARTFLVKKIVPFSARMVVERLDCGGAQSVRLLVNDAVQPLAFCGADTSGVCTLDAFVESQAYARNDGEGDFEKCFAT

SEQ ID NO: 11099 - protein, 439 aa, Peniophora lycii
MVSSAFAPSILLSLMSSLALSTQFSFVAAQLPIPAQNTSNWGPYDPFFPVEPYAAPPEGCTVTQVNLIQRHGARWPTSGARSRQVAAVAKIQMARPFTDPKYEFLNDFVYKFGVADLLPFGANQSHQTGTDMYTRYSTLFEGGDVPFVRAAGDQRVVDSSTNWTAGFGDASGETVLPTLQVVLQEEGNCTLCNNMCPNEVDGDESTTWLGVFAPNITARLNAAAPSANLSDSDALTLMDMCPFDTLSSGNASPFCDLFTAEEYVSYEYYYDLDKYYGTGPGNALGPVQGVGYVNELLARLTGQAVRDETQTNRTLDSDPATFPLNRTFYADFSHDNTMVPIFAALGLFNATALDPLKPDENRLWVDSKLVPFSGHMTVEKLACSGKEAVRVLVNDAVQPLEFCGGVDGVCELSAFVESQTYARENGQGDFAKCGFVPSE

SEQ ID NO: 11100 - protein, 442 aa, cf. Ceriporia sp. CBS 100231
MLFGFVALACLLSLSEVLATSVPKNTAPTFPIPESEQRNWSPYSPYFPLAEYKAPPAGCQINQVNIIQRHGARFPTSGATTRIKAGLTKLQGVQNFTDAKFNFIKSFKYDLGNSDLVPFGAAQSFDAGQEAFARYSKLVSKNNLPFIRADGSDRVVDSATNWTAGFASASHNTVQPKLNLILPQTGNDTLEDNMCPAAGDSDPQVNAWLAVAFPSITARLNAAAPSVNLTDTDAFNLVSLCAFLTVSKEKKSDFCTLFEGIPGSFEAFAYGGDLDKFYGTGYGQELGPVQGVGYVNELIARLTNSAVRDNTQTNRTLDASPVTFPLNKTFYADFSHDNLMVAVFSAMGLFRQPAPLSTSVPNPWRTWRTSSLVPFSGRMVVERLSCFGTTKVRVLVQDQVQPLEFCGGDRNGLCTLAKFVESQTFARSDGAGDFEKCFATSA

SEQ ID NO: 11101 - protein, 442 aa, cf. Ceriporia sp. CBS 100231
MHLGFVTLACLIHLSEVFAASVPRNIAPKFSIPESEQRNWSPYSPYFPLAEYKAPPAGCEINQVNIIQRHGARFPTSGAATRIKAGLSKLQSVQNFTDPKFDFIKSFTYDLGTSDLVPFGAAQSFDAGLEVFARYSKLVSSDNLPFIRSDGSDRVVDTATNWTAGFASASRNAIQPKLDLILPQTGNDTLEDNMCPAAGESDPQVDAWLASAFPSVTAQLNAAAPGANLTDADAFNLVSLCPFMTVSKEQKSDFCTLFEGIPGSFEAFAYAGDLDKFYGTGYGQALGPVQGVGYINELLARLTNSAVNDNTQTNRTLDAAPDTFPLNKTMYADFSHDNLMVAVFSAMGLFRQSAPLSTSTPDPNRTWLTSSVVPFSARMAVERLSCAGTTKVRVLVQDQVQPLEFCGGDQDGLCALDKFVESQAYARSGGAGDFEKCLATTV

SEQ ID NO: 11102 - protein, 463 aa, Emericella nidulans
MAFFTVALSLYYLLSRVSAQAPVVQNHSCNTADGGYQCFPNVSHVWGQYSPYFSIEQESAISEDVPHGCEVTFVQVLSRHGARYPTESKSKAYSGLIEAIQKNATSFWGQYAFLESYNYTLGADDLTIFGENQMVDSGAKFYRRYKNLARKNTPFIRASGSDRVVASAEKFINGFRKAQLHDHGSKRATPVVNVIIPEIDGFNNTLDHSTCVSFENDERADEIEANFTAIMGPPIRKRLENDLPGIKLTNENVIYLMDMCSFDTMARTAHGTELSPFCAIFTEKEWLQYDYLQSLSKYYGYGAGSPLGPAQGIGFTNELIARLTQSPVQDNTSTNHTLDSNPATFPLDRKLYADFSHDNSMISIFFAMGLYNGTQPLSMDSVESIQEMDGYAASWTVPFGARAYFELMQCEKKEPLVRVLVNDRVVPLHGCAVDKFGRCTLDDWVEGLNFARSGGNWKTCFTL

SEQ ID NO: 11103 - protein, 482 aa, Anopheles gambiae str. PEST
VILLLHCAVQLIAAQRSTCCESYCYNDDPERKQVKHFATKTMYELVRAPDTDRQHIVPNCVPVKFWLLSRHGTRLPGKSEINELPKQLKLLQDAIMDNYFTRRTPPDNGRMCEEDLELLRQWHWDPNITEQYDSFLTDQGWEDLKYIALRAKEKYWQVFGSGYQPAKFMFRHTKTQRTEASFKAFAEGLFGREEAQRVKPTPATEPDRLLKPYDDCPDFDANKDRNKRDENSEVNKFLRSALFTGTVWDISQRLGFRHNLSVEQVETLWDACRYEQAWKISRPSPFCAAFTEDQVRVLEYKEDLAYYYRQSYGYGPSTELACHAMADMLRQLSSRDDPSVVAYFTHDTEIQLFLAALGAKRDEMPLRADNFPFMRNRKYTTSDIPFAANVAAVKYQCAEQREPERVIFFLNEKPLMLDWCSVGLCNWSDVKQKYQRFTEGNCDRTFCQSSGAVGTHLAGSIALGVAPLLLLAVLRRLTSLSL

SEQ ID NO: 11104 - protein, 466 aa, Talaromyces thermophilus
MSLLLLVLSGGLVALYVSRNPHVDSHSCNTVEGGYQCRPEISHSWGQYSPFFSLADQSEISPDVPQNCKITFVQLLSRHGARYPTSSKTELYSQLISRIQKTATAYKGYYAFLKDYRYQLGANDLTPFGENQMIQLGIKFYNHYKSLARNAVPFVRCSGSDRVIASGRLFIEGFQSAKVLDPHSDKHDAPPTINVIIEEGPSYNNTLDTGSCPVFEDSSGGHDAQEKFAKQFAPAILEKIKDHLPGVDLAVSDVPYLMDLCPFETLARNHTDTLSPFCALSTQEEWQAYDYYQSLGKYYGNGGGNPLGPAQGVGFVNELIARMTHSPVQDYTTVNHTLDSNPATFPLNATLYADFSHDNTMTSIFAALGLYNGTAKLSTTEIKSIEETDGYSAAWTVPFGGRAYIEMMQCDDSDEPVVRVLVNDRVVPLHGCEVDSLGRCKRDDFVRGLSFARQGGNWEGCYAASE

SEQ ID NO: 11105 - protein, 469 aa, Kluyveromyces lactis
MLSILLSLLSLSGTHAAPISKDNGTVCYALNSSTTDESIFPLLNGQGPHYDYPQSFGIPVEVPDQCTVEHVQMLARHGERYPTASKGKLWIALWDKLKEFQGQYNGPMEVFNDYEFFVSNTKYFDQLTNSTDVDPSNPYAGAKTAQHLGKYIAYNYGDLFSDSNPVFTSSSGRVHQTAKYVVSSLEEELDIQLDLQIIQENETSGANSLTPADSCMTYNGDLGDEYFENATLPYLTDIKNRWMKKNSNLNLTLEHDDIELLVDWCAFETNVKGSSAVCDLFERNDLVAYSYYANVNNFYRRGAGNPMSNPIGSVLVNASYNLLTQADELDNKVWLSFSHDTDIQQFISALGLIDNGVTEYSLDQVDFQNIQQLSWVTPMGGRIFTEKLKCGNASYVRYIINDVIIPVPGCTSGPGFSCPIEDFDDYITNRLNGIDYVSSCEVQQVSNTTELTFYWDYNEVEYNGPVSNK

SEQ ID NO: 11106 - protein, 469 aa, Kluyveromyces lactis
MLSILLGLLSLSGTHAAPISKDNGTVCYALNNSTTDESIFSLLNGQGPHYDYPQSFGIPVEVPDQCTVEHVQMLARHGERYPTASKGKLMIALWDKLKEFQGQYNDPLEVFNDYEFFVSNTKYFDQLTNSTDVDPSNPYAGAKTAQHLGKYIAYNYGDLFSDSNPVFTSSSGRVHQTAKYVVSSLEEELDIQLDLQIIQENETSGANSLTPADSCMTYNGDLGDEYFENATLPYLTDIKNRWMKKNSNLNLTLEHDDIELLVDWCAFETNVKGSSAVCDLFERNDLVAYSYYANVNNFYRRGAGNPMSNPIGSVLVNASYNLLTQADELDNKVWLSFSHDTDIQQFISALGLIDNGVTEYSLDQVDFQNIQQLSWVTPMGGRIFTEKLKCGNASYVRYIINDVIIPVPGCTSGPGFSCPIEDFDDYITNRLNGIDYVSSCEVQQVSNTTELTFYWDYNEVEYNGPVSNK

SEQ ID NO: 11107 - protein, 464 aa, Takifugu rubripes
MTAPVWKVIVRFAAVFGLCAGFRCDVVAEENPNIPAIANYFTTKGRYEEVNPHLIDDILAVNSSILQPPSAQCRIIHLTAIVRHGTRYPTGKNIKKMHDFYELMKSSAVGRESWLQELQNQWTMWYTEDMDGRLVQKGVDDLKNLAVRLSKLFPSMISEEKLRAGMIKFITSSKHRCVNSTLSFKAGLTELWAISDQEIEHTVNDALMRFFDQCTRFVQEVDGNPSALSEVESFRLGPEMRRVQEKIAERLRVPYSDITCDSAEAAFYLCAYEFAIKTVNSPWCRLFDQVDAQIMEYANDLKQFWKRGYGHDINSKSSCILFHDLFSRLEKAVSDHKSGQKVTEAVTVQVGHAKTLLPLLTLLGFFKDNNRMTSVNYAAQTRRSFRTSLMVPYAANLVLVLYDCGNDDLRLQPLLNEKPVDFPGLTTQKASMPRFQDVKELYRELLQGCDFESECRLFRAPAEG

SEQ ID NO: 11108 - protein, 448 aa, synthetic construct
MAVPASRNQSTCDTVDQGYQCFSETSHLWGQYAPFFSLANKSAISPDVPAGCHVTFAQVLSRHGARYPTDSKGKKYSALIEEIQQNATTFEGKYAFLKTYNYSLGADDLTPEGEQELVNSGVKFYQRYESLTRNIVPFIRSSGSSRVIASGNKFIEGFQSTKLKDPRAQPGQSSPKIDVVISEASTSNNTLDPGTCTVFEDSELADDIEANFTATFVPSIRQRLENDLSGVSLTDTEVTYLMDMCSFDTISTSTVDTKLSPFCDLFTHEEWINYDYLQSLNKYYGHGAGNPLGPTQGVGYANELIARLTHSPVHDDTSSNHTLDSNPATFPLNSTLYADFSHDNGIISILFALGLYNGTKPLSSTTAENITQTDGFSSAWTVPFASRMYVEMMQCQSEQEPLVRVLVNDRVVPLHGCPVDALGRCTRDSFVKGLSFARSGGDWGECFA

SEQ ID NO: 11109 - protein, 449 aa, synthetic construct
MLAVPASRNQSSCDTVDQGYQCFSETSHLWGQYAPFFSLANESVISPEVPAGCRVTFAQVLSRHGARYPTDSKGKKYSALIEEIQQNATTFDGKYAFLKTYNYSLGADDLTPFGEQELVNSGIKFYQRYESLTRNIVPFIRSSGSSRVIASGKKFIEGFQSTKLKDPRAQPGQSSPKIDVVISEASSSNNTLDPGTCTVFEDSELADTVEANFTATFVPSIRQRLENDLSGVTLTDTEVTYLMDMCSFDTISTSTVDTKLSPFCDLFTHDEWINYDYLQSLKKYYGHGAGNPLGPTQGVGYANELIARLTHSPVHDDTSSNHTLDSSPATFPLNSTLYADFSHDNGIISILFALGLYNGTKPLSTTTVENITQTDGFSSAWTVPFASRLYVEMMQCQAEQEPLVRVLVNDRVVPLHGCPVDALGRCTRDSFVRGLSFARSGGDWAECFA

SEQ ID NO: 11110 - protein, 449 aa, synthetic construct
MLAVPASRNQSTCDTVDQGYQCFSETSHLWGQYAPFFSLANKSAISPDVPAGCHVTFAQVLSRHGARYPTDSKGKKYSALIEEIQQNATTFEGKYAFLKTYNYSLGADDLTPFGEQELVNSGVKFYQRYESLTRNIVPFIRSSGSNRVIASGNKFIEGFQSTKLKDPRAQPGQSSPKIDVVISEASTSNNTLDPGTCTVFEDSELADDIEANFTATFVPSIRQRLENDLSGVSLTDTEVTYLMDMCSFDTISTSTVDTKLSPFCDLFTHEEWINYDYLQSPNKYYGHGAGNPLGPTQGVGYANELIARLTHSPVHDDTSSNHTLDSNPATFPLNSTLYADFSHDNGIISILFALGLYNGTKPLSSTTAENITQTDGFSSAWTVPFASRMYVEMMQCQSEQEPLVRVLVNDRVVPLHGCPVDALGRCTRDSFVKGLSFARSGGDWAECFA

SEQ ID NO: 11111 - protein, 448 aa, synthetic construct
MAVPASRNQSTCDTVDQGYQCFSETSHLWGQYAPFFSLANKSAISPDVPAGCQVTFAQVLSRHGARYPTDSKGKKYSALIEEIQQNATTFKEKYAFLKTYNYSLGADDLTPEGEQELVNSGVKFYQRYESLTRNIVPFIRSSGSSRVIASGNKFIEGFQSTKLKDPRAQPGQSSPKIDVVISEASSSNNTLDPGTCTVFEDSELADTVEANFTATFVPSIRQRLENDLSGVTLTDTEVTYLMDMCSFDTISTSTVDTKLSPFCDLFTHDEWINYDYLQSLKKYYGHGAGNPLGPTQGVGYANELIARLTHSPVHDDTSSNHTLDSSPATFPLNSTLYADFSHDNGIISILFALGLYNGTKPLSTTTVENITQTDGFSSAWTVPEASRLYVEMMQCQAEQEPLVRVLVNDRVVPLHGCPVDALGRCTRDSFVRGLSFARSGGDWAECFA

SEQ ID NO: 11112 - protein, 477 aa, synthetic construct
MNFLKSFPFYAFLCFGQYFVAVTHALAVPASRNQSTCDTVDQGYQCFSETSHLWGQYAPFFSLANKSAISPDVPAGCQVTFAQVLSRHGARYPTDSKGKKYSALIEEIQQNATTFKEKYAFLKTYNYSLGADDLTPEGEQELVNSGVKFYQRYESLTRNIVPFIRSSGSSRVIASGNKFIEGFQSTKLKDPRAQPGQSSPKIDVVISEASSSNNTLDPGTCTVFEDSELADTVEANFTATFVPSIRQRLENDLSGVTLTDTEVTYLMDMCSFDTISTSTVDTKLSPFCDLFTHDEWINYDYLQSLKKYYGHGAGNPLGPTQGVGYANELIARLTHSPVHDDTSSNHTLDSSPATFPLNSTLYADFSHDNGIISILFALGLYNGTKPLSTTTVENITQTDGFSSAWTVPEASRLYVEMMQCQAEQEPLVRVLVNDRVVPLHGCPVDALGRCTRDSFVRGLSFARSGGDWAECFAKDEL

SEQ ID NO: 11113 - protein, 467 aa, synthetic construct
MRVSAVLLPLYLLSGVTSGLAVPASRNQSTCDTVDQGYQCFSETSHLWGQYAPFFSLANKSAISPDVPAGCQVTFAQVLSRHGARYPTDSKGKKYSALIEEIQQNATTFKEKYAFLKTYNYSLGADDLTPEGEQELVNSGVKFYQRYESLTRNIVPFIRSSGSSRVIASGNKFIEGFQSTKLKDPRAQPGQSSPKIDVVISEASSSNNPLDPGTCTLFEDSELADTVEANFTATFVPSIRQRLENDLSGVTTTDTEVTYLMDMCSFDTISTSTVDTKLSPFCDLFTHDEWINYDYLQSLKKYYGHGAGNPLGPTQGVGYANELIARLTHSPVHDDTSSNHTLDSSPATFPLNSTLYADFSHDNGIISILFALGLYNGTKPLSTTTVENITQTDGFSSAWTVPEASRLYVEMMQCQAEQEPLVRVLVNDRVVPLHGCPVDALGRCTRDSFVRGLSFARSGGDWAECFA

SEQ ID NO: 11114 - protein, 443 aa, synthetic construct
SKSCDTVDLGYQCSPATSHLWGQYSPFFSLEDELSVSSKLPKDCRITLVQVLSRHGARYPTSSKSKKYKKLVTAIQANATDFKGKFAFLKTYNYNLGADDLNPFGEQQLVNSGIKFYQRYKALARSVVPFIRASGSDRVIASGEKFIEGFQQAKLADPGATNRAAPAISVIIPESETFNNTLDHGVCTKFEASQLGDEVAANFTALFAPDIRARAEKHLPGVTLTDEDVVSLMDMCSFDTVARTSDASQLSPFCQLFTHNEWKKYNYLQSLGKYYGYGAGNPLGPAQGIGFTNELIARLTRSPVQDHTSTNSTLVSNPATFPLNATMYVDFSHDNSMVSIFFALGLYNGTEPLSRTSVESAKELDGYSASWVVPFGARAYFETMQCKSEKEPLVRALINDRVVPLLGCDVDKLGRCKLNDFVKGLSWARSGGNWGECFSKDEL

SEQ ID NO: 11115 - protein, 465 aa, synthetic construct
MVTLTFLLSAAYLLSGRVSAAPSSAGSKSCDTVDLGYQCSPATSHLWGQYSPFFSLEDELSVSSKLPKDCRITLVQVLSRHGARYPTSSKSKKYKKLVTAIQANATDFKGKFAFLKTYNYNLGADDLNPFGEQQLVNSGIKFYQRYKALARSVVPFIRASGSDRVIASGEKFIEGFQQAKLADPGATNRAAPAISVIIPESETFNNTLDHGVCTKFEASQLGDEVAANFTALFAPDIRARAEKHLPGVTLTDEDVVSLMDMCSFDTVARTSDASQLSPFCQLFTHNEWKKYNYLQSLGKYYGYGAGNPLGPAQGIGFTNELIARLTRSPVQDHTSTNSTLVSNPATFPLNATMYVDFSHDNSMVSIFFALGLYNGTEPLSRTSVESAKELDGYSASWVVPFGARAYFETMQCKSEKEPLVRALINDRVVPLLGCDVDKLGRCKLNDFVKGLSWARSGGNWGECFS

SEQ ID NO: 11116 - protein, 477 aa, synthetic construct
MDFLKSFPFYAFLCFGQYFVAVTHALAVPASRNQSTCDTVDQGYQCFSETSHLWGQYAPFFSLANKSAISPDVPAGCQVTFAQVLSRHGARYPTDSKGKKYSALIEEIQQNATTFKEKYAFLKTYNYSLGADDLTPEGEQELVNSGVKFYQRYESLTRNIVPFIRSSGSSRVIASGNKFIEGYQSTKLKDPRAQPGHSSPKIDVVISEASTSNNTLDPGTCTVSEDNELADDFEANFTATFVPSIRQSLENNLSGVALTDTEVTYLMDLCSFDTISTSTVDTKLSPFCDLFTHEKWINYDYLQSLNKYYGHGAGNPLGPTQGVCYANELISRLTHSPVHDYTSSNHILDSSQDTFPLNSTLYADFSLNNGIISILFAWGLNKGTKPLSSTTAENITQTDGFSSAWTVPFASRMYVEMMQCQSEQEPLVRVLVNDRVVPLHGCPVDALGRCTRDSFVRGLSFARSGGDWAECFAKDEL

SEQ ID NO: 11117 - protein, 448 aa, synthetic construct
MAVPASRNQSTCDTVDQGYQCFSETSHLWGQYAPFFSLANKSAISPDVPAGCQVTFAQVLSRHGARYPTDSKGKKYSALIEEIQQNATTFKEKYAFLKTYNYSLGADDLTPEGEQELVNSGVKFYQRYESLTRNIVPFIRSSGSSRVIASGNKFIEGYQSTKLKDPRAQPGHSSPKIDVVISEASTSNNTLDPGTCTVSEDNELADDFEANFTATFVPSIRQSLENNLSGVALTDTEVTYLMDLCSFDTISTSTVDTKLSPFCDLFTHEKWINYDYLQSLNKYYGHGAGNPLGPTQGVCYANELISRLTHSPVHDYTSSNHILDSSQDTFPLNSTLYADFSLNNGIISILFAWGLNKGTKPLSSTTAENITQTDGFSSAWTVPFASRMYVEMMQCQSEQEPLVRVLVNDRVVPLHGCPVDALGRCTRDSFVRGLSFARSGGDWAECFA

SEQ ID NO: 11118 - protein, 409 aa, synthetic construct
MPIPAQNTSNWGPYDPFFPVEPYAAPPEGCTVTQVNLIQRHGARWPTSGARSRQVAAVAKIQMARPFTDPKYEFLNDFVYKFGVADLLPFGANQSHQTGTDMYTRYSTLFEGGDVPFVRAAGDQRVVDSSTNWTAGFGDASGETVLPTLQVVLQEEGNCTLCNNMCPNEVDGDESTTWLGVFAPNITARLNAAAPSANLSDSDALTLMDMCPFDTLSSGNASPFCDLFTAEEYVSYEYYYDLDKYYGTGPGNALGPVQGVGYVNELLARLTGQAVRDETQTNRTLDSDPATFPLNRTFYADFSHDNTMVPIFAALGLFNATALDPLKPDENRLWVDSKLVPFSGHMTVEKLACSGKEAVRVLVNDAVQPLEFCGGVDGVCELSAFVESQTYARENGQGDFAKCGFVPSE

SEQ ID NO: 11119 - protein, 466 aa, Aspergillus terreus
MGFLAIVLSVALLFRSTSGTPLGPRGKHSDCNSVDHGYQCFPELSHKWGLYAPYFSLQDESPFPLDVPEDCHITFVQVLARHGARSPTHSKTKAYAATIAAIQKSATAFPGKYAFLQSYNYSLDSEELTPFGRNQLRDLGAQFYERYNALTRHINPFVRATDASRVHESAEKFVEGFQTARQDDHHANPHQPSPRVDVAIPEGSAYNNTLEHSLCTAFESSTVGDDAVANFTAVFAPAIAQRLEADLPGVQLSTDDVVNLMAMCPFETVSLTDDAHTLSPFCDLFTATEWTQYNYLLSLDKYYGYGGGNPLGPVQGVGWANELMARLTRAPVHDHTCVNNTLDASPATFPLNATLYADFSHDSNLVSIFWALGLYNGTAPLSQTSVESVSQTDGYAAAWTVPFAARAYVEMMQCRAEKEPLVRVLVNDRVMPLHGCPTDKLGRCKRDAFVAGLSFAQAGGNWADCF

SEQ ID NO: 11120 - protein, 466 aa, Aspergillus terreus
MGVFVVLLSIATLFGSTSGTALGPRGNHSDCTSVDRGYQCFPELSHKWGLYAPYFSLQDESPFPLDVPDDCHITFVQVLARHGARSPTDSKTKAYAATIAAIQKNATALPGKYAFLKSYNYSMGSENLNPFGRNQLQDLGAQFYRRYDTLTRHINPFVRAADSSRVHESAEKFVEGFQNARQGDPHANPHQPSPRVDVVIPEGTAYNNTLEHSICTAFEASTVGDAAADNFTAVFAPAIAKRLEADLPGVQLSADDVVNLMAMCPFETVSLTDDAHTLSPFCDLFTAAEWTQYNYLLSLDKYYGYGGGNPLGPVQGVGWANELIARLTRSPVHDHTCVNNTLDANPATFPLNATLYADFSHDSNLVSIFWALGLYNGTKPLSQTTVEDITRTDGYAAAWTVPFAARAYIEMMQCRAEKQPLVRVLVNDRVMPLHGCAVDNLGRCKRDDFVEGLSFARAGGNWAECF

SEQ ID NO: 11121 - protein, 453 aa, Schizosaccharomyces pombe
MFLQNLFLGFLAVVCANAQFAEFTAFDGKFDFKEHLTSRSPYHKPYFYGPSIDFPTTCKIKQVHTLQRHGSRNPTGGNAAFDAVGIANFQQRLLNGSVPIDYSVSGNPLSFVPTWTPVIEAANADALSSSGRVELFDMGRQFYERYHELFNASTYNIYTAAQQRVVDSALWYGYGMFGEDVHNFTNYILVSENATAGSNSLSSYNACPASDADDFTTPALEAWRNVYMPPIRQRLNPYFSNYNLTNDDILNLYGICSYEIALQDYSEFCKLFNSVDFLNFEYEGDLSFSYGMGNSVKWGSIFGGAYANSLANSLRSVENNTQQVFFAFTHDANIIPVETALGFFTDNTPENPLPTSYQVHSHSMKASEFVPFAGNLITELFQCEDSKYYVRHLVNEEVFPLSDCGFGPSNTSDGMCELYAYLNSPVRVNGTSNGIQNFDTLCNASAVAAVYPY

SEQ ID NO: 11122 - protein, 463 aa, Schizosaccharomyces pombe
MKLSGISLWLLAASIVHAGKSQFEAFENEFYFKDHLGTISVYHEPYFNGPTTSFPESCAIKQVHLLQRHGSRNPTGDDTATDVSSAQYIDIFQNKLLNGSIPVNFSYPENPLYFVKHWTPVIKAENADQLSSSGRIELFDLGRQVFERYYELFDTDVYDINTAAQERVVDSAEWFSYGMFGDDMQNKTNFIVLPEDDSAGANSLAMYYSCPVYEDNNIDENTTEAAHTSWRNVFLKPIANRLNKYFDSGYNLTVSDVRSLYYICVYEIALRDNSDFCSLFTPSEFLNFEYDSDLDYAYWGGPASEWASTLGGAYVNNLANNLRKGVNNASDRKVFLAFTHDSQIIPVEAALGFFPDITPEHPLPTDKNIFTYSLKTSSFVPFAGNLITELFLCSDNKYYVRHLVNQQVYPLTDCGYGPSGASDGLCELSAYLNSSVRVNSTSNGIANFNSQCQAHSTNVTVYY

SEQ ID NO: 11123 - protein, 463 aa, Schizosaccharomyces pombe
MQLCIISLWFLAAFIVNADNVQFEDYESNFFFKEHLGTLSPYHEPYFDGLDSAFPETCEIQQVHLLQRHGSRNPTGDVTATDVYSSQYLNNFQEKLLNGSIPVNFSYPENPLCFIKQWTPVIDAENADQLSSRGRLELFDLGRQLYQRYYKLFDSYVYDINTAEQERVVESAKWFTYGLFGDKMYEKTNFILISEGKAAGANSLSMYNACPVFKDNNFHKNATDAAHAVWRNIFIEPIVNRLAKYFDSSYKLTINDVRSLFYICEYEIAIKDHSDFCSIFTPSEFLNFEYDSDLDQAYGGGPVSEWASTLGGAYINNLADSLRNVTNPDFDRKVFLAFTHDSNIIPVEAALGFFPDITPQNPLPTDKNIYTYSQKTSSFVPFAGNLITELFFCSDSKYYVRHLVNQQVYPLIDCGYGPSGTSDGLCELQAYLNSPIRANSTSNGISIFNTECQARPTNVTIYF

SEQ ID NO: 11124 - protein, 198 aa, Schizosaccharomyces pombe
NFQQRLLNGSVPIDYSVSGNPLSFVPTWTPVIEAANADALSSSGRVELFDMGRQFYERYHELFNASTYNIYTAAQQRVVDSALWYGYGMFGEDVHNFTNYILVSENATAGSNSLSSYNACPASDADDFTTPALEAWRNVYMPPIRQRLNPYFSNYNLTNDDILNLYGICSYEIALQDYSEFCKLFNSVDFLNFEYEGD

SEQ ID NO: 11125 - protein, 442 aa, Pichia angusta
MFSFATTLLVGAIVANGLILHPGYDQVATDQYNLLKFMIGAGPFVEHSGFGIPLDTPPHCEIEQAQLFMRHGERFPTKSSGKQYKKFYDKLKKANITDYKGPLAFIEDLEYFVPDSDNYELETTRGLYSGLLNAFKFGTYLRERYDSLVDTSSVLPIFAASEDRVVDTARSFGRGFFGPDYATSCSIQVVNETDTSKGANALTTKDNCPTYNSSFYDYSFGDEIFQREADRLNELSPGFNITADDIITMGTYCAYETNVKGHSSFCDALSREAFIALQYNNDVTKFYQFGPGYNMSAVAGGVYANATAKLLQEDGKLWFSFSHDNDLLNYITALGLITDTELGTEDVDFHRSFKTSELVPQGARLIIEKLNCSDTSFVRTILNDKVYPVPGCSSGPGYSCPLEDYLDIITPEVDYASACELPDDAPKEISFYWDWKPTFENN

SEQ ID NO: 11126 - protein, 468 aa, Pichia pastoris
MFSPILSLEIILALATLQSVFAVELQHVLGVNDRPYPQRTDDQYNILRHLGGLGPYIGYNGWGIAAESEIESCTIDQAHLLMRHGERYPSTNVGKQLEALYQKLLDADVEVPTGPLSFFQDYDYFVSDAAWYEQETTKGFYSGLNTAFDFGTTLRERYDHLINTSEEGKKLSVWAGSQERVVDTAKYFAQGFMKSNYTDMVEVVALEEEKSQGLNSLTARISCPNYNSHIYKDGDFPNDIAEREADRLNTLSPGFNITADDIPTIALYCGFELNVRGESSFCDVLSREALLYTAYLRDLGWYYNVGNGNPLGKTIGYVYANATRQLLENTEADPRDYPLYFSFSHDTDLLQVFTSLGLFNVTDLPLDQIQFQTSFKSTEIVPMGARLLTERLLCTVEGEEKYYVRTILNDAVFPLSDCSSGPGFSCPLNDYVSRLEALNEDSDFAENCGVPKNASYPLELSFFWDDLS

SEQ ID NO: 11127 - protein, 479 aa, Aspergillus ficuum
MPRTSLLTLACALATGASAFSYGAAIPQSTQEKQFSQEFRDGYSILKHYGGNGPYSERVSYGIARDPPTGCEVDQVIMVKRHGERYPSPSAGKSIEEALAKVYSINTTEYKGDLAFLNDWTYYVPNECYYNAETTSGPYAGLLDAYNHGNDYKARYGHLWNGETVVPFFSSGYGRVIETARKFGEGFFGYNYSTNAALNIISESEVMGADSLTPTCDTDNDQTTCDNLTYQLPQFKVAAARLNSQNPGMNLTASDVYNLMVMASFELNARPFSNWINAFTQDEWVSFGYVEDLNYYYCAGPGDKNMAAVGAVYANASLTLLNQGPKEAGPLFFNLAHDTNITPILAALGVLIPNEDLPLDRVAFGNPYSIGNIVPMGGHLTIERLSCQATALSDKGTYVRLVLNEAVLPFNDCTSGPGYSCPLANYTSILNKNLPDYTTTCNVSASYPQYLSFWWNYNTTTELNYRSSPIACQEGDAMD

SEQ ID NO: 11128 - protein, 438 aa, Aspergillus ficuum
SCDTVDQGYQCFSETSHLWGQYAPFFSLANESVISPEVPAGCRVTFAQVLSRHGARYPTDSKGKKYSALIEEIQQNATTFDGKYAFLKTYNYSLGADDLTPFGEQELVNSGIKFYQRYESLTRNIVPFIRSSGSSRVIASGKKFIEGFQSTKLKDPRAQPGQSSPKIDVVISEASSSNNTLDPGTCTVFEDSELADTVEANFTATFVPSIRQRLENDLSGVTLTDTEVTYLMDMCSFDTISTSTVDTKLSPFCDLFTHDEWINYDYLQSLKKYYGHGAGNPLGPTQGVGYANELIARLTHSPVHDDTSSNHTLDSSPATFPLNSTLYADFSHDNGIISILFALGLYNGTKPLSTTTVENITQTDGFSSAWTVPFASRLYVEMMQCQAEQEPLVRVLVNDRVVPLHGCPVDALGRCTRDSFVRGLSFARSGGDWAECFA

SEQ ID NO: 11129 - protein, 441 aa, Aspergillus ficuum
ASRNQSSCDTVDQGYQCFSETSHLWGQYAPFFSLANESVISPEVPAGCRVTFAQVLSRHGARYPTDSKGKKYSALIEEIQQNATTFDGKYAFLKTYNYSLGADDLTPFGEQELVNSGIKFYQRYESLTRNIVPFIRSSGSSRVIASGKKFIEGFQSTKLKDPRAQPGQSSPKIDVVISEASSSNNTLDPGTCTVFEDSELADTVEANFTATFVPSIRQRLENDLSGVTLTDTEVTYLMDMCSFDTISTSTVDTKLSPFCDLFTHDEWINYDYLQSLKKYYGHGAGNPLGPTQGVGYANELIARLTHSPVHDDTSSNHTLDSSPATFPLNSTLYADFSHDNGIISILFALGLYNGTKPLSTTTVENITQTDGFSSAWTVPFASRLYVEMMQCQAEQEPLVRVLVNDRVVPLHGCPVDALGRCTRDSFVRGLSFARSGGDWAE

SEQ ID NO: 11130 - protein, 448 aa, Aspergillus ficuum
LAVPASRNQSTCDTVDQGYQCFSETSHLWGQYAPFFSLANKSAISPDVPAGCQVTFAQVLSRHGARYPTDSKGKKYSALIEEIQQNATTFEEKYAFLKTYNYSLGADDLTPFGEQELVNSGVKFYQRYESLTRNIVPFIRSSGSSRVIASGNKFIEGFQSTKLKDPRAQPGQSSPKIDVVISEASTSNNTLDPGTCTVFEDSELADDIEANFTATFVPSIRQRLENDLSGVTLTDTEVTYLMDMCSFDTISTSTVDTKLSPFCDLFTHEEWINYDYLQSLNKYYGHGAGNPLGPTQGVGYANELIARLTHSPVHDDTSSNHTLDSNPATFPLNSTLYADFSHDNGIISILFALGLYNGTKPLSSTTAENITQTDGFSSAWTVPFASRMYVEMMQCQSEQEPLVRVLVNDRVVPLHGCPVDALGRCTRDSFVKGLSFARSGGDWAECFA

SEQ ID NO: 11131 - protein, 467 aa, Aspergillus ficuum
MGVSAVLLPLYLLSGVTSGLAVPASRNQSTCDTVDQGYQCFSETSHLWGQYAPFFSLANKSAISPDVPAGCHVTFAQVLSRHGARYPTDSKGKKYSALIEEIQQNATTFEGKYAFLKTYNYSLGADDLTPFGEQELVNSGVKFYQRYESLTRNIVPFIRSSGSSRVIASGNKFIEGFQSTKLKDPRAQPGQSSPKIDVVISEASTSNNTLDPGTCTVFEDSELADDIEANFTATFVPSIRQRLENDLSGVSLTDTEVTYLMDMCSFDTISTSTVDTKLSPFCDLFTHEEWINYDYLQSLNKYYGHGAGNPLGPTQGVGYANELIARLTHSPVHDDTSSNHTLDSNPATFPLNSTLYADFSHDNGIISILFALGLYNGTKPLSSTTAENITQTDGFSSARTVPFASRMYVEMMQCQSEQEPLVRVLVNDRVVPLHGCPVDALGRCTRDSFVKGLSFARSGGDWAECFA

SEQ ID NO: 11132 - protein, 479 aa, Aspergillus niger [sequence omitted]

SEQ ID NO: 11133 - protein, 460 aa, Aspergillus niger
FSYGAAIPQSTQEKQFSQEFRDGYSILKHYGGNGPYSERVSYGIARDPPTSCEVDQVIMVKRHGERYPSPSAGKDIEEALAKVYSINTTEYKGDLAFLNDWTYYVPNECYYNAETTSGPYAGLLDAYNHGNDYKARYGHLWNGETVVPFFSSGYGRVIETARKFGEGFFGYNYSTNAALNIISESEVMGADSLTPTCDTDNDQTTCDNLTYQLPQFKVAAARLNSQNPGMNLTASDVYNLMVMASFELNARPFSNWINAFTQDEWVSFGYVEDLNYYYCAGPGDKNMAAVGAVYANASLTLLNQGPKEAGSLFFNFAHDTNITPILAALGVLIPNEDLPLDRVAFGNPYSIGNIVPMGGHLTIERLSCQATALSDEGTYVRLVLNEAVLPFNDCTSGPGYSCPLANYTSILNKNLPDYTTTCNVSASYPQYLSFWWNYNTTTELNYRSSPIACQEGDAMD

SEQ ID NO: 11134 - protein, 467 aa, Aspergillus niger
MGVSAVLLPLYLLSGVTSGLAVPASRNQSTCDTVDQGYQCFSETSHLWGQYAPFFSLANKSAISPDVPAGCHVTFAQVLSRHGARYPTDSKGKKYSALIEEIQQNATTFEGKYAFLKTYNYSLGADDLTPFGEQELVNSGVKFYQRYESLTRNIVPFIRSSGSSRVIASGNKFIEGFQSTKLKDPRAQPGQSSPKIDVVISEASTSNNTLDPGTCTVFEDSELADDIEANFTATFVPSIRQRLENDLSGVSLTDTEVTYLMDMCSFDTISTSTVDTKLSPFCDLFTHEEWINYDYLQSLNKYYGHGAGNPLGPTQGVGYANELIARLTHSPVHDDTSSNHTLDSNPATFPLNSTLYADFSHDNGIISILFALGLYNGTKPLSSTTAENITQTDGFSSAWTVPFASRMYVEMMQCQSEQEPLVRVLVNDRVVPLHGCPVDALGRCTRDSFVKGLSFARSGGDWGECFA

SEQ ID NO: 11135 - protein, 467 aa, Aspergillus niger
MGVSAVLLPLYLLSGVTSGLAVPASRNQSTCDTVDQGYQCFSETSHLWGQYAPFFSLANESAISPDVPAGCRVTFAQVLSRHGARYPTDSKGKKYSALIEEIQQNATTFDGKYAFLKTYNYSLGADDLTPFGEQELVNSGIKFYQRYESLTRNIIPFIRSSGSSRVIASGKKFIEGFQSTKLKDPRAQPGQSSPKIDVVISEASSSNNTLDPGTCTVFEDSELADAVEANFTATFVPTIRQRLENDLSGVSLTDTEVTYLMDMCSFDTISTSTVDTKLSPFCDLFTHDEWINYDYLQSLKKYYGHGAGNPLGPTQGVGYANELIARLTHSPVHDDTSSNHTLDSNSATFPLNSTLYADFSHDNGIISILFALGLYNGTKPLSTTTVQNITQTDGFSSAWTVPFASRLYVEMMQCQAEQEPLVRVLVNDRVVPLHGCPVDALGRCTRDSFVKGLSFARSGGDWAECFA

SEQ ID NO: 11136 - protein, 467 aa, Aspergillus niger
MGVSAVLLPLYLLSGVTSGLAVPASRNQSSCDTVDQGYQCFSETSHLWGQYAPFFSLANESVISPEVPAGCRVTFAQVLSRHGARYPTDSKGKKYSALIEEIQQNATTFDGKYAFLKTYNYSLGADDLTPFGEQELVNSGIKFYQRYESLTRNIVPFIRSSGSSRVIASGKKFIEGFQSTKLKDPRAQPGQSSPKIDVVISEASSSNNTLDPGTCTVFEDSELADTVEANFTATFVPSIRQRLENDLSGVTLTDTEVTYLMDMCSFDTISTSTVDTKLSPFCDLFTHDEWINYDYLQSLKKYYGHGAGNPLGPTQGVGYANELIARLTHSPVHDDTSSNHTLDSSPATFPLNSTLYADFSHDNGIISILFALGLYNGTKPLSTTTVENITQTDGFSSAWTVPFASRLYVEMMQCQAEQEPLVRVLVNDRVVPLHGCPVDALGRCTRDSFVRGLSFARSGGDWAECFA

SEQ ID NO: 11137 - protein, 466 aa, Aspergillus oryzae
MAVLSVLLPITFLLSSVTGTPVTSPRQQSCNTVDEGYQCFSGVSHLWGQYSPYFSVDDESSLSEDVPDHCQVTFAQVLSRHGARYPTKSKSEKYAKLIKAVQHNATSFSGKYAFLKSYNYSLGADDLTPFGENQLVDSGIKFYQRYEELAKNVVPFIRASGSDRVIASGEKFIEGFQKAKLGDSKSKRGQPAPIVNVVITETEGFNNTLDHSLCTAFENSTTGDDAEDKFTAVFTPSIVERLEKDLPGTTLSSKEVVYLMDMCSFDTIALTRDGSRLSPFCALFTQEEWAQYDYLQSVSKYYGYGGGNPLGPAQGIGFANELIARLTKSPVKDHTTTNTTLDSNPATFPLNATLYADFSHDNTMTSVFFALGLYNTTEPLSQTSVQSTEETNGYSSARTVPFGARAYVEMMQCTDEKEPLVRVLVNDRVIPLQGCDADEYGRCKRDDFVEGLSFVTSGGNWGECFA

SEQ ID NO: 11138 - protein, 442 aa, Aspergillus fumigatus
SAGSKSCDTVDLGYQCSPATSHLWGQYSPFFSLEDELSVSSKLPKDCRITLVQVLSRHGARYPTSSKSKKYKKLVTAIQANATDFKGKFAFLKTYNYTLGADDLTPFGEQQLVNSGIKFYQRYKALARSVVPFIRASGSDRVIASGEKFIEGFQQAKLADPGATNRAAPAISVIIPESETFNNTLDHGVCTKFEASQLGDEVAANFTALFAPDIRARAEKHLPGVTLTDEDVVSLMDMCSFDTVARTSDASQLSPFCQLFTHNEWKKYNYLQSLGKYYGYGAGNPLGPAQGIGFTNELIARLTRSPVQDHTSTNSTLVSNPATFPLNATMYVDFSHDNSMVSIFFALGLYNGTEPLSRTSVESAKELDGYSASWVVPFGARAYFETMQCKSEKEPLVRALINDRVVPLHGCDVDKLGRCKLNDFVKGLSWARSGGNWGECFS

SEQ ID NO: 11139 - protein, 465 aa, Aspergillus fumigatus
MVTLTFLLSAAYLLSGRVSAAPSSAGSKSCDTVDLGYQCSPATSHLWGQYSPFFSLEDELSVSSKLPKDCRITLVQVLSRHGARYPTSSKSKKYKKLVTAIQANATDFKGKFAFLKTYNYTLGADDLTPFGEQQLVNSGIKFYQRYKALARSVVPFIRASGSDRVIASGEKFIEGFQQAKLADPGATNRAAPAISVIIPESETFNNTLDHGVCTKFEASQLGDEVAANFTALFAPDIRARAEKHLPGVTLTDEDVVSLMDMCSFDTVARTSDASQLSPFCQLFTHNEWKKYNYLQSLGKYYGYGAGNPLGPAQGIGFTNELIARLTRSPVQDHTSTNSTLVSNPATFPLNATMYVDFSHDNSMVSIFFALGLYNGTEPLSRTSVESAKELDGYSASWVVPFGARAYFETMQCKSEKEPLVRALINDRVVPLHGCDVDKLGRCKLNDFVKGLSWARSGGNWGECFS

SEQ ID NO: 11140 - protein, 482 aa, Monascus purpureus
MPLFSFLSATPTVMQLIFTVAAIASVAAGFQSVISEKQFSQEFLDNYSILKHYGGNGPYSSRRSYGISREPPDSCSVDQVIMIMRHGERYPSPDLGASIEAALAKIKSSNVSTYQGDLDFLNSWTYYVPNHCAYNAETSTGPYAGLLEGFKRGSDYRARYGHLWDGESIVPIFAAGYQRIIATSRKFGEGFFGANYSTNAAINIISEAKEMGANSLTPTCDHDNDTSTCNSLTTVWPQFKVAAARLNSQNPGLDLNATDIYYLMSMASFELNARPYSDWINVFTLDEWVTFGYVQDLNYYYCAGPGDKNMAAVGAVYVNASLTLLNQGPSAGTLWFNFAHDTNITPILAALGVLTPERDLPTDRVVFDSKWSSGDIVPQAGHLTIERLNCTSTAASPAGVYVRLVQNEAVIPVEACQSGPGYSCSLADFTEIMSKQLPDFVSTCSIRSSYPQYLDFWWNYNTTTDLNYPKGPVPCAEGVATS

SEQ ID NO: 11141 - protein, 610 aa, Neurospora crassa
MATLLRRTTVKMRSPINPQAPGHNPVGLAEKEELVLRPLLAHDTQPSPGQRLKRKLSILLASCAVSLAVLFAFNILACNGTLFGIKPRPSELASPTPLQARDDQRSSGEKDCPCKPTSTVPDYFNTSPGPWIGKTATGKAPFMAQTRTFDHAATYVPNAPLQTQVPIQGWHPGNLSIFGMMGFLTPYTPSTGFGVDEWPLPDGAEIIWLQMVSRHGSRYPTGGSNVESFGARLANATGKFNATGELEFLNNWKYQMGTEILVPRGRQELFDSGVLHAYMYSSLYDPNTKIIARTTTQDRMLRSAENFLAGMFGLEWPNNVTLEVIIEGSNLNNSLAGYMNCPNEREDGLGSAARDIWVGHYLQNATERFSKLVTGYNWTLDDTYAAQTLCAYDTVASGYSRFCSLFTYEEWIGFGYSHDLQFYGNNAFGSETGRAIGIGFQQEVLARLQNHTIPYSETQVNVTLDNNTVTFPLNQSLYLDFSHDTNIVSILAAFGLTQFEEDLPADKYPGEHNFTVSHMTPFGARLDIEIIKTPKPLKADRSGYEDEGEETKYVHFVLNQRTVPLGWSHPECDAERVDGWCEFEAFLKVQEKMPGLARYEEVCFADGGSP

SEQ ID NO: 11142 - protein, 596 aa, Neurospora crassa
MDPATKGTTRASSASTSLFGMGGGSQHKYSPLGRDGDDSESQTQLLPGESTAEDLDEESQLQQQNKKRGLLYRLVWGDPNKIFVKLIMFLLMVPLFSYLAAASLRVLSPNPASCDSPELGYQCNSETTHTWGQYSPFFSVPSEISPSVPEGCRLTFAQVLSRHGARFPTPGKAAAISAVLTKIKTSATWYAPDFEFIKDYNYVLGVDHLTAFGEQEMVNSGIKFYQRYASLIRDYTDPESLPFIRASGQERVIASAENFTTGFYSALLADKNPPPSSLPLPRQEMVIISESPTANNTMHHGLCRAFEDSTTGDAAQATFIAANFPPITARLNAQGFKGVTLSDTDVLSLMDLCPFDTVAYPPSSSLTTSSSPSGGSKLSPFCSLFTAQDFTVYDYLQSLGKFYGYGPGNSLAATQGVGYVNELLARLTVSPVVDNTTTNSTLDGNEDTFPLSRNRTVFADFSHDNDMMGILTALRIFEGVDAEKMMDNTTIPREYGETGDDPANLKEREGLFKVGWVVPFAARVYFEKMICDGDGSGEMVQSEEEQDKELVRILVNDRVVKLNGCEADELGRCKLDKFVESMEFARRGGDWDKCFA

SEQ ID NO: 11143 - protein, 487 aa, Corynascus heterothallicus
MTGLGVMVVMVGFLAIASLQSESRPCDTPDLGFQCGTAISHFWGQYSPYFSVPSELDASIPDDCEVTFAQVLSRHGARAPTLKRAASYVDLIDRIHHGAISYGPGYEFLRTYDYTLGADELTRTGQQQMVNSGIKFYRRYRALARKSIPFVRTAGQDRVVHSAENFTQGFHSALLADRGSTVRPTLPYDMVVIPETAGANNTLHNDLCTAFEEGPYSTIGDDAQDTYLSTFAGPITARVNANLPGANLTDADTVALMDLCPFETVASSSSDPATADAGGGNGRPLSPFCRLFSESEWRAYDYLQSVGKWYGYGPGNPLGPTQGVGFVNELLARLAGVPVRDGTSTNRTLDGDPRTFPLGRPLYADFSHDNDMMGVLGALGAYDGVPPLDKTARRDPEELGGYAASWAVPFAARIYVEKMRCSGGGGGGGGGEGRQEKDEEMVRVLVNDRVMTLKGCGADERGMCTLERFIESMAFARGNGKWDLCFA

SEQ ID NO: 11144 - protein, 457 aa, Danio rerio
MKAFFLNFITTYLSIMVGLSLSKLAKPTVPSIAHYFGTKGRYEEVNPHLLDDVLFVNKSQVAPPSLDCRAIHMVSVIRHGTRYPTTKNVRKIAQLFDLVKSDSLRLASSWLNDLKTWKMWYTEDMDGRLVEKGRDDHRHLAMRLAKSFPTLITADHLRANRIEFMTSSKHRCVDSVKAFQEGLHRLWDVQDMDYQHYVDDSLMRFFDHCEKFVEGVENNKTALKEVQRFKSSSEMDSVRRKISSRLQIPYDRITADMAEAAFFLCSYEFAIKSEYSPWCELLDESDAQVLEYKNDLKQYWKRGYGHDINRKSSCPLFHDIFSRLDNAAKDHRFGEVKKTATIQVGHGETLLPLLSLMGFFKDEKPLTSENFALQRKRVFRSSKILPYAANVVLVLYECSDGLRVQLFLNEKPMIFPSMNHAAPLYERVRKHYSKLLHGCDFNKECDLPQLNLRNTEL

SEQ ID NO: 11145 - protein, 453 aa, Agrocybe pediades
MSLFIGGCLLVFLQASAYGGVVQATFVQPFFPPQIQDSWAAYTPYYPVQAYTPPPKDCKITQVNIIQRHGARFPTSGAGTRIQAAVKKLQSAKTYTDPRLDFLTNYTYTLGHDDLVPFGALQSSQAGEETFQRYSFLVSKENLPFVRASSSNRVVDSATNWTEGFSAASHHVLNPILFVILSESLNDTLDDAMCPNAGSSDPQTGIWTSIYGTPIANRLNQQAPGANITAADVSNLIPLCAFETIVKETPSPFCNLFTPEEFAQFEYFGDLDKFYGTGYGQPLGPVQGVGYINELLARLTEMPVRDNTQTNRTLDSSPLTFPLDRSIYADLSHDNQMIAIFSAMGLFNQSSPLDPSFPNPKRTWVTSRLTPFSARMVTERLLCQRDGTGSGGPSRIMRNGNVQTFVRILVNDALQPLKFCGGDMDSLCTLEAFVESQKYAREDGQGDFEKCFD

SEQ ID NO: 11146 - protein, 494 aa, Sulfolobus tokodaii
MSNNPFKSLDSLKLSFNHIKIWYTAGMGFFTDAYDLLIIGYIIATIEYAHTYAGIIIPGFTEYLIGHNAAFWTGLLASSAIWTAIIGQLLFGYLGDRLGRKSVYGIEAMLLTLGAFLSALAWNLPALIAFRMLMGFGIGGDYPISSTIMSEYANVKDRGKLVSLVFANQGIGSIVAAVVGIVSALTLPPDIAWRVMAGIGAIPAATVIYLRRKVPETPRYSLLAKGNIEEAKKAAELLGTKLDVDKRVISKRLSISEFFAKYGLLLIGTAGTWFILDIAFYGTGTYSSAVLAPIFGSPFPATHVTLSLAEFQADLAKDLFLGAIPFLVGFPGYFTAVALMDKLGRKVIQLQGFVMMALIYGIVASIALTSGTKITGFIIPSTLAFAIYSLSYFFIDFGPNTTTFVIPAEVYPVRYRTTGHGISAASGKLGAAITTYLFPLLLASIGIKNILIMLAIVSIIGAVLTYFFVPEPKHKPLEEVAKEELEEEQNVQSQ

SEQ ID NO: 11147 - protein, 458 aa, Sulfolobus tokodaii
MKLSDIFKPLDQRNFDVWHIKSLLTTGMGVFTDGYDLSSIGIVLAMVLSSFGITSKSPDYTLWQSLVSGSALIGAAVGAIIFGILSNRGRKTFYGIDVALLSIGALLQAFVSTPLELVIVRGLLGLGVGADYVLSPMIMAEYSNAKDRGKLLAFGFGLMWGFGATTAAAIALGLEALSVPTNIIWRVVLVTGAIPSASVIYLRRKIPETPRYLARIKGDVEKFREVVRTLANTDIHVNKELKDINSFSSYFSKFWKTFLAACLLWFLFDIVAYSGILFGPTDIAKSIGINNSAIFQFVIEFGFTLPGGIIALLTLDRIGRKPMQTFGFFGMAISLLLFSLLKSSIPATTALILYGLQNLFSQAGPGSVSASGMLGVELAPTKVRGLVQSLTVASGRIGAALTAFVFPALFNTYGESFAVAFLSSVAFVAAVLTLIAVPETKGKPLEVSSQEDLIVQEI

SEQ ID NO: 11148 - protein, 418 aa, Sulfolobus tokodaii
MSFEKIPWAIKVRAFFVSSGGFLLDGYDLSVISFASTIISKEFSLTSAELGLLVSSSLIGMIPGSIIFGYLADKIGRKKLMGFDLLIFLVFGILTAISNSFASLFLSRLFLGFGIGGDYPISSTIMSELSPSFSRGKYLVGSISMYWIGTAISALFTLLLLPTGEYFWRYVFLVGAIISLPIVLLRVKLIESPRWLVAIGKEKGEKELQVKGATSFMDIFKGRLLVVTFFVTSVWFLFDVASYGIGLYYPYVLEQFAFPSKYEVVLGTLAISVGAIIGYIIAINIVDPLGRRLTLITGLSVMSILLYLGALTHISGSILVPYFMTFVAFEQWAGAVTLFYPTELYPTSVRASGQGFATAISRIGGVLGTFYFPILEHQLGFANVLMLFGSLSLLADIISIVLAKETSRKPLEETSISV

SEQ ID NO: 11149 - protein, 446 aa, Sulfolobus tokodaii
MMRLSWTSVLVSGMGVFTDGYNLYSLSLTIYLISNYISLNSVTEGILVAGSYFGAGIAALLFGILSDFKGRKRMYGIDVTLMSIGAIAQAISQNYVELFVSRLLLGMGIGADYVLSPIIVAENAEAKNRGKLMVITFAVLWGLGAVFAAFVDQISSIFLPSSLVWRVVLGVGAIPAISVIMARRKLTETLQFLTKVKPDENELQKIKTNYGLLLGINVDKEKFINRLKASLPFIIVASVLWLLYDIYSSTFAIYGPIVIASNLGLTPITFTYVAQFFAGIPGQLLCIYLIDKVGRKILITIGYAGVALWLVMYSLLLLDPYLFGFKPMKELVGEAALLGFSFYMLNYFFSAIGPASIIGSAMVTPELTYTKVRGTGQAISVAVDRFASATVISLFPSLVNIVGLGAMVGVYAGIAFLSSLITMLFVPETKGKELDEVVKSSLKYGK

SEQ ID NO: 11150 - protein, 535 aa, Hordeum vulgare subsp. vulgare
MAREQLEVLSALDTAKTQWYHFTAIVIAGMGFFTDAYDLFCISLVTKLLGRIYYYREGADAPGSLPPNVAAAVNGVAFCGTLSGQLFFGWLGDRMGRKRVYGMTLMCMVLCSIASGLSFGSTPGSVMATLCFFRFWLGFGIGGDYPLSATIMSEYANKKTRGAFIAAVFAMQGFGILTGGVVTLIVSAAFRAAFHAPAYEKGAVASTPPQADFVWRFILMFGAVPALLTYYWRMKMPETARYTALVAKNAKQAAADMSKVLQVEIAAEDETKDNDGAGEDRNSFGLFSGEFLRRHGLHLLGTATCWFLLDIAFYSQNLFQKDIFTAINWIPKAKTMSALEEVHRIARAQTLIALCGTVPGYWFTVALIDRIGRFWIQLGGFFFMAVFMLGLAFPYHHWTTPGNHIGFVVLYALTFFFANFGPNSTTFIVPAEIFPARLRSTCHGISAAAGKLGAIVGSFGFLYLAQNQDPSKVDHGYKAGIGVKNSLFILAACNFLGMAFTFCAPESNGISLEELSGENDDEAPAPATHARTVPV

SEQ ID NO: 11151 - protein, 538 aa, Hordeum vulgare subsp. vulgare
MARSEQQGLQVLSALDAAKTQWYHFTAIVVAGMGFFTDAYDLFCISLVTKLLGRIYYTDLSKPDPGSLPPSVAAAVNGVAFCGTLAGQLFFGWLGDKMGRKSVYGMTLLLMVICSIGSGLSFAHTPKSVMATLCFFRFWLGFGIGGDYPLSATIMSEYANKKTRGAFIAAVFAMQGFGILAGGIVTLIISSAFRAGFHEPAYQDDRVASTGTEADFVWRIILMLGALPALLTYYWRMKMPETARYTALVAKNAKLAAADMSKVLQVELEDETEKMDEMVSRGANDFGLFSPQFARRHGLHLVGTATTWFLLDIAFYSQNLFQKDIFTSINWIPKARTMSALDEVFRISRAQTLIALCGTVPGYWFTVFLIDVVGRFAIQLMGFFMMTVFMLGLAVPYHHWTTPGNQIGFVVMYGFTFFFANFGPNATTFVVPAEIFPARLRSTCHGISAAAGKAGAMIGAFGFLYAAQDPHKPDAGYRPGIGVRNSLFVLAGVNLLGFMFTFLVPEANGKSLEEMSGEAQDNENEDQARTAAVQPSMA

SEQ ID NO: 11152 - protein, 539 aa, Hordeum vulgare subsp. vulgare
MASRQQQQLQVLSALDGAKTQLYHFRAVVVAGMGFFTDAYDLFCISLVTKLLGRIYYADPSSPNPGSLPPNVAAAVNGVALCGTLAGQLFFGWLGDRLGRKSVYGMTLILMVVCSVASGLSFGHTPASVMATLCFFRFWLGFGIGGDYPLSATIMSEYANKKTRGAFIAAVFAMQGFGILAGGVVTLVLSTVFRSAFPAPAYQTDAAASTVPQADYVWRIILMLGALPAALTYYWRTKMPETARYTALVAKNAKKASLDMSKVLQSEVEAEPEKLDEIMARGEDYGLLTSRFAKRHGLHLLGTATAWFLVDVAYYSQNLFQKDIFGSIGWIPKARTMDALEEVFRISRAQTLIALCGTVPGYWFTVFLIDVIGRFWIQLVGFAMMAVFMLGLAVPYHHWTTPGNHVGFVVMYGLTFFFANFGPNATTFIVPAEIFPARLRSTCHGISAAAGKAGAIIGAFGFLYAAQSPDLAHVDAGYKPGIGVQKALYVLAACNLLGFLVTFLVPESKGKSLEEMSGEADAEEGNGANNVRPSGEQLV

SEQ ID NO: 11153 - protein, 525 aa, Hordeum vulgare subsp. vulgare
MATEQLNVLKALDVAKTQLYHFKAVVIAGMGFFTDAYDLFCIALVTKLLGRIYYTDPALNEPGHLPANVSAAVNGVALCGTLAGQLFFGWLGDKLGRKSVYGFTLILMVLCSIASGLSFGHEAKGVMGTLCFFRFWLGFGVGGDYPLSATIMSEYANKKTRGTFIAAVFAMQGFGILFGTIVTIIVSSAFRHAFPAPPFYIDAAASIGPEADYVWRIIVMFGTIPAALTYYWRMKMPETARYTALIAGNTKQATSDMSKVLNKEISEEAGQGERATGDTWGLFSRQFMKRHGVHLLATTSTWFLLDVAFYSQNLFQKDIFTKIGWIPPAKTMNALEELYRIARAQALIALCGTVPGYWFTVAFIDIIGRFWIQLMGFTMMTIFMLAIAIPYDYLVKPGNHTGFVVLYGLTFFFANFGPNSTTFIVPAEIFPARLRSTCHGISAATGKAGAIIGAFGFLYASQDQKKPETGYSRGIGMRNALFVLAGTNFLGLLFSLLVPESKGKSLEELSKENVGDDDAIAPTGV

SEQ ID NO: 11154 - protein, 527 aa, Hordeum vulgare subsp. vulgare
MAGDQVHVLAALDGAKTQWYHFTAIVVAGMGFFTDAYDLFCISLVTKLIGRIYYTVPGSPSPGSLPPTVSAVVNGVAFVGTLSGQLFFGWLGDKVGRKSVYGMTLMLMIICSVASGLSFGRTPTSVMATLCFFRFWLGFGIGGDYPLSATIMSEYANKRTRGAFIAAVFAMQGFGILAGGGVAIGITALFRALFPAPPYAADPVASTPDQADYVWRIVLMLGALPAALTFYWRMKMPETPRYTALIAKNAERAAADMSKVLNVEITKEQAGDLETAISIKSHTSPSFGLFSREFMRRHGLHLLGTASTWLLLDIAYYSQNLFQKDIFSAIGWIPPAPTMSALDELYHIARAQILIALCGTVPGYWFTVAFIDSVGRFKIQLMGFFMMTAFMLGLAGPYDYWTGQGHQVGFVVMYALTFFFANFGPNATTFIVPAEIYPARFRATCHGISAASGKVGAIIGSFGFLYLAQSPDPAKTAHGYHPGIGVRYSLFVLALCSLLGFMLTFLVPEPKGKSLEEMSRETEPDHC

SEQ ID NO: 11155 - protein, 521 aa, Hordeum vulgare subsp. vulgare
MATEQLNVLKALDVAKTQLYHFKAVVIAGMGFFTDAYDLFCIALVTKLLGRIYYTDPALNEPGHLPANVSAAVNGVALCGTLAGQLFFGWLGDKLGRKSVYGFTLILMVLCSIASGLSFGHEAKGVMGTLCFFRFWLGFGVGGDYPLSATIMSEYANKKTRGTFIAAVFAMQGFGILFGTIVTIIVSSAFRHAFPAPPFYIDAAASIGPEADYVWRIIVMFGTIPAALTYYWRMKMPETARYTALIAGNTKQATSDMSKVLNKEISEEAGQGERATGDTWGLFSRQFMKRHGVHLLATTSTWFLLDVAFYSQNLFQKDIFTKIGWIPPAKTMNALEELYRIARAQALIALCGTVPGYWFTVAFIDIIGRFWIQLMGFTMMTIFMLAIAIPYDYLVKPGNHTGFVVLYGLTFFFANFGPNSTTFIVPAEIFPARLRSTCHGISAATGKAGAIIGAFGFLYASQDQKKPETGYSRGIGMRNALFVLAGTNFLGLLFSLLVPESKGKSLEELSKENVGDDGIDA

SEQ ID NO: 11156 - protein, 509 aa, Hordeum vulgare subsp. vulgare
MATEQLNVLKALDVAKTQLYHFKAVVIAGMGFFTDAYDLFCIALVTKLLGRIYYTDPALNEPGHLPANVSAAVNGVALCGTLAGQLFFGWLGDKLGRKSVYGFTLILMVLCSIASGLSFGHEAKGVMGTLCFFRFWLGFGVGGDYPLSATIMSEYANKKTRGTFIAAVFAMQGFGILFGTIVTIIVSSAFRHAFPAPPFYIDAAASIGPEADYVWRIIVMFGTIPAALTYYWRMKMPETARYTALIAGNTKQATSDMSKVLNKEISEEAGQGERATGDTWGLFSRQFMKRHGVHLLATTSTWFLLDVAFYSQNLFQKDIFTKIGWIPPAKTMNALEELYRIARAQALIALCGTVPGYWFTVAFIDIIGRFWIQLMGFTMMTIFMLAIAIPYDYLVKPGNHTGFVVLYGLTFFFANFGPNSTTFIVPAEIFPARLRSTCHGISAATGKAGAIIGAFGFLYASQDQKKPETGYSRGIGMRNALFVLAGTNFLGLLFSLLVPESKGKSLEEL

SEQ ID NO: 11157 - protein, 159 aa, Hordeum vulgare subsp. vulgare
QLMGFFMMTVFMLGLAVPYHHWTTPGNQIGFVVMYGFTFFFANFGPNATTFVVPAEIFPARLRSTCHGISAAAGKAGAMIGAFGFLYAAQDRHKPDAGYRPGIGVLNSLFVLAGVNLLGFMFTFLVPEANGKSLEEMSGEAQDNEEDQARTAAVQPSMA

SEQ ID NO: 11158 - protein, 461 aa, Bacillus subtilis
MKKDTRKYMIYFFGALGGLLYGYDTGVISGALLFINNDIPLTTLTEGLVVSMLLLGAIFGSALSGTCSDRWGRRKVVFVLSIIFIIGALACAFSQTIGMLIASRVILGLAVGGSTALVPVYLSEMAPTKIRGTLGTMNNLMIVTGILLAYIVNYLFTPFEAWRWMVGLAAVPAVLLLIGIAFMPESPRWLVKRGSEEEARRIMNITHDPKDIEMELAEMKQGEAEKKETTLGVLKAKWIRPMLLIGVGLAIFQQAVGINTVIYYAPTIFTKAGLGTSASALGTMGIGILNVIMCITAMILIDRVGRKKLLIWGSVGITLSLAALSGVLLTLGLSASTAWMTVVFLGVYIVFYQATWGPVVWVLMPELFPSKARGAATGFTTLVLSAANLIVSLVFPLMLRPMGIAWVFMVFSVICLLSFFFAFYMVPETKGKSLEEIEASLKKRFKKKKSTQNQVLNERTL

SEQ ID NO: 11159 - protein, 451 aa, Bacillus subtilis
MKTIFKQKNTHPFSNAANRLGRLPISRVHFQVLTALGIVYFFDLADLFTLSNVAPALIENWGIPLSTIANVTAASFLGMFLGSSLGGRLSDRIGRKKPLNLFVFVFSIASLCNAAAWDIPSLMTFRFLTGFGVAAAMVITNSYLAEFFPSSVRGKYISFCAMIGLIGVPITNIVSAFVIPLGSWGWRLVFVWGAVGLIYFFFIHRLEESPRWHENRGEYAKADAILTRIEEQVEKEKGPLPAASQPKVSETVKQNAGYAGLLKGRNLKITIVLSAVWIFETFGFYGFASWVPSLLKSNGVTMENTLWYNVLHSVGAPLGALLGSMISERFQRKWILAASAFLTAIAGLLYGMTFIPIMIIVFGFIVNITERVFTSNLYAYTSEPYPTEYRSSGSGLAYGLGRFSNIFGSLLVGFIAVQLGYISVFLFIGGCWLACSLLLIFFGPNTNAKQI

SEQ ID NO: 11160 - protein, 469 aa, Clostridium acetobutylicum
MGENNSHKHSLLFIVLISCAAGLGGLLYGYDTAVISGAIGFLKKLYNLSPAMQGFVISSIMVGGVLGVGFSGFLGDAIGRRKVLMLAAALFAISAVISSISTSAFMLIFARIVGGLGIGMASALSVTYITECAPPSIRGRLSSLYQLFTILGISITFFVNLGIVNMGSETWRVSTGWRYMLACGTVPAIVFLITLFFVPESPRFLVKSGNIKKAAAVLTKINGAEIAKQELDSISKSLATENDSSLGQLLQPGLRRALLIGIFLAIFNQAIGMNSITYYGPEIFQMIGFKNNSSFLATSVIGVVEVFSTILAMFLIDKLGRKKLMEIGSAAMAVFMLLIGTSFYIKLSNGFVILIFIICFVVSFCISMGPIPWIMIPEIFPNHLRARATGIATIFLWGANWAIGQFTPMLLNGIGGAYTFWIFCGINVICFLVVTTKVPETKNKSLEEIEKFWIPKSKQNAKGSSVGAK

SEQ ID NO: 11161 - protein, 467 aa, Staphylococcus epidermidis ATCC 12228
MLKRFHKGIIISLAIEKGMIRMKANKYLIFILGALGGLLYGYDNGVISGALLFIHKDIPLNSTTEGIVVSSMLIGAIVGAGSSGPLADKLGRRRLVMLIAIVFIIGALILAASTNLALLIIGRLIIGLAVGGSMSTVPVYLSEMAPTEYRGSLGSLNQLMITIGILAAYLVNYAFADIEGWRWMLGLAVVPSVILLVGIYFMPESPRWLLENRNEEAARQVMKITYDDSEIDKELKEMKEINAISESTWTVIKSPWLGRILIVGCIFAIFQQFIGINAVIFYSSSIFAKAGLGEAASILGSVGIGTINVLVTIVAIFVVDKIDRKKLLVGGNIGMIASLLIMAILIWTIGIASSAWIIIVCLSLFIVFFGISWGPVLWVMLPELFPMRARGAATGISALVLNIGTLIVSLFFPILSDALSTEWVFLIFAFIGVLAMIFVIKFLPETRGRSLEEIEYELRERTGARTE

SEQ ID NO: 11162 - protein, 443 aa, Agrobacterium tumefaciens str. C58 (U. Washington)
MNWSLPVNIMANGPATAPDQKTRLKSIIGGSAGNLVEWYDWYVYSAFTLYFAPVFFPSGNQTAELLSAAAVFAVGFLMRPIGAWFMGTYADRKGRKAGLTLSVTLMCLGSLLIAVTPGHETIGIAAPAILVFARLLQGISVGGEYGASATYLSEMAGKSRRGFFSSFQYVTLISGQLLALAVLLVLQRVLTPEQLGSWGWRIPFFIGGMLAIAVFYIRRGLAETQSFENAKAGEADKPKSSGWALFKHYPREALMVMALTSGGTLAFYAYTTYLQKFLVNTSGFSKESATEITTAALFVFMLCQPLAGALSDRVGRKPLMVGFGILGTLFTYLIFSTLATTTDPIMAFVLVLVGLLIVTGYTSINAVVKAEMFPAHIRALGVALPYALANTIFGGTAEFVALKFKQIGHENWFFWYVTIMIALSLVVYVKMRDTRDHSHIHED

SEQ ID NO: 11163 - protein, 488 aa, Fusarium sp. IFO 7772
IVYYPEKGKLPTSSDNAIKLSTSAGTVIGQLFFGAMADIVGRKRMYGLELILIIFATLAQALTAGSPSVSIIGVIIFWRVLMGVGIGGDYPLSSIITSEFATTKWRGAMMAAVFAMQGIGQLVAALVMMFLTLGFKSSLETAADTKSCTGGCQVSVDKMWRTLIGFGAVPACIALYYRLTIPETPRYTFDVARDVEQADEDVKAYMTGKREGETDEVARAQVHQGAKANLQVPKASFRDFLKHYSKWKNASLLLGTAGSWFCLDVAFYGLSLNNGTILKVIGYSAKNTHSVYEYLYNTAVGNIIIVLAGAVPGYWVSVATIDTLGRKTIQLGGFIILTILFVVLGFAYNHIPSNGLLAIYVLAQFFFNFGPNTTTFIVPGEVFPTRYRSTSHGISAASGKIGSIIGQGAISILRTRGATETNEAPWMDHVLEIYALFMLLGVFTTLLIPETARKTLEELSGDDDFANTHDDHALGHESHSGKPERTSV

SEQ ID NO: 11164 - protein, 62 aa, Helianthus annuus x Helianthus argophyllus
RGYPTGIGIRYTLIILGVVNALGLLFTFLVPEPNGKSLEEMSGENEEDIEPTANTTNRTVPV

SEQ ID NO: 11165 - protein, 481 aa, Xanthomonas campestris pv. campestris str. ATCC 33913
MFPGEPMSSVSIDGAPDAGENTRFIILISCVATIGGFLFGFDSGVINGTVDGLKQTFQSSAAETGFEVASMLLGCAIGAFFAGRLADRWGRRAVLIISAALFLLSAIGAGASHSSGFFIFARVMGGFAVGAASVISPAYIAEVASARYRGRLATMQQIAIISGLFCAFLSNYLLANAAGASTEPLWGGQAAWRWMFWMQAIPSLLFLLLLLVIPESPRYLVVKGRREQALVVLKRLYGNAAAQTKLGEISASMSADQHKPKFSDLISKTTGKIRPIVWIGVGLAVFQQLVGINVVFYYGAVLWQAVGFSEQDALLINVLSGGLSIGACLVTVMLVDKIGRKPLLWIGSAGMAVSLALVTYAFATASLDPNGKLAMSDAMGMLALVAANVYVVFFNASWGPVMWVMLGEMFPNQIRGSGLAIAGAAQWTSNFAITVSFPILLGSIGLAGAYGIYTVAAFISVFFVLKYVYETKGKELEQMEG

SEQ ID NO: 11166 - protein, 496 aa, Xanthomonas campestris pv. campestris str. ATCC 33913
MHDTRAIRSHFGWFKRRRQLQLDEVTVVDRGMLRKAVGAAALGNAMEWFDFGVYGYLAVTLGQVFFPSSSPTAQLIATFATFTVAFLVRPIGGMVFGPLGDRYGRQKVLAATMILMALGTFSIGLIPSYAQIGLWAPALLLLARLLQGFSTGGEYGGAATFIAEYATDRNRGLMGSWLEFGTLGGYIAGAATVTALHMALSQAQMLDWGWRVPFLVAGPLGLLGLYMRMKLEETPAFRAYTEQSEQRERETAGQGLMTLLRLHWPQLLKCVGLVLVFNVTDYMLLTYMPSYLSVTMGYAESKGLLLIILVMLVMMPLNVVGGMFSDKLGRRPMIIGACAALFALAIPCLLLIGSGSDVLIFTGLMLLGLALVCFTSSMPSTLPALFYTPVRYSALSIAFNVSVSLFGGTTPLVTAWLVERTGDPLVPAYYLMGAAAIGLVTMLFVRETAGLPLRGSPPAVASDAEARALLQGDSPVTVDAQLPLSGTPSIGQPRPA

SEQ ID NO: 11167 - protein, 475 aa, Xanthomonas axonopodis pv. citri str. 306
MSSVSIDGAPDAGENTRFIILISCVATIGGFLFGFDSGVINGTVDGLKQTFQSTAAETGFEVASMLLGCAIGAFFAGRLADRWGRRAVLIISAALFLLSAIGAGASHSSAFFIFARVMGGFAVGAASVISPAYIAEVASARYRGRLATMQQIAIISGLFCAFLSNYLLANAAGASTEPLWAGQAAWRWMFWMQAVPSILFLLLLLVIPESPRYLVVKGRREQALVVLKRLYGNAAAQTKLGEISASMAADQHKPKFSDLINKATGKIRPIVWIGIGLAVFQQLVGINVVFYYGAVLWQAVGFSEQDALLINVLSGGLSIGACLVTVMLVDKIGRKPLLWIGSAGMAVSLALVTYAFATASLDPNGKLAMSDAMGMLALVAANVYVVFFNASWGPVMWVMLGEMFPNQIRGSGLAIAGAAQWTSNFAITVSFPILLGSIGLAGAYGIYTVAAFISVFFVLKYVYETKGKELEQMEG

SEQ ID NO: 11168 - protein, 427 aa, Xanthomonas axonopodis pv. citri str. 306
MTTHAPPTQLTRSDYKTLGLSALGGALEFYDFIIFIFFAKVLGELFFPPGIPEWTRQLQTFGIFAAGYLIRPLGGIVMAHFGDLLGRKRMFALSIGLMALPTLAIGVLPTYAQIGVAAPLLLLTMRLLQGAAIGGEVPSAWVFVAEHVPARRTGLACGTLTAGLAAGVLLGSLSAGALHRAFSPDQIAEYAWRLPFLAGGIFGLLSVYLRRWLHETPVFAELVAMRALARETPLKVVLRDHPRSLAMSLWLTWVIAAAVLVVSLMTPTLLQSAYGYPSPVALQANLLAVLLQAVGSVVAGALSDRWGNGRVLLAGSVLLGVSAWLFYRLAGDPYLLFPLYALLGAALGVLGAIPRVMVEAFPPVVRLSGVSFAYNLGYAVFGGLTPLLVVMLLKLHPMGPAYYVILLASIGAIVGARLSQRERISRW

SEQ ID NO: 11169 - protein, 490 aa, Xanthomonas axonopodis pv. citri str. 306
MRSHFGWFKRRRQLQLDEVTVVDRSMLRRAVGAAALGNAMEWFDFGVYGYLAVTLGQVFFPASNPTAQLIATFATFTVAFLVRPIGGMVFGPLGDRYGRQKVLAATMILMALGTFSIGLIPAYQRIGLWAPALLLLARVLQGFSTGGEYGGAATFIAEYATDRNRGLMGSWLEFGTLGGYIAGAATVTALHMSVTPAQMLDWGWRVPFLIAGPLGLLGLYMRMKLEETPAFRAHTEQSEQRERQTAAQGLTTLLRLHWPQLLKCVGLVLVFNVTDYMLLTYMPSYLSVTMGYAESKGLLLIILVMLVMMPLNIVGGMFSDKLGRRPMIIGACIALFALAIPCLLLVGSGNDGLIFAGLMLLGLALVCFTSSMPSTLPALFYTPVRYSALSIAFNVSVSLFGGTTPLVTAWLVERTGDPLVPAYYLMGAAAIGLLTMLFVRETAGLPLRGSPPAVASDAEARALLQADSPVTVDAQLPVTTAASMGQPRTA

SEQ ID NO: 11170 - protein, 431 aa, Campylobacter jejuni subsp. jejuni NCTC 11168
MRKSKFGTKEIKILGLSSLGGTLEFYDFIIFVFFAEYIANVFFPKDMSEFWALLNTYGAFAAGYLARPLGGIVMAHFGDKFGRKNMFMLSILLMVLPTFVLAFIPGYETLGFLAPVLLILIRIFQGIAIGGELPGAWVFVREYCQEKQKAFFLSCLNSAMALGILLGSIVFLIINAFFSIEEIAAYAWRIAFFVGGIFGIISIYLRRFLQETPVFKQMKKESSLSSFPLKDLFKEKDIVKNLFSSMMMTWVLTGCVIVLVLLMPKFMPSILNLSGVEGSYLQILGILGIALGGAFMGYLVDKFGLFKICIFFSLTFVFFSFLYFYALYELKNLVLVCILYSIICFLGGINVFAPILMSEVFRAKIRFSGISFSYNISYAISGGITPQLVFWLNTLASKNENPFLYGMSIYMIFLALLAICAVFIVKDKIKF

SEQ ID NO: 11171 - protein, 453 aa, Campylobacter jejuni subsp. jejuni NCTC 11168
MTNQQIDGIADKNFNTPEGRKVFKKAVFSCWLGTAMEYADFALYGLAAATIFSEVFFPEQTPVIALLLSFVTYGIGFIARPIGALFFGHLGDKHGRKNVMMATIALMGISTTLIGFIPSYAVIGVWAPICLVALRFMQGFGAGAELSGGTVMLAEYAPSKRRGLVSSVIALGSNSGTLLASFVWLLMVQMDEASFKEWGWRVPFMGSILIALFAVYIRFHVKETPVFEKQKNEMMKLRLNNEKHMKKDERSFWQRSRAFWTMVGLRIGENGPSYLAQGFIVGYVTKILLLDKSVATTAVMIASLVGFLVIPLAGYLSDKFGRCITYRMFCLLLMIYAFPAFMLLDSKNEIIVILTIIVGMSLASLGIFGVQAAWGVELFGVKNRYTKMAFAKELGSILSGGTAPMVASALLAYYGSWWPIATYFVLTAGIGFVTTFFAPETRGRDLNKIEDAI

SEQ ID NO: 11172 - protein, 480 aa, Corynebacterium efficiens YS-314
MFGGRTHPGPTRTPSRTGVVLCAGMLIDAGYPRPTGVVFPHMNLTRNDRLDRLPVTSKHRKLLGGSGIGWALDAMDVGLISFIMAALVTHWDLSPTEASLLGSIGFVGMALGATFGGLLADKVGRRQVFALSLLVYGLATGASALSVSLVMLMALRFVVGLGLGAELPVASTLISEFSPRRIRGRMVVILEAFWALGWIMAAIIGTFVVTIGENGWRWALALGCVPAAYAIYVRLGLPESVRFLESKGRHEEAEAIVVSFEEQAVREGKPLTDSLPESRDVEVEGSESIWAKNLRRRTAALWVVWFCINLSYYGAFIWIPSLLVADGFTLVRSFQFTLIITLAQLPGYAAAAWLIEKWGRRATLSTFLAGSAVSAAMYGMADAEWQILVAGCLLSFFNLGAWGALYAIGPELYPTDVRGTGTGAAAGFGRIASIIAPLIVPPVISLGGPVLLFALFASAFALAAVAAFTLPEQKGKALAD

SEQ ID NO: 11173 - protein, 464 aa, Shigella flexneri 2a str. 301
MQPSRNFDDLKFSSIHRRILLWGSGGPFLDGYVLVMIGVALEQLTPALKLDADWIGLLGAGTLAGLFVGTSLFGYISDKVGRRKMFLIDIIAIGVISVATMCVSSPVELLVMRVLIGIVIGADYPIATSMITEFSSTRQRAFSISFIAAMWYVGATCADLVGYWLYDVEGGWRWMLGSAAIPCLLILIGRFELPESPRWLLRKGRVKECEEMMIKLFGEPVAFDEEQPQQTRFRDLFNRRHFPFVLFVAAIWTCQVIPMFAIYTFGPQIVGSLGLGVGKNAALGNVVISLFFMLGCIPPMLWLNTAGRRPLLIGSFAMMTLALAVLGLIPDMGIWLVVMAFAVYAFFSGGPGNLQWLYPNELFPTDIRASAVGVIMSLSRIGTIVSTWALPIFINNYGISNTMLMGAGISLFGLLISVAFAPETRGMSLAQTSNMTIRGQRMGLFVQISLFSESILLTISRVNI

SEQ ID NO: 11174 - protein, 452 aa, Shigella flexneri 2a str. 2457T
MEQYDQIGARLDRLPLARFHYRIFGIISFSLLLTGFLSYSGNVVLAKLVSNGWSNNFLYAAFTSALMFGYFIGSLTGGFIGDYFGRRRAFRINLLIVGIAATGAAFVPDMYWLIFFRFLMGTGMGALIMVGYASFTEFIPATVRGKWSARLSFVGNWSPMLSAAIGVVVIAFFSWRIMFLLGGIGILLAWFLSGKYFIESPRWLEGKGQIAGAESQLREVEQQIEREKSIRLPQLTLNQSNSKVKVIKGTFRLLFKGEMLRRTLVAITVLIAMNISLYTITVWIPTIFVNSGIDVDKSILMTAVIMIGAPVGIFIAALIIDHFPRRLFGSALLIIIAVLGYIYSSQTTEWAILIYGLVMIFFLYMYVCFASAVYIPELWPTHLRLRGSGFVNAVGRIVAVFTPYGVAALLTHYGSITVFMVLGVMLVLCALVLSIFGIETRKVSLEEISEVN

SEQ ID NO: 11175 - protein, 500 aa, Shigella flexneri 2a str. 2457T
MLKRKKVKPITLRDVTIIDDGKLRKAITAASLGNAMEWFDFGVYGFVAYALGKVFFPGADPSVQMVAALATFSVPFLIRPLGGLFFGMLGDKYGRQKILAITIVIMSISTFCIGLIPSYDTIGIWAPILLLICKMAQGFSVGGEYTGASIFVAEYSPDRKRGFMGSWLDFGSIAGFVLGAGVVVLISTIVGEANFLDWGWRIPFFIALPLGIIGLYLRHALEETPAFQQHVDKLEQGDREGLQDGPKVSFKEIATKYWRSLLTCIGLVIATNVTYYMLLTYMPSYLSHNLHYSEDHGVLIIIAIMIGMLFVQPVMGLLSDRFGRRPFVLLGSVALFVLAIPAFILINSNVIGLIFAGLLMLAVILNCFMGVMASTLPAMFPTHIRYSALAAAFNISVLVAGLTPTLAAWLVESSQNLMMPAYYLMVVAVIGLITGVTMKETANRPLKGATPAASDIQEAKEILVEHYDNIEQKIDNIDHEIADLQAKRTRLVQQHPRIDE

SEQ ID NO: 11176 - protein, 472 aa, Thermobifida fusca
MSTTGEAPSSGEVNIAHVVMIAAAAAMGGFLFGYDSAVINGAVSAIQDTFRVGSTVIGFTVAAALIGSAVGAAIAGALADRIGRIRVMQLAAVLFAASAVGSALPFTVWDLAWWRVVGGVAIGIASVIAPTYIAEVSPPAFRGRLASLQQLAIVLGIATSQLVNYGLAAAVGGSALHRLGPLQAWQWMLGIEVLPAATYFVLTLVIPESPRHLVRIGRDARARRVLAEVEGGDVDGRVAEIRRVLGRERRPRLRDLRGRYGLLAIVWVGMALSAFQQLVGINVIFYYSAVLWQSVGIAETDSLLLSLFTSIVNIVGTLIAIGLVDRVGRKPLLLAGSAGMTVALAFTAFAFSHARGEGDDVVLSTAWALTALVSASTFVLFFALSWGVVTWVLLGEMFPLRIRAAAMAVATATQWITNWLVTVTFPSLRDWSLPGTYLVYTAFALLSFGFVLRFVRETKGRTLESMDELAGQ

SEQ ID NO: 11177 - protein, 459 aa, Leuconostoc mesenteroides subsp. mesenteroides ATCC 8293
MENGSTKRIASSFIYFFGAFGGILFGYDIGVMTGALPFLQKDWHLTDAGTIGWITSTLMLGAILGGALAGQLSDRLGRRRMILASSFIFAVGAIMAGVSPNNGVVWLLIARFLLGLAVGAASALVPSYMSEMAPAKNRGRLSGLNQLMIVSGMLLSYIVDYLLQGLPHTIAWRLMLGLAAVPAIILFVGVLRLPESPRFLVKTHKLAEARQVLTYIRTASEVDPELEDIQNTVAIESGAQKNITLSTLFSSKYRYLVTAGIGVAAFQQFMGANAIFYYIPLIVEKASGQAASSALLWPIVQGVILVLGALLYMVIADKFKRRTLLMVGGTVMALSFLMPSALNALVGADKFPPMLIVVFLSIFVAFYSFTWAPLTWVLVGEVFPLAIRGRASGLASSFNWLGSFAVGLLFPIMTAAMPQATVFAIFGVISIIAVLFIKFAVPETHGRTLEEIEAQGTNH

SEQ ID NO: 11178 - protein, 428 aa, Leuconostoc mesenteroides subsp. mesenteroides ATCC 8293
MEQAMNLQQRMDTTKETATFYRVFAMIAAGMILDGADVYLASAVNSAIVSTHFATLAQGSVFLSSGFLGLFFGSIFAGFIGDFLGRRKAYSTNLLIFGVLTLCAAFATNIWMLVGLRFFAAIGLGAEIVTGYALINEFAPIKNRGRWSGVTSVIANLAAPLTLLLAASVIPRYTWRAMFVIVGVLALILWVVRRHFPESPRWLIARGEYDKAEKIIEKLEVNGSYSTNDSSVKRQPVKTRIGIGLLVATVAVSAVNLTQYTFTSWMPTLLIKQGIEVVHSLTFSAVMMAGAPIGALIGALLVDVIGRKKVIVSAFVMTAVFGMIYSQQHTTVGILTVGFLVVTMMYILMASVVGVYMSELFPTYFRFRGTGYANGVAKILTVLTPYFAAWAITQFSANLIFYFIAAVALIAAIVVAVYGPETKQKAIY

SEQ ID NO: 11179 - protein, 480 aa, Oenococcus oeni MCW
MENKKTNISKTNYALNFIKTKSKAERHLKIIALCVTLGGLLFGVDTGVINGALPYMAKKQELNLNPATEGLVTSSITLGAAFGAIFAGRLADRYGRKRILFYLSIVFFFCTAICSLAPNAIIMMIFRFLLGLAVGSASVIVPTFLSEIATVKLRGPLVTQNEIMITGGQLLAFVVNAILGNIFVNVSNIWRYMIAFGMIPSALLFIGTLIVPESPRWLIMKGKTKTALKILKGIRSDKRQSQQEVTQIQATLKKEKEVSHISWYDLKKPWIKKLIILGSGLGIVQQIVGINIIMYYGTTVLIKAGFTHNIALITNIANGIVSVLATYTGMHLMNHINRRKMLLTGIAGTGGALALITLVSQILPHSKLLPVCVVFLTLIFLSFFQGCISPTIWLLMSEIFPQNLRGLGMGISTFFLWMANFLVGFLFPIFLNYFGFSITFGIFVLCNLISFIFVYKFAPETRNKSLERVQLELRTRIDKN

SEQ ID NO: 11180 - protein, 449 aa, Bifidobacterium longum DJO10A
MSTTTSAQPAQLTRNERLDRLPFNKAHRKLLVASGIGWAFDAMDVGLVSFVVAAIAADPHFNLTPTEKSWVLSIGFVGMAIGAAVGGFIADRVGRKTVFTATLIIFGIANGAMALSWSLGMLLGARLIIGLGLGAELPVASTLVSEFSPTKQRGRMTVLLESFWAVGWIVAAMIGYFVIPNTGDWGWRWALAIGALPLLYAIVTRVHIPESVRFLEAKGREDEAEKAVRYFEEAGGVAPVTSPKGKPLPKIKTRELFGSKYLARTIAIWATWFFVNFSYYGAFTWMPSLLADQFGSLTKSFGYTLAISIAQLPGYFLAAWLVEVWGRRKTLSIFLAVSAVAAFAFSQAGSVALVLVFGMLLSASNLGAWGVLYAVTPEIYPTRLRGAAAGAAAAVGRIAAIIAPLLMPWFLTLSGGNKAVAFIIFAAAFIIACVAALCLPERKGLDLED

SEQ ID NO: 11181 - protein, 449 aa, Bifidobacterium longum NCC2705
MSTTTPAQPAQLTRNERLDRLPFNKAHRKLLVASGIGWAFDAMDVGLVSFVVAAIAADPHFNLTPTEKSWVLSIGFVGMAIGAAVGGFIADRVGRKTVFTATLIIFGIANGAMALSWSLGMLLGARLIIGLGLGAELPVASTLVSEFSPTKQRGRMTVLLESFWAVGWIVAAMIGYFVIPNTGDWGWRWALAIGALPLLYAIVTRVHIPESVRFLEAKGREDEAEKAVRYFEEAGGVAPVTSPKGKPLPKIKTRELFGSKYLARTIAIWATWFFVNFSYYGAFTWMPSLLADQFGSLTKSFGYTLAISIAQLPGYFLAAWLVEVWGRRKTLSIFLAVSAVAAFAFSQAGSVALVLVFGMLLSASNLGAWGVLYAVTPEIYPTRLRGAAAGAAAAVGRIAAIIAPLLMPWFLTLSGGNKAVAFIIFAAAFIIACVAALCLPERKGLDLED

SEQ ID NO: 11182 - protein, 446 aa, Salmonella enterica subsp. enterica serovar Typhi Ty2
MPQPRNFDDLKFSSIHRRIMLWGSGGPFLDGYVLVIIGVALEQLTPLLHLDAEWIGALGAATLAGLFIGTSLFGYICDKVGRRKMFLLDIIAIGVISVATMFVSTPLELLVMRVLIGIVIGADYPIATSMITEFSNTRQRAFSIGFIAAMWYVGATCANLVGYWLYDMEGGWRWMLGSAFIPCLIILIGRFDLPESPRWLLRKGRVKECEQMMIKLFGEPVCFDDEPPQETRFLQLFNRRHFPFVLFVAAIWSCQVIPMFAIYTFGPQIVGLLGWEQGRNAALGNVVISLFFMLGCIPAMFWLNSIGRRPLLIGSFAMMTIALALLGLVSNLGIILVVVAFAVYAFFSGGPGILQWLYPNELFPTDIRASAVGVIMSLSRIGTIVSTWALPIFITRYGINNVMLIGALISLVGLGVSVMFAPETRGLTLTQTGNMTLRGTPSDNPR

SEQ ID NO: 11183 - protein, 452 aa, Yersinia pestis CO92
MQTLPSEKIRMDDVPLNRFHIRIAGLTFGAHFIDGYILGLIGFALIQLKPIMALTPLWEGLLGSAALIGLFLGSLILGWISDYIGRQKIFSFSFVIITLASALQFFASTPEQLFILRVIVGIGIGGDYSVGHTLLAEFSPRKHRGVLLGAFSVIWTFGYVSASFVGHYLSMVSPEAWRWLLSSAALPALLILLVRIGTPESPRWLMGKGREDDAMAIVHKYFGPNVTLIDEEPATSTRRFLSLFGRKYWRRTAFNSLFFVCLVIPYFAIYTFLPSILNVMALSQNFATDLLLNGLLVVGALVGIVLTAFCSRRSFLISSFIFLATCLLLLSILPSNQTFWLIALFAAFTLVMSAVSNLVGVFPAESFPTEVRSMGVGFATSMSRLGSAIGTSLLPLAIVNYGMPVTTTLLAFVLIIGAIVSIAWAPETKGLTLVDASQSATTPRPPSSIIPN

SEQ ID NO: 11184 - protein, 525 aa, Triticum aestivum/Thinopyrum intermedium alien addition line
MATEQLNVLKALDVAKTQLYHFKAVVIAGMGFFTDAYDLFCIALVTKLLGRIYYTDPALNEPGHLPANVSAAVNGVALCGTLAGQLFFGWLGDKLGRKSVYGFTLILMVLCSIASGLSFGHEAKGVMGTLCFFRFWLGFGVGGDYPLSATIMSEYANKKTRGTFIAAVFAMQGFGILFGTIVTIVVSSAFRHAFPAPPFYIDAAASIGPEADYVWRIIVMFGTIPAALTYYWRMKMPETARYTALIAGNTKQATSDMSKVLNKEISEEDVQGERATGDTWGLFSRQFLKRHGVHLLATTSTWFLLDVAFYSQNLFQKDIFSKIGWIPPAKTMNALEELYRIARAQALIALCGTVPGYWFTVAFIDIIGRFWIQLMGFTMMTIFMLAIAIPYDYLVKPGHHTGFVVLYGLTFFFANFGPNSTTFIVPAEIFPARLRSTCHGISAATGKAGAIIGAFGFLYASQDQKKPETGYSRGIGMRNALFVLAGTNFLGLLFSLLVPESKGKSLEELSKENVGDDDAIAPTGV

SEQ ID NO: 11185 - protein, 525 aa, Triticum aestivum/Thinopyrum intermedium alien addition line
MATEQLNVLKALDVAKTQLYHFKAVVIAGMGFFTDAYDLFCIALVTKLLGRIYYTDPALNEPGHLPANVSAAVNGVALCGTLAGQLFFGWLGDKLGRKSVYGFTLILMVLCSIASGLSFGHEAKGVMGTLCFFRFWLGFGVGGDYPLSATIMSEYANKKTRGTFIAAVFAMQGFGILFGTIVTIIVSSAFRHAFPAPPFYIDAAASIGPEADYVWRIIVMFGTIPAALTYYWRMKMPETARYTALIAGNTKQATSDMSKVLNKEISEENVQGERATGDTWGLFSRQFMKRHGVHLLATTSTWFLLDVAFYSQNLFQKDIFTKIGWIPPAKTMNALEELYRIARAQALIALCGTVPGYWFTVAFIDIIGRFWIQLMGFTMMTIFMLAIAIPYDYLVKPGHHTGFVVLYGLTFFFANFGPNSTTFIVPAEIFPARLRSTCHGISAATGKAGAIIGAFGFLYASQDQKKPETGYSRGIGMRNALFVLAGTNFLGLLFSLLVPESKGKSLEELSKENVGDDDTIVPTGV

SEQ ID NO: 11186 - protein, 525 aa, Triticum aestivum/Thinopyrum intermedium alien addition line
MATEQLNVLKALDVAKTQLYHFKAVVIAGMGFFTDAYDLFCIALVTKLLGRIYYTDPALNEPGHLPANVSAAVNGVALCGTLAGQLFFGWLGDKLGRKSVYGFTLILMVLCSIASGLSLGHEAKGVMGTLCFFRFWLGFGVGGDYPLSATIMSEYANKKTRGTFIAAVFAMQGFGILFGTIVTIIVSSAFRHAFPAPPFYIDAAASIGPEADYVWRIIVMFGTIPAALTYYWRMKMPETARYTALIAGNTKQATSDMSKVLNKEISEENVQGERATGDTWGLFSRQFMKRHGVHLLATTSTWFLLDVAFYSQNLFQKDIFTKIGWIPPAKTMNALEELYRIARAQALIALCGTVPGYWFTVAFIDIIGRFWIQLMGFTMMTIFMLAIAIPYDYLVKPGHHTGFVVLYGLTFFFANFGPNSTTFIVPAEIFPARLRSTCHGISAATGKAGAIIGAFGFLYASQDQKKPETGYSRGIGMRNALFVLAGTNFLGLLFSLLVPESKGKSLEELSKENVGDDDTIVPTGV

SEQ ID NO: 11187 - protein, 370 aa, Triticum aestivum/Thinopyrum intermedium alien addition line
DLFSLSLVVDLIGHRYYTGGPIPTYISVYINAAALCGTVPGQLVFGWLGDKMGRKRIYGVTLLLMVFCSLASGFTFGKSNYKSVVITLCFFRFWLGVSIGGDYPLSATIMSEYANKKTRGAFMSAVFAMQGFGNVVAGLVGMITSQVFRKSSPGNIDVVWRIVLMFGAVPALLTYYWRMKMPETARYTALIAKDANMAAADMSAVLSMHIVPEEDNLGSHDQYGLFSSEFRQRHGLHLLSTTVCWFVLDVTFYSLNLCMKDIFTTVGLLKGHDDEVCKVNTCQVARYHKADNPFQRTIDITAVHMAIAAGCTLPGYFFAVAFIDRIGRVKIQLLGFTMMTVFQLCLAIPYDKWLECNNNKYGFAVMYGFI

SEQ ID NO: 11188 - protein, 370 aa, Triticum aestivum/Thinopyrum intermedium alien addition line
DLFSLSLVVDLISQRYYTGGPIPTHISVYINAAALCGTVPRQLVFGWLGDKMGRKRIYGVTLLLMVFCSLASGFTFGKSNYKSVVITLCFFRFWLGVSIGGDYPLSATIMSEYANMRTRGAFLSAVFAMQGFGNVVAGLVGMITSQAFKKSSPDNIDFVWRIVLIFGAVPALLTYYWRMKMPETARYTALIAKDADMAAADMSAVLSMHIAPEEDSLGSQDQYGLFSSEFRQRHGLHLLGTTVCWFILDVTFYSLNLCMKDIFTTVGLLEGHDDEVCKVNSCQGASYHKADNPFQRTIDITAMHMAIAAGCTLPGYFFAVAFIDRIGRVKIQLLGFTMMTVFQLCLAIPYYKWQECNHNKYGFAVMYGLI

SEQ ID NO: 11189 - protein, 121 aa, Triticum aestivum/Thinopyrum intermedium alien addition line
RHGRHLLGTTVCWFVLDIAFYSQNLFQKDIYTAVEWLPRADTMNALQEMFKISRAQTLVALCGTIPGYWFTVFLIDVVGRFAIQLGGFFFMTAFMLGLAVPYHHWTTPGNHVGFVVMFSLT

SEQ ID NO: 11190 - protein, 50 aa, Triticum aestivum/Thinopyrum intermedium alien addition line
VAFIDKIGRFTIQLMGFFFMTVFMFAIAIPYKHWTHSENRIGFVVMYSFT

SEQ ID NO: 11191 - protein, 466 aa, Lactobacillus plantarum WCFS1
MNKQKKVSSKFIFFFGSFGGILFGYDIGVMTGALPFLKTDWALTNATLVGWVTSAVMFGAIFGAAIAGQLADRLGRRRMILMSSLIFAIGSILCGFSPNNGTYYLIGMRIFLGLAVGAASALVPAYMSEMAPARLRGSLSGINQTMIVSGMLISYIVDYILKDLPENMSWRLMLGLAAVPAIILFLGVLKLPESPRFLIKANRLDEARQVLSFVRKPDEVDSEVKAIQSTAQTEANNLEKTSWATLFNGKYRYLVMAGVGVAAFQQFQGANAIFYYIPLIVEKATGSAASSALMWPIVQGILLVLGSLLYIWIAEKFNRRTLLMLGGSVMALSFLLPAVINSLVPNASPMMIVVFLSIYVAFYSFTWAPLTWVLVGEVFPLAVRGRASGLASSFNWIGSWAVGLLFPIMTASMSQEAVFAVFGVICVLGVLFVRFCVPETRGHSLEEIEAAGTNHHKQVPVQQASH

SEQ ID NO: 11192 - protein, 488 aa, Lactobacillus plantarum WCFS1
MSAEKSISSDHVPLSDPALKTINRNAGRNLNHIAFISTLGGLLFGVDTGVINGAIGYMATPAELNLSPNNEGLVTSGITLGAAFGAVFAGHLSDRIGRKRLLKYLALLFFVCTLACSLAPNALFMIISRVLLGLAVGGASVIVPTYLSEISTPEIRGRLVTQNELMIVTGQLLAFIVNAILGNWFGHISNIWRYMIGFGMIPAVALFFGMMVVPESPRWLVMVNQLDNAFDSLRKIRSHPETCNEEITQIQDTLNQESEIKQATFKDLSTPWIRRLVFIGIGLGVMQQFIGINIMMYYGTTILTNSGFAHNAALIANIGNGLVSVIATFIGMSIMNRVNRRSMLIAGIIGTTTSLILIVGVSAFLSQSPLLPILVVLCTMMFLGFFQGFISPLVWLLLSEIFPQNLRGLGMGVSTFFLWFANFLVGYFFPILLSAVGMTWTFLIFVFFNILSFIFAYKYAPETRGKSLELIQMEFKYGDTTGINPEDK

SEQ ID NO: 11193 - protein, 470 aa, Lactobacillus plantarum WCFS1
MDVSESTNKKSNSHTGFLWLATFIAAMGSLLFGYDTGIVNGSLEFMAVKGQLDLTAFQQGIVSSGLTLGAAFGAIIGGPFADKIGRKKILTILGIIFSVGALGCAFATNITILIVFRFILGLAVGSASANVPVYIAEIAPTELRGKMVTTAQVMIVSGQFVAFGVNAALTPLGAQNAAIWRWMLGLGTIPGIILWIGMYLIPESPRWLVSQGKMDKALGVLRRIRSAASVESEMKEIQDKDKADKELNAEQATFKELISKRWVVQILITGAMLGIIQQFAGINSIMYYGGKIIQESGFDTTVAAILNAGNGFLSIVGAVLGMFTIDWLGRRKLEFAGLTICGITLVSAGVIHTVAPNASWAGITIVVLVYLYIIFFQGTLGPVTWLINSEIFPQRYRGIGTGITIFVLWIGNFIVGLLSPVLLEWNMSNTFYIFAVCCVLGIIFVALRVPETKGVPLEEIEKYFRTKYDK

SEQ ID NO: 11194 - protein, 463 aa, Oceanobacillus iheyensis HTE831
MIQDKKISSKFIYFFGAFGGILFGYDIGVMTGALPFLQSDWNLQNDPTAIGWITSSLMLGAIFGGALSGQLSDRIGRRKMILIASIIFALGSIMAGISPHNGILFMIVSRIILGLAVGAASALVPAYMSEMAPARLRGRLSGINQTMIVSGMLLSYIVAFVLKDLPETMAWRLMLSLAAVPALILFFGVLRLPESPRFLIKNNKINEARKVLSYIRPKEKIESEISQIQASTKYEEKASQKTSWGTLLSGKYRYLVIAGLGVAAFQQFQGANAIFYYIPLIVENATGNAASSALMWPIIQGIILVLGSLLFLLIADKFNRRTLLTLGGTVMGLSFILPAILNIVIPNASPMMIVVFLSIYVAFYSFTWAPLTWVIVGEIFPLVIRGRSSGLASSFNWIGSFLVGLLFPVMVASMAQEAVFAIFGAICLLGVLFVRLCVPETRGRSLEEIEKIGESKQLHKKTV

SEQ ID NO: 11195 - protein, 400 aa, Bacillus subtilis subsp. subtilis str. 168
MGKQQPISQRKLLGVAGLGWLFDAMDVGILSFIIAALHVEWNLSPEEMKWIGSVNSIGMAAGAFLFGLLADRIGRKKVFIITLLCFSIGSGISAFVTSLSAFLILRFVIGMGLGGELPVASTLVSEAVVPEKRGRVIVLLESFWAVGWLAAALISYFVIPSFGWQAALLLTALTAFYALYLRTSLPDSPKYESLSAKKRSMWENVKSVWARQYIRPTVMLSIVWFCVVFSYYGMFLWLPSVMLLKGFSMIQSFEYVLLMTLAQLPGYFSAAWLIEKAGRKWILVVYLIGTAGSAYFFGTADSLSLLLTAGVLLSFFNLGAWGVLYAYTPEQYPTAIRATGSGTTAAFGRIGGIFGPLLVGTLAARHISFSVIFSIFCIAILLAVACILIMGKETKQTELE

SEQ ID NO: 11196 - protein, 461 aa, Bacillus subtilis subsp. subtilis str. 168
MKKDTRKYMIYFFGALGGLLYGYDTGVISGALLFINNDIPLTTLTEGLVVSMLLLGAIFGSALSGTCSDRWGRRKVVFVLSIIFIIGALACAFSQTIGMLIASRVILGLAVGGSTALVPVYLSEMAPTKIRGTLGTMNNLMIVTGILLAYIVNYLFTPFEAWRWMVGLAAVPAVLLLIGIAFMPESPRWLVKRGSEEEARRIMNITHDPKDIEMELAEMKQGEAEKKETTLGVLKAKWIRPMLLIGVGLAIFQQAVGINTVIYYAPTIFTKAGLGTSASALGTMGIGILNVIMCITAMILIDRVGRKKLLIWGSVGITLSLAALSGVLLTLGLSASTAWMTVVFLGVYIVFYQATWGPVVWVLMPELFPSKARGAATGFTTLVLSAANLIVSLVFPLMLSAMGIAWVFMVFSVICLLSFFFAFYMVPETKGKSLEEIEASLKKRFKKKKSTQNQVLNERTL

SEQ ID NO: 11197 - protein, 451 aa, Bacillus subtilis subsp. subtilis str. 168
MNTIFKQKNTHPFSNAANRLDRLPISRVHFQVLTALGIVYFFDLADLFTLSNVAPALIEHWGIPLSTIANVTAASFLGMFLGASLGGRLSDRIGRKKALNLFVFVFSIASLCNAAAWDIPSLMTFRFLTGFGVAAAMVITDSYLAEFFPSSVRGKYISFCAMIGLIGVPITNIVSAFVIPLGSWGWRLVFVWGAVGLIYFFFIHRLEESPRWHENRGEYAKADAILTRIEEQVEKEKGPLPAASQPKVSETVKQNAGYAGLLKGRNLKITIVLSAVWIFETFGFYGFASWVPSLLKSNGVTMENTLWYNVLHSVGAPLGALLGSMISERFQRKWILAASAFLTAIAGLLYGMTFIPIMIIVFGFIVNITERVFTSNLYAYTSEPYPTEYRSSGSGLAYGLGRFSNIFGSLLVGFIAVQLGYISVFLFIGGCWLACSLLLIFFGPNTNAKQI

SEQ ID NO: 11198 - protein, 419 aa, Bacillus subtilis subsp. subtilis str. 168
MDMNEHRNRRLKLIMISATFGGLLFGYDTGVINGALPFMARPDQLDLTPVTEGLVTSILLLGAAFGALLCGRLADRDRRRKMILNLSFLFFLASLGTALAPNVFIMAVFRFLLGLAVGGASAMVPAFLAEMAPHEKRGRMVTQNELMIVGGQFLAYVFNAILGVTMANTGHVWRYMLVICAVPAIMLFASMLKVPESPRWLISKGKNSEALRVLKQIREDKRAEAECREIQEAVEKDTALEKASLKDFSTPWLRRLLWIGIGVAIVNQITGVNSIMYYGTQILKESGFGTKAALIANIGNGLISVIAVIFGIWLVGKVRRRPILLIGLAGTTTALLLIAIFSIVLDGSMALPYVVLSLTVLFLAFMQGCVGPVTWLVIAEIFPQRLRGLGSGISVFFLWILNFVIGFAFPILLSSVGLS

SEQ ID NO: 11199 - protein, 482 aa, Bacillus subtilis subsp. subtilis str. 168
MSTKKKEAVIGKESLAHKGLLRTITLVSTFGGLLFGYDTGVINGALPFMATAGQLNLTPVTEGLVASSLLLGAAFGAMFGGRLSDRHGRRKTILYLALLFIAATLGCTFSPNASVMIAFRFLLGLAVGCASVTVPTFLAEISPAERRGRIVTQNELMIVIGQLLAYTFNAIIGSTMGESANVWRYMLVIATLPAVVLWFGMLIVPESPRWLAAKGRMGDALRVLRQIREDSQAQQEIKEIKHAIEGTAKKAGFHDFQEPWIRRILFIGIGIAIVQQITGVNSIMYYGTEILREAGFQTEAALIGNIANGVISVIAVIFGIWLLGKVRRRPMLIIGQIGTMTALLLIGILSIVLEGTPALPYVVLSLTILFLAFQQTAISTVTWLMLSEIFPMHVRGLGMGISTFCLWTANFLIGFTFPILLNHIGMSATFFIFVAMNILAILFVKKYVPETKGRSLEQLEHSFRQYGRRADQEIQNQTTHLS

SEQ ID NO: 11200 - protein, 473 aa, Bacillus subtilis subsp. subtilis str. 168
MNKQGNQMSFLRTIILVSTFGGLLFGYDTGVLNGALPYMGEPDQLNLNAFTEGLVTSSLLFGAALGAVFGGRMSDFNGRRKNILFLAVIFFISTIGCTFAPNVTVMIISRFVLGIAVGGASVTVPAYLAEMSPVESRGRMVTQNELMIVSGQLLAFVFNAILGTTMGDNSHVWRFMLVIASLPALFLFFGMIRMPESPRWLVSKGRKEDALRVLKKIRDEKRAAAELQEIEFAFKKEDQLEKATFKDLSVPWVRRIVFIGLGIAIVQQITGVNSIMYYGTEILRNSGFQTEAALIGNIANGVISVLATFVGIWLLGRVGRRPMLMTGLIGTTTALLLIGIFSLVLEGSPALPYVVLSLTVTFLAFQQGAISPVTWLMLSEIFPLRLRGLGMGVTVFCLWMVNFAVSFTFPILLAAIGLSTTFFIFVGLGICSVLFVKRFLPETKGLSLEQLEENFRAYDHSGAKKDSGAEVIG

SEQ ID NO: 11201 - protein, 452 aa, Bradyrhizobium japonicum USDA 110
MSMISARIERLPFARFHKHLLLMGGLGYMFDAMDAAVLAFILPVLRTAWNLSSVQIGVLGSSTYIGFLFGALLAGTLGDLIGRRAVMMSALALYCAASIVSAMVDTWPSFFAARVVAGMGTGAESAIVAPYLAEFVARRYRGSFTGALAGFFSFGFVAAALLGYFIVPAYENGWRIVLVITAVPVVMLLWWRRALPESPRWLESRGREKEAEALLDTIEAGFARQGHVLPHPVVEAVAPQGATGTLLANFAALLAGRQARITIMTWIMWLAITFSYYSFFVWIPGLLVQNGMSITKSFAYSIAIYCAQIPGYFSAAYFNERIGRQATIATYMVLGGASALGLAFAQSDQQIMAAGIFLSLFMNGTYAGVYAYTAEVFPTPVRTTGAGLASAIGRIGAIVSPILVGYLYPNFGFAGVFGVTTTVLLLGAVTVVLMGVPTRGRSLEEIAAGEVA

SEQ ID NO: 11202 - protein, 460 aa, Bacteroides thetaiotaomicron VPI-5482
MKSYNKKFVYSICLVSAMGGLLFGYDWVVIGGAKPFYELYFGIADSPTMQGLAMSVALLGCLIGAMVAGMMADRYGRKPLLLISAFIFLSSAYATGAFSVFSWFLAARFLGGIGIGIASGLSPMYIAEVAPTSIRGKLVSLNQLTIVLGILGAQIANWLIAEPIPADFTPADICASWNGQMGWRWMFWGAAFPAAVFLLLACFIPESPRWLAMKGKREKAWSVLSRIGGNRYAEQELQMVEQTSASKSEGGLKLLFSRPFRKVLVLGVIVAVFQQWCGTNVIFNYAQEIFQSAGYSLGDVLFNIVVTGVANVIFTFVAIYTVERLGRRALMLLGAGGLAGIYLVLGTCYFFQVSGFFMVVLVVLAIACYAMSLGPITWVLLAEIFPNRVRGVAMATCTFALWVGSFTLTYTFPLLNTALGSYGTFWIYSAICVFGFLFFLRALPETKGKSLETLEKDLIK

SEQ ID NO: 11203 - protein, 484 aa, Bacteroides thetaiotaomicron VPI-5482
MNNTTNEGSKLYLYSITSVAILGGLLFGYDTAVISGAEKGLEAFFLSASDFQYNKVMHGITSSSALIGCVLGGALSGVFASRLGRRNSLRLAAVLFFLSALGSYYPEVLFFEYGKPNMDLLIAFNLYRVLGGIGVGLASAVCPMYIAEIAPSNIRGTLVSCNQFAIIFGMLVVYFVNYLIMGDHQNPIILKDAAGVLSVSAESDMWTVQEGWRYMFGSEAFPAAFFGLLLFFVPKTPRYLVLVQQEEKAYTILEKINGKKKAQEILNDIKATAQEKTEKLFTYGVTVIVIGILLSVFQQAIGINAVLYYAPRIFENAGAEGGGMMQTVIMGIVNIIFTLVAIFTVDRFGRKPLLIIGSIGMAVGAFAVAMCDSMAIKGVLPVLSIIVYAAFFMMSWGPICWVLISEIFPNTIRGKAVAIAVAFQWIFNYIVSSTFPALYDFSPMFAYSLYGIICVAAAIFVWRWVPETKGKTLEDMSKLWKKNK

SEQ ID NO: 11204 - protein, 399 aa, Bacillus cereus ATCC 14579
MGKVKEISKRKLLGIAGLGWLFDAMDVGMLSFVMVALQKDWGLSTQEMGWIGSINSIGMAVGALIFGILSDKIGRKSVFIITLLLFSIGSGLTALTTTLAMFLVLRFLIGMGLGGELPVASTLVSESVEAHERGKIVVLLESFWAGGWLIAALISYFVIPKYGWEVAMVLSAIPALYALYLRWNLPDSPRFQKVEKRPSVIENIKSVWSGEYRKATIMLWILWFCVVFSYYGMFLWLPSVMVLKGFSLIKSFQYVLIMTLAQLPGYFTAAWFIERLGRKFVLVTYLIGTACSAYLFGVADSLTVLIVAGMLLSFFNLGAWGALYAYTPEQYPTVIRGTGAGMAAAFGRIGGILGPLLVGYLVASEASLSLIFTIFCGSILIGVFAVIILGQETKQRELV

SEQ ID NO: 11205 - protein, 441 aa, Coxiella burnetii RSA 493
MTNQVQNPTLESLDEQKLNRLHWRMVITAGTGFFTDAYDLFVIGVVTALLMPLWHLSASQIALLNGASLASAAVGAVMFGWFADKFGRKKMYGIEVLILFIGALLSAVSPSFAWLLVSRIIVGIGIGGDYPTSAVVASEYANRKNRGFLVLLVFAMQAVGLIIGPLFASLLMAFHLPHALVWRLLLAFGALPAASVFYLRRRIAETPRFLLNKSPVEVSRVVSDLAGHSDTAVATPVQKLFSPKWLKCLIGTAGAWFLLDVALYGNGVSSVLIMKAISPHASLLKHTLLSALIFLCFAVPGYFSAATYVDKIGRKTLQIAGFVMMGLCYLLIAGIPHISDQLPLFVGIFGISFFFINFGPNATTFLIPSEIYPIHLRARAHGLSAAVGKAGAFIGAFFLPLLLKNMGLAYTMAVVAIASFLGIFATFLVPEMKGVSLEKPQ

SEQ ID NO: 11206 - protein, 442 aa, Coxiella burnetii RSA 493
MRWVIVVKDDESNIKAFHWRIVFTAGMGFFTDAYDLFIIGVVTTILTPIWHLTISQLALLNGAALAAAAVGAISFGVLSDKFGRKRLYGVEVLILFFGAILSAFPPSYGWLLFSRIVVGLGIGGDYPSSAIIASEYAPSQRRGFLVLLVFAMQALGLVVGPLLASLLLVTPLSHTLVWRILLGIGAIPAASVFYLRRQIEETPHYLLKKSPPVAVSRVVSDLTGFTKKIKAQQVPHPQHYLFEKKWLVRLIGTASAWFLLDVAFYGNSVSSVLILKWLNPQAQLVTNTLLTALTFFVFAVPGYLLAATYIDRIGRKFLQMFGFFMIAVAYGAIALIPHLTQHIPLFIAIFGISFFFVNFGPNTTTFLIPSEIYPTSLRARAHGISAAWGKVGAFVGAFFLPHILHTQGLRYTMALLAVVCLIGILVTLLLPEMKGKAIDVIE

SEQ ID NO: 11207 - protein, 443 aa, Coxiella burnetii RSA 493
MFHIRMSQKAHLTSQQKKVLFLTSLGGILEYYDFIIYIYLANVIEKLFFPSGTPFVATLETLIVFSIGYLFRPLGGILFSHFGDRYGRKVVFLLTVLFMAIPAFGIALLPTVSQIGITASVLLVLFRIMQGLALGGEIPGAITFVAEHVDNNRRGLATATLFFGINAGLLLGSFATMILTTMTTPATLYSYGWRVPFFVGGIFGILAVFLRRYLEETVAFSKLARSQLQRVPLITLLKHFRKNVVESALLVGLASVTIFLFLYWPHYLNQYLGFPLAATLKINTLGILIFSFTLFLTGWLADRFGYRTIYFIGVVLIILSAYPLFLLFTLHSLSLVIVSYVLFSIIFAFITGAYPVILTTLFPTTVRYTGIATAYNLGYAIWGGLSPLICTFLIFKLHSVLAPASYLIFMAVALLIHFPFRFRHPRPLVVPAQTHRRQLKGAR

SEQ ID NO: 11208 - protein, 471 aa, Sulfolobus solfataricus
MDKGISKTPFGSIDSLKLTFNHIKVWYTSGMGFFTDAYDLFIISAILDVLLQLHDPNFPLNSVTEGLLASSALWAAIIGQLVFGFLGDKIGRKAIYGVEAILMTVGALLSALSPNIYWLIIFRSIMGLGIGGDYPISATIMSEYANVKDRGKLIALVFANQGLGSLAAVSVGIGSVLAFPLDISWRVMAAIGAIPAATVIYLRRKTPETPRYSMLVKGNVQEAKKAAEFLGAKIEEKRAYSKPLSLSEFLSKYWLILIGTAVPWFILDIAFYGTGIYSGAITQLILGKPTSIANLILEQGLPYMVGFFGYFTAVALMDKLGRKIIQLQGFILMTIIYAVVSSFLIVSGTKVVGLTIPAGIGFLIYALSFFFIDFGPNTTTFILPAEAYPTRARTTGHGISAASGKLGAAITTYLFPSLLASMGIKNILLMLSALSLVGAIVTIIAVKETKGKSLEEISKEEVIVQEEQFST

SEQ ID NO: 11209 - protein, 423 aa, Sulfolobus solfataricus
MSYFDNIPLSVRIRTFIVTSAGFLLDGYDLNSISFAATIILKEFSLTTVKYGLLLAASLIGMIPGSIVFGWLSDKMGRSKIMGLDLFFFLVFGILTAISQNFVELFISRLLLGIGIGGDYPISSTLMSELSPSRSRGRYLTGSVAMYWVGVAISGIATLFLLPTGSYFWRYVFLIGALISVPIILLRLRLIESPRWLVSTGKANIKEINREIENKGVRGVVDLFKGKLLKITFFVTSVWFLFDVAAYGIGLYYPALLEEFAFPSKYEVVLGTLAIAAASVLGYIIAELLVDSLGRRVVLLVGLGFMTLLLYLGGIYKFTGGILVPYFMSFVALEQWAGAVTLFYPTELYPTPVRAIGQGFATAISRVGSVLGVFYFPILTKQMGFFNSLIMFGSVCLIAFIISILLSKETAKKPLEVTSEGVK

SEQ ID NO: 11210 - protein, 357 aa, Sulfolobus solfataricus
MNVKNVFKPLDEAKFGWFHAKSLITTGMGVFTDGYDLSSIGIVLLSVLASFGITKNSPDYVITTSLITGAALIGATIGAILFGFLSNMGRKKFYGIDVTLMTFGALLQAFVQNPLELIIVRFLLGLGIGADYVLSPTIMAEHSNAKDRGKTLVLGFGLFWGFGASTAAGLYLILQTMGLPTDLIWRIVLAAGSIPAASVIYLRRKIPETARYLGRIKGDLNELKNVIKEVTRLEVSNVKDIKDNVKLTEYFIANWKLILTAAILWFLFDIVAYAGILFGPSLIANSLGMNSGTFQLLIEGAFTIPGGLIALTLIDKLGRKPLQVIGVWASWDFMIFNINPQPLGFTEVADVHPSPPH

SEQ ID NO: 11211 - protein, 451 aa, Sulfolobus solfataricus
MGYNKPDFSSLEFKSVLTAGMGVFTDGYELYAISLVFYYIQKEFLLNGLEEGIVIASAYYGAAVSAILLGFLSDKLGRKFIYGLDVALMSLGILFQSISTNFAELVMSRIILGFGIGADYVLSPIITAENSNPKNRGKRMIVTFALLWGMGAVTAAFVEQILLLVNMENDLIWRIVLFMGILPAISVFYLRRKIPETYKFLTRIKPKPEELKKLEKEIKSKVAISPDEVPFSKRFVSAIGITIISSILWLLYDMYSSTFAIYGPITIAGNLGLNPIEFTYLAQFLAGLPGQIISIYLVDKIGRKPLIVIGYAGVAFWLFMYSILLMDPYYFGLKIHISNPLKAAESLTGEAALLGLSFYLMNYLSSAIGPASIIGSAMLTPELVPTKVRGTSQAISVAVDRLAAAFSITAFPLLLAKFGLPVLLGIYSIIALVSCSITLFLIPETKGVELS

SEQ ID NO: 11212 - protein, 476 aa, Thermoplasma acidophilum
MTENNGGLDAINEAINTSHGSFHLKTVLISGLGFFTDAYDLFIIGVVVSLLSLAGWTTVDTFYKGLISSTALISAVIGAIIFGRLLDYLGRKRVYGLELAILIVGALGSAFLTPYNNVIALIAWRFILGIGIGGDYATSSTIIAEYSNTKSRGKLIGSVFSMQSFGLVAGPLVALAFMLHGIPPAITWKALLAIGAIPAAIVIYFRLKMPEPPRYTAAAKGDVHKAAKDLKEYTGIHVEVSSKDKYVVKAKWTALFKDRTFLLTLIGTMGAWFMMDWALYGNSIMSSTILSALVPSTIKGLPALIRSTEYTLLIFAGAAFPGYWIATSVLDKIGRKTIQLIGFAVMALSYALIAIGYHSIIGNISMFLALYGLSYFFIEFGPNVTTFVYPPEVFPVTTRGLGTGMSAAGGKIGAFIGTFADAIILGTDASAHLPFLFSLLAVFAVIGFALTLVLLPETKGRNLEDTSGEKRYTVKA

SEQ ID NO: 11213 - protein, 476 aa, Thermoplasma acidophilum
MAQGLLQQLDNAKVGKFHLRAWVISGMGFFTDAYDLFIIGTVVSLLPLAGWNSLTTADISLISSVALLASVIGAFTFGRLLDLLGRSRVYGFELMLLIIGAVGSAFLVPVNGVLYLLIWRFILGLGIGGDYAGSSTIMAEFSNAKNRGQLIGMVFSMQGFGLVFGPVIALVMLRYIPSIDLVWRLLLFLGAIPAAIVLYGRRTIGETPRYSINVSGDISSAKKAIQEISGKSTVQANPDELIGEHISWKKMFTDRYFLMTLIGTAGAWFALDWAFYGNSIMSHQMLSAIVPASLGGVAKVKMTTFYALIIFAVSALPGYWIATFTVDRIGRKPLQILGFFMMALSYIILGVFRFISAPSYIIWFMIIYGLSYFFTEFGPNVTTFIYGPEMFPTSLRGMGSGLSSAGGKLGAFIGTALNVVIYAIFGESVLFIILAFISIAGALLTMFFLPETSGRSLEDISGERNYKRALSSGSKK

SEQ ID NO: 11214 - protein, 445 aa, Thermoplasma acidophilum
MGFFDEMDNMRMRPFHRKMEILASMGMFLDGYDLSVIAMAILLMPIQLKFSKPEYILVNVSALAGMIVGAPLLGRLSDRIGRKKIFDIDLILFVVFAITAGLATNFWMMFISRFMLGVGIGGDYPISSTIVSEFAPVKRRGTLLYAMVGMYWLGSLFSGIMNYTFAFTYYFWRYTFIIGGIVAIPIISLRMQIPESPRWLVSQGRADEASKVIENITGKEPDLNEGVIEGKEERSVRFRDLFSSGFLSKTVFVLSVWFLFDVASYGIGFYYPTMMREIGLSASALNTAGLRVIAEIGMIVAVGAIVGYAVAMMLADRVGRRVLTLVGVFVMFALLFLGSMVKIVSLIPLVSFFFSFVLFEQWVGAATLFYPTELYPTNYRSTIQGIATSVSRVGAIMGVVVFPLYPIFHSMFLFATLMFVAFVITVLFAPETKKKPLEKIWNAKA

SEQ ID NO: 11215 - protein, 459 aa, Thermoplasma acidophilum
MFEGLDSRRITFFQIKSVIVSGIGIFSDSYNLYAISLVYYLVSASLDLSPLQDSLMTSASFMGAAAGAFLFGFIADRIGRKPMYGIDLAFIALGSFLQLFTVNFYELVIFRSILGFGIGGDYVLSPVIMAENADTRDRGKLMIMTFPIMAAFGAMLVAFVDQISLLYLPSSAVWHVVLAFGGVPALLVIYLRRKIPETPRFEARVRGNSTELSKIETEIGSAVNVDIDRKPFISRLRASILMITVSAVLWILYDMYSTTFAIYGPITIAYNLGLTPITFTYYAELFAGIPGAIISALLIDRVGRRKLIVVGYAGVFVWLLMYSLLLAKASIFAGLASDITPAGLIGKAAILGFFFYIMNYLFSATGPASIIGGAMVTPEITPTKVRGTSQGITVGIDRTADAVGLTAFPILLSKFGLSAMVLAYAMIAVLSIIMIFMIPEAAGKSLEEVSKDYDTTTQI

SEQ ID NO: 11216 - protein, 449 aa, Burkholderia cepacia
MKAFETSQEWHGTVTSTESASGANTTESGSRRLFFASFLGTMVEWYDFFLYGFIAPLVFEELFFPKLNALSGTIAVYATFAVGYASRPLGGLVFGHFGDKIGRKSMMLVTLLMMGIGTAAIGLLPSVAQIGMSATCLLVALRFVQGFALGGESAAASLMVLESAQQRRRGLLGAALQAAGPLGVLLASLAVFVVSRLPHDALLAWGWRVPFLVSAVLVVIGLYIRLRVEETVAFRKQQSKHELTRIPAWETLRSYKWPVFVVLVVSIMESTFYYLTGVYSISYVTKTLHMPGSVAIGAIACANAFALVSVPLYGALSDRLGRKGVYLLGIVASAIYLNFFFTMLDGRSAMVVVLAVVAAVGVIHAPMYAMFGSFYGELFPTRVRFTGFSMGKAFGTVLGGGIAPMIAASLAARNHGDPSAIGLYYLCLAFVALCVVLRVRETRNDDITV

SEQ ID NO: 11217 - protein, 545 aa, Chlamydomonas reinhardtii
MGAHCTRSGTWSRFFLFLASFMIPGLGMFCEAYFVFAVGNLSALWKVEYKNCWKGIGCPVKLSESITYTQVCGIIFGQLFLGFFADRIGRKWGSVTTAATMVVGAILIISSAGNTERALWAMFTAVQFIFGIGVGGEYPVASTSANERAESSAALQKRRGETVVLVFSMQGWGNLVNTAVIIAIMAGYHQYGAPYSNHALEVTWRLSYAIGLIPLIGILLYRTFRLRESAVWTKKREALQAMGGSEAKGVQWRKFGLLMYYYWHRNFGTAMSWFVWDFAFYGNKLFQGTFIKIINPSASLIQVLEWTLLNSSVALVGYYFAAFTVDKPWMGRMRMQVMGFAWMFVLFLICAVHYDQLRTPKYIHTFQFLYYFSSFWGQFGPNATTWLLPAELAPTELRSMCHGFSAAVGKAGALVAGVVFGLVDGRTKFWISAFCGLAGVILTLITIPDVTGLDLREGDKRWLAILDGHHHLYHGDAIKPRHLSLIERLLGYGKNYQADSSSDVQYSATTTSSSAAMAKRAAEMSSPKQSFKKQNSGNAIIPVTN

SEQ ID NO: 11218 - protein, 560 aa, Chlamydomonas reinhardtii
MATPPQNTADPEKTQLQKLQNAEVTLLTMEKEEVVVYHNPLWRCLHFMGAFMLPGLGMFCEAYFVFAVGNLSAVWKAEYPDCWATHTTCPKKLSDSITYTQVCGIIFGQLVLGFFADRIGRKWGSVSTAATMVVGGILIVASAGPTDRALWAMFTAVQFIFGIGVGGEYPVASTSANERAESSVALSKRRGETVVLVFSMQGWGNLVNTAVIIAIMAGFNQYHPPYSSYALEVTWRLSYAIGLIPLISILLYRVFHLRESAVWQKKREALRAMGGAKASGVQWRKFSLLMRYYWHRNFGTAMSWFVWDFAFYGNKLFQSTFIKIINPHASVIQILEWTLLNSAVALVGYYFAAFTIDKPWMGRMRMQIMGFSWMFVLFLICAVHYDALSTPKWIHAFQFLYYFSSFWGQFGPNATTWLLPAELAPTEVRSMCHGFSAAVGKAGALVAGVVFGLVDNRTKFWISAFCGLAGVILTLITIPDVTTLDLREGDRRWLAILDGHHDMYHGEAVNPKNLSLIERLMGYGKLYKPHAGEQYAVDKSSDDSTPEGVKGMDGIEQPAK

SEQ ID NO: 11219 - protein, 573 aa, Chlamydomonas reinhardtii
MTDPKGQDLDAEKQHAATLHNAEDTLCSAVQDETAEDLRPRNVIVRFFQFLASFMIPGLGMFCEAYFVFAVGNLSALWKVEYKNCWKGIGCPVKLSESITYTQVCGIIFGQLFLGFFADRIGRKWGSVATAGTMVVGAILIISSAGPTENALWAMFTAVQFIFGIGVGGEYPVASASANERAESSAALQKRRGETVVLVFSMQGWGNVVNTAVIIAIMAGFGQYGAPYSNHALEVTWRLSYAIGLIPLISILLYRIFRLRESAVWTKKREALQAMGGSEAKGVQWRKFGLLMYYYWHRNFGTAMSWFVWDFAFYGNKLFQGTFIKIINPSASLIQVLEWTLLNSSVALVGYYFAAFTVDKPWMGRMRMQVMGFAWMFVLFLICAVHYDQLRTPKYIHTFQFLYYFSSFWGQFGPNATTWLLPAELAPTEVRSMCHGFSAAVGKAGALVAGVVFGLVDGRTKFWISAFCGLAGVILTLITIPDVTGLDLREGDKRWLAILDGHHHLYHGDAIKPRNLSLIERLLGYGKNYQADTSNDGAYSATTTSASAAMAMKGAEMVPPHKQQPTATIAIAK

SEQ ID NO: 11220 - protein, 444 aa, Amycolatopsis orientalis
MTMTRAVNEDGAGQDTTPTELRRVVGASVVGTALEWYDFFIYGFAVTLVFNELFFTTGDPAMGVIIGFATFGVGFAVRPIGGFLFGHLGDRIGRRSTLVLTTLVMGVSTGLIGLLPTYDSIGVAAPILLTVLRMCQGLGAGAEFGGASTLLAEHAPARRRGFFTSFAQTGVQIGLLSGVTVFLLIELLPRQTVLDWAWRIPFLFSFVLIAVALYVRLRVAESPVFQQMSERRTTVKMPVLDALRHYPRNFLIGIGAHICDTAVVYIYATYSLTYITKTLAMPRWVALTGVIIFSVIVIALQPVYGALSDRVGRRPLNLFSVVFTAAFAFPFFLLLDTREPVLIWIALVLATSLGFAPMIAVQPAFYAELFGARVRYTGFAASREIGAALGGFSPLIAAALVAQAGGKGWLVALWMIATAAISFVAFWLSKESKDVDITVIDATR

SEQ ID NO: 11221 - protein, 498 aa, Mesembryanthemum crystallinum
MTLDSIPGSSGYLDSYPERRITYFGNKFVLALTVTAGIGGLLFGYDTGVISGALLYIKDEFPAVKNSSFLQETIVSMALVGAMIGSATAGWINDVYGRKKATLLADFIFAIGAVVMAAAPDPYILIVGRFLVGLGVGLASVCAPVYIAEASPTEVRGGLVSTNVLMITFGQFVSYCVNLAFTEVPGTWRWMLGVSGVPAVLQFGFMLLLPESPRWLYLKHEKSKAAAVLAKIYDPFRLEDELDLLAAAEEEEKNKPAVHISDVFTKRELRYAFIAGGGLLAFQQLAGINTVMYYSPTIVQMAGFSSNQLALLISLIVAAMNAVGTVLGIYLIDHMGRRKLALTSLSGVFVALVMLTISFMLRSSGPTSALYSWLAVLGLALYIAFFAPGMGPVPWAINSEIYPQAYRGLCGGMGATICWIVNLFVSETFLSIADAIGTGPTFLIIAGIVIVAFVFVVCFVPETKALTFEEVDQMFMDRAYGTEENTQSLLESSNRSGN

SEQ ID NO: 11222 - protein, 539 aa, Lupinus albus
MARDELSVLTALDVAKTQWYHFTAIIVAGMGFFTDAYDLFSIANVTKLLGRIYYTHQGAPKPGTLPPNVSLAVNGVALCGTLTGQVFFGWLGDKMGRKKVYGLTLAIMVFASLASGLSFGHTAKGTVSTLCFFRFWLGFGIGGDYPLSATIMSEYANKKTRGAFIAAVFAMQGFGILFGGIVSLVISTIFDHAYSAPAYEVDAEASLVPQADYVWRIILMLGALPAALTYYSRMKMPETARYTALVARNAKQAAQDMSKVLQVEIEAEQDMVDKLSERDNNNFGLFTKEFAKRHGKHLIGTCTTWFLLDIAYYSSNLFQKDIYSSIGWLPPAKEMNAIHEVFRVSKAQVLIALCGTVPGYWFTVAFIDHLGRFFIQLMGFFFMTVFMFALAIPYDHWTKKDNRIGFLVMYALTFFFANFGPNSTTFVVPAEIFPARLRSTCHGISSAAGKAGAIVGAFGFLYASQSKDATKRDVGYPAGIGMKNTLIVLAVCNCLGMFFTFLVPESKGKSLEELSGENEDEGTNETSQQPAASNRTVPV

SEQ ID NO: 11223 - protein, 222 aa, Medicago sativa
HGLALFGTCSTWFLLDIAFYSQNLFQKDIFSAIGWIPPAKEMNAIHEVYKIARAQTLIALCSTVPGYWFTVAFIDYMGRFAIQMMGFFFMTVFMFALAIPYDHWSKKDNRIGFVVMYSLTFFFANFGPNATTFVVPAEIFPARLRSTCHGISAAAGKAGAIVGAFGFLYAAQSKDPTKTDKGYPTGIGIKNSLIMLGVINFVGMLCTLLVPESKGKSLEELS

SEQ ID NO: 11224 - protein, 533 aa, Medicago truncatula
MSGELGVLNALDVAKTQLYHFTTIVIAGMGFFTDAYDLFCISLVTKLLGRIYYTEPNPTRPGTLPPSAQSAVTGVALVGTLAGQLFFGWLGDKLGRKKVYGLTLILMVVCSVASGLSFGSSPKSVMATLCFFRFWLGFGIGGDYPLSATIMSEYANKKTRGAFIAAVFAMQGFGILGGGIVALTVASIFDHKYKVPTFEENPAASLLVPQFDYVWRLILMFGALPAALTYYWRMKMPETARYTALVAKNAKQAAADMSKVLQVELEVEEEKVEKMTSDKRNSYGLFSKQFAARHGLALFGTCSTWFLLDIAFYSQNLFQKDIFSAIGWIPPAKEMNAIHEVYKIARAQTLIALCSTVPGYWFTVAFIDHMGRFAIQMMGFFFMTVFMFALAIPYDHWSKEENRIGFVVIYSLTFFFANFGPNATTFVVPAEIFPARLRSTCHGISAAAGKAGAIVGAFGFLYAAQSKDPTKTDKGYPTGIGIKNSLIMLGVINFVGMLCTLLVPESKGKSLEELSGENEGEGAEATEQEGSRV

SEQ ID NO: 11225 - protein, 537 aa, Medicago truncatula
MSGELGVLNALDVAKTQLYHFTTIVIAGMGFFTDAYDLFCISLVTKLLGRIYYTEPNPTRPGTLPPSAQSAVTGVALVGTLAGQLFFGWLGDKLGRKKVYGLTLILMVVCSVGSGLSFGSSPKSVMATLCFFRFWLGFGIGGDYPLSATIMSEYANKKTRGAFIAAVFAMQGFGILGGGIVALIVASIFDHKYKVPTFEENPATSLLVPQFDYVWRLILMFGALPAALTYYWRMKMPETARYTALVAKNAKQAAADMSKVLQVELEVEEEKVQKMTSDKRNSYGLFSKQFAARHGLALFGTCSTWFLLDIAFYSQNLFQKDIFSAIGWIPPAKEMNAIHEVYKIARAQTLIALCSTVPGYWFTVAFIDHMGRFAIQMMGFFFMTVFMFGLAIPYDHWSKEENRIGFVVMYSLTFFFSNFGPNAATFVVPAEIFPARLRSTCHGISAAAGKAGAIVGAFGFLYAAQSKDPTKTDKGYPTGIGIKNSLIMLGVINFVGMLCTLLVPESKGKSLEELSGENEGEGAEATEQEGPRFENVA

SEQ ID NO: 11226 - protein, 528 aa, Medicago truncatula
MGLEVLEALDSARTQWYHVTAIVIAGMGFFTDAYDLFCISTVSKLLGRLYYFDPSTNKPGKLPPSVNNVVTGVALVGTLSGQLVFGWLGDKLGRKKVYGVTLIIMVACAICSGLSFGSSAKSVMITLCFFRFWLGFGIGGDYPLSATIMSEYANKRTRGAFIAAVFAMQGVGIIFAGLVSMVFSGIFKAYYQAPRFNEDPILSTQPEGDLLWRLILMIGAVPAAMTYYWRMKMPETGRYTAIVEGNAKQAAADMARVLDIEIIAEQDKLAEFKAANDYPLWSSEFFNRHGRHLIGTMSCWFLLDIAFYSQNLTQKDIYPAMGLIRQDKEMNAIDEVFQTSRAMFVVALFGTFPGYWFTVFFIEKLGRFKIQLVGFFMMSFFMFVIGVKYEYLKDENKNLFALLYGLTFFFANFGPNSTTFVLPAELFPTRVRSTCHAFSAASGKAGAMVGAFGIQYYTLDGTPRKIRRAMMILAFTNLIGFFCTFLVTETKGRSLEEISGEDGRESELTATPNDRAPGIRQDSRTEKM

SEQ ID NO: 11227 - protein, 536 aa, Sesbania rostrata
MAGELGVLNALDVAKTQWYHFTAIVIAGMGFFTDAYDLFCISLVTKLLGRIYYSDPKAPKPGTLPPNVQAAVTGVALCGTLAGQLFFGWLGDKLGRKKVYGITLILMVVCSLASGLSFGSSAKGVMATLCFFRFWLGFGIGGDYPLSATIMSEYANKKTRGAFIAAVFAMQGFGIMAGGIVALIVSAGFDHKYKVPSYQENPQASLVLPQFDYVWRIVLMFGALPAALTYYWRMKMPETARYTALVAKNAQQAATDMSKVLKVELEVEEEKVQKITEADTNKYGLFSKEFAKRHGLHLVGTTTTWFLLDIAFYSQNLFQKDIFSAIGWIPPAKEMNAIHEVYKIARAQTLIALCSTVPGYWFTVAFIDYMGRFAIQLMGFFFMTVFMFALAIPYDHWTKKENRIGFVVMYSLTFFFANFGPNATTFVVPAEIFPARLRSTCHGISAAAGKAGAIVGAFGFLYAAQSKDPTKTDKGYPTGIGIKNSLIMLGVINFAGMLFTLLVPESKGKSLEELSGENEDGAEGIELPASARTVPV

SEQ ID NO: 11228 - protein, 540 aa, Sesbania rostrata
MAGGGGQLGVLNALDVAKTQWYHFTAIVIAGMGFFTDAYDLFCISLVTKLLGRIYYTDYNKPKPGVLPPNVQAAVTGVALCGTLAGQLFFGWLGDKLGRKKVYGITLMLMVVCSIASGLSFGSSAKGVMATLCFFRFWLGFGIGGDYPLSATIMSEYANKKTRGAFIAAVFAMQGFGIMAGGIVALIVSSAFDHKYKVPAYQEDAKASMVLPAFDYVWRIILMFGAVPAALTYYWRMKMPETARYTALVAKNAKQAASDMSKVLQVEIEAEEDKVQHLIESQNQTFGLFSKEFAKRHGLHLVGTTTTWFLLDIAFYSQNLFQKDIFTAIGWIPPAKEMNAIHEVYRIARAQTLIALCSTVPGYWFTVAFIDYMGRFAIQLMGFFFMTVFMFALAIPYHHWTLKENRIGFVVMYSLTFFFANFGPNATTFVVPAEIFPARLRSTCHGISAAAGKAGAIVGAFGFLYAAQSTDPAKTDAGYPTGIGVKNSLIMLGVINFFGIIFTLLVPESKGKSLEELSGETEEDGVEAIEAAASSRTVPV

SEQ ID NO: 11229 - protein, 538 aa, Oryza sativa (indica cultivar-group)
MAGELKVLNALDSAKTQWYHFTAIVIAGMGFFTDAYDLFSISLVTKLLGRIYYFNPASKSPGSLPPNVSAAVNGVAFCGTLAGQLFFGWLGDKMGRKKVYGMTLMLMVICCLASGLSFGSSAKGVMATLCFFRFWLGFGIGGDYPLSATIMSEYANKRTRGAFIAAVFAMQGFGNLTGGIVAIIVSAAFKSRFDAPAYRDDRTGSTVPQADYAWRIVLMFGAIPALLTYYWRMKMPETARYTALVAKNAKQAAADMTQVLNVEIVEEQEKADEVARREQFGLFSRQFLRRHGRHLLGTTVCWFVLDIAFYSSNLFQKDIYTAVQWLPKADTMSALEEMFKISRAQTLVALCGTIPGYWFTVFFIDIIGRFVIQLGGFFFMTAFMLGLAVPYHHWTTPGNHIGFVVMYAFTFFFANFGPNSTTFIVPAEIFPARLRSTCHGISAAAGKAGAIVGSFGFLYAAQSTDASKTDAGYPPGIGVRNSLFFLAGCNVIGFFFTFLVPESKGKSLEELSGENEDDDDVPEAPATADHRTAPAPPA

SEQ ID NO: 11230 - protein, 538 aa, Oryza sativa (indica cultivar-group)
MAGELKVLNALDSAKTQWYHFTAIVIAGMGFFTDAYDLFSISLVTKLLGRIYYFNPASKSPGSLPPNVSAAVNGVAFCGTLAGQLFFGWLGDKMGRKKVYGMTLMLMVICCLASGLSFGSSAKGVMATLCFFRFWLGFGIGGDYPLSATIMSEYANKRTRGAFIAAVFAMQGFGNLTGGIVAIIVSAAFKARFDAPAYRDDRAGSTVPQADYAWRIVLMLGAIPALLTYYWRMKMPETARYTALVAKNAKQAAADMTQVLNVEIVEEQEKADEVARREQFGLFSRQFLRRHGRHLLGTTVCWFVLDIAFYSSNLFQKDIYTAVQWLPKADTMSALEEMFKISRAQTLVALCGTIPGYWFTVFFIDIIGRFVIQLGGFFFMTAFMLGLAVPYHHWTTPGTTSGFVVMYAFTFFFANFGPNSTTFIVPAEIFPARLRSTCHGISAAAGKAGAIVGSFGFLYAAQSTDASKTDAGYPPGIGVRNSLFFLAGCNVIGFFFTFLVPESKGKSLEELSGENEDDDDVPEAPSTADHRTAPAPPA

SEQ ID NO: 11231 - protein, 534 aa, Oryza sativa (indica cultivar-group)
MGGGGGEQQQLEVLHALNVAKTQWYHFTAIVVAGMGFFTDAYDLFCISLVTKLLGRIYYRVDGSPSPGTLPPHVSACVNGVAFVGTLSGQLFFGWLGDKLGRKRVYGITLMLMVLCSLASALSFGHTPTSVMATLCFFRFWLGFGIGGDYPLSATIMSEYANKKTRGAFIAAVFAMQGFGIITGGLVAILVSASFRAAFPAPPYGEDPVASTPPQADFVWRIILMLGALPAALTYYWRTKMPETARYTALVATNAKQAAADMSKVLQVVEMRNIGNNGGSRRPFGLFSGEFVRRHGLHLVGTSATWLLLDIAFYSQNLFQKDIFSAVGWIPKAATMSALEELFRIARAQTLIALCGTVPGYWFTVTLIEVVGRFKIQAVGFFMMTLFMLTLALPYHHWTAPGKNHVGFLLLYGLTFFFANFGPNSTTFIVPAEIFPARLRATCHGISAASGKLGAIVGSFGFLYLAQSPDRSKTEHGYPPGIGVRNSLFLLAACNLLGLLFTFLVPESKGKSLEEMSGDAEAQEEAPPPLQTVL

SEQ ID NO: 11232 - protein, 555 aa, Oryza sativa (indica cultivar-group)
MADADGGSNLAVLDALDSARTQMYHMKAIVIAGMGFFTDAYDLFCISTVSKLLGRLYYQPDGLTDSKPGALSKTANNMVIGVALVGTLMGQLVFGYFGDKLGRKRVYGVTLILMAACAIGFGLSFGSSRKAVIGTLCFFRFWLGFGIGGDYPLSATIMSEYSNKKTRGAFIAAVFAMQGVGIIFAGLVSMIVSSIFLTYNKAPSYKGNHDLSRQMPAADYVWRIVLMIGAFPALATFYWRMKMPETARYTAIIDGNAKQAANDMQKVLSIEIEAEQEKLAKFNAANNYPLLSMEFARRHGLHLIGTTTTWFLLDIAFYSQNLTQKDIFPAMGLISGAAEVNALTEMFQISKASFLVALLGTFPGYWVTVALIDKMGRYMIQLIGFFMMSMFMLAMGILYDYLKTHHFLFGLLYALTFFFANFGPNSTTFVLPAELFPTRVRSTCHAISAAAGKAGAIVAAFGIQKLTYNSQVKSIKKALIILSITNMLGFFFTFLVPETMGRSLEEISGEDGNTGAGGGGAPAAANAGVGVSASDVSRDEKFPASSTEWQTSMHA

SEQ ID NO: 11233 - protein, 541 aa, Oryza sativa (japonica cultivar-group)
MARQEQQQHLQVLSALDAAKTQWYHFTAIVVAGMGFFTDAYDLFCISLVTKLLGRIYYTDLAKENPGSLPPNVAAAVNGVAFCGTLAGQLFFGWLGDKLGRKSVYGMTLLMMVICSIASGLSFSHTPTSVMATLCFFRFWLGFGIGGDYPLSATIMSEYANKKTRGAFIAAVFAMQGFGILAGGIVTLIISSAFRAGFPAPAYQDDRAGSTVRQADYVWRIILMLGAMPALLTYYWRMKMPETARYTALVAKNAKQAAADMSKVLQVEIQEEQDKLEQMVTRNSSSFGLFSRQFARRHGLHLVGTATTWFLLDIAFYSQNLFQKDIFTSINWIPKAKTMSALEEVFRIARAQTLIALCGTVPGYWFTVFLIDIVGRFAIQLLGFFMMTVFMLGLAVPYHHWTTKGNHIGFVVMYAFTFFFANFGPNSTTFIVPAEIFPARLRSTCHGISAAAGKAGAIIGSFGFLYAAQDPHKPDAGYKPGIGVRNSLFVLAGCNLLGFICTFLVPESKGKSLEEMSGEAEDDDDEVAAAGGGAAVRPQTA

SEQ ID NO: 11234 - protein, 528 aa, Oryza sativa (japonica cultivar-group)
MAGSQLNVLVKLDQAKTQWYHFMAIVIAGMGFFTDAYDLFCIALVTKLLGRLYYTDITKPNPGTLPPNVSSAVTGVALCGTLAGQLFFGWLGDKLGRKSVYGFTLILMVVCSIASGLSFGHTPKSVIATLCFFRFWLGFGIGGDYPLSATIMSEYASKKTRGAFIAAVFAMQGFGILFGAIVALVVSAGFRHAYPAPSYAQNPAASLAPQADYTWRLILMFGTIPAGLTYYWRMKMPETARYTALVARNAKQAAADMSKVLHAEIEERPEVVESQVVAGETWGLFSRQFMKRHGMHLLATTSTWFLLDIAFYSQNLFQKDIFSKVGWIPPAKTMNALEELYRISRAQALIALCGTIPGYWFTVAFIDIVGRFWIQIMGFFMMTVFMLALGVPYDHWTHPAHHTGFVVLYALTFFFANFGPNSTTFIVPAEIFPARLRSTCHGISAASGKAGAIIGAFGFLYAAQDQHNPDAGYSRGIGIRNALFVLAGTNFLGMLMTLLVPESKGLSLEEMSKDNVVDETAQEAIAQA

SEQ ID NO: 11235 - protein, 526 aa, Oryza sativa (japonica cultivar-group)
  unsure (1)..(526): unsure at all Xaa locations
MADGQLKVLTTLDHARTQWYHFMAIVIAGMGFFTDAYDLFCISLVSKLLGRIYYTDLAGDNPGSLPPNVSAAVNGVALCGTLAGQLFFGWLGDKLGRKSVYGFTLVLMVVCSVASGLSFGRTAKGVVAXLCFFRFWLGFGIGGDYPLSATIMSEYANKRTRGAFIAAVFAMQGFGILFGAIVALVVSAGFRNAYPAPSYADGRAASLVPEADYVWRIILMFGTVPAALTYYWRMKMPETARYTALIARNAKQAAADMSKVLXTEIQEDXERAEAVAAGGAGNEWGLFSRQFVRRHGVHLVATTSTWFLLDIAFYSQNLFQKDIFSKVGWIPPARTMNAVEEVFRIARAQALIALCGTIPGYWFTVAFIDVAGRFAIQLMGFAMMTVFMLGLAAPYHHWTTPGNHTGFVVMYGFTFFFANFGPNATTFIVPAEIYPARLRSTCHGISAAAGKAGAIVGAFGFLYAAQDPHKPEAGYKPGIGIRNALFVLAGTXFLGMLMTLLVPESKGMSLEEVSKENVADDEEATA

SEQ ID NO: 11236 - protein, 527 aa, Oryza sativa (japonica cultivar-group)
MAGGQLNVLSTLDQAKTQWYHFMAIVIAGMGFFTDAYDLFCISLVTKLLGRIYYTDDSKDTPGALPPNVSAAVTGVALCGTLAGQLFFGWLGDKLGRKSVYGFTLILMVVCSVASGLSFGSSAKGVVSTLCFFRFWLGFGIGGDYPLSATIMSEYANKRTRGAFIAAVFAMQGFGILFGAIVALAVSAGFRHAYPAPSYSDNHAASLVPQADYVWRIILMFGTVPAALTYYWRMKMPETARYTALIARNAKQAAADMSKVLHTQIEESADRAETVAVGGESWGLFSRQFLRRHGLHLLATTSTWFLLDIAFYSQNLFQKDIFSKVGWIPPAKTMNALEELYRIARAQALIALCGTIPGYWFTVAFIEIMGRFWIQIMGFAMMTAFMLGLAIPYHHWTTPGHHTGFIVMYGFTFFFANFGPNSTTFIVPAEIYPARLRSTCHGISAAAGKAGAIIGAFGFLYAAQDQHKPEPGYPRGIGIKNALFVLAGTNFLGTIMTLLVPESKGMSLEVISQEVADGDDEEAAYPK

SEQ ID NO: 11237 - protein, 545 aa, Oryza sativa (japonica cultivar-group)
  unsure (1)..(545): unsure at all Xaa locations
MVQDRKVLDALDTAKTQWYHFTAVVIAGMGFFTDAYDLFSISLVTKLLGRIYYFNPASKSPGSLPPNVSAAVNGVAFCGTLAGQLFFGWLGDKMGRKKVYGMTLMLMVICCLASGLSFGSSAKGVMATLCFFRFWLGFGIGGDYPLSATIMSEYANKRTRGAFIAAVFAMQGFGNLTGGIVAIIVSAAFKLRFDAPAYRDDRAGXXADYAWRIVLMFGAIPALLTYYWRMKMPETARYTALVAKNDKKAAADMARVLNVELVDEQEKAAAATAAAAEEEAARREQYGLFSREFARRHGHHLLGTTVCWFVLDIAYYSQNLFQKDIYTAVQWLPKADTMSALEEMFKISRAQTLVALCGTIPGYWFTVLFIDIVGRFAIQLGGFFLMTAFMLGLAVPYHHWTTPGNHVGFVVMYAFTFFFANFGPNSTTFIVPAEIFPARLRSTCHGISSAAGKMGAIVGSFGFLYAAQSTDPSKTDAGYPRGIGVRNSLFLLAGCNVVGFLFTFLVPESKGKSLEELSGENEMEAEPAAATNSYRQTVPDSGQSE

SEQ ID NO: 11238 - protein, 541 aa, Oryza sativa (japonica cultivar-group)
  unsure (1)..(541): unsure at all Xaa locations
MGRQDQQLQVLNALDAAKTQWYHFTAIIVAGMGFFTDAYDLFCISLVTKLLGRIYYTDPASPXPGSLPPNIAAAVNGVALCGTLSGQLFFGWLGDKLGRKSVYGMTLLLMVICSIASGLSFSHTPTSVMATLCFFRFWLGFGIGGDYPLSATIMSEYANKKTRGAFIAAVFAMQGFGILAGGVVTLAMSAGFQAAFPAPAYEVNAAASTVPQADYVWRIILMLGALPAILTYYWRMKMPETARYTALVAKDAKQASSDMAKVLQVEIEVEEEKLQDITRGRDYGLFSARFAKRHGAHLLGTAATWFLVDVAYYSQNLFQKDIFTSIHWIPKARTMSELEEVFRISRAQTLIALCGTVPGYWFTVFLIDIIGRFKIQLLGFAGMTAFMLGLAIPYHHWTMPGNQVIFVFLYGFTFFFANFGPNATTFIVPAEIFPARLRSTCHGISAASGKAGAIIGAFGFLYAAQPQDKAHVDAGYKPGIGVRNALFVLAGCNLVGFLMTWMLVPESKGKSLEEMSGEADDEEASANGGATAVNSSGVEMV

SEQ ID NO: 11239 - protein, 541 aa, Oryza sativa (japonica cultivar-group)
MGRQDQQLQVLNALDAAKTQWYHFTAIIVAGMGFFTDAYDLFCISLVTKLLGRIYYTDPASPTPGSLPPNIAAAVNGVALCGTLSGQLFFGWLGDKLGRKSVYGMTLLLMVICSIASGLSFSHTPTSVMATLCFFRFWLGFGIGGDYPLSATIMSEYANKKTRGAFIAAVFAMQGFGILAGGVVTLAMSAGFQAAFPAPAYEVNAAASTVPQADYVWRIILMLGALPAILTYYWRMKMPETARYTALVAKDAKQASSDMAKVLQVEIEVEEEKLQDITRGRDYGLFSARFAKRHGAHLLGTAATWFLVDVAYYSQNLFQKDIFTSIHWIPKARTMSELEEVFRISRAQTLIALCGTVPGYWFTVFLIDIIGRFKIQLLGFAGMTAFMLGLAIPYHHWTMPGNQVIFVFLYGFTFFFANFGPNATTFIVPAEIFPARLRSTCHGISAASGKAGAIIGAFGFLYAAQPQDKAHVDAGYKPGIGVRNALFVLAGCNLVGFLMTWMLVPESKGKSLEEMSGEADDEEASANGGATAVNSSGVEMV

SEQ ID NO: 11240 - protein, 534 aa, Oryza sativa (japonica cultivar-group)
MGGGGGEQQQLEVLHALDVAKTQWYHFTAIVVAGMGFFTDAYDLFCISLVTKLLGRIYYRVDGSPSPGTLPPHVSASVNGVAFVGTLSGQLFFGWLGDKLGRKRVYGITLMLMVLCSLASALSFGHTPTSVMATLCFFRFWLGFGIGGDYPLSATIMSEYANKKTRGAFIAAVFAMQGFGIITGGLVAILVSASFRAAFPAPPYGEDPVASTPPQADFVWRIILMLGALPAALTYYWRTKMPETARYTALVANNAKQAAADMSKVLQVVEMRNIGNNGGSRRPFGLFSGEFVRRHGLHLVGTSATWLLLDIAFYSQNLFQKDIFSAVGWIPKAATMSALEELFRIARAQTLIALCGTVPGYWFTVALIDVVGRFKIQAVGFFMMTLFMLTLALPYHHWTAPGKNHVGFLLLYGLTFFFANFGPNSTTFIVPAEIFPARLRATCHGISAASGKLGAIVGSFGFLYLAQSPDRSKTEHGYPPGIGVRNSLFLLAACNLLGLLFTFLVPESKGKSLEEMSGDAEAQEEAPPPLQTVL

SEQ ID NO: 11241 - protein, 526 aa, Oryza sativa (japonica cultivar-group)
MAGDQMHVLSALDSAKTQWYHFTAIVIAGMGFFTDAYDLFCISLVTKLIGRVYYTADGASKPGSLPPNVSAAVNGVAFVGTLTGQLFFGWLGDRVGRKSVYGMTLLLMIICSVASGLSFGDTPTSVMATLCFFRFWLGFGIGGDYPLSATIMSEYANKRTRGAFIAAVFAMQGFGILAGGAVAIGITAIFRSRFPAPPFAADPAASTPPQADYVWRLILMFGALPAALTFYWRMRMPETARYTAIVAKNAERAAADMSKVLQVKITAEQAEMASPVDKPFTSKPFGLFSGEFARRHGFHLLGTTSTWLLLDIAYYSQNLFQKDIFSAIGWIPEAKTMSALDELYHIARAQTLIALCGTVPGYWFTVALIDVVGRFKIQAAGFFVMTAFMLALAVPYDHWTAAGNQIGFVVLYALTFFFANFGPNATTFIVPAEIYPARLRATCHGISAASGKVGAIVGSFGFLYLAQSPVPAKAAAHGYPPGIGVRNSLFALAGCSLLGFLLTFLVPEPKGKSLEEMSRENEVGQP

SEQ ID NO: 11242 - protein, 555 aa, Oryza sativa (japonica cultivar-group)
MADADGGSNLAVLDALDSARTQMYHMKAIVIAGMGFFTDAYDLFCISTVSKLLGRLYYQPDGSTDSKPGALSKTANNMVIGVALVGTLMGQLVFGYFGDKLGRKRVYGVTLILMAACAIGSGLSFGSSRKAVIGTLCFFRFWLGFGIGGDYPLSATIMSEYSNKKTRGAFIAAVFAMQGVGIIFAGLVSMIVSSIFLTYNKAPSYKGNHDLSRQMPAADYVWRIVLMIGAFPALATFYWRMKMPETARYTAIIDGNAKQAANDMQKVLSIEIEAEQEKLAKFNAANNYPLLSMEFARRHGLHLIGTTTTWFLLDIAFYSQNLTQKDIFPAMGLISGAAEVNALTEMFQISKASFLVALLGTFPGYWVTVALIDKMGRYMIQLIGFFMMSMFMLAMGILYDYLKTHHFLFGLLYALTFFFANFGPNSTTFVLPAELFPTRVRSTCHAISAAAGKAGAIVAAFGIQKLTYNSQVKSIKKALIILSITNMLGFFFTFLVPETMGRSLEEISGEDGNTGAGGGGAPAAANAGVGVSASDVSRDEKFPASSTEWQTSMHA

SEQ ID NO: 11243 - protein, 393 aa, Oryza sativa (japonica cultivar-group)
FFTDAYDLFCISLVSKLLGRIYYTDIASDTPGSLPPNVSAAVNGVALCGTLAGQLFFGWLGDKLGRKSVYGFTLVLMVVCSVASGLSFGRTAKGVVATLCFFRFWLGFGIGGDYPLSATIMSEYANKRTRGAFIAAVFAMQGFGILFGAIVALVVSAGFRNAYPAPSYADGRAASLVPEADYVWRIILMFGTVPAALTYYWRMKMPETARYTALIARNAKQAAADMSKVLDTEIQEDADRAEAVAAGGAGNEWGLFSRHFVRRHGVHLVATTSTWFLLDIAFYSQNLFQKDIFSKVGWIPPARTMNAVEEVFRIARAQALIALCGTIPGYWFTVAFIDVAGRFAIQLMGFAMMTVFMLGLAAPYHHWTTPGNHTGFVVMYGFTFFFANFGPNA

SEQ ID NO: 11244 - protein, 487 aa, Oryza sativa (japonica cultivar-group)
MAGNQQLRVLHALDIARTQLYHFIAIVIAGMGFFTDAYDLFSISLVADLLGHVYYHGELPRNIHAAVTGIALCGTVPGQLVFGWLGDKMGRKRVYGITLLLNGCLLSRLRTLLHIGGDYPLSATIMSEYANKRTRGAFIAAVFAMQGFGNLAAGIIGMIVSAAFKHSSASKIDYAWRIILMFGAIPAALTYHWRMKMPETARYTALISKNAKKAAKDMSAVLNVNITPDDEVINELARQDEYGLFSFEFLHRHGLHLLGTTVCWFVLDVTFYSLNIFMKNIFTEVGLLPRLDSEYHHTLQRMITMTAVHTFISLCGALPGYFFTVAFVDRIGRVKIQLIGFTMMTVFMLCLAIPYDQWLRHKNKYGFAVMYGLTFFFANFGPNTTTFIIPAEIFPARLRSTCHGISGAVGKIGAIVGVFGFLYTEYHIRIFLFVLIGCNLVGFIFTLLLPESKGKSLEDLTGEIEEFQEEDEGSEVALSRPIHTVPL

SEQ ID NO: 11245 - protein, 390 aa, Oryza sativa (japonica cultivar-group)
  unsure (1)..(390): unsure at all Xaa locations
FFTDAYDLFSISLVTKLLGRIYYFNPASKSPGSLPPNVSAAVNGVAFCGTLAGQLFFGWLGDKMGRKKVYGMTLMLMVICCLASGLSFGSSAKGVMATLCFFRFWLGFGIGGDYPLSATIMSEYANKRTRGAFIAAVFAMQGFGNLTGGIVAIIVSAAFKSRFDAPAYRDDRTGSTVPKPTTRGASCSCSAPIPALLTYYWRMKMPETARYTALVAKNAKQAAADMTQVLNVEIVEEQNKADEVARREQFGLFSRQFLRRHGRHLLGTTVCWFVLDIAFYSSNLFQKDIYTAVQWLPKADTMSALEEMFKISRAQTLVALCGTIPGYWFTVFFIDIIGRFVIQLGGFFFMTAFMLGLAVPYHHWTTPGNHIGFVVMYAFTFFFAXXGPXA

SEQ ID NO: 11246 - protein, 582 aa, Oryza sativa (japonica cultivar-group)
  unsure (1)..(582): unsure at all Xaa locations
MAPRIRVLAALDQARTQYYHFKAIVIAGMGLFTDSYDLFCISPVMKIFGRVYYAPSGSVDGSGSGPGVTPPAVVSATVGVALLGAVAGNVVFGALGDRVGRRRVYGACLLLMVCSSVGSGLSVCRXRRCALASLCFFRFLLGVGVGGDYPLSATIMSEFANRGTRGAFIAAVFSMQGFGILVSSAVTMAVAAAFDHYTGYPAPLDTPECADLAWRIILMAGAVPAALTYYWRMSMPETARYTALVERDVVKATNDIGRVLADLDLAAVAEEEVAAAALSPPPVTTPPPPRPSYGLFSRRFVRQHGRDLFACAAAWFLLDIPYYSSTLFQSQIYRPWFPPAAKVNAFQEAFNVAKFQAVIAVASTIPGYFAAMLLIERAGRRRLQMAGFLLMAVFLFALAGPYDGYWRDHAKTAGYIVLYSLTFFSANLGPNTTTFILPAELFPARFRSTCHGLSGAAGKLGALVGSIGFLWASQQKDGAAAGHLPGIGMMYALFVLGGICLLGLALTYAFTPETMTRSLEENESSVQAQSQVGDGGSDAGNGSDGLRFHELNVLMEAATKSPVSMASSHLSMSPILPHRMSL

SEQ ID NO: 11247 - protein, 549 aa, Oryza sativa (japonica cultivar-group)
MAPIGVLTALDQARTQYYHFKAIVIAGMGLFTDSYDLFCIAPVMKIVGRVYYSDGGARPGVTPPAVVSATVGVALLGAVIGNVVFGALGDRVGRRRVYGACLLLMLRRERLLRVPDAPVRARQPLLLPFLLGVGVGGDYPLSATIMSEFANRRTRGAFIAAVFSMQGFGILASSAVTMAVAAAFDHYTGYPAPLDTPECADLAWRIILMAGAVPAALTYYWRMSMPETARYTALVERDVVKATNDIGRVLADLDLGAVAEEEVAAALSRPPPPPRPSYGLLSRRFVRQHGRDLFACAAAWFLLDIPYYSSTLFQSQIYRPLFPAPGLINAFQEAFNVAKFQAVIAVASTIPGYFVAVLLIDRVGRRCLQMAGFLLMAVFLFALAGPYDGYWRDHGAHAGYIVLYSLTFFSANLGPNTTTFILPAELFPARFRSTCHGLSGAAGKLGALVGSIGFLWASQQKDGAAAGHLPGIGMMYALFVLGGICLLGLALTYVFTPETMMRSLEENESDRAQTQVGDGGSDTEAAKSPASMASSHLSMSPILPARVSV

SEQ ID NO: 11248 - protein, 118 aa, Oryza sativa (japonica cultivar-group)
MEVAVASSELDASRGRLDELTVVRPLLFLQRLLDLDDDNDNDDVVGAIIGSFGFLYLAQSPDPAKAAAHGYLPGIGVRNSLFTLAGCSLLGFLLTFLVPEPKGKSLEEMSRENEVGQP

SEQ ID NO: 11249 - protein, 535 aa, Solanum tuberosum
MAKNQLQVLNALDVAKTQLYHFTAIVIAGMGFFTDAYDLFCISLVTKLLGRIYYHHEGAPKPGILPPGISAAVNGVAFVGTLSGQLFFGWLGDKMGRKRVYGMTLMIMVICSIASGLSFGKTPSGVIATLCFFRFWLGFGIGGDYPLSATIMSEYANKKTRGAFIAAVFAMQGFGILAGGIVALVVSGAFKNAYPAPIYSVNNEGSTPQEADIVWRIILMFGAIPALLTYYWRMKMPETARYTALVAKNATKAASDMSKVLNVEIEAEDDKIEKIVAIQGNNFGLFSKEFLHRHGLHLLGTTSTWFLLDIAFYSQNLFQKDIFSKIGWIPHPETMNALDEVFKIAKAQTLIALCSTVPGYWFTVAFIDRMGRFAIQLMGFFFMTVFMFALAIPYNHWTKKENRFGFVVMYSLTFFFANFGPNATTFVVPAEIFPARLRSTCHGISAAAGKAGAIVGAFGFLYAAQSTDPSKVDAGYPTGIGVKNALIVLGCVNFLGMLFTLLVPESKGKSLEEMSKENEGEEEMTKVENAQTIPV

SEQ ID NO: 11250 - protein, 521 aa, Glomus versiforme
MSTSDRVTIDVDKRRAALKEIDDAKFGWQHIRACLVAGTGFFMDAYDLFAVNFASTMIGYVYYGGKTPANIDLGLKVTGSIGTLLGQLFFGYLADRLGRKRMYGVELMIIIVATVASALSGESRAVTVVGTIMFWRVIMGVGIGGDYPLSAIITSEFATKKRRGAMMASVFAMQGFGILGSAIVALAVLAGFRNEIIKDVSAVDYCWRIVLGCGAVPGLAALYFRLTIPETPRYTMDVEHDVNKATSDITSYLQKNDVNEDDTNTGNHVGVPKASWSDFVSYFGKWSNGKVLLGTSMSWFALDIAFYGIGLNNGIILSAIGYSETHEADLNLRAYNSLKNMAVGNIIITIMGTAPGYWVTAALVDSWGRKPIQLMGFGVLTALFIVMGAAFNPLKEHSIPAFIILFTLLQFFQNFGPNTTTFIVPGEVFPTRYRSTGHGISAASGKLGAIVAQVGFSKLKDIGGSNAFVGPLLLIFSAWMFIGGLFSILIPETKGLSLEELANEEHTYDVEERKERIKADA

SEQ ID NO: 11251 - protein, 525 aa, Hordeum vulgare
MATEQLNVLKALDVAKTQLYHFKAVVIAGMGFFTDAYDLFCIALVTKLLGRIYYTDPALNEPGHLPANVSAAVNGVALCGTLAGQLFFGWLGDKLGRKSVYGFTLILMVLCSIASGLSFGHEAKGVMGTLCFFRFWLGFGVGGDNPLSATIMSEYANKKTRGTFIAAVFAMQGFGILFGTIVTIIVSSAFRHAFPAPPFYIDAAASIGPEADYVWRIIVMFGTIPAALTYYWRMKMPETARYTALIAGNTKQATSDMSKVLNKEISEEAAQGERATGDTWGLFSRQFMKRHGVHLLATTSTWFLLDVAFYSQNLFQKDIFTKIGWIPPAKTMNALEELYRIARAQALIALCGTVPGYWFTVAFIDIIGRFWIQLMGFTMMTIFMLAIAIPYDYLVKPGHHTGFVVLYGLTFFFANFGPNSTTFIVPAEIFPARLRSTCHGISAATGKAGAIIGAFGFLYASQDQRKPETGYSRGIGMRNALFVLAGTNFLGLLFSLLVPESKGKSLEELSKENVGDDDAIAPTGV

SEQ ID NO: 11252 - protein, 333 aa, Oryza rufipogon
LFCISLVTKLLGRIYYFNPASKSPGSLPPNVSAAVNGVAFCGTLAGQLFFGWLGDKMGRKKVYGMTLMLMVICCLASGLSFGSSAKGVMATLCFFRFWLGFGIGGDYPLSATIMSEYANKRTRGAFIAAVFAMQGFGNLTGGIVAIIVSAAFKSRFDAPAYRDDRAGSTVPQADYAWRIVLMFGAIPALLTYYWRMKMPETARYTALVAKNDKKAAADMARVLNVELVDEQEKAAAATAAAAEEEAARREQYGLFSREFARRHGHHLLGTTVCWFVLDIAYYSQNLFQKDIFSAIGWIPEAKTMSALDELYHIARAQTLIALCGTVPGYWFTV

SEQ ID NO: 11253 - protein, 566 aa, Oryza sativa
  unsure (1)..(566): unsure at all Xaa locations
MAGVRTNTGGLVFFPELCEQSRSAMARQEQQQHLQVLSALDAAKTQWYHFTAIVVAGMGFFTDAYDLFCISLVTKLLGRIYYTDLAKENPGSLPPNVAAAVNGVAFCGTLAGQLFFGWLGDKLGRKSVYGMTLLMMVICSIASGLSFSHTPTSVMATLCFFRFWLGFGIGGDYPLSATIMSEYANKKTRGAFIAAVFAMQGFGILAGGIVTLIISSAFRAGFPAPAYQDDRAGSTVRQADYVWRIILMLGAMPALLTYYWRMKMPETARYTALVAKNAKQAAADMSKVLQVEIQEEQDKLEQMVTRNSSSFGLFSRQFARRHGLHLVGTATTWFLLDIAFYSQNLFQKDIFTSINWIPKAKTMSALEEVFRIARAQTLIALCGTVPGYWFTVFLIDIVGRFAIQLLGFFMMTVFMLGLAVPYHHWTTKGNHIGFVVMYAFTFFFANFGPNSTTFIVPAEIFPARLRSTCHGISAAAGKAGAIIGSFGFLYAAQDPHKPDAGYKPGIGVRNSLFVLAGCNLLGFICTFLVPESKGKSLEEMSGEAEDDDDEVAAXXAVAPPFSWISL

SEQ ID NO: 11254 - protein, 538 aa, Oryza sativa; identical to SEQ ID NO: 11230

SEQ ID NO: 11255 - protein, 528 aa, Oryza sativa
MAGGQLNVLSKLDQAKTQWYHFMAIVIAGMGFFTDAYDLFCIALVTKLLGRLYYTDITKPNPGTLPPNVSSAVTGVALCGTLAGQLFFGWLGDKLGRKSVYGFTLILMVVCSIASGLSFGHTPKSVIATLCFFRFWLGFGIGGDYPLSATIMSEYASKKTRGAFIAAVFAMQGFGILFGAIVALVVSAGFRHAYPAPSYAQNPAASLAPQADYTWRLILMFGTIPAGLTYYWRMKMPETARYTALVARNAKQAAADMSKVLHAEIEERPEVVESQVVAGETWGLFSRQFMKRHGMHLLATTSTWFLLDIAFYSQNLFQKDIFSKVGWIPPAKTMNALEELYRISRAQALIALCGTIPGYWFTVAFIDIVGRFWIQIMGFFMMTVFMLALGVPYDHWTHPAHHTGFVVLYALTFFFANFGPNSTTFIVPAEIFPARLRSTCHGISAASGKAGAIIGAFGFLYAAQDQHNPDAGYSRGIGIRNALFVLAGTNFLGMLMTLLVPESKGLSLEEMSKDNVVDETAQEAIAQA

SEQ ID NO: 11256 - protein, 545 aa, Oryza sativa
  unsure (1)..(545): unsure at all Xaa locations
MAGDQMHVLSALDSAKTQWYHFTAIVIAGMGFFTDAYDLFCISLVTKLIGRVYYTADGASKPGSLPPNVSAAVNGVAFVGTLTGQLFFGWLGDRVGRKSVYGMTLLLMIICSVASGLSFGDTPTSVMATLCFFRFWLGFGIGGDYPLSATIMSEYANKRTRGAFIAAVFAMQGFGILAGGAVAIGITAIFRSRFPAPPFAADPAASTPPQADYVWRLILMFGALPAALTFYWRMRMPETARYTAIVAKNAERAAADMSKVLQVKITAEQAEMASPVDKPSFGLFSGEFARRHGFHLLGTTSTWLLLDIAYYSQNLFQKDIFSAIGWIPEAKTMSALDELYHIARAQTLIALCGTVPGYWFTVALIDVVGRFKIQAAGFFVMTAFMLALAVPYDHWTAAGNQIGFVVLYALTFFFANFGPNATTFIVPAEIYPARLRATCHGISAASGKVGAIVGSFGFLYLAQSPVPAKAAAHGYPPGIGVRNSLFALAGCSLLGFLLTFLVPEPKGKSLEEMSRENEVGQPXSTRXFHRRPSACKIHAYAWLVH

SEQ ID NO: 11257 - protein, 424 aa, Oryza sativa
  unsure (1)..(424): unsure at all Xaa locations
MAGDQMHVLSVLDSAKTQWYHFTVIDIAGMGFFTDAYDLFCISLVSKLLGRVYYTAVAAATPGSLPPNVSAAVNGVALGGTLAGQLFFGWLGDRLGRKSVYGFTLLLMVVCSVASGLSFGRTPTGVVATLCFFRFWLGFGIGGDYPLSATIMSEYANKRTRGAFIAAVFAMQGFGILFGAIVALVVSAGFRNAYPAPSYADGRAASLVPEADYVWRIILMFGTVPAALTYYWRMKMPETARYTALIARNAKQAAADMSKVLDTEIQEDADRAEAVAAGGAGNEWGLFSRHFVRRHGVHLVATTSTWFLLDIAFYSQNLFQKDIFSKVGWIPPARTMNAVEEVFRIARAQALIALCGTIPGYWFTVAFIDVAGRFAIQLMGFAMMTVFMLGLAAPYHHWTTPGNHTGFVVMYGFTFFFANFGPNX

SEQ ID NO: 11258 - protein, 424 aa, Oryza sativa
  unsure (1)..(424): unsure at all Xaa locations
MAGGQLNVLSTLDQAKTQWYHFMAIVIAGMGFFTDAYDLFCISLVTKLLGRIYYTDDSKDTPGALPPNVSAAVTGVALCGTLAGQLFFGWLGDKLGRKSVYGFTLILMVVCSVASGLSFGSSAKGVVSTLCFFRFWLGFGIGGDYPLSATIMSEYANKRTRXAFIAAVFAMQGFGILFGAIVALAVSAGFRHAYPAPSYSDNHAASLVPQADYVWRIILMFGTVPAALTYYWRMKMPETARYTALIARNAKQAAADMSKVLHTQIEESADRAETVAVGGXXSWGLFSRQFLRRHGLHLLATTSTWFLLDIAFYGQXNLFQKDIFSKVGWIPPAKTMNALEELYRIARAQALIALCGTIPGYWFTVAFIGIMGRFWIQIMGFAIMTAFMLGLAISYHHXTTPGHHTGFIVMYGFTFFFANLGPNX

SEQ ID NO: 11259 - protein, 391 aa, Oryza sativa
  unsure (1)..(391): unsure at all Xaa locations
FFTDAYDLFCIALVTKLLGRLYYTDITKPNPGTLPPNVSSAVTGVALCGTLAGQLFFGWLGDKLGRKSVYGFTLILMVVCSIASGLSFGHTPKSVIATLCFFRFWLGFGIGGDYPLSATIMSEYASKKTRGAFIAAVFAMQGFGILFGAIVALVVSTGFRHTYPAPSYAQNPAASLAPQADYTWRLILMFGTIPAGLTYYWRMKMPETARYTALVARNAKQAAANMSKVLHAEIEERPEVVESQVVAGETWGLFSRQFMKRHGMHLLATTSTWFLLDIAFCNQNLFQKDIFSKIGWIPPAKTMNALEELYRISRAQALIALCGTIPGYWFTVAFIDIVGRFXIQIMGFFMMTVFMLALGVPYDHWTHPAHHTGFVVLYALTFFFANLGPNX

SEQ ID NO: 11260 - protein, 391 aa, Oryza sativa
  unsure (1)..(391): unsure at all Xaa locations
FFTDAYDLFCIALVTKLLGRLYYTDITKPNPGTLPPNVSSAVTGVALCGTLAGQLFFGWLGDKLGRKSVYGFTLILMVVCSIASGLSFGSTPKSVITTLCFFRFWLGFGIGGDYPLSATIMSEYASKKTRGAFIAAVFAMQGFEILFGAIVALVVSAGFRHAYPAPSYTQNPAASLAPQADYTWRLILMFGTIPAGLTYYWRMKMPETARYTALVARNAKQAAADMSRVLHAEIEERPEVVESQVVAGETWDLFSRQFMKRHGMHLLATTSTWFLLDIAFYSQNLFQKDIFSKVGWIPPAKTMNALEELYRISRAQALIALCGTIPGYWFTVAFIDIVGRFXIQIMGFFMMTVFMLALGVPYDHWTHPAHHTGFVVLYALTFFFAXLGPNX

SEQ ID NO: 11261 - protein, 393 aa, Oryza sativa
  unsure (1)..(393): unsure at all Xaa locations
FFTDAYDLFCIALVTKLLGRLYYTDITKPNPGTLPPNVSSAVTGVALCGTLAGQLFFGWLGDKLGRKSVYGFTLILMVVCSIASGLSFGHTPKSVIATLCFFRFWLGFGIGGDYPLSATIMSEYASKKTRGAFIAAVFAMQGFGILFGAIIALVVSAGFRHAYPAPSYAQNPAASLAPQADYTWRLILMFGTIPAGLTYYWXRMKMPEXTARYTALVARNAKQXAADMSKVLHAEIEERPEVVESQVVAGETWGLFSRQFIKRHGMHLLAITSTWFLLDIAFYSQNLFQKNIFSKVGWIPPAKTMNALEELYRISRAQALIALCGTIPGYWFTVAFIDIVGRFXIQIMGFFMMTVFMLALGVPYDHWTHPAHHTGFVVLYALTFFFANFGPNX

SEQ ID NO: 11262 - protein, 391 aa, Oryza sativa
  unsure (1)..(391): unsure at all Xaa locations
FFTDAYDLFCIALVTKLLGRLYYTDITKPNPGTLPPNVSSAVTGVALCGTLAGQLFFGWLGDKLGRKSVYGFTLILMVVCSIASGLSFGHTPKSVIVTLCFFRFWLGFGIGGDYPLSATIMSEYASKKTRGAFIAAVFAMXGFGILFGAIVALVVSAGFRHAYPAPSYAXNSAASLAPQADYTWWLILMFGTIPAGLTYYWRMKMPEMARYTALVARNAKQAAADMSKVLHAEIEERPEVVESQVVAGETWGLFSRQFMKRHGMHLLATTSTWFLLDIAFYSXNLFQKDIFSKVGWIPPAKTMNALEELYRISRAQALIALCGTIPGYWFTVAFIDIVGRFXIQIMGFFMMTVFMLALGVPYDHWTHPAHHTGFVVLYALTFFFANFGPNX

SEQ ID NO: 11263 - protein, 395 aa, Oryza sativa
  unsure (1)..(395): unsure at all Xaa locations
FFTDAYDLFCIALVTKLLGRLYYTDITKPNPGTLPPNVSSAVTGVALCGTLAGQLFFGWLGDKLGRKSVYGFTLILMVVCSIASGLSFGHTPKSVIATLCFFRFXLGFGIGGDYPLSATIMSKYASKKTRRAFIAAVFAMQGFGILFGAIVALVVSADFRHAYPAPSYNPSPPASLAPQAXDYTWRAXILQCSGTIPXAGLTYYWRIKMPETARYTTLVARNAKQAAADMSKVLHAEIEERPEVVESQVIAGETWGLFSRQLMKRHGMHLLATTSTWFLLDIAFYSQNLFQKNIFSKVGWIPPAKTMNALEELYRISRAQALIALCGTIPGYWFTVAFIDIVGRFWIQIVGFFMMTVFMLALGVPYDHXTHPAHHTGFVVLYALTFFFANFGPNX

SEQ ID NO: 11264 - protein, 390 aa, Oryza sativa
  unsure (1)..(390): unsure at all Xaa locations
FFTDAYDLFSISLVTKLLGRIYYFNPASKSPGSLPPNVSAAVNGVAFCGTLAGQLFFGWLGDKMGRKKVYGMTLMLMVICCLASGLSFGSSAKGVMATLCFFRFWLGFGIGGDYPLSATIMSEYANKRTRGAFIAAVFAMQGFGNLTGGIVAIIVSAAFKSRFDAPAYRDDRTGSTVPKPTTRGASCSCSAPIPALLTYYWRMKMPETARYTALVAKNAKQAAADMTQVLNVEIVEEQNKADEVARREQFGLFSRQFLRRHGRHLLGTTVCWFVLDIAFYSSNLFQKDIYTAVQWLPKADTMSALEEMFKISRAQTLVALCGTIPGYWFTVFFIDIIGRFVIQLGGFFFMTAFMLGLAVPYHHWTTPGNHIGFVVMYAFTFFFXXXXXXX

SEQ ID NO: 11265 - protein, 430 aa, Oryza sativa
  unsure (1)..(430): unsure at all Xaa locations
MADADGGSNLAVLDALDSARTQMYHMKAIVIAGMGFFTDAYDLFCISTVSKLLGRLYYQPDGSTDSKPGALSKTANNMVIGVALVGTLMGQLVFGYFGDKLGRKRVYGVTLILMAACAIGSGLSFGSSRKAVIGTLCFFRFWLGFGIGGDYPLSATIMSEYSNKKTRGAFIAAVFAMQGVGIIFAGLVSMIVSSIFLTYNKAPSYKGNHDLSRQMPXAADYVWRIVLMIGAFPAFGAFYWRKKMPEXTARYTAIIDGNAKQXAANDXMQKVLSIEIEAEQEKLAKFNAANNYPLLSMEFARRHGLHLIGTTTTWFLLDIAFYSQNLTQKDILPAMGLISGAAEVNALTEMFQISKASFLVALLGTFPGYWVTVALIDKMGRYMIQLIGFFMMSMFMLAMGILYDYLKTHHFLFGLLYALTFFFANLGPNX

SEQ ID NO: 11266 - protein, 506 aa, Oryza sativa
MGFFTDAYDLFCISLVTKLLGRIYYRVDGSPSPGTLPPHVSASVNGVAFVGTLSGQLFFGWLGDKLGRKRVYGITLMLMVLCSLASALSFGHTPTSVMATLCFFRFWLGFGIGGDYPLSATIMSEYANKKTRGAFIAAVFAMQGFGIITGGLVAILVSASFRAAFPAPPYGEDPVASTPPQADFVWRIILMLGALPAALTYYWRTKMPETARYTALVANNAKQAAADMSKVLQVVEMRNIGNNGGSRRAVRAVLRRVCPAARAAPGGHVGDVVAAGHCVLQPEPVPEGHIQRGGVDPQGGDDERAGGAVPHRAGADADRAVRDGARLLVHRHAHRSGGPFQDPGRWLLHDDPLHAHPRPAVPPLDGAGEEPRRLPAALRPHLLLRQLRPQLHHLHRAGGDFPGAAAGHVPRHLGGVGEAGRHRRILRVPVPGAEPRPEQDGARVPSGHRRPQLALPARRLQPAGPALHLPRAGVQGEVAGGDVRRRRGPGGGAAAPANCTVALSPS

SEQ ID NO: 11267 - protein, 323 aa, Oryza sativa
LFCISLVTKLLGRIYYRVDGSPSPGTLPPHVSASVNGVAFVGTLSGQLFFGWLGDKLGRKRVYGITLMLMVLCSLASALSFGHTPTSVMATLCFFRFWLGFGIGGDYPLSATIMSEYANKKTRGAFIAAVFAMQGFGIITGGLVAILVSASFRAAFPAPPYGEDPVASTPPQADFVWRIILMLGALPAALTYYWRTKMPETARYTALVANNAKQAAADMSKVLQVVEMRNIGNNGGSRRAVRAVLRRVCPAARAAPGGHVGDVVAAGHCVLQPEPVPEGHIQRGGVDPQGGDDERAGGAVPHRAGADADRAVRDGARLLVHGG

SEQ ID NO: 11268 - protein, 386 aa, Secale cereale
FFTDAYDLFCISLVTKLLGRIYYTDLSKPDPGTLPPGVAAAVNGVAFCGTLTGQLFFGWLGDKMGRKSVYGMTWCSWSLLHRLRPLLRAHPQERHGHPLFFRFWLGFGIGGDYPLSATIMSEYANKKTRGAFIAAVFAMQGFGILAGGIVTLIISSAFRAGFHEPSYQDDRVASTGTEADFVWRIILMIGALPALLTYYWRMKMPETARYTALVAKNAKLAAADMSKVLQVELEDETEKMDEMVSRGANDFGLFSPQFARRHGLHQVGTATTWFLLDIAFYSHNLFQKDIFTSINWIPKARTMSALDEVFRISRAQTLIALCGTVPGIWFTVFLIDVVGRFAIQLMGFFMMTVFMLGLAVPYHHWTQPGNQIGFVMYAFTFFFANF

SEQ ID NO: 11269 - protein, 539 aa, Triticum aestivum
  unsure (1)..(539): unsure at all Xaa locations
MARSEQQGLQVLSALDAAKTQWYHFTAIVVAGMGFFTDAYDLFCISLVTKLLGRIYYTGLRPPAPGTLPPGVAAAXNGVAFCGTLAGQLFFGWLGDKMGRKSVYGMTLILMVICSIGSGLSFAHTPGSVMATLCFFRFWLGFGIGGDYPLSATIMSEYANKKTRGGFIAAVFAMQGFGILTGGVVTLIVSAAFRAAFPTQAYQDAPLASTPAQADFVWRFILMFGAVPALMTYYWRMKMPETARYTALVAKNAKQAAADMSKVLQVDIGAEEEAKANDGGAGAADDRNSFGLFSGEFLRRHGLHLLGTATCWFLLDIAFYSQNLFQKDIFTAINWIPKAKTMSALEEVHRIARAQTLIALCGTVPGYWFTVALIDRIGRFWIQLGGFFFMAVFMLGLAFPYHHWTTPGNHIGFVVLYGLTFFFANFGPNSTTFIVPAEIFPARLRSTCHGISAAAGKLGAIVGSFGFLYLAQNQDPAKVDHGYKAGXIGVRNSLFILAACNFLGMGFTFCAPESNGLSLEELSRENEEEAPXXARTVPV

SEQ ID NO: 11270 - protein, 525 aa, Triticum aestivum; identical to SEQ ID NO: 11184

SEQ ID NO: 11271 - protein, 525 aa, Triticum aestivum; identical to SEQ ID NO: 11185

SEQ ID NO: 11272 - protein, 396 aa, Triticum aestivum
FFTDAYDLFCISLVTKLLGRIYYYREGADAPGSLPPNLAAAVNGVAFCGTLSGQLFFGWLGDRMGRKRVYGMTLMCMVLCSIASGLSFGSTPGSVMATLCFFRFWLGFGIGGDYPLSATIMSEYANKKTRGGFIAAVFAMQGFGILTGGVVTLIVSAAFRAAFPTQAYQDAPLASTPAQADFVWRFILMFGAVPALMTYYWRMKMPETARYTALVAKNAKQAAADMSKVLQVDIGAEEEDPKANDGVGAADDRNSFGLFSGEFLRRHGLHLLGTATCWFLLDIAFYSQNLFQKDIFTAINWIPKAKTMSALEEVHRIARAQTLIALCGTVPGYWFTVALIDRIGRFWIQLGGFFFMAVFMLGLAFPYHHWTTPGNHIGFVVLYALTFFFANFGPNA

SEQ ID NO: 11273 - protein, 396 aa, Triticum aestivum; identical to SEQ ID NO: 11272

SEQ ID NO: 11274 - protein, 335 aa, Triticum aestivum
MAHLAAALISAAFCGTFTRRLVCGLALMTYYWRMKMPETARYTALVAKNAKQAAADMSKVLQVDIGAEEEDPKANDGGAGAADDRNSFGLFSGEFLRRHGLHLLGTATCWFLLDIAFYSQNLFQKDIFTAINWIPKAKTMSALEEVHRIARAQTLIALCGTVPGYWFTVALIDRIGRFWIQLGGFFFMAVFMLGLAFPYHHWTTPGNHIGFVVLYGLTFFFANFGPNSTTFIVPAEIFPARLRSTCHGISAAAGKLGAIVGSFGFLYLAQNQDPAKVDHGYKAGIGVRNSLFILAACNFLGMGFTFCAPESNGLSLEELSRENEEEAPDARTVPV

SEQ ID NO: 11275 - protein, 370 aa, Triticum aestivum; identical to SEQ ID NO: 11187

SEQ ID NO: 11276 - protein, 370 aa, Triticum aestivum; identical to SEQ ID NO: 11188

SEQ ID NO: 11277 - protein, 121 aa, Triticum aestivum
RHGRHLLGTTVCWFVLDIAFYSQNLFQKDIYTAVEWLPRADTMNALQEMFKISRAQTLVALCGTIPGYWFTVFLIDVVGRFAIQLGGFFFMTAFMLGLAVPYHHWTTPGNHVGFVVMYAFT

SEQ ID NO: 11278 - protein, 106 aa, Triticum aestivum
  unsure (1)..(106): unsure at all Xaa locations
MAREQLEVLTALDAAKTQWYHFTAIVIAGMGFFTDAYDLFCISLVTKLLGRIYYYREGADAPGSLPPNVAAAVNGVAFCGTLSGQLFFGWLGDRMGRKRVYGMTLX

SEQ ID NO: 11279 - protein, 50 aa, Triticum aestivum; identical to SEQ ID NO: 11190

SEQ ID NO: 11280 - protein, 548 aa, Zea mays
  unsure (1)..(548): unsure at all Xaa locations
PPPPDETGXGGAAMAAGDLEVLTALDTAKTQWYHFTAIVVAGMGFFTDAYDLFCISLVTKLLGRIYYTVEGSATPGTLPPHVSASVNGVAFVGTLSGQLFFGWLGDKLGRKKVYGMTLMLMVLCSVASGLSFGHTPASVMATLCFFRFWLGFGIGGDYPLSATIMSEYANKKTRGAFIAAVFAMQGFGIMAGGLVAIVVSASFKARFPAPAYAVDPAGSTPPQADFVWRIILMLGAMPAALTYYWRTKMPETARYTALVAKNAKQAAADMSKVLQVEISAGAAEEDGRRRXFGLFSGEFLRRHGLHLLGTSSTWFLLDIAFYSQNLFQKDIFSAVGWIPKAATMNALEELFSIARAQSLIALCGTVPGYWFTVALIDVLGRFAIQVTGFLMMTVFMLGLAVPYEHWTTPGHHIGFIVMYGLTFFFANFGPNATTFIVPAEIFPARLRSTCHGISAASGKLGAIIGSFGFLYLAQNRDPAKTDHGYPAGIGVRNSLFLLAGCNLLGLAFTFLVPESKGKSLEEMSGENXXRRPPPPPRRTTTTAQCPCK

SEQ ID NO: 11281 - protein, 537 aa, Zea mays
  unsure (1)..(537): unsure at all Xaa locations
MAGGQLNVLTTLDQAKTQWYHFMAIVIAGMGFFTDAYDLFCIALVTKLLGRIYYSDPTSKDPGSLPPNVSAAVTGVALCGTLAGQLFFGWLGDKLGRKSVYGFTLILMVLCSVASGLSFGHTPKGVIATLCFFRFWLGFGIGGDYPLSATIMSEYANKKTRGAFIAAVFAMQGFGILFGTIVALAVSAAFRNAFPAPPYFVDAQASLVPEADYVWRVILMFGTVPAALTYYWRMKMPETARYTALIARNTKQATADMAKVLKKEIEKEDEQVERQVVGADTWGLFSAQFLRRHGLHLLATSSTWFLLDIAFYSQNLFQKDIFTKVGWIPPARTMNAIEEVYRISRAQALIALCGTIPGYWFTVGLIDIVGRFWIQIMGFFMMTVFMLALGVPYEHWTKASNHTGFVVLYGLTFFFANFGPNSTTFIVPAEIFPARLRSTCHGISAAAGKAGAIIGAFGFLYAAQDPKKPDHGYSPGIGIRNTLFVLAGTNFLGMLMSVFVPESKGMSLEEISKENVDDEAEAEVXRDRLHLCVQMHM

SEQ ID NO: 11282 - protein, 538 aa, Zea mays
  unsure (1)..(538): unsure at all Xaa locations
MAGXSQLNVLTTLDQAKTQWYHFMAIVIAGMGFFTDAYDLFCIALVTKLLGRIYYSDPTSKDPGSLPPNVSAAVTGVALCGTLAGQLFFGWLGDKLGRKSVYGFTLILMVLCSVASGLSFGHTPKGVIATLCFFRFWLGFGIGGDYPLSATIMSEYANKKTRGAFIAAVFAMQGFGILFGTIVALAVSAAFRNAFPAPPYFVDAQASLVPEADYVWRVILMFGTVPAALTYYWRMKMPETARYTALIARNTKQATADMAKVLKKEIEKEDEQVERQVVGADTWGLFSAQFLRRHGLHLLATSSTWFLLDIAFYSQNLFQKDIFTKVGWIPPARTMNAIEEVYRISRAQALIALCGTIPGYWFTVGLIDIVGRFWIQIMGFFMMTVFMLALGVPYEHWTKASNHTGFVVLYGLTFFFANFGPNSTTFIVPAEIFPARLRSTCHGISAAAGKAGAIIGAFGFLYAAQDPKKPDHGYSPGIGIRNTLFVLAGTNFLGMLMSVFVPESKGMSLEEISKENVDDEAEAEVXRDRLHLCVQMHM

SEQ ID NO: 11283 - protein, 550 aa, Zea mays
  unsure (1)..(550): unsure at all Xaa locations
LTSAMARGGDGLQVLSALDAAXKTQWYHFTAIIVAGMGFFTDAYDLFCISLVTKLLGRIYYTDTSKDSPXGSLPPNVAAAVNGVAFCGTLAGQLFFGWLGDKLGRKSVYGMTLMVMVICSVASGLSFGHTPTGXVMATLCFFRFWLGFGIGGDYPLSATIMSEYANKRTRGAFIAAVFAMQGFGILAGGIVTLVISAAFRAAYPAPAYRDDHFTSTVPQADFVWRVIXLMLGXAAPALLTYYWRMKMPETARYTALVAKNAKQAAADMSKVLQTEIVDEQEKLXXAAEGANSFGLFSREFARRHGLHLVGTATTWFLLDIAFYSQNLFQKDIFTSINWIPKANTMSALEEVYRISRAQTLIALCGTVPGYWFTVALIDVVGRFAIQLLGFFMMTVFMLGLAIPYHHWTTPGNHIGFVVMYAFTFFFANFGXPNSTTFIVPAEIFPARLRSTCHGISAASGKAGAIIGAFGFLYAAQNQDKSKTDAGYPAGIGVRNSLFVLAASNMLGFVLTFLVPESKGKSLEEMSGEAEDSEEEPVGARAVRPSETQMV

SEQ ID NO: 11284 - protein, 549 aa, Zea mays
  unsure (1)..(549): unsure at all Xaa locations
MARGXXRRACRSLSALDAAKTQWYHFTAIIVAGMGFFTDAYDLFCISLVTKLLGRIYYTDTSKDSPGSLPPNVAAAVNGXVAFCGTLAGQLFFGWLGDKLGRKSVYGMTLMVMVICSVASGLSFGHTPTGVMATLCFFRFWLGFGIGGDYPXLSATIMSEYANKRTRGXAFIAAVFAMQGLXGILAXGGIVTLVISAAFRAAYPAPAYRDDHFTSTVPXQADIVWRVIVMLGAAPALLTYYWRMKMPXETARYTALVAKNAKQAAADMSKVLHTEIVDEQEKLXXAAEGANSFGLFSREFARRHGLHLVGTATTWFLLDIAFYSQNLFQKDIFTSINWIPKANTMSALEEVYRISRAQTLIALCGTVPGYWFTVALIDVVGRFAIQLLGFFMMTVFMLGLAIPYHHWTTPGNHIGFVVMYAFTFFFANFGPNSTTFIVPAEIFPARLRSTCHGISAASGKAGAIIGAFGFLYAAQNQDRSKTDAGYPAGIGVRNSLFVLAASNMLGFVLTFLVPESKGKSLEEMSGEAEDSEEEPVGARAVRPSETQMV

SEQ ID NO: 11285 - protein, 552 aa, Zea mays
  unsure (1)..(552): unsure at all Xaa locations
MARARGRXLQVLSALDAAKTQWYHFTAIIVAGMGFFTDAYDLFCISLVTKLLGRIYYTDTSKDNPGSLPPNVXAAAVNGVAFCGTLAGQLFFGWLGDKLGRKSVYGMTLMLMVICSVASGXLSFGHTPTGXVMATLCFFRFWLGFXASGGDYPLSATIMSEYANKKTRGAFIAAVFAMQGFGILAXGGIVTLVISARXFRAGYPAPAXYRDDHFNSTVPQADYVWRIILILGARXPAMLTYYWRMKMPETARYTALVAKNAKQAAADMSRVLQTEIVDEQEKLDEMVTAESNTFGLFSREFARRHGLHLVGTSTTWFLLDIAFYSQNLFQKDIFTSINWXIPKANTMSALEEVFRISRAQTLIALCGTVPGYWFTVALIDVVGRFAIQLLGFFMMTVFMLGLAIPYHHWTTPGNHIGFVVMYAFTFFFANFGPNSTTFIVPAEIFPARLRSTCHGISAASGKAGAIIGAFGFLYAAQNQDKSKADAGYPAGIGVRNSLFVLAASNLLGFILTFLVPESKGKSLEEMSGEADDAEDXXAVGTRAVRPSGTQMV

SEQ ID NO: 11286 - protein, 577 aa, Zea mays
  unsure (1)..(577): unsure at all Xaa locations
MPSEYLLVSAEPSASMTAKEVKFSEAMSSMPRRWRPRVRGRVGGRVGGAAMAAGDLEVLTALDTAKTQWYHFTAIVVAGMGFFTDAYDLFCISLVTKLLGRIYYTVEGSATPGTLPPHVSASVNGVAFVGTLSGQLFFGWLGDKLGRKKVYGMTLMLMVLCSVASGLSFGHTPASVMATLCFFRFWLGFGIGGDYPLSATIMSEYANKKTRGAFIAAVFAMQGFGIMAGGLVAIVVSAWFKASFPAPAYAVDPAASTPPQADFVWRIILMLGAMPAALTYYWRTKMPETVEISAGAAEEGAAAATATAXLSLRXASASASFGLFSGEFLRRHGLHLLGTSSTWFLLDIAFYSQNLFQKDIFSAVGWIPKAATMNALEELFSIARAQSLIALCGTVPGYWFTVALVDVLGRFAIQVTGFLMMTVFMLGLAVPYEHWTTPGHHIGFIVMYGLTFFFANFGPNATTFIVPAEIFPARLRSTCHGISAASGKLGAIIGSFGFLYLAQNRDPAKTDHGYPAGIGVRNSLFLLAGCNLLGLAFTFLVPESKGKSLEEMSGDDEAAALEDPSLRTRACDVIALL

SEQ ID NO: 11287 - protein, 531 aa, Zea mays
  unsure (1)..(531): unsure at all Xaa locations
MAMAGGQNMQVLSALDGAKTQRYHFTAIVVAGMGFFTDAYDLFCISLVTKLIGRIYYTVDGSPRPGSLPPHVSAAVNGVAFVGTLSGQLFFGWLGDRVGRKSVYGMTLLTMVVCSVASGLSFGRSPACVMATLCFFRFWLGFGIGGDYPLSATIMSEYANKRTRGAFVAAVFAMQGFGILAGGAVAIGVTALFRSRFPAPPYDVDPAASTPAEADLVWRIILMFGAVPAALTFYSRMKMPETARYTALVARNAERAAADMSRVLQVDITGTEARLRGEQEEATTGPPFGLFSREFAHRHGLHLVGTASTWLLLDIAYYSQNLFQKDIFSAVGWIPAAETISALDELFHIARAQTLIALCGTVPGYWFTVAFIDIVGRFAIQAVGFLMMTAFMLGLAVPYRQWTRPGNQTGFVVMYALTFFFANFGPNATTFIVPAEIYPARLRATCHGISAASGKVGAIIGSFGFLYLAQSQDPAKXXAHGYAPGIGVRNSLLLLAGCSFLGFLLTFLVPEPKGKSLEEMSRETEPGAAEP

SEQ ID NO: 11288 - protein, 550 aa, Zea mays
  unsure (1)..(550): unsure at all Xaa locations
MALEKLQVLHALDVADTQRYHVRAVVIAGMGFFADAYDLFCITLVTKLLGRIYYHVPGREEPGRLPPRLEAAINGVTFCGMIVGQLLFGWLGDKVGRKKFYGKTIMLMIMGSFLSGLSFGNSADGVMATLCFFRFWLGVGIGGDYPLSATIMSEYANKRTRGSFVAAVFAMEGFGVLAGCIVTLVVSATFQARFSAPAYEEDPAASTPPQADYAWRIVLMVGAIPACFTYHWRMRMPETARYTALVARDADKAARDMSRVLQVDITGEPDKVENITRDRGDYGAFSRRFARRHGAHLAGAVACWFVLDVVFYSQNILQEGIFSDVNWVPRARTMSALEETYRVGRAHAIIALCGTLPGYWFTIAFVDVVGRKAIQFLGFAMMMGFMLLIAAFYDSLISPGRRIWLVLMYTFTFFFANFGPNSTTFILPAEIFPAHLRTTCHGISAAAGKVGAIVGTFGFMYAAQKADGSEAAAGYPSGIGVRASLFVLAASNALGILFTCFLPEPKGRSLEEVCGEGAXXPTIRDDTDVGDSKILPLXMSIFIFVTGAHG

SEQ ID NO: 11289 - protein, 579 aa, Zea mays
VCTGSHATRTPALHCRRACVTGRGEMTAPGGSNLAVLDALDSARTQMYHMKAIVIAGMGFFTDAYDLFCISTVSKLLGRIYYPDDNLYIDKPKPGTLPVSVNNMVTGVALVGTLMGQLVFGYFGDKLGRKRVYGITLVLMAACAIGSGLSFGSSAHAVIGTLCFFRFWLGFGIGGDYPLSATIMSEYSNKKTRGAFIAAVFAMQGVGIIFAGLVSMIVSGILLHYHPAPAWKENHDRSWQDQMPAADYMWRIVLMIGAFPALATFYWRMKMPETARYTALIEGNAKQAANDMQKVMDVEIQAEQDKLARYKAANDYPLLSREFARRHGLHLIGTATTWFLLDIAFYSQNLTQKDIFPAIKLTSPVDDINALKEVFEISKAMFLVALLGTFPGYWVTVALIDKMGRYLIQLIGFFMMSVFMLLMGVMYNDLKNKHTTLFALFYALTFFFANFGPNSTTFVLPAELFPTRVRSTCHAISAASGKAGAIVAAFGVQSLTLKGDVGHIKKALIILSVTNILGFFFTFLVPETMGRSLEEISGEDGNVENGPGAPAGVAMGVADVSKDDKMPVSSTEWQSSMHA

SEQ ID NO: 11290 - protein, 423 aa, Zea mays
  unsure (1)..(423): unsure at all Xaa locations
XGLSFGHTPKGVIATLCFFRFWLGFGIGGDYPLSATIMSEYANKKTRGAFIAAVFAMQGFGILFGTIVAIVVSAAFRNAFPAPPYFVDAQASLVPEADYVWRVILMFGTVPAALTYYWRMKMPETARYTALIARNTKQATADMAKVLKKEIEAEEEQVERQVVGADTWGLFSAQFLRRHGLHLLATSSTWFLLDIAFYSQNLFQKDIFTKVGWIPPARTMNAIEEVYRISRAQALIALCGTIPGYWFTVGLIDIVGRFWIQIMGFFMMTVFMLALGVPYEHWTKASNHTGFVVLYGLTFFFANFGPNSTTFIVPAEIFPARLRSTCHGISAAAGKAGAIIGAFGFLYAAQDPKKPDHGYSPGIGIRNTLFVLAGTNFLGMLMSVFVPESKGMSLEEISKENVDDEADAEVXRDRLHLCVQMHM

SEQ ID NO: 11291 - protein, 470 aa, Zea mays
  unsure (1)..(470): unsure at all Xaa locations
LGQQLRVLHALDVARTQLYHFMATAIAGMGFFTDAYDFFAISLVMDLISYLYYEEQIDRGVKATINGIALCGAVPGQLVFGWLGDKMGRKRIYGVTLLLMPLLLPLLAWLRHXGGDYPLSATIMSEYANKRRRGAFIAAVFAMQGFGNLAAGIVAVVVSASFLKTNPRRNDFVWRIVLMLGAVPAIFTYYWRMKMPETARYTALVAKDARKAASEMSSVLNMEIGQEDEAVRELVRQDEYGLFSVQFLRCHGTHLLATSVCWLAVDITFYSLNLYMKDIFVDVGLIDPXXEKSDLFKRMTVSTLLHMAIAFGGTLPGYFFTVAFVDRIGRVRIQLLGFTMMAALTASLAATYDPYWKQQNKIGFAVLYGLTNFFTNFGPNTTTFIVPAEIFPTRMRATCHGIAGAFGKIGAIIGVFGFMFTMEEHHVAPRALWALFASNLVGLVFTFLLPDSKGKSLEEMTGETEEQQGX

SEQ ID NO: 11292 - protein, 361 aa, Zea mays
  unsure (1)..(361): unsure at all Xaa locations
XSIEAVAAAAGYDLFCISLVAIVVSASFKARFPAPAYAVDPAGSTPPQADFVWRIILMLGAMPAALTYYWRTKMPETARYTALVAKNAKQAAADMSKVLQVVSRRRRGGRRGCDCDXAXRRPFGLFSGEFLRRHGLHLLGTSSTWFLLDIAFYSQNLFQKDIFSAVGWIPKAATMNALEELFSIARAQSLIALCGTVPGYWFTVALIDVLGRFAIQVTGFLMMTVFMLGLAVPYEHWTTPGHHIGFIVMYGLTFFFANFGPNATTFIVPAEIFPARLRSTCHGISAASGKLGAIIGSFGFLYLAQNRDPAKTDHGYPAGIGVRNSLFLLAGCNLLGLAFTFLVPESKGKSLEEMSGENDEX

SEQ ID NO: 11293 - protein, 360 aa, Zea mays
  unsure (1)..(360): unsure at all Xaa locations
XVISAAFRAAYPSPAYRDDHFTSTVPQADFVWRVILMLGAAPALLTYYWRMKMPETARYTALVAKNAKQAAADMSKVLHTEILDEQEKLDGMVAAEGANSFGLFSREFARRHGLHLVGTATTWFLLDIAFYSQNLFQKDIFTSINWIPKANTMSALEEVYRISRAQTLIALCGTVPGYWFTVALIDVVGRFAIQLLGFFMMTVFMLGLAIPYHHWTTPGNHIGFVVMYAFTFFFANFGXPNSTTFIVPAEIFPARLRSTCHGISAAXSGKAGAIIGAFGFLYAAQNQDKSKTDAGYPAGXIGVRNSLFVLAATTWLGFVLTFLVPESKGKSLEEMSGEAEDSEEEPVGARAVRPSETQMV

SEQ ID NO: 11294 - protein, 305 aa, Zea mays
  unsure (1)..(305): unsure at all Xaa locations
XAGLLMPGAMPAALTYYWXRTKMPETARYTALVAKNAKQAAADMSKVLQVEISAGAPEEDGRRRXFGLFSGEFLRRHGLHLLGTSSTWFLLDIAFYSQNLFQKDIFSAVGWIPKAATMNALEELFSIARAQSLIALCGTVPGYWFTVALIDVLGRFAIQVTGFLMMTVFMLGLAVPYEHWTTPGHHIGFIVMYGLTFFFANFGPNATTFIVPAEIFPARLRSTCHGISAASGKLGAIVGSFGFLYLAQNRDPAKTDHGYPAGIGVRNSLFLLAGCNLLGLAFTFLVPESKGKSLEEMSGENDEAA

SEQ ID NO: 11295 - protein, 50 aa, Thinopyrum elongatum
MALIDRIGRFWIQLGGFFFMAVFMLGLAFPYHHWTTPGNHIGFVVLYVLT

SEQ ID NO: 11296 - protein, 466 aa, Acinetobacter calcoaceticus
MSREINVNQMIDDSKLTPFHWRVIILSTLIIIFDGYDLVIYGVALPLLMKEWAIDPVTAGFIGSIALFGMMFGALIFGTIADKLEHLGVSRKKVIAVCIILFSLCTVLCGFSETTTQFSIFRFLAGVGIGGVMPNVIALVSEYAPKKFKSFFVTLMFSGYAIGGMTAAFLGSILVPLYGWKIMFMIAGIPLVLLLPLMEVLPESIDYLVRKKKDETVRFIMTKMVPSYQYQPDHVFVLNSSNQNQAQAPVKMIFQEQRAFSTMMFWCSIFMTLIMVYALGNWLPKLMIEAGYNLSKSLIFLFSLNVGGMIGSILGGYLADRYNVKFVTMGLLLLGAISLSLLSFQFSSVILYILIACAGAASIGAQIMLLAYMAKFYAPNVRSTGIGWGLGMGRVGAILGPILTGWLLSLQLPHFYNFLALSIPAVLGIVTVFLINDRRMYQPEPISPIANQNDTTTVKVNEAVSH

SEQ ID NO: 11297 - protein, 465 aa, Pseudomonas straminea
MTSQTSKQNTDPTVVNVQTVLNESPFSGFQWGIFFLCFLIVLLDGFDTAAIGFIAPSLLGEWGIDKSHLGPVLSAALFGLAFGALGAGPLADRVGRKTVLIIAAVVMGGASIASGLVHDLQGLTIWRFITGLGLGAAMPNAITLMNEYCPDSKRSFITNCMFCGFPIGSAFGGFIAAWMIPHFGWRSLLIVGGVVPLILAVLMIVMLPESVRFMVLKNYSADRVRKVMVRIAAGTRNAARFVLNDGGAAAAQAQQGPQGLRLVFSQKYLVGTLALWVTYFMGLVIVYGLVNWMPVLFKEAGVPASQAAVIAALFQLGGVGAIFVGLLMDRWNANLIIAAGYFLTSLGVAFIGQVLGGGVGMLVASVFIAGLLMNAAQSSMQALAAEYYPTECRASGVSWMLGIGRFGGIAGSFLVAELSRRHLELPQVFMVVAIPGVIAALALLVKNRYAGGAPRTSMLGLGGAH

SEQ ID NO: 11298 - protein, 521 aa, Glomus intraradices
MSTSDRVTIDVDKRRAALKEIDDAKFGWQHIRACLVAGTGFFMDAYDLFAINFASTMIGYVYYGGKTPANIDLGLKVSGSIGTLLGQLFFGYLADRLGRKKMYGVELMIIIVATVASSLAGQSRAVTVVGIIMFWRVVMGVGIGGDYPLSAIITSEFATKKRRGAMMASVFAMQGFGILGSAIVALIVLAAFRSAIIADVSAVDYCWRIVLGCGAIPGIAALYFRLTIPETPRYTMDVEHDVNKATSDVANYLQKTDTTDENDGPGNHVGVPKASWSDFTSYFGKWKNGKVLLGTSMSWFALDIAFYGIGLNNGIILSAIGYADTHDADFNLRAYNSLKNMALGNIIITIMGTVPGYWVTVAFVDKWGRKPIQIMGFAVLTVLFIVMGAAFNPLKEHSIPAFIVLFTLLQFFQNFGPNTTTFIVPGEVFPTRYRSTGHGISAASGKLGAIVAQVGFSKLKDIGGPNAFVGQLLLIFAAWMFIGGLFSILIPETKGLSLEELANEDHDFNVEERKERVKAEA

SEQ ID NO: 11299 - protein, 396 aa, Glomus intraradices
VTVVGIIMFWRVVMGVGIGGDYPLSAIITSEFATKKRRGAMMASVFAMQGFGILGSAIVALIVLAAFRSAIIADVSAVDYCWRIVLGCGAIPGIAALYFRLTIPETPRYTMDVEHDVNKATSDVANYLQKTDTTDENDGPGNHVGVPKASWSDFTSYFGKWKNGKVLLGTSMSWFALDIAFYGIGLNNGIILSAIGYADTHDADFNLRAYNSLKNMALGNIIITIMGTVPGYWVTVAFVDKWGRKPIQIMGFAVLTVLFIVMGAAFNPLKEHSIPAFIVLFTLLQFFQNFGPNTTTFIVPGEVFPTRYRSTGHGISAASGKLGAIVAQVGFSKLKDIGGPNAFVGQLLLIFAAWMFIGGLFSILIPETKGLSLEELANEDHDFNVEERKERVKAEA

SEQ ID NO: 11300 - protein, 544 aa, Novosphingobium aromaticivorans
MCVNASVTKNDAAKPSASDIRLVIAASSAGTVFEWYDFFIYGTLASIIGRTFFPSDNATLQVLLVWAGFAVGFGFRPLGAVLFGYLGDKLGRKYTFLVTVTLMGVATAGVGLIPSAATIGLAAPAIVILLRVLQGLALGGEYGGAAIYVAEHAPGGRRGYYTSYIQASVVGGFVLSLIVVLSSKALMSDAVWNDWGWRVPFLVSLALLAISLWMRMKLSESPVFQAMKEEGELAGNPFVESFTYPGNKRRIFIALFGIAAGLTVIWYTAMFSGLSFLKSAMRMEDTLAEVVVGIGATLGMGFFIYFGSLSDRIGRKKPIIIGYAVTLLMLFPTFWLMGAAANPQLAEAAERNPVVVAGPDCNYSPFASEQVSNCGKLLADLAASGVSYSLRDDAVFGMTAGGSAVDLASYPWTDKAAARAKALQSELSAHGYDFAKVQPSLGRIVAVIGALLALMAMSGATYGPVAALLSEMFPPRIRYSSMSIPYHLGTGYFGGFLPLISSYIVARTGDPYAGLWYTWVVVLVALLVAAWGLRPGLPADFTDD

SEQ ID NO: 11301 - protein, 572 aa, Schizosaccharomyces pombe
MAFGSKILNIGSKSDEYNDDAVPLDQVEEGAQERRYYLGLTKREFKLMMLAGVGFFLDSYDLFIINLVTPIFEYLYWGGIEKGPTGKGHYPSGIRGLVNASANIGNIFGQLLFGFMGDFFGRKFVYGKEMVIVIIATVLVIAMPKSIHSPLSKMMWVFCWRWLLGVGIGGDYPMSAAITSERSKIKRRGTLISLIFAFQGFGTLAGAIVTIILLGCFEHPLNREGHYHKLEGVWRLQFGLALVPAIGVLIPRLIMKESKSYENSKALNSAEGKDPKAFFNTDDEDNMKKSSSHGDSEVVEASDRYANQADAADAEVDNIEKQFAAVTTPENSSGFITYFRQWRHFKHLLGTSVCWFLLDIAFYGVNLNQSVILKNIGFSTGTNEYRTLMKNAIGNLIIAVAGYVPGYWFNVFLVEILGRKWIQLQGFVITGLMFAILAGRWNEISTGGRFACFVIAQLFSNFGPNSTTFIYPAEVFPARVRGTAHGVSAALGKCGAILASLLFNFLTGVIGYGNVMWIFCGCMWGGILFTLLLPETKGRDADEIDRLELFYGKDGKVQCDSKWKSWYFNGIF

SEQ ID NO: 11302 - protein, 573 aa, Schizosaccharomyces pombe
MKLNIFKSHGDSNTAEERPVPLEQVEAEDQQHENRFWLGLTAKEFRLMMLAGVGFFLDSYDLFIINLVTPIFEYLYWGGIEKGPNGKGHYPSGIRGLVNAASNIGNIFGQLMFGFMGDFFGRKFVYGKEMIIVIIATILLIAMPKSIHSPLSKMMWVFCWRWLLGVGIGGDYPMSAAITSERSKLNRRGTLISLIFAFQGFGTLAGAIVTIILLGCFEHPLNREGHYRKLEGVWRLQFGLALVPAIGVLIPRLMMEETQKFKNSQQLNSGDNRDPKTSLNFEDDELVKNPSVTKGHPEIHESSENYLSRSNTVENEPENIEKQFESVSAPANRSGFIQYFRQWHHFKHLLGTSVCWFLLDIAFYGVNLNQSVILKNIGFSSGTNEYRTLMKNAIGNLIIAVAGYVPGYWFNVFLVEILGRKWIQLQGFVITGLMFAILAGRWNEISTGGRFACFVIAQLFSNFGPNSTTFIYPAEVFPARVRGTAHGISAALGKCGAILASLLFNFLTSIIGYGNVMWIFCGCMWGGILFTLLLPETKGRDADEIDRVELFYGGDGKVECNSKWKSWYVNGIF

SEQ ID NO: 11303 - protein, 559 aa, Schizosaccharomyces pombe
MNRLNPFSKSHSKNSNENNEVSLADVAESDTRRHWLGLTKREFKLMGFAGAGFFLDSYDLFIINLVSPIYEYLYWGGLEGKKPHYPSGIHGLVNAAANIGNVFGQILFGFMGDFFGRKFVYGKEMIVVIIATVLVIALPKSIPTPLGKMMWIFAWRWLLGLGIGGDYPMSATITSERSLLSRRGTLLSIVFSFQGFGTLAGAIVTIILLACFEKPLNQRGEYTKLEGVWRLQMGLALVPALLVLIPRLTMKESKSYEQSKALNKYTDNDTYIADDDEPKKDNQNVVEEKQINLTTSSDSHPTSTEDFGDKRASTVPTSENTSGFIEYFSQWHHFKHLLATAVSWFLLDIAFYGVNLNQSVILKAIGFSSGKNEYHTLMRGAIGNLIIAIAGYVPGYWFTVFLVEKLGRKWIQLQGLFITGLMFAILAGSWDTISTGGRFACFVIAQFFSNFGPNATTFLYPAEVFPARVRGTAHGLSAALGKCGAILASLLFNFLTSVIGYGNVMWIFCGCMWGAIFFTLLLPETKMRDADEIDREEVLRGGNGKTHQGRWSWYFNGIF

SEQ ID NO: 11304 - protein, 583 aa, Schizosaccharomyces pombe
MGFKLNPFSKKPKDEEPLPLEQYEASEQKILGLVTKKEAKLLAIAGTGFLLDSYDLFIINLVSPILAYLYWGGLTGHQDYPSGIRGVVNAATNIGNIMGQLLFGFLGDFFGRKFVYGKEMMVVIIATILIICLPDRIPTPTAKMMWLFAFRVMLGIGIGGDYPMSASITSEQSLINRRGALLAWIFSNQGWGTLAGCVATLIILACFEKPLNDRGEYTKLNGVWRIQFGIALFPAVIVLIPRLRMQESEQFKNSKNMKSPGEGDLDSASQIELHDFKKKESLTAEFTTSSPSTASLSDKKNPGSVHIRPNNEVAPSSAPSRAPSTTSVESNTEGKESDIQTGSSFVSYFKEWRHAKLLIGSALSWFLLDIAFYGINLNQSVILQEMGFNKGVNEYHILQKNAIGNLIIAVAGYIPGYWVSVVLIEVMGRKWIQIQGFLICCLLFGVLAGTWETISTGGRFACVALAQFFFNFGPNTTCFVIPAEVFPSRVRAFSHGICAACGKAGAILSALLFNKLTEVIGFGNVLWIFFGCMVAGAVVTLILPETANRDADLIDRLEIAAMQQGRTSIIDRSEKWAWWKHGI

SEQ ID NO: 11305 - protein, 274 aa, Schizosaccharomyces pombe
MAFGSKILNIGSKSDEYNDDAVPLDQVEEGAQERRYYLGLTKREFKLMMLAGVGFFLDSYDLFIINLVTPIFEYLYWGGIEKGPTGKGHYPSGIRGLVNASANIGNIFGQLLFGFMGDFFGRKFVYGKEMVIVIIATVLVIAMPKSIHSPLSKMMWVFCWRWLLGVGIGGDYPMSAAITSERSKIKRRGTLISLIFAFQGFGTLAGAIVTIILLGCFEHPLNREGHYHKLEGVWRLQFGLALVPAIGVLIPRLIMKESKSYENSKALNSAEGKD

SEQ ID NO: 11306 - protein, 543 aa, Schizosaccharomyces pombe
MSGGWDESKYVDNGEDEVVRQVSEPSVEEPIEASVTRYRSDEEKLDDKSSGAHVTEKEAEFDIEGGSRETSQWKHFLNVAVAGVALMSDGYCSNSIGTVITILRKLYPEETTHNKSLQDIGMIAYVGTIVGQLSFGWYSDRFGRKNGMITATIILIVSTALCTGAYGYKGSINGMLSALIAYRFFLGIGIGAEYPCGSVAASESSNELKSGLRHAAFIVVTDGAIDFGFVVGALVPYILVCIFGEHHLRIVWRLSIGLGLVIPCVLLPFRIAMKDPKTYVKHKVPLTKIPWLLVLKMYGFRLFILCLIWFVYDLSAFAFGLYSSTIVDGVLPADASTARSFGWNVLINTFYLPGALLGGVFSDLLGPKYCLITGLVLQSIFGFFMSGFYNQLVHKIAGFCVIYGIFLTLGEFGPGGNIGLLASKTSPTAIRGVYYGIAAAIGKCGAIAGVYAFGGDQVRNYFYAASAMAIFVAVLALLFVPKLKQTCIEDEDKRFIQACIDAGYGNPYNYEKNEPEQLEEPDRPPAFNPFLSATFSFHHIILC

SEQ ID NO: 11307 - protein, 208 aa, Schizosaccharomyces pombe
LGTPIFEYLYWGGIEKGPNGKGHYPSGIRGLVNAASNIGNIFGQLMFGFMGDFFGRKFVYGKEMIIVIIATILLIAMPKSIHSPLSKMMWVFCWRWLLGVGIGGDYPMSAAITSERSKLNRRGTLISLIFAFQGFGTLAGAIVTIILLGCFEHPLNREGHYRKLEGVWRLQFGLALVPAIGVLIPRLMMEETQKFKNSQQLNSGDNRD

SEQ ID NO: 11308 - protein, 195 aa, Schizosaccharomyces pombe
NQRGEYTKLEGVWRLQMGLALVPALLVLIPRLTMKESKSYEQSKALNKYTDNDTYIADDDEPKKDNQNVVEEKQINLTTSSDSHPTSTEDFGDKRASTVPTSENTSGFIEYFSQWHHFKHLLATAVSWFLLDIAFYGVNLNQSVILKAIGFSSGKNEYHTLMRGAIGNLIIAIAGYVPGYWFTVFLVEKLGRKWI

SEQ ID NO: 11309 - protein, 554 aa, Schizosaccharomyces pombe
MSSSIPPRLYDMSPTESKKQEDVSETELVYPVELADATIQPSKSDDDLFDSNDFSKTYLAKSRILSNAMNEIGFGRYQWYLFFVAGFGWMSDNIWPVCTSLILMRLDEVDGPHPPAEGRAPYLTLSQNLGLLVGAMVWSLSADTIGRRWAFNLTFLFTGVFAVIAGASPNFASICVFDALWSFGVGGNLPVDSAIFLEALPSSHQWLLTVMSFWWAIGQVIANLVSWGLISNFSCPDDESVCHRADNKGWRYFLFTMGGMTLLMFAARFLVSVYESPKFYLAKGDDYKAVETIHKIARINGKTCTLTVEELYAIDRQEQEESDLDDSKSSDAKSVTQGTTNLIVEKLRKYNFEHIRQCFGSRKLAISSILVILSWAVIGLAFPLYNAFLPYYLETRGNANEPLSVAKTYRNSLIVSAIGVPGSLIAGVLVEFRIGRKGTLCLSLILTGVFLFASTTAKTSNAYLGWNCTFSFFSDIMYGVLYAYTPEVFPSKVRGTAVGLAASANRILGIFSPVIAMRANLTTSAPIFVSGALFIFAGILVVFFPYEPRGKSSF

SEQ ID NO: 11310 - protein, 587 aa, Saccharomyces cerevisiae
MSSVNKDTIHVAERSLHKEHLTEGGNMAFHNHLNDFAHIEDPLERRRLALESIDDEGFGWQQVKTISIAGVGFLTDSYDIFAINLGITMMSYVYWHGSMPGPSQTLLKVSTSVGTVIGQFGFGTLADIVGRKRIYGMELIIMIVCTILQTTVAHSPAINFVAVLTFYRIVMGIGIGGDYPLSSIITSEFATTKWRGAIMGAVFANQAWGQISGGIIALILVAAYKGELEYANSGAECDARCQKACDQMWRILIGLGTVLGLACLYFRLTIPESPRYQLDVNAKLELAAAAQEQDGEKKIHDTSDEDMAINGLERASTAVESLDNHPPKASFKDFCRHFGQWKYGKILLGTAGSWFTLDVAFYGLSLNSAVILQTIGYAGSKNVYKKLYDTAVGNLILICAGSLPGYWVSVFTVDIIGRKPIQLAGFIILTALFCVIGFAYHKLGDHGLLALYVICQFFQNFGPNTTTFIVPGECFPTRYRSTAHGISAASGKVGAIIAQTALGTLIDHNCARDGKPTNCWLPHVMEIFALFMLLGIFTTLLIPETKRKTLEEINELYHDEIDPATLNFRNKNNDIESSSPSQLQHEA

SEQ ID NO: 11311 - protein, 596 aa, Saccharomyces cerevisiae
MSSVNKDTIHVAERSLHKEHLTEGGNMAFHNHLNDFAHIEDPLERRRLALESIDDEGFGWQQVKTISIAGVGFLTDSYDIFAINLGITMMSYVYWHGSMPGPSQTLLKVSTSVGTVIGQFGFGTLADIVGRKRIYGMELIIMIVCTILQTTVAHSPAINFVAHSPAINFVAVLTFYRIVMGIGIGGDYPLSSIITSEFATTKWRGAIMGAVFANQAWGQISGGIIALILVAAYKGELEYANSGAECDARCQKACDQMWRILIGLGTVLGLACLYFRLTIPESPRYQLDVNAKLELAAAAQEQDGEKKIHDTSDEDMAINGLERASTAVESLDNHPPKASFKDFCRHFGQWKYGKILLGTAGYWFTLDVAFYGLSLNSAVILQTIGYAGSKNVYKKLYDTAVGNLILICAGSLPGYWVSVFTVDIIGRKPIQLAGFIILTALFCVIGFAYHKLGDHGLLALYVICQFFQNFGPNTTTFIVPGECFPTRYRSTAHGISAASGKVGAIIAQTALGTLIDHNCARDGKPTNCWLPHVMEIFALFMLLGIFTTLLIPETKRKTLEEINELYHDEIDPATLNFRNKNNDIESSSPSQLQHEA

SEQ ID NO: 11312 - protein, 518 aa, Saccharomyces cerevisiae
MEDKDITSVNEKEVNENTNPRIIKYDAERRATRTETSKKDKWKNIVTIIASGFALISDGYVNGSMSMLNKVFVMEYGKKNYSSKVSTRVSNAALVGIIFGQFFMGIAADYYSRKSCILVATAILVIGSALCAASHGTTVPGMFWMLTVMRGLVGIGVGAEYPTSTLSANESANEYTTTKRGGILVMVTNLPLAFGGPFATIIFLIVYKICSGTKHLEAIWRTVFAIGCFWPLSVFYFRWKTATTEVYEKGRIKRNIPYFLALKFYWKRLLGTCGTWFMYDFVTFPNGIFSSTIISSVIKDQNDLVKVAEWNLLLGVLAVLGVPIGAYLSDRIGRKYTLMFGFSGYIIFGLIIGCAYDQLKKITPLFIIFYAFMNMLGNAGPGDMLGVISSEASATAVRGVFYGLSAVTGKIGSVVGVECFQPIRDNLGARWTFIIAAICGLIGIIITYFFVPHSLESDLMKQDVEFHNYLVSNGWTGKMGFDETDEESMVRTIEVEENGTNCSKKNAEIISVRQVDQS

SEQ ID NO: 11313 - protein, 546 aa, Thermoplasma volcanium
MESEFPGKTIINHIIKINLWRYPFIILVLPQVKQRLESYLLHLIIYNIYRQYIHIYTTIYYLYNVYLKFNNLSFDMTTESKPELIESINDAKTSGFHYKTWIVSGLGFFTDAYDLFIIGVVTSILVLSGWNKFTTLQSSLLDSTALLSAVIGALIFGRLIDKLGRKTVYGLELIILIVGALGSAFLTPLNGVYVLIIWRFILGIGIGGDYATSSTIMAEYSNTAHRGKLVGMVFSMQSLGLLAGPLITLGLLYSGMSLSLVWKLLLAFGAIPALIVVYFRRKMPETPRYLLRVKGDAEAAVKNWEKYTGIEASADAQAEVIKKSWTQIIKQKEFLITLVGTAGAWFLMDWALYGNSIMSSSMLGVLVPSSVTGLDHLIRTTIYSAMIFGFAAFPGYWLATFTIDRIGRKTIQSIGFAAMALSFGILGVFHQLLSPSYIVQFLLLYGMSYFFINFGPNVTTFIYPPEVFPTKVRGLGAGASAAGGKIGAFVGTFLNAIILRSSIGESGLFMILALLAAFGLIITLVLLPEPKKLDLDESSGEKALLV

SEQ ID NO: 11314 - protein, 471 aa, Thermoplasma volcanium
MTTESKPELIESINDAKTSGFHYKTWIVSGLGFFTDAYDLFIIGVVTSILVLSGWNKFTTLQSSLLDSTALLSAVIGALIFGRLIDKLGRKTVYGLELIILIVGALGSAFLTPLNGVYVLIIWRFILGIGIGGDYATSSTIMAEYSNTAHRGKLVGMVFSMQSLGLLAGPLITLGLLYSGMSLSLVWKLLLAFGAIPALIVVYFRRKMPETPRYLLRVKGDAEAAVKNWEKYTGIEASADAQAEVIKKSWTQIIKQKEFLITLVGTAGAWFLMDWALYGNSIMSSSMLGVLVPSSVTGLDHLIRTTIYSAMIFGFAAFPGYWLATFTIDRIGRKTIQSIGFAAMALSFGILGVFHQLLSPSYIVQFLLLYGMSYFFINFGPNVTTFIYPPEVFPTKVRGLGAGASAAGGKIGAFVGTFLNAIILRSSIGESGLFMILALLAAFGLIITLVLLPEPKKLDLDESSGEKALLV

SEQ ID NO: 11315 - protein, 476 aa, Thermoplasma volcanium
MAKGIIEELDNSKINSFHLRTWLIAGMGFFTDAYDLFVIGTVISILPLAGWDKLNTYDISILSSISLLASVIGAVIFGRLLDALGRKRVYGFELMLLILGALGSAFVVPVNGINYLIAWRFILGLGIGGDYAGSSTIMTEFSNTKNRGQLVGMVFSLQGVGLIAGPLITLGLLSFIHNLDLVWRVLFFIGAVPAFIVLYGRRAIGETPRYALRVKGDASSAMQSVEKISGDSKVSVSREDLEMSNIKWTDLFKNRYFMLSLIGTAGTWFLLDWAFYGNSIMSHEMLSALIPSSMSGLNKLKLSTFYTLIIFAVSAFPAYWIATFTVDRIGRKRMQVIGFLIMGITFGILGIFRYLMSPTFVTYFLLVYGISYFFTEFGPNVTTFIYAPEMFPTAIRGLGSGISSAGGKTGAFIGTALNVIIFTLYGEGELFLILAGISMLGMLMTLVLLPETSRRKLEDISGEGRYIVRTASGFKK

SEQ ID NO: 11316 - protein, 465 aa, Thermoplasma volcanium
MFSDFDSKLTRFQIKTVIVSGIGIFSDSYNLYAIALVYYIAAFYLNLTPPESALMTSGAFIGAAIGAILFGLIADKIGRKPVYGLDLALITLGSFLQFFAVNFTLLLIFRIILGLGIGGDYVLSPIITAENANSRDRGKLMIMTFPIMAAFGAMLAAFVDQVSTILLPSSLVWKIVLAFGGVPALFVIYFRRKITETARYSAIVKGSSVDIMSIEKETGTKIEITRDTKTYSYRLKTSLVLVLISSVLWILYDMYSSTFAIYGPITIAKNLGLTPISFTYYAEIFAGIPGAIVSAMLIDKIGRKRLITIGYLGVFFWLLLYGLLLMKSPIFGSKILSGILPTGLVGEAAFAGFSFYIMNYLFSAMGPASIIGGAMVTPEITPTKARGTSQAITVGLDRTADALGLTAFPLLLARLGLPFLILGFSAIAILSIIIMNVGIPEARGKSLEEITGETADTGIRGSIGK

SEQ ID NO: 11317 - protein, 469 aa, Thermoplasma volcanium
MYIRLVQYPSTGSGTGCTNIGGIWMGFFDDMDRMGIRPFHRKIEILASMGMFLDGYDLSVITMAILLMPTQLHFGKLDYILVNVSAFIGMIIGAPLLGRLSDRIGRKKIFGIDLLLFVVFAITAGLATNFAMLFISRLMLGIGIGGDYPISSTMVSEFSPVSKRGTLLYGMVGMYWLGSFFSAVMNYTFAFTPYFWRYTFIVGGVIAIPIIFLRMRIPESPRWLIGHGMTKSAESVVEDLTGRKPDVEEGKAEAEQEESVKFSSLFSSKFLASTIFVLSVWFLFDVASYGIGFYYPTLIDKLGLASHVLNTAGLRAIAESSMIVAVGAILGYLVAMPLADRIGRRILTISGLFVMFLLLLLGSVVKISTLLPVVAFFFSFVLFEQWVGAATLFYPTELFPTNYRSTIQGIATSVSRVGAIMGIVVFPLYPVFHSIFIFAILMALALIISVIFAPETKKTPLEKIWKSKA

SEQ ID NO: 11318 - protein, 445 aa, Thermoplasma volcanium
MGFFDDMDRMGIRPFHRKIEILASMGMFLDGYDLSVITMAILLMPTQLHFGKLDYILVNVSAFIGMIIGAPLLGRLSDRIGRKKIFGIDLLLFVVFAITAGLATNFAMLFISRLMLGIGIGGDYPISSTMVSEFSPVSKRGTLLYGMVGMYWLGSFFSAVMNYTFAFTPYFWRYTFIVGGVIAIPIIFLRMRIPESPRWLIGHGMTKSAESVVEDLTGRKPDVEEGKAEAEQEESVKFSSLFSSKFLASTIFVLSVWFLFDVASYGIGFYYPTLIDKLGLASHVLNTAGLRAIAESSMIVAVGAILGYLVAMPLADRIGRRILTISGLFVMFLLLLLGSVVKISTLLPVVAFFFSFVLFEQWVGAATLFYPTELFPTNYRSTIQGIATSVSRVGAIMGIVVFPLYPVFHSIFIFAILMALALIISVIFAPETKKTPLEKIWKSKA

SEQ ID NO: 11319 - protein, 441 aa, Thermoplasma volcanium
MDYKTGYVQFDQIRITPIFVAVTVLSSMGVFMDGFALSIFSAALPYLKNYILVKSILVSLAASAIYIGMFVGSFVIGHLSDTIGRKRMYTYDLAITSLFLVLTGISRNFAEFFIFELLAGIGIGADYPLSSSIEAEFSPRVSRGRFLVFNIFMWTIGSIVFYLISIPLVGYFGSSSWRWMYFVGAIIPIAVIISRHALPESPYWLVKAGRKEAKKVAENIGKEAGTPNVDVPSVESGSSSIKSVFSGSYLPLIMFASIAWFAYDVSSYGVWNYTPSIFVSTGISVVSSIVSTLLEDLPVIAGFIVCLILIDRIGRRVLQAAGFGLAGISLLTFGLYSMHHTLPFILIFIAFAMMHLFHNIGPTNLTYVYPVEIFPTRVRGTAMGIATSASRIGAILGVFAFPLLIGTFSLSAGLLFFAIFEFLGFIVTVILAPETKATALK

SEQ ID NO: 11320 - protein, 487 aa, Gibberella fujikuroi
IVYYPGKGKLATSSDNAIKLSTSAGTVIGQLGFGMLADIVGRKRMYGLELIVIIFATLAQALTAGSPSTSLVGLIIFWRVVMGVGIGGDYPLSSIITSEFATTKWRGAMMAAVFAMQGIGQLVAALVMMFLTLGFKSSLEGAPDTKHCTGDCQVAVDKMWRTLVGFGAVPACIALYYRLTIPETPRYTFDVARDVEQADEDVKAYINGKREGDTDEVARAQVHASAKSNLQVPKASWSDFCQHYSKWKNLSILIGTAGSWFCLDVAFYGLSLNNGTILKVIGYSTKDANNMYEYLHNTAVGNIIIVLAGAVPGYWVSVATIDTLGRKTIQLGGFIILTILFIVMGFAYNHISSNGLLAIYVLAQFFFNFGPNTTTFIVPGEVFPTRYRSTSHGISAASGKIGSIIGQGAISILRTHGATDKNEAPWMDHVLEIYALFMLLGIFTTLLIPETARKTLEELSGEDDYANNPETTIDTEAHAGKNERTSG

SEQ ID NO: 11321 - protein, 527 aa, Neurospora crassa
MSTPQKTAGGNNAYHNFYNDFLHIKDPNERRRLALAEVDRAPFGWYHVRAVAVAGVGFFTDSYDIFTVSLLTLMLGILATSAGTVIGQVGFGAAADVFGRLGLRVTFHQHHRYHYLLACSYDYPLSSIITSEFATTKWRGAMMGAVFAMQGLGQLAAAFVMLFVTLGFKKSLEAAPTLASCTGDCAVAVDKMWRTVIGVGAVPGCIALYYRLTIPETPRYTFDVKRDVEQASDDIEAFKTGKPKGQPDEATRIVAKQEAEKEMEIPKASWGDFFRHYSKRKNAMLLAGTALSWCFLDIAYYGVSLNNATILNVIGYSTTGAKNTYEILYNTAVGNLIIVLAGAVPGYWVTVFTVDTVGRKPIQFMGFGILTILFVVMGFAYKHLSPHALLAIFVLAQFFFNFGPNATTFIVPGEVFPTRYRSTSHGLSAAMGKIGSIIGQGAIAPLRTRGAVKGGNPNPWMNHVLEIYALFMLLGVGTTFLIPETKRKTLEELSGEFDMSGEEEAQRDTTLTEHKTEAPTSSAAVNA

SEQ ID NO: 11322 - protein, 569 aa, Neurospora crassa
MSTPQKTAGGNNAYHNFYNDFLHIKDPNERRRLALAEVDRAPFGWYHVRAVAVAGVGFFTDSYDIFTVSLLTLMLGIVYFQAKARCLQPPTQPSSSQHRPARSLGRSASAPLLMSLVVRACTDWNCCSSSLPLSLRPWLRVTFHQHHRYHYLLACSYGGRYRWRLSSFQYITSEFATTKWRGAMMGAVFAMQGLGQLAAAFVMLFVTLGFKKSLEAAPTLASCTGDCAVAVDKMWRTVIGVGAVPGCIALYYRLTIPETPRYTFDVKRDVEQASDDIEAFKTGKPKGQPDEATRIVAKQEAEKEMEIPKASWGDFFRHYSKRKNAMLLAGTALSWCFLDIAYYGVSLNNATILNVIGYSTTGAKNTYEILYNTAVGNLIIVLAGAVPGYWVTVFTVDTVGRKPIQFMGFGILTILFVVMGFAYKHLSPHALLAIFVLAQFFFNFGPNATTFIVPGEVFPTRYRSTSHGLSAAMGKIGSIIGQGAIAPLRTRGAVKGGNPNPWMNHVLEIYALFMLLGVGTTFLIPETKRKTLEELSGEFDMSGEEEAQRDTTLTEHKTEAPTSSAAVNA

SEQ ID NO: 11323 - protein, 693 aa, Neurospora crassa
MDDDVMRPDTHHDPTPGLIPVPHGPATGDEALQLPFGHTPDPDHEKAIFGYLTQPDDIYTKDGTYWADLPLRERIAFVNKVQNEEAKQELKAIGRMMKKDPLSPVSWYFRNAVLPGAGLGLEGYVLFSIGNIEPLFKATWPQCWGHNATECSSNWIAAVTYLEVIGIMVGQLVVGVIGDWIGRRWGLIQDAAIMFVGLLMLTASWGFGVGGEYPITATSSMENSVASGKLSTRNDRLHRGRKVTTAFLMQGWGQLINQALLIILLLIFHAGSGSPPYGLATVQWTFRLSFAIPAVGTLWLVYYRTYKMPHASRQLIAAKKKTNVTGYDFDSLAMTTRHFGGRLLATAGCWFCNDVFFYGNKLFQAQFIAVISGGSSSVLTGWIWNLYNVIISLVGYYLASLLMDNRFYGRKMMQQVGFLMCFIMFVVPAFKLEYYTSPAGIKSFQAMYFLSSFFNQFGPNSVTFLVAGEVFPTPIRASAHGFSACCGKAGALLASVLYNYIDTQTKFYVVPWFGLAGMILTWLFLPDTTGLDLKEQERRWSYIRAGKPEDYHGIAIHPMHLSLWERLRGVGKHYNPELDHKQKIEDMREEWAGKERMRREKEVNGQNSMGDDLEVDDFNDQVHHYFRNTTDQGMFVNDGSAGPSTHSRSRNNSEPPFASGANSKEVTQEKIRPDSPSTTQTPSSTRPVSEKEQ

SEQ ID NO: 11324 - protein, 513 aa, Neurospora crassa
MFGFGQRKAEVKTTAQPVDQQRDANVDTLVNEGATVGKTNWKNLIPVIACGAGLFSDGYINNVIGSVVTILDREYQEVWRNSNAKKYVGDIAFAGTVVGMLLFGYLSDKWSRTNSLLVSTIILIIFAALAAGSYYKGDAVGMFNILTAWRFFVGLGIGGEYPAGSVGCAENTGELKSGQRNMWFILFTNSMIDWGFVIGAFVPYVVSAACHNGHLSTIWRTSLGIGVAFPLVLFVLRLFVSEPEEFQKNSMKNARTPYLLVLRFYGFRLFIVSLIWFIYDFSAYSFGIYSPKIVANIYPADSPLTTIFGWNTVINLFYIPGTMLGAPVSDLLGPRYALALGVFLQAIVGFIMAACYSSLAQPGRVAAFAVVYGIFQSLGELGPGNNIGLIAAKTCATGIRGQYYGLAAAVGKIGAFVGTWVFPYIEAAGGGDERLAAQYPFWVSSSLCVLSAVLVLFCLPHIGQDTIQAEDARFRAFLEENGYDTRQLGLRKGEEIGELGEAEGAEEVSIEKK

SEQ ID NO: 11325 - protein, 474 aa, Tetragenococcus halophilus
MKSHPLTLTQNIMNNKGLNRYVITITLIATLGGLLFGYDTAVISGAEQSIQNNLVNGVGLGSFAHGLTVSSALIGCVFGGLLSGIFSNNLGRRNSLKLAGSLFLISALGSAYPEFLFFQAGDASVGLLIVFNLYRVLGGIGVGMASGISPTYIGEIAPGKVRGSLVSWYQFAIIFGQLVVYFVNWGIATGQSPEWVNDIGWRFMFASEAIPAILFFALLFYVPETPRYLVLKNNEEKAFDVLSKINNSKEEAKDILTDIKGSLNTTETSGKLFSYGKTVVIVGVLLSIFQQFIGINVALYYAPRIFESMGAGQNASMVQTIIMGIVNVTFTYVAIRTVDKWGRRPLLLVGSIGMAIGMFAVALLAKNGVLGIWTLVFIIVYTASYMMSWGPIVWVLLSEIFPNKIRGQAMAFAVAAQWLSNFFISSTYPAMIDFSGPLTYGFYGLMCVISAIFVWKMVPETKGKTLEQLENTWL

SEQ ID NO: 11326 - protein, 479 aa, Zymomonas mobilis
MNNNSEIENDTQTNVRNTVSDFIGSQLYLLGTVLVTAIAGFLYGYDTGIISGALMNIAHDFKLDAHQQEIITSILLFGAVIGSLVCGRLSAFVGRRHMIMIVTAIFGFSVIAADAPTAFWLGAARLVLGFAVGGSSQIVPVYIAELAPADQRGRMVTFYNISIGLGILAAGIVGAFLQEEWTWRTMFSVAAIPAAVLFCSMMMLPESPRWLVRQERVEEARDMLDTVRETDHEVTKELRSIKKNQQPDEGSGSRWLESLAQPWVRPALIAGLGVAAFTQLSGIEMMIYYTPTFLRDSGFTEKMAYYSALGVALIYVIMTTIGKLLVDHVGRRKLALCMMPLAALSLFALGIAFNLPGGASEHRWLILACLFAFMVFNAGGIQVIGWLIGSEVYPLCIRARATSLHAATLWGSNLILTSTALTMTSLLGIGGSMWFYGGLNALGFVFVYFMVPETKGRSLEEIESSLKDGSFLPSKKASA

SEQ ID NO: 11327 - protein, 487 aa, Fusarium oxysporum
IVYYPGKGKLATSSDNAIKLSTSAGTVIGQLGFGMLADIVGRKRMYGLELIVIIFATLAQALTAGSPSTSLVGLIIFWRVVMGVGIGGDYPLSSIITSEFATTKWRGAMMAAVFAMQGIGQLVAALVMMFLTLGFKSSLESAPDTKHCTGDCQVAVDKMWRTLVGFGAVPACIALYYRLTIPETPRYTFDVARDVEQADEDVKAYMTGKREGDTDEIARAQVHASAKSNLQVPKASWSDFCQHYSKWKNLSILIGTAGSWFCLDVAFYGLSLNNGTILKVIGYSSKDANNMYEFLYNTAVGNIIIVLAGAVPGYWVSVATIDTLGRKTIQLGGFIILTILFIVMGFAYNHISSNGLLAIYVLAQFFFNFGPNTTTFIVPGEVFPTRYRSTSHGIFAASGKIGSIIGQGAISILRTHGATDKNEAPWMDHVLEIYALFMLLGIFTTLLIPETARKTLEELSGEDDYANNPETTIDSEAHAGKNEGTSV

SEQ ID NO: 11328 - protein, 150 aa, Fusarium culmorum
WRVIMGVGIGGDYPLSSIITSEFATTKWRGAMMAAVFAMQGIGQLVAALVMMFLTLGFKSSLEQAADTKSCTGDCQIAVDKMWRTLVGFGAVPACIALYYRLTIPETPRYTFDVARDVEQADEDVKAYINGKSEGNTDEVSRAQNLQSAK

SEQ ID NO: 11329 - protein, 568 aa, Gibberella zeae
MAQEARPVAKTSGGNNAFHNFHNDFAHIADPNERRRLALAEIDKAPFGWYHVRACIVAGVGFFTDSYDIFCVSMLTIMLGIVYYPGKGKLPTSSDNAIKLSTSAGTVIGQFGFGMLADIVGRKRMYGLELIVTIFATLAQALTAGSPSTSLVGLIIFWRVIMGVGIGGDYPLSSIITSEFATTKWRGAMMAAVFAMQGIGQLVAALVMMFLTLGFKSSLEQAADTKSCTGDCQIAVDKMWRTLVGFGAVPACIALYYRLTIPETPRYTFDVARDVEQADEDVKAYINGKSEGNTDEVTRAQNLQSAKTNLEVPKASWRDFFQHYSKWKNASLLLGTAGSWFCLDVAFYGLSLNNGTILKVIGYSTKDATNVYEFLHNTAVGNIIIVLAGAVPGYWVSVATIDTLGRKTIQLGGFIILTILFIVMGFAYNHIPSNGLLAIYVLAQFFFNFGPNTTTFIVPGEVFPTRYRSTSHGISAASGKIGSIIGQGAISILRTHGATDKNEAPWMDHVLEIYALFMLLGIFTTLLIPETARKTLEELSGEDDYANHDHALESETQASHDKARRTSV

SEQ ID NO: 11330 - protein, 150 aa, Gibberella zeae
WRVIMGVGIGGDYPLSSIITSEFATTKWRGAMMAAVFAMQGIGQLVAALVMMFLTIGFKSSLEQAADTKSCTGDCQIAVDKMWRTLVGFGAVPACIALYYRLTIPETPRYTFDVARDVEQADEDVKAYINGKSEGNTDEVTRAQNLQSAK

SEQ ID NO: 11331 - protein, 150 aa, Gibberella zeae
WRVIMGVGIGGDYPLSSIITSEFATTKWRGAMMAAVFAMQGIGQLVAALVMMFLTLGFKSSLEQAADTKSCTGDCQIAVDKMWRTLVGFGAVPACIALYYRLTIPETPRYTFDVARDVEQADEDVKAYINGKSEGNTDEVTRAQNLQSAK

SEQ ID NO: 11332 - protein, 150 aa, Gibberella zeae
WRVIMGVGIGGDYPLSSIITSEFATTKWRGAMMAAVFAMQGIGQLVAALVMMFLTLGFKSSLEQAADTKSCTGDCQIAVDKMWRTLVGFGAVPACIALYYRLTIPETPRYTFDVARDVEQADEDVKAYINGRSEGNTDEVTRAQNLQSAK

SEQ ID NO: 11333 - protein, 149 aa, Gibberella zeae
RVIMGVGIGGDYPLSSIITSEFATTKWRGAMMAAVFAMQGIGQLVAALVMMFLTLGFKSSLEQAADTKSCTGDCQIAVDKMWRTLVGFGAVPACIALYYRLTIPETPRYTFDVARDVEQADEDVKAYINGKSEGNTDEVTRAQNLQSAK

SEQ ID NO: 11334 - protein, 95 aa, Gibberella zeae
TAGSWFCLDVAFYGLSLNNGTILKVIGYSTKDATNVYEFLHNTAVGNIIIVLAGAVPGYWVSVATIDTLGRKTIQLGGFIILTILFIAMGFAYNH

SEQ ID NO: 11335 - protein, 95 aa, Gibberella zeae
TAGSWFCLDVAFYGLSLNNGTILKVIGYSTKDATNVYEFLHNTAVGNIIIVLAGAVPGYWVSVATIDTLGRKTIQLGGFIILTILFIVMGFAYNH

SEQ ID NO: 11336 - protein, 94 aa, Gibberella zeae
TAGSWFCLDVAFYGLSLNNGTILKVIGYSTKDATNVYEFLHNTAVGNIIIVLAGAVPGYWVSVATIDTLGRKTIQLGGFIILTILFIVMGFAYN

SEQ ID NO: 11337 - protein, 498 aa, Erwinia chrysanthemi
MKLKRKRVKPIALDDVTIIDDGRLRKAITAAALGNAMEWFDFGVYGFVAYALGQVFFPGDPGVQSIAALATFSVPFLMPLGGVFFGALGDKYGRQKILAITIIIMSISTFCIGLIPSYERIGIWAPILLLLAKMAQGFSVGGEYTGASIFVAEYSPDRKRGFMGSWLDFGSIAGFVLGAGVVVLISTLIGEQAFLAWGWRLPFFLALPLGLIGLYLATLEETPAFRQHVEKLEQNDRDGLKAGPGVSFREIATHHWKSLLVCIGLVIATNVTYYMLLTYMPSYLSHSLHYSENHGVLIIIAIMIGMLFVQPVMGLLSDRFGRKPFVVIGSVAMFFLAVPSFMLINSDIIGLIFLGLLMLAVILNAFTGVMASTLPALFPTHIRYSALASAFNISVLIAGLTPTVAAWLVESSQNLYMPAYYLMVIAVIGLLTGLFMKETANKPLKGATPAASDLSEAKEILQEHHDNIEHKIEDITQQIAELEAKRQLLVAQHPRIND

SEQ ID NO: 11338 - protein, 150 aa, Fusarium cerealis
WRVIMGVGIGGDYPLSSIITSEFATTKWRGAMMAAVFAMQGIGQLVAALVMMFLTLGFKPSLEQAADTKSCTGDCQIAVDKMWRTLVGFGAVPACIALYYRLTIPETPRYTFDVARDVEQADEDVKAYINGKSEGNTDEVSRAQNLQSAK

SEQ ID NO: 11339 - protein, 551 aa, Pholiota nameko
MASYQEKSSDRDSHEKVVPANSGYVLGERRRAALAEVDNAKFSWFHAKVCIVAGVGFFTDAYDIFAINIASTMLGYVYGSGKPGALKALNKQQDLGVKVATPVGTLVGQLLFGWLADLLGRKKMYGVELMIIIIATFAQALSENAPAVHIIGVLVVWRFIMGVGIGGDYPLSAVISSEFASTKIRGRMMTAVFASQGWGNFTAALVGFIITAAYKSSILKEASITNLHSVDVMWRLLIGLGAVPGVVALYFRLTIPETPRFTMDIERNIDQAATDIQAVLAGRKSHVDDDAFIQRIEAPKASWADFREHFGKFENFKILFGTAYSWFALDIAFYGLGLNSGIILQAIGFGNPTSTGTQAIYDNLKNICVGNLILSAAGLIPGYWVSFLFIDKWGRKPIQLMGFIALTILFVILGFGYDKLISTPSSKKAFVFLYCLADFFQNFGPNTTTFVIPGEIFPTRYRSTAHGISAASGKLGAIVAQVGFSQLKDIGGPSAWVKHILEIFAFFMLTGIGSTLLLPETKNRTLEDLSNENQEGFVRGTSNKTAVITDA

SEQ ID NO: 11340 - protein, 486 aa, Pholiota nameko
MSTKLSLKERIKSVSLIFACGTALFSDGYANGVIGNVNTLLTRVYGADKLDQHNYSRTLSSFGFAGTVVGMLVFGYLSDKIGRKFGMMTAAGIVTLFSGLSAASSGAHGSVGGLLSMLSAMRFLLGIGVGAEYPCGSVSASEQSEEPGISKGAQNRWFALATNSMIDFGFVVSSFVPLVLFWIFGNDHLRAVWRLSLGLGVVPAAAVFIWRINMKEPIRYQKDSMKHARIPYMLVLRRYGGRLAAISATWFLYDIIVYPFGIYSSIIVDRITGGKSDLAVVFGWNVIINLFYMPGTLGGAFVVDRLGPKNTMITGLLLQAVIGFIMSGAYVRLTNSIAAFAVVYGIFLSFGELGPGNCLGLLASKSSPTAIRGQFYGTAAAIGKIGAFIGTWIFPPIIDAFGGPKSNKGNTGPFWIGSGLAVLSAIITFMWIKPLTTDGMIEEDRKFREYLEANGYDTSVMGLPETQSEVETESVSVDEKHEKVDV

SEQ ID NO: 11341 - protein, 478 aa, Penicillium paxilli
MDAMSTNQDGENYEVKKDAIVTGKETSDEPKGSYRPKKWQSNVTIFSCYVANFSDGFQNSLANPTNVIFKKLLGSAGYSADMKTRISDSLIVGAILGVVVLGYTSDMFSRRSGLLFTSSLVAIGTLMSTVALSVHPSKNMLWYFVIARGIAGFGVGGEYPPSAAAGIEESDTIMRSYRGPLFVSFTTLMATLAGPILQIIYLICLIASDNNLTITFHAIYSIATILPLIIIVLRIFMIDSALFHDSNLTKQRRSLKLYLVLARRYWWRILTTSVAFFLYDFINFPNSIMSSTIIASLVQDSDIRKTAIWQVILAVLPVPGVMIGAWLTNAIGRRNTGILGFAGYMVLGFIIGGTYDKLSKNIAAFVVLYGLLQAFGHMGPGATIGLISSEAFPTAMRGMGYGIATAFGRTGAAVGTECFTPLQTAAGNSSTFYLAGGVAILGILAYCLLPESSKLNLEEEDRALESFLAEKGYTISQK

SEQ ID NO: 11342 - protein, 502 aa, Mycobacterium tuberculosis H37Rv
MTTLWQPHRNDYSPIPGRGVHARRGARRPRPRGGRAERPGTGQLTRSGRRALLVGLTAASVGVLYGYDLSAIAGALLSLSEEFELTTREQELLTTTAVLGQIAGALGGGILANAIGRKKSVVLIVAGYAVFALLGATSVSVPMLVVARLLLGVTIGLSVVVVPVYVAESAPAAVRGSLVTAYQLATLSGIVVGYLVGYLLAGSHGWRAMFGLAAAPATLLLPLLWRMPDTARWYLLKGRIADARSALRRIQPEADIDAELADMAAAVDERGGGIGEMVRRPYLRATLFVIALGFLVQITGINAIIYYSPRLFAAMGFAGYFAMLALPAMVQVAGLAAVCASLFLVDRLGRRPILLSGIATMITADAVLITVFANDSDGGTGLVLGFAGVLLFIIGFNFGFGSLVWVYAAESFPSRLRSMGSSPMLTSTLTANAIVAAFSLTMLRVLGGAGVFAVFGTFAVVAFVVVYRFAPETKGRKLEEIRHFWENGGRWPAERSPAADEP

SEQ ID NO: 11343 - protein, 425 aa, Mycobacterium tuberculosis H37Rv
MKRVALACLVGSAIEFYDFLIYGTAAALVFPTVFFPHLDPTVAAVASMGTFAVAFLSRPFGAAVFGYFGDRLGRKKTLVATLLIMGLATVTVGLVPTTVAIGAAAPLILTTMRLLQGFAVGGEWAGSALLSAEYAPASKRGWYGMFTVVGGGIALVLTSLTFLGVNYTIGESSPTFMQWGWRIPFLVSAALIAVALYVRFNIDETPVFARERADEKTRLGPAETPIAQVLRRQRREIVLAAGSAVCCFGFVYLASTYLASYAQTRLGYSRGSILFDSVLGGLLCIVFTALSSALCDQLGRRRVLLAGWAVALPWSLLVMPLIDSGSPSLFAVAVVGMYAIGGFGFGPTASFIPELFATSYRYTGSALAANLAGVAGGALPPVIAGALVATYGSWAIGVMLAILALISLVCTYRLPETAGSALVSR

SEQ ID NO: 11344 - protein, 452 aa, Escherichia coli O157:H7
MTQRRDLQALIDAAPVGKMQWRVIICCFLVVMLDGFDTAAIGFIAPDIRTHWQLTAGDLAPLFGAGLLGLTAGALLCGPLSDRFGRKRVIELCVFLFGALSLASAFSPDLQTLVFLRFLTGLGLGGAMPNTITMTSEYLPARRRGALVTLMFCGFTLGSAFGGIVSAQLVPVIGWHGILVLGGVLPLMLFVALLVVLPESPRWQVRRQLPQAVIAKTVSAITRERYVDTHFYLIESASVTKGSIRQLFMGRQLPITLMLWVVFFMSLLIIYLLSSWMPTLLNHRGIDLQHASWVTAAFQIGGTLGALALGVLMDKFNPFRVLTLSYAIGAICIVMIGLSQDGLWLMALAIFGTGIGISGSQVGLNALTATLYPTQSRATGVSWSNAIGRCGAIVGSLSGGVMMAMNFSFDTLFFIIAVPAAISAVMLTLLITVVRQSTSVPDSLPRAGVVNE

SEQ ID NO: 11345 - protein, 125 aa, Thinopyrum intermedium
DLFCIALVTKLLGRIYYTDPALNEPGHLPANVSAAVNGVALCGTLAGQLFFGWLGDKLGRKSVYGFTLILMVLCSIASGLSFGHEAKGVMGTLCFFRFWLGFGVGGDYPLSATIMSEYANKKTRG

SEQ ID NO: 11346 - protein, 77 aa, Thinopyrum intermedium
ALEELYLIARAQALIALCGTVPGYWFTVAFIDIIGRFWIQLMGFTMMTIFVLAIAIPYDYLVKPGHHTGSFVLYGLT

SEQ ID NO: 11347 - protein, 50 aa, Thinopyrum intermedium
VFLIDVVGRFAIQLGGFFFMTAFMLGLAVPYHHWTTAGNHVGFVVMFSLT

SEQ ID NO: 11348 - protein, 50 aa, Thinopyrum intermedium
VALIDRIGRFWIQLGGFFFMAVFMLGLAFPYHHWTTPGNHIGFVVLYALT

SEQ ID NO: 11349 - protein, 50 aa, Thinopyrum intermedium
VALIDQVGRFWIQLGGFFFMAAFMLGLAVPYHHWTTPGNHVGFVVLYRLT

SEQ ID NO: 11350 - protein, 50 aa, Thinopyrum intermedium
VFLIDVIGRFWIQLVGFAMMTVFMLGLAVPYHHWTTPGNHVGFVVMYGLT

SEQ ID NO: 11351 - protein, 471 aa, Ferroplasma acidarmanus
MDNKNEGNISAINQALDNATGKFHFRTFLTAGMGFFTDAYDLFIIGTVLAILPMIGWHLTKTEIALIGSVSLIAAVLGALAFGRLLDYLGRKAIYGLELVLLVIGALGSAFLSFKNPYALMAWRFLLGVGIGGDYATSSVIMAEYSNMKTRGKYVGMVFSMQSIGLVVSSLLALTFLLSTKIIPLADAWKIMLSVGAIPAAIVIYYRRKMPEPPRYTVAKGRAAEASKNLKSYTGIDVAVSKNKEEVNAPWYTLFKDRKFLITLIGTAGAWFLMDWAFYGNSIMASRIFATIITQTGLSGLIRSTEYSAIVFIGFALPGYWLATFTLDKLGRKPIQITGFIMLAVTYGILALFPILDTPSFVVEFIAVYGISYFFMMFGPNVTTFVFPSEVFPVTTRGFGTGISAAGGKTGAFIGTFVDVFIIAAGLSSLMTVLAIFSVLGVIVTILCLPEPKGRAMEEISREKEYTKTIN

SEQ ID NO: 11352 - protein, 467 aa, Ferroplasma acidarmanus
MSSAIDRSMDEAKTSKFHYKVLFISGLGFFTDAYDLFIIGVVILLLPYAGWHNISIFYKGLVTSTALLAAVIGSVVFGRLLDYSGRKAIYGFELVALIAGSLGSAFLTPVNNIFMLLFWRFLLGVGIGGDYATSSTIMTEYSSTMNRGKFVGMIFSMQSFGLIAGPLISIAFLSNYVSPYITWRLLLAIGAIPAIIVIYFRRTMPEPPRYTADVRGDYKLAAKNLKTFAGLDSTGSKGKTINAPWYVLFRDRKFLLTLIGTAGAWFLMDWAFYGNSIMSNSILSFLVPSTVSGIHSIIMTNEYSAIIFGVAAFPGYWIAAFTIDRIGRKPVQITGFAMMAISFGIISAFSFLTTYRFLDYFLLLYGISYFFIMFGPNVTTFVYPPEVFPISTRGLGTGISAAGGKTGAFIGTLADTIILSITGLHFLMGMLAIIAAIGLILTIVLLPETKRRDLGETSGEARYAEWK

SEQ ID NO: 11353 - protein, 477 aa, Ferroplasma acidarmanus
MTENETGSQIKIPGRSVITTLSAMGYFLDGYDLSVISVFTLVLVTFKPFHYDPFTESFVTGAALLGAFVGAVIFGHFADNIGRRYLYIFDLIFFAVFAILSALSTNIYEMIIFRFFVGWGVGADYALSPVYTTEMYPDKKRGAGYGWVWTFWSIGAGAAFAIGYVFYMINPLVGWRYTLAIGAIPAIVTVVLRTRMPESVRWDILEPGKSKLSAKDLDSIAERVGITKEDIKAIIAEREKEENIAAGSFTALFKGEYGKRTAIIWFQWILYDIAGYGIGLYSPIILTTLGISHSSSLLFSLIFNMPVGFLGAFGAVMLNDRLGRRPLQALGFGGMAIAMAMFFIASSAIASIGIIIGIAAFVIDYGIGNLGPGDTMGLYAIELLPTKLRSSSMGGATGITRIASFLAAFMFPLISASLGKSSFFFILLGLMVLAFVFTIFFTPETKGLTLEEIALASYKHVHGVPKLILPEAKKEQS

SEQ ID NO: 11354 - protein, 446 aa, Salmonella typhimurium LT2
MQQPRNFDDLKFSSIHRRIMLWGSGGPFLDGYVLVIIGVALEQLTPLLHLDAEWIGALGAATLAGLFIGTSLFGYICDKVGRRKMFLLDIIAIGVISVATMFVSTPLELLVMRVLIGIVIGADYPIATSMITEFSNTRQRAFSIGFIAAMWYVGATCANLVGYWLYDMEGGWRWMLGSAFIPCLIILIGRFDLPESPRWLLRKGRVKECEQMMIKLFGEPVCFDDELPQETRFLQLFNRRHFPFVLFVAAIWTCQVIPMFAIYTFGPQIVGLLGWEQGRNAALGNVVISLFFMLGCIPAMFWLNSIGRRPLLIGSFAMMTIALALLGLVSNLGIILVVVAFAVYAFFSGGPGILQWLYPNELFPTDIRASAVGVIMSLSRIGTIVSTWALPIFITRYGINNVMLIGALISLVGLGVSVMFAPETRGLTLTQTGNMTLRGTPSDNPR

SEQ ID NO: 11355 - protein, 500 aa, Salmonella typhimurium LT2
MLKRKKIKPITLGDVTIIDDGKLRKAITAASLGNAMEWFDFGVYGFVAYALGKVFFPGADPSVQMIAALATFSVPFLIRPLGGLFFGMLGDKYGRQKILAITIVIMSISTFCIGLIPSYATIGIWAPILLLLCKMAQGFSVGGEYTGASIFVAEYSPDRKRGFMGSWLDFGSIAGFVLGAGVVVLISTIVGEENFLEWGWRIPFFIALPLGIIGLYLRHALEETPAFQQHVDKLEQGDREGLQDGPKVSFKEIATKHWRSLLSCIGLVIATNVTYYMLLTYMPSYLSHNLHYSEDHGVLIIIAIMIGMLFVQPVMGLLSDRFGRRPFVIMGSIALFALAIPAFILINSNVIGLIFAGLLMLAVILNCFTGVMASTLPAMFPTHIRYSALAAAFNISVLIAGLTPTLAAWLVESSQDLMMPAYYLMVIAVIGLITGISMKETANRPLKGATPAASDIQEAKEILGEHYDNIEQKIDDIDQEIAELQVKRSRLVQQHPRIDE

SEQ ID NO: 11356 - protein, 450 aa, Rhodococcus sp. RHA1
MNPSTTPESWASPRHRSAVTWVVAIATIAIIFDGYDLVVYGTILPTLMNDPGELGEISAQQAGALGSYALIGVMVGALTAGAVGDYLGRRRMMLVNIVWFSIGMGLAALATNVTMFGLLRFFTGIGVGGLVATAGAMVAEFAPPGKRNLYNAIVYSGVPAGGVLASLLAIVLRDTIGWRGLFWIGALPIVILLPLALVKLPESPKWLVARGHEDKARRISERTGIPMPDADEIAAERASVEKVGFAALATRRYAWGTALLGMMSFSGLLLTYGLNTWLPKIMEDAGFNAKGSLSFLLVLNGGAILGGLIASKVADGIGPQRVVATTFGLAALALILLTLGFPLPVLLASVAVAGVGTIGTQVLIYGFVSNYYSTSARGAGVAWCAGFGRLGGIFGPLIGGALISAGISSQVAFYVFAGIAVLGGIVTFFVPRARVTRAAPAAAYSTVQVS

SEQ ID NO: 11357 - protein, 383 aa, Oenococcus oeni MCW
MLYHSWKRTGIYTIVPVSLAGLPRVMFGAIFGGALAGQLADRLGRRKMILISAIIFAVFSVLSAIAPNNGSYYLIIMRIFLGLAVGAASALVPAYISELAPAAIRGRLSGLNQTMIVSGMLISYIVDYILKGLPNQIAWRLMLGFACIPAIILYLGVMKLPESPRYLIKNGRLDEARKVMSYVRSSEGEINNEINQIKETAHKEQEAQKTSWSALFSGKYRYLVIAGVGVAAFQQFQCANAIFYYIPLIVQKATGQAATSALMWPIIQGVILVIGSLVFMWIAEKFNRRTLLMFAGTIMGLSFILPAIIRWIDPHASQMMIVVFLCLYVAFYSATWAPLTWVLVGEIFPLAIRGRAAGLASSFNWIGSWAVGLLFPIMTASMS

SEQ ID NO: 11358 - protein, 50 aa, Triticum aestivum/Thinopyrum intermedium alien addition line
VFLIDVVGRFAIQLMGFFMMTVFMLGLAVPYHHWTTPGNQIGFVVMYAFT

SEQ ID NO: 11359 - protein, 50 aa, Triticum aestivum/Thinopyrum intermedium alien addition line
VALIDRIGRFWIQLGGFFFMAVFMLGLAFPYHHWTTPGNHIGFVVLYGLT

SEQ ID NO: 11360 - protein, 58 aa, Triticum aestivum/Thinopyrum intermedium alien addition line
VFFIDRIGRFTIQLMGFFFMTVFMFALAIPYNHWRGTKCGDSFCDGNHVAFVVLYSFT

SEQ ID NO: 11361 - protein, 486 aa, Thermoplasma acidophilum
MAWPFMNRLICRHRYYRFQIRCIWHIIFCILKKYISWSCIIGIMVEFKSSHAAFDQMRITPTFIEITILSSMGVFMDGFSLSIFSAALTYLKSYILVRAIFVSLAASAIYIGMFLGSFTMGHLSDRIGRKRMYTYDLAITSVFLVLTALSTSFYEFFIFELLAGIGIGADYPLSSSIEAEFSPRRSRGRFLVFNIFMWTIGSIVFYVISIPLIFRFGSESWRWMYGVGAIVPVVVILARRALPESPYWLVKAGKDSEAKTVADSMGREAGYTDVDLPNVEKGSSSFRSVFSGSYLPLIIFASLAWFSYDVSSYGVWNYTPSIFVSVGVSAVSSILSTLLEDLPVIVGFIICLLLIERVGRKILQSVGFGLAGVSLLSFALYADHRTLPFIMLFTAFAMMHLFHNIGPTNLTYVYPVEIFPTRIRGTAMGIATAASRIGAILGVFAFPLITASMGMSASLMFFAIFEFVGFIVTVVLAPETKSRPIT

SEQ ID NO: 11362 - protein, 440 aa, Thermoplasma acidophilum
MPNIFEDLDRKKFGWFHLRSILTTGMGVFTDGYDLSSIGIVLAIVLSSYGITKITPGYTLYTSLIAGSALIGAAIGALIFGELAKRGRKKFYGVDVLILGIFAFLQIFAVNVYALIIIRLILGIGVGADYVMSPMIMGEHANSKDRGKTIAFGFGMMWGFGALLAAFAYMIFGPILGLPDAVVWRIVLAFGAVPALAVVYLRRKMPETPRFLARIAGDKASFEEEVKYVANREIMIEGNIRDDHGFGYYFKRYRREFIAAMLLWFLYDQIAYAGILFGPMLIASKLGLGPVSWTYLMEVFTLIGGIIMLSLIDRKGRKVLQILGFIGMGASLLLFDALKSAGIVAATTGGGNARVRHRNGVLQSARARIGDCVWHVRCGACPNKDKIANTVLHRGIRKDRRIDCVICLSGCIRSTRRISGILLSLGTGNNCCGHHACVHS

SEQ ID NO: 11363 - protein, 465 aa, Comamonas testosteroni
MTSQTSKQNTDPTVVNVQTVLNESPFSGFQWGIFFLCFLIVLLDGFDTAAIGFIAPSLLGEWGIDKSHLGPVLSAALFGLAFGALGAGPLADRVGRKTVLIIAAVVMGGASIASGLVHDLQGLTIWRFITGLGLGAAMPNAITLMNEYCPDSKRSFITNCMFCGFPIGSAFGGFIAAWMIPHFGWRSLLIVGGVVPLILAVLMIVMLPESVRFMVLKNYSADRVRKVMVRIAAGTRNAARFVLNDGGEAAAQAQQGPQGLRLVFSQKYLVGTLALWVTYFMGLVIVYGLVNWMPVLFKEAGVPASQAAVIAALFQLGGVGAIFVGLLMDRWNANLIIATGYFLTSLGVAFIGQVLGGGVGMLVASVFIAGLLMNAAQSSMQALAAEYYPTECRASGVSWMLGIGRFGGIAGSFLVAELSRRHLELPLVFMVVAIPGVIAALALLVKNRYAGGAPRTSMLGLGGAH

SEQ ID NO: 11364 - protein, 534 aa, Arabidopsis thaliana
MAREQLQVLNALDVAKTQWYHFTAIIIAGMGFFTDAYDLFCISLVTKLLGRIYYHVEGAQKPGTLPPNVAAAVNGVAFCGTLAGQLFFGWLGDKLGRKKVYGMTLMVMVLCSIASGLSFGHEPKAVMATLCFFRFWLGFGIGGDYPLSATIMSEYANKKTRGAFVSAVFAMQGFGIMAGGIFAIIISSAFEAKFPSPAYADDALGSTIPQADLVWRIILMAGAIPAAMTYYSRSKMPETARYTALVAKDAKQAASDMSKVLQVEIEPEQQKLEEISKEKSKAFGLFSKEFMSRHGLHLLGTTSTWFLLDIAFYSQNLFQKDIFSAIGWIPPAQSMNAIQEVFKIARAQTLIALCSTVPGYWFTVAFIDVIGRFAIQMMGFFFMTVFMFALAIPYNHWTHKENRIGFVIMYSLTFFFANFGPNATTFVVPAEIFPARFRSTCHGISAASGKLGAMVGAFGFLYLAQNPDKDKTDAGYPPGIGVRNSLIVLGVVNFLGILFTFLVPESKGKSLEEMSGENEDNENSNNDSRTVPIV

SEQ ID NO: 11365 - protein, 535 aa, Arabidopsis thaliana
MAGDQLNVLNALDVAKTQWYHFTAIIIAGMGFFTDAYDLFCISLVTKLLGRIYYHVDGSEKPGTLPPNVSAAVNGVAFCGTLAGQLFFGWLGDKLGRKKVYGMTLMVMVLCSIASGLSFGSNPKTVMTTLCFFRFWLGFGIGGDYPLSATIMSEYANKKTRGAFIAAVFAMQGFGILTGGIFAIIVSAAFEAKFPAPTYQIDALASTVPQADYVWRIILMVGALPAAMTYYSRSKMPETARYTALVAKDAKLAASNMSKVLQVEIEAEQQGTEDKSNSFGLFSKEFMKRHGLHLLGTTSTWFLLDIAFYSQNLFQKDIFSAIGWIPPAQTMNAIQEVFKIARAQTLIALCSTVPGYWFTVAFIDVIGRFAIQMMGFFFMTVFMFALAIPYDHWTHKENRIGFVAMYSLTFFFANFGPNATTFVVPAEIFPARFRSTCHGISAASGKLGAMVGAFGFLYLAQSPDKTKTEHGYPPGIGVKNSLIVLGVVNLLGMVFTLLVPESKGKSLEEMSGENEQNDESSSSSNNNSNNAVSTA

SEQ ID NO: 11366 - protein, 542 aa, Arabidopsis thaliana
MAKKGKEVLNALDAAKTQMYHFTAIVIAGMGFFTDAYDLFSISLVTKLLGRIYYHVDSSKKPGTLPPNVAAAVNGVAFCGTLAGQLFFGWLGDKLGRKKVYGITLMLMVLCSLGSGLSFGHSANGVMATLCFFRFWLGFGIGGDYPLSATIMSEYANKKTRGAFIAAVFAMQGFGILAGGIVSLIVSSTFDHAFKAPTYEVDPVGSTVPQADYVWRIVLMFGAIPALLTYYWRMKMPETARYTALVARNTKQAASDMSKVLQVDLIAEEEAQSNSNSSNPNFTFGLFTREFARRHGLHLLGTTTTWFLLDIAYYSSNLFQKDIYTAIGWIPAAETMNAIHEVFTVSKAQTLIALCGTVPGYWFTVAFIDILGRFFIQLMGFIFMTIFMFALAIPYDHWRHRENRIGFLIMYSLTMFFANFGPNATTFVVPAEIFPARLRSTCHGISAASGKAGAIVGAFGFLYAAQSSDSEKTDAGYPPGIGVRNSLLMLACVNFLGIVFTLLVPESKGKSLEEISREDEEQSGGDTVVEMTVANSGRKVPV

SEQ ID NO: 11367 - protein, 521 aa, Arabidopsis thaliana
MADQQLGVLKALDVAKTQLYHFTAIVIAGMGFFTDAYDLFCVSLVTKLLGRLYYFNPTSAKPGSLPPHVAAAVNGVALCGTLAGQLFFGWLGDKLGRKKVYGITLIMMILCSVASGLSLGNSAKGVMTTLCFFRFWLGFGIGGDYPLSATIMSEYANKKTRGAFIAAVFAMQGVGILAGGFVALAVSSIFDKKFPSPTYEQDRFLSTPPQADYIWRIIVMFGALPAALTYYWRMKMPETARYTALVAKNIKQATADMSKVLQTDLELEERVEDDVKDPKKNYGLFSKEFLRRHGLHLLGTTSTWFLLDIAFYSQNLFQKDIFSAIGWIPKAATMNAIHEVFKIARAQTLIALCSTVPGYWFTVAFIDIIGRFAIQLMGFFMMTVFMFAIAFPYNHWILPDNRIGFVVMYSLTFFFANFGPNATTFIVPAEIFPARLRSTCHGISAATGKAGAIVGAFGFLYAAQPQDKTKTDAGYPPGIGVKNSLIMLGVINFVGMLFTFLVPEPKGKSLEELSGEAEVDK

SEQ ID NO: 11368 - protein, 521 aa, Arabidopsis thaliana
MADQQLGVLKALDVAKTQLYHFTAIVIAGMGFFTDAYDLFCVSLVTKLLGRLYYFNPTSAKPGSLPPHVAAAVNGVALCGTLAGQLFFGWLGDKLGRKKVYGITLIMMILCSVASGLSLGNSAKGVMTTLCFFRFWLGFGIGGDYPLSATIMSEYANKKTRGAFIAAVFAMQGVRILAGGFVALAVSSIFDKKFPSPTYEQDRFLSTPPQADYIWRIIVMFGALPAALTYYWRMKMPETARYTALVAKNIKQATADMSKVLQTDLELEERVEDDVKDPKKNYGLFSKEFLRRHGLHLLGTTSTWFLLDIAFYSQNLFQKDIFSAIGWIPKAATMNAIHEVFKIARAQTLIALCSTVPGYWFTVAFIDIIGRFAIQLMGFFMMTVFMFAIAFPYNHWILPDNRIGFVVMYSLTFFFANFGPNATTFIVPAEIFPARLRSTCHGISAATGKAGAIVGAFGFLYAAQPQDKTKTDAGYPPGIGVKNSLIMLGVINFVGMLFTFLVPEPKGKSLEELSGEAEVDK

SEQ ID NO: 11369 - protein, 524 aa, Arabidopsis thaliana
MAEQQLGVLKALDVAKTQLYHFTAIVIAGMGFFTDAYDLFCVSLVTKLLGRIYYFNPESAKPGSLPPHVAAAVNGVALCGTLSGQLFFGWLGDKLGRKKVYGLTLIMMILCSVASGLSFGNEAKGVMTTLCFFRFWLGFGIGGDYPLSATIMSEYANKKTRGAFIAAVFAMQGVGILAGGFVALAVSSIFDKKFPAPTYAVNRALSTPPQVDYIWRIIVMFGALPAALTYYWRMKMPETARYTALVAKNIKQATADMSKVLQTDIELEERVEDDVKDPRQNYGLFSKEFLRRHGLHLLGTTSTWFLLDIAFYSQNLFQKDIFSAIGWIPKAATMNATHEVFRIARAQTLIALCSTVPGYWFTVAFIDTIGRFKIQLNGFFMMTVFMFAIAFPYNHWIKPENRIGFVVMYSLTFFFANFGPNATTFIVPAEIFPARLRSTCHGISAAAGKAGAIIGAFGFLYAAQNQDKAKVDAGYPPGIGVKNSLIVLGVLNFIGMLFTFLVPEPKGKSLEELSGEAEVSHDEK

SEQ ID NO: 11370 - protein, 524 aa, Arabidopsis thaliana
MAEQQLGVLKALDVAKTQLYHFTAIVIAGMGFFTDAYDLFCVSLVTKLLGRIYYFNPESAKPGSLPPHVAAAVNGVALCGTLSGQLFFGWLGDKLGRKKVYGLTLVMMILCSVASGLSFGHEAKGVMTTLCFFRFWLGFGIGGDYPLSATIMSEYANKKTRGAFIAAVFAMQGVGILAGGFVALTVSSIFDKKFPAPTYAVNRALSTPPQVDYIWRIIVMFGALPAALTYYWRMKMPETARYTALVAKNIKQATADMSKVLQTDIELEERVEDDVKDPKQNYGLFSKEFLRRHGLHLLGTTSTWFLLDIAFYSQNLFQKDIFSAIGWIPKAATMNATHEVFRIARAQTLIALCSTVPGYWFTVAFIDTIGRFKIQLNGFFMMTVFMFAIAFPYNHWIKPENRIGFVVMYSLTFFFANFGPNATTFIVPAEIFPARLRSTCHGISAAAGKAGAIVGAFGFLYAAQSQDKAKVDAGYPPGIGVKNSLIMLGVLNFIGMLFTFLVPEPKGKSLEELSGEAEVSHDEK

SEQ ID NO: 11371 - protein, 524 aa, Arabidopsis thaliana
MAEQQLGVLKALDVAKTQLYHFTAIVIAGMGFFTDAYDLFCVSLVTKLLGRIYYFNPESAKPGSLPPHVAAAVNGVALCGTLSGQLFFGWLGDKLGRKKVYGLTLVMMILCSVASGLSFGHEAKGVMTTLCFFRFWLGFGIGGDYPLSATIMSEYANKKTRGAFIAAVFAMQGVGILAGGFVALAVSSIFDKKFPAPTYAVNRALSTPPQVDYIWRIIVMFGALPAALTYYWRMKMPETARYTALVAKNIKQATADMSKVLQTDIELEERVEDDVKDPKQNYGLFSKEFLRRHGLHLLGTTSTWFLLDIAFYSQNLFQKDIFSAIGWIPKAATMNATHEVFRIARAQTLIALCSTVPGYWFTVAFIDTIGRFKIQLNGFFMMTVFMFAIAFPYNHWIKPENRIGFVVMYSLTFFFANFGPNATTFIVPAEIFPARLRSTCHGISAAAGKAGAIVGAFGFLYAAQSQDKAKVDAGYPPGIGVKNSLIMLGVLNFIGMLFTFLVPEPKGKSLEELSGEAEVSHDEK

SEQ ID NO: 11372 - protein, 524 aa, Arabidopsis thaliana
MAEQQLGVLKALDVAKTQLYHFTAIVIAGMGFFTDAYDLFCVSLVTKLLGRIYYFNPESAKPGSLPPHVAAAVNGVALCGTLSGQLFFGWLGDKLGRKKVYGLTLVMMILCSVASGLSFGHEAKGVMTTLCFFRFWLGFGIGGDYPLSATIMSEYANKKTRGAFIAAVFAMQGVGILAGGFVALAVSSIFDKKFPAPTYAVNRALSTPPQVDYIWRIIVMFGALPAALTYYWRMKMPETARYTALVAKNIKQATADMSKVLQTDIELEERVEDDVKDPKQNYGLFSKEFLRRHGLHLLGTTSTWFLLDIAFYSQNLFQKDIFSAIGWIPKAATMNATHEVFRIARAQTLIALCSTVPGYWFTVAFIDTIGRFKIQLNGFFMMTVFMFAIAFPYNHWIKPENRIGFVVMYSLTFFFANFGPNATTFIVPAEIFPARLRSTCHGISAAAGKAGAIVGAFGFLYAAQSQDKPKVDAGYPPGIGVKNSLIMLGVLNFIGMLFTFLVPEPKGKSLEELSGEAEVSHDEK

SEQ ID NO: 11373 - protein, 524 aa, Arabidopsis thaliana
MAEQQLGVLKALDVAKTQLYHFTAIVIAGMGFFTDAYDLFCVSLVTKLLGRIYYFNPESAKPGSLPPHVAAAVNGVALCGTLSGQLFFGWLGDKLGRKKVYGLTLIMMILCSVASGLSFGNEAKGVMTTLCFFRFWLGFGIGGDYPLSATIMSEYANKKTRGAFIAAVFAMQGVGILAGGFVALAVSSIFDKKFPAPTYAVNRALSTPPQVDYIWRIIVMFGALPAALTYYWRMKMPETARYTALVAKNIKQATADMSKVLQTDIELEERVEDDVKDPRQNYGLFSKEFLRRHGLHLLGTTSTWFLLDIAFYSQNLFQKDIFSAIGWIPKAATMNATHEVFRIARAQTLIALCSTVPGYWFTVAFIDTIGRFKIQLNGFFMMTVFMFAIAFPYNHWIKPENRIGFVVMYSLTFFFANLGPNATTFIVPAEIFPARLRSTCHGISAAAGKAGAIIGAFGFLYAAQNQDKAKVDAGYPPGIGVKNSLIVLGVLNFIGMLFTFLVPEPKGKSLEELSGEAEVSHDEK

SEQ ID NO: 11374 - protein, 516 aa, Arabidopsis thaliana
MANEEQGSILKALDVAKTQWYHVTAVVVSGMGFFTDSYDLFVISLITKLLGRIYYQVPGSSSPGSLPDGISAAVSGVAFAGTFIGQIFFGCLGDKLGRKRVYGLTLLIMTICSICSGLSLGRDPKTVMVTLCFFRFWLGFGIGGDYPLSATIMSEYSNKRTRGAFIAAVFGMQGIGILAAGAVSLLVSAVFESKFPSRAYILDGAASTVPQADYVWRIILMVGALPALLTYYWRMKMPETARYTALVSKNAEQAALDMTKVLNVDIEASAAKNDQARVSSDEFGLFSMKFLRRHGLHLLGTASTWFLLDIAFYSQNLFQKDIFTTIGWLPSAKTMNAIQELYMIAKAQTIIACCSTVPGYFFTVGFIDYMGRKKIQIMGFAMMTIFMLSLAIPYHHWTLPANRIGFVVLYSFTFFFSNFGPNATTFIVPAEIFPARIRSTCHGISAASGKAGAMVGSFGFSALVKALGMSNTLYIMAGINLLGLLLTFTIPETNGKSLEELSGETEPEKIKEKIVV

SEQ ID NO: 11375 - protein, 394 aa, Arabidopsis thaliana
MAKKGKEVLNALDAAKTQMYHFTAIVIAGMGFFTDAYDLFSISLVTKLLGRIYYHVDSSKKPGTLPPNVAAAVNGVAFCGTLAGQLFFGWLGDKLGRKKVYGITLMLMVLCSLGSGLSFGHSANGVMATLCFFRFWLGFGIGGDYPLSATIMSEYANKKTRGAFIAAVFAMQGFGILAGGIVSLIVSSTFDHAFKAPTYEVDPVGSTVPQADYVWRIVLMFGAIPALLTYYWRMKMPETARYTALVARNTKQAASDMSKVLQVDLIAEEEAQSNSNSSNPNFTFGLFTREFARRHGLHLLGTTTTWFLLDIAYYSSNLFQRHLHSNRMDSRRRNNERNPRSLHRLKSSNPNRSLRHRPWLLVHRRIHRYTRSILHPVDGIYLHDDLYVRFSDSL

SEQ ID NO: 11376 - protein, 543 aa, Glycine max
  unsure (1)..(543): unsure at all Xaa locations
MAREQIQVLNALDVAKTQWYHFTAIIIAGMGFFTDAYDLFCISLVTKLLGRIYYHVDGAAKPGTLPPNVSAAVNGVAFCGTLSGQLFFGWLGDKMGRKKVYGMTLMLMVICSIGSGLSFGHSAKSVIATLCFFRFWLGFGIGGDYPLSATIMSEYSNKKTRGAFIAAVFAMQGFGILAGGIFAIIISVAFKERFDAPPYELDPAGSTVPQADYIWRIIRPXVMVGALPAALTYYWRMKMPETARYTALVAKNTKQAAADMSKVLQVEIQAEPQKEEQKAXXSYGLFSKEFLRRHGLHLLGTASTWFLLDIAFYSQNLFQKDIFSAIGWIPPAKTMNAIEEVYRIARAQTLIALCSTVPGYWFTVALIDKIGRFAIQLMGFFFMTVFMFALAIPYDHWTHKDNRIGFVVIYSLTFFFANFGPNATTFVVPAEIFPARFRSTCHGISSASGKLGAIVGAFGFLYLAQNKDKSKADAGYPAGIGVKNALIVLGVVNILGFFFTFLVPEANGKSLEEMSGENDEDVGTQEESEQSHSQNNNRTVPYV

SEQ ID NO: 11377 - protein, 534 aa, Glycine max
  unsure (1)..(534): unsure at all Xaa locations
MAGELGVLNALDVAKTQWYHFTAIVIAGKGFFTDAYDLFCICLVTKLLGWLYYTEPGAPKPGSLPPRVQASVTGVALCGTLAGQLFFGWLGDKMGRKRVYGLTLILMVVCSLASGLSFGSTPEGVMASLCFFRFWLGFGIGGDYPLSATIMSEYANKKTRGAFIAAVFAMQGFGILAGGVVALIVSYAYDQKYKLPSYEQNPEASLXXPAFDYVWRIVLMFGAVPAALTYYWRMKMPETARYTALVAKNAKQAAADMSKVLQVELEAEEEKVKKLTENESNKYGLFTKEFVKRHGLHLLGTTTTWFLLDIAFYSQNLFQKDIFSAIGWIPPAKEMNAIHEVYKIARAQTLIALCSTVPGYWFTVALIDYMGRFAIQLLGFFFMTVFMFALAIPYDHWSEKENRIGFVVMYSFTFFFANFGPNSTTFVVPAEIFPARLRSTCHGISAAAGKAGAIVGAFGFLYAAQSKDPSKTDAGYPTGIGIKNSLIMLGVINFIGMLFTLLVPESKGKSLEELSGENGENDAEHAVSARTVPV

SEQ ID NO: 11378 - protein, 548 aa, Glycine max
  unsure (1)..(548): unsure at all Xaa locations
MGKEQVQVLNALDVAKTQWYHFTAIIIAGMGFFTDAYDLFCISLVTKLLGRIYYHVDGAAKPGSLPPNVSAAVNGVAFVGTLSGQLFFGWLGDKMGRKKVYGMTLALMVIASIASGLSFGHDAKTVMTTLCFFRFWLGFGIGGDYPLSATIMSEYSNKKTRGAFIAAVFAMQGFGILAGGVFAIIIASVFKSKFDSPPYEVDPLGSTVPQADYVWRIILMFGAIPAAMTYYSRSKMPETARYTALVAKNMEKAAADMSKVMNMEIQAEPKKEEEAQAKSYGLFSKEFMSRHGLHLLGTTSTWFLLDIAFYSQNLFQKDIFSAIGWIPPAKTMNALEEVFFIARAQTLIALCSTVPGYWFTVAFIDRIGRFAIQLMGFFFMTIFMFALAIPYDHWTLRENRIGFVVIYSLTFFFANFGPNATTFVVPAEIFPARFRSTCHGISSASGKLGAMVGAFGFLYLAQNQDPSKADAGYPAGIGVRNSLLVLGVINILGFMFTFLVPEAKGRSLEEISGEQEEETKVXXKXWQQNNSVSFSSLLVICYXNKAVP

SEQ ID NO: 11379 - protein, 538 aa, Glycine max
  unsure (1)..(538): unsure at all Xaa locations
MAGELGVLNALDVAKTQWYHFTAIVIAGMGFFTDAYDLFCISLVTKLLGRLYYTEPGAPKPGSLPPRVQASVTGVALCGTLAGQLFFGWLGDKMGRKRVYGLTLILMVVCSLASGLSFGSTPEGVMATLCFFRFWLGFGIGGDYPLSATIMSEYANKKTRGAFIAAVFAMQGFGILAGGVVALIVSYAYDQKXYKLSSYEQNSKASXLDPAFDFVWRIGLMLGAVPAALTYYWRMKMPETARYTALVAKTAKQAAADMSKVXLQVELEAEEEKVMKLTENESNKYGLFTKEFAKRHGLHLLGTTTTWFLLDIAFYSQNLFQKDIFSAIGWIPPAKEMNAIHEVYRIARAQTLIALCSTVPGYWFTVAFIDIMGRFAIQLMGFFFMTVFMFALAIPYNHWKNHNNIGFVVMYSFTFFFSNFGPNATTFVVPAEIFPARLRSTCHGISAAAGKAGAIVGAFGFLYAAQSTNPNKVDHGYPTGIGVKNSLIVLGVINFFGMVFTLLVPESKGKSLEELSGENEDDGAEAIEMAGSARTVPV

SEQ ID NO: 11380 - protein, 341 aa, Glycine max
  unsure (1)..(341): unsure at all Xaa locations
XVMAGGQLGVLNALDVAKTQWYHFTAIVIAGMGFFTDAYDLFCISLVTKLLGRLYYTDITNPKPGVLPPNVQAAVTGVALCGTLAGQLFFGWLGDKLGRKRVYGLTLMLMVLCSIASGLSFGDTPKGVMATLCFFRFWLGFGIGGDYPLSATIMSEYANKKTRGSFIAAVFAMQGFGIMAGGIVALIVSSAYDHKYDLPSYKDNPAGSKVDSLDYVWRIILMFGAVPAALTYYWRMKMPETARYTALVAKNAKQAASDMSKVLQVEVEAEEDKLQHMVESENQKYGLXFSKEFAKRHGLHLVGPTXTWFLLDIAFYXQNLFQXDIXTAIGWISSAXDMNAX

SEQ ID NO: 11381 - protein, 371 aa, Glycine max
  unsure (1)..(371): unsure at all Xaa locations
IRLITFGVSTFDPAGXXPCNXEDPAGSKVDSLDYVWRIILMFGAVPAALTYYWRMKMPETARYTALVAKNAKQAASDMSKVLQVEVEAEEDKLQHMVESENQKYGLFSKEFAKRHGLHLVGTTVTWFLLDIAFYSQNLFQKDIFTAIGWIPPAQDMNAIHEVYRIARAQTLIALCSTVPGYWFTVAFIDIIGRFAIQLMGFFFMTVFMFALAIPYNHWKNHNNXLGFVVMNSFTFFFSNFGPNATTFVVPAEIFPARLRSTCHGISAAAGKAGAIVGAFGFLYAAQSTNPNKVDHGYPTGIGVKNSLIVLGVINFFGMVFTLLVPESKGKSLEELSGENEDXXGAEAIEMAGSARTVPVXPKSLINKVLSS

SEQ ID NO: 11382 - protein, 280 aa, Glycine max
  unsure (1)..(280): unsure at all Xaa locations
XPADMSKVLQVEIEAEQEKVEQLDTRRGNEFGLFTKQFLRRHGLHLVGTATTWFLLDIAYYSQNLFQKDIFSTIGWIPEXXXMNAVEEVFKIARAQTLIALCSTVPGYWFTVALIDKMGRFTIQLMGXXFMTVFMFALAIPYHHWTMKGNQIGFVVLYSLTFFFANFGPNATTFVVPAEIFPARLRSTCHGISAAAGKAGAMVGAFGYLYTQNAIGLRNTLIVLGVVSFLGLLFTFLVPESKGKSLEEMSGEAEAETAAAPRASAMEAGLGVRSSVKLHG

SEQ ID NO: 11383 - protein, 257 aa, Glycine max
  unsure (1)..(257): unsure at all Xaa locations
QDGEKKSLWTNSYAYALNLVGTTVTWFLLDIAFYSQNLFQKDIFTAIGWIPPAQDMNAIHEVYRIARAQTLIALCTVPGYWFTXAFIDIIGRFAIQLMGFFFMTVFMFALAIPYNHWXXNHNNIXFVVMYSFTFFFSNFGPNATTFVVPAEIFPARLRSTCHGISAAAGKAGAIVGAFGFLYAAQSTNPNKVDHGYPTGIGVKNSLIVLGVINFFGMVFTLLVPESKGKSLEELSGENEDDGAEAIEMAGSARTVPV

SEQ ID NO: 11384 - protein, 543 aa, Lupinus albus
MAREHIHVLNALDVAKTQWYHFTAIIIAGMGFFTDAYDLFCISLVTKLLGRIYYHVDGAGKPGTLPPNVSAAVNGVAFCGTLSGQLFFGWLGDKMGRKKVYGMTLMIMVICSIGSGLSFGHSPNSVLATLCFFRFWLGFGIGGDYPLSATIMSEYSNKKTRGSFIAAVFAMQGFGILGGGIFAIIISAAFKARFDAPAYEVDPVGSTVPQADYIWRIIVMVGALPAALTYYWRMKMPETARYTALVAKNAQQAAADMSKVLQVEIQSETNKEEAQGKPSFGLFSKEFLRRHGLHLLGTAGTWFLLDIAFYSQNLFQKDIFSAIGWIPPAKTMNALDEVYRIARAQTLIALCSTVPGYWFTVALIDRIGRFAIQLMGFFFMTVFMFALAIPYDHWTHKDNRIGFVVIYSLTFFFANFGPNATTFVVPAEIFPARFRSTCHGISSASGKLGAIVGAFGFLYLAQNKDKSKTDAGYPAGIGVKNSLIVLGVVNILGFCFTFLVPEPNGKSLEEMSGENEEEEPTKEGSYNNNNNNNNNNNRTVPYV

SEQ ID NO: 11385 - protein, 540 aa, Lupinus albus
MAREHIHVLNALDVAKTQWYHSLQIIIAGMGFFTDAYDLFCISLVTKLLGRIYYHVDGAGKPGTLPPNVSAAVNGVAFCGTLSGQLFFGWLGDKMGRKKVYGMTLMIMVICSIGSGLSFGHSPNSVLATLCFFRFWLGFGIGGDYPLSATIMSEYSNKKTRGSFIAAVFAMQGFGILGGGIFAIIISAAFKARFDAPAYEVDPVGSTVPQADYIWRIIVMVGALPAALTYYWRMKMPETARYTALVAKNAQQAAADMSKVLQVEIQSETNKEEAQGKPSFGLFSKEFLRRHGLHLLGTASTWFLLDIAFYSQNLFQKDIFSAIGWIPPAKTMNALDEVYRIARAQTLIALCSTVPGYWFTVALIDRIGRFAIQLMGFFFMTVFMFALAIPYDHWTHKDNRIGFVVIYSLTFFFANFGPNATTFVVPAEIFPARFRSTCHGISSASGKLGAIVGAFGFLYLAQNKDKSKTDAGYPAGIGVKNSLIVLGVVNILGFCFTFLVPEPNGKSLEEMSGENEEEEPTKEGSYNNNNNNNNRTVPYV

SEQ ID NO: 11386 - protein, 542 aa, Catharanthus roseus
MAKEQLQVLNALDVAKTQWYHFTAIVIAGMGFFTDAYDLFCISLVTKLLGRIYYHVDGAVKPGTLPPNVSAAVNGVAFCGTLAGQLFFGWLGDKMGRKRVYGMTLMLMVIASIASGLSFGDKPKAVMATLCFFRFWLGFGIGGDYPLSATIMSEYANKKTRGAFIAAVFAMQGFGILAGGMVAIIVSASFKAGFPAPAYQDGAVASTVPEADYVWRIILMFGAIPAALTYYWRMKMPETARYTALVAKNAKQAANDMSKVLQVELEAEQEKVEKFAQEPANTFGLFTKEFLKRHGLHLLGTATTWFLLDIAFYSQNLFQKDIFSAIGWIPPAQTMNAIEEVFRIARAQTLIALCSTVPGYWFTVFLIDRIGRFIIQWMGFFFMTVFMFALAIPYNHWTHKDNRIGFVIMYSLTFFFANFGPNATTFVVPAEIFPARLRSTCHGISAAAGKAGAIIGAFGFLYAAQPSDPSKTDKGYPPGIGVKNALIVLGCVNFLGMVFTFLVPEAKGKSLEEVSKENEEEVENGTELRQQSGHDTRTVPVL

SEQ ID NO: 11387 - protein, 538 aa, Lycopersicon esculentum
MANDLQVLNALDVAKTQLYHFTAIVIAGMGFFTDAYDLFCISMVTKLLGRLYYHHDGALKPGSLPPNVSAAVNGVAFCGTLAGQLFFGWLGDKMGRKKVYGMTLMIMVICSIASGLSFGHTPKGVMTTLCFFRFWLGFGIGGDYPLSATIMSEYANKKTRGAFIAAVFAMQGFGILAGGMVAIIVSAAFKGAFPAPAYEVDAIGSTVPQADFVWRIILMFGAIPAGLTYYWRMKMPETARYTALVAKNLKQAANDMSKVLQVEIEAEPEKVTAISEAKGANDFGLFTKEFLRRHGLHLLGTASTWFLLDIAFYSQNLFQKDIFSAIGWIPPAQTMNALEEVYKIARAQTLIALCSTVPGYWFTVAFIDKIGRFAIQLMGFFFMTVFMFALAIPYHHWTLKDHRIGFVVMYSFTFFFANFGPNATTFVVPAEIFPARLRSTCHGISAAAGKAGAMVGAFGFLYAAQPTDPTKTDAGYPPGIGVRNSLIVLGCVNFLGMLFTFLVPESNGKSLEDLSRENEGEEETVAEIRATSGRTVPV

SEQ ID NO: 11388 - protein, 538 aa, Lycopersicon esculentum
MANDLQVLNALYVAKTQLYHFTAIVIAGMGFFTDAYDLFCISMVTKLLGRLYYHHDGALKPGSLPPNVSAAVNGVAFCGTLAGQLFFGWLGDKMGRKKVYGMTLMIMVICSIASGLSFGHTPKGVMTTLCFFRFWLGFGIGGDYPLSATIMSEYANKKTRGAFIAAVFAMQGFGILAGGMVAIIVSAAFKGAFPAPAYEVDAIGSTVPQADFVWRIILMFGAIPAGLTYYWRMKMPETARYTALVAKNLKQAANDMSKVLQVEIEAEPEKVTAILKQKGANDFGLFTKEFLRRHGLHLLGTASTWFLLDIAFYSQNLFQKDIFSAIGWIPPAQTMNALEEVYKIARAQTLIALCSTVPGYWFTVAFIDKIGRFAIQLMGFFFMTVFMFALAIPYHHWTLKDHRIGFVVMYSFTFFFANFGPNATTFVVPAEIFPARLRSTCHGISAAAGKAGAMVGAFGFLYAAQPTDPTKTDAGYPPGIGVRNSLIVLGCVNFLGMLFTFLVPESNGKSLEDLSRENEGEEETVAEIRATSGRTVPV

SEQ ID NO: 11389 - protein, 538 aa, Lycopersicon esculentum
MANDLQVLNALDVAKTQLYHFTAIVIAGMGFFTDAYDLFCISMVTKLLGRLYYHHDGALKPGSLPPNVSAAVNGVAFCGTLAGQLFFGWLGDKMGRKKVYGMTLMIMVICSIASGLSFGHTPKGVMTTLCFFRFWLGFGIGGDYPLSATIMSEYANKKTRGAFIAAVFAMQGFGILAGGMVAIIVSAAFKGAFPAPAYEVDAIGSTVPQADFVWRIILMFGAIPAGLTYYWRMKMPETARYTALVAKNLKQAANDMSKVLQVEIEAEPEKVTAISEAKGANDFGLFTKEFLRRHGLHLLGTASTWFLLDIAFYSQNLFQKDIFSAIGWIPPAQTMNALEEVYKIARAQTLIALCSTVPGYWFTVAFIDKIGRFAIQLMGFFFMTVFMFALAIPYHHWTLKDHRIGFVVMYSFTFFFANFGPNATTFVVPAEIFPARLRSTCHGISAAAGKAGAMVGAFGFLYAAQPTDPTKTDAGYPPGHWCEELVDRPWLCNFLGMLFTFLVPESNGKSLEDLSRENEGEEETVAEIRATSGRTVPV

SEQ ID NO: 11390 - protein, 528 aa, Lycopersicon esculentum
MAVGDNDNNNLQVLNALDLAKTQLYHFTAIVIAGMGFFTDAYDLFSISLVTKLLGRLYYTKPDLLKPGTLPPAVSASVTGVALVGTLAGQLFFGWLGDKMGRKKVYGMTLVLMVVCSVASGLSFGSTPKGVMTTLCFFRFWLGFGIGGDYPLSATIMSEYANKKTRGAFIAAVFAMQGFGILFSGIVALITAAGFDHAYRSPTFEENAALSTVPQSDYIWRIILMFGSLPAALTYYWRMKMPETARYTALVAKDAKRAAQDMGKVLQVEIESEEAKIEQISRNETNQFGLFSWEFVRRHGLHLFGTCSTWFLLDIAFYSQNLFQKDVFSAVGWIPKAPTMNAVQEVYKIARAQTLIALCSTVPGYWFTVAFIDIIGRFAIQLMGFFFMTVFMFAIAIPYHHWTLEANRIGFIVMYSLTFFFANFGPNATTFVVPAEIFPARLRSTCHGISAAAGKAGAIVGAYGFLYAAQSKDPNKTDAGYPAGIGIKNSLIVLGCINALGMLCTFCVPEPKGKSLEEASQETITGEA

SEQ ID NO: 11391 - protein, 536 aa, Nicotiana tabacum
MAKDLQVLNALDVAKTQLYHFTAIVIAGMGFFTDAYDLFCISLVTKLLGRIYYHRDGALKPGSLPPNVSAAVNGVAFCGTLAGQLFFGWLGDKMGRKKVYGMTLMMMVICSIASGLSFGHTPKGVMTTLCFFRFWLGFGIGGDYPLSATIMSEYANKKTRGAFIAAVFAMQGFGILAGGMVAIIVSAAFKGAFPAPTYHADALASTVSQADFVWRIILMFGAIPAAMTYYWRMKMPETARYTALVAKNLKQAANDMSKVLQVEIEEEQEKVENVSQNTGNEFGLFSKEFLRRHGLHLLGTASTWFLLDIAFYSQNLFQKDIFSAIGWIPPAETMNALEEVYRIARAQTLIALCSTVPGYWFTVFFIDRIGRFAIQLMGFFFMTVFMFALAIPYHHWTLKDNRIGFVIMYSLTFFFANFGPNATTFVVPAEIFPARLRSTCHGISAAAGKAGAMIGAFGFLYAAQPTDPKKVDAGYPAGIGVRNSLIVLGCVNFLGMVFTFLVPESKGKSLEEMSRENEGEEESGTEMKNSGRTVPV

SEQ ID NO: 11392 - protein, 537 aa, Nicotiana tabacum
MAKDQLQVLNALDVAKTQLYHFTAIVIAGMGFFTDAYDLFCISLVTKLLGRIYYHHDGAPKPGTLPPNVSAAVNGVAFCGTLAGQLFFGWLGDKMGRKRVYGMTLMMMVICSIASGLSFGHTPKSVMTTLCFFRFWLGFGIGGDYPLSATIMSEYANKKTRGAFIAAVFAMQGFGILAGGMVAIIVSAAFKGAFPAQTYQTDPLGSTVSQADFVWRIILMFGAIPAAMTYYWRMKMPETARYTALVAKNLKQAANDMSKVLQVDIEEEQEKVENVSQNTRNEFGLFSKEFLRRHGLHLLGTASTWFLLDIAFYSQNLFQKDIFSAIGWIPPAQTMNALEEVYKIARAQTLIALCSTVPGYWFTVFFIDKIGRFAIQLMGFFFMTVFMFALAIPYHHWTLKDNRIGFVIMYSLTFFFANFGPNATTFVVPAEIFPARLRSTCHGISAAAGKAGAMIGAFGFLYAAQPTDRKKADAGYPAGIGVRNSLIVLGCVNFLGMVFTFLVPESKGKSLEEMSRENEGEEESGTEMKNSGRTVPV

SEQ ID NO: 11393 - protein, 537 aa, Nicotiana tabacum
MAKDQLQVLNALDVAKTQLYHFTAIVIAGMGFFTDAYDLFCISLVTKLLGRIYYHHDGAPKPGTLPPNVSAAVNGVAFCGTLAGQLFFGWLGDKMGRKRVYGMTLMMMVICSIASGLSFGHTPKSVMTTLCFFRFWLGFGIGGDYPLSATIMSEYANKKTRGAFIAAVFAMQGFGILAGGMVAIIVSAAFKGAFPAQTYQTDPLGSTISQADFVWRIILMFGAIPAAMTYYWRMKMPETARYTALVAKNLKQAANDMSKVLQVDIEEEQEKVENVSQNTRNEFGLFSKEFLRRHGLHLLGTASTWFLLDIAFYSQNLFQKDIFSAIGWIPPAQTMNALEEVYKIARAQTLIALCSTVPGYWFTVFFIDKIGRFAFQLMGFFFMTVFMFALAIPYHHWTLKDNRIGFVIMYSLTFFFANFGPNATTFVVPAEIFPARLRSTCHGISAAAGKAGAMIGAFGFLYAAQPTDRKKADAGYPAGIGVRNSLIVLGCVNFLGMVFTFLVPESKGKSLEEMSRENEGEEESGTEMKNSGRTVPV

SEQ ID NO: 11394 - protein, 523 aa, Nicotiana tabacum
MSADNNLQVLNALDVAKTQLYHFTTIVIAGMGFFTDAYDLFSISLVTKLLGRLYYTKPELLKPGTLPPTVSASVTGVALVGTLAGQLFFGWLGDKMGRKTVYGMTLIIMVLCSVASGLSFGSTPKGVMATLCFFRFWLGFGIGGDYPLSATIMSEYANKKTRGAFIAAVFAMQGFGILFSGIIALIVSAGFDHAYNVPSFQENPALSTVPQADYIWRIILMFGALPAGLTYYWRMKMPETARYTALVAKDAKRAAQDMGRVLQVEIDPEDAKIEQMSRDKTNKFGLFSWEFVRRHGLHLFGTTSTWFLLDIAFYSQNLFQKDVFSAIGWIPPAKTMNAVQEVYKIARAQTLIALLSTVPGYWFTVAFIDIVGRFAIQLMGFFFMTVFMFAIAIPYDHWTKKDNHIGFVAMYALTFFFANFGPNATTFVVPAEIFPARLRSTCHGISAAAGKAGAIVGAYGFLYAAQSKDPTKTDAGYPAGIGIKNSLIALGAINALGMVCTFCVPESKGKSLEEASQETITEE

SEQ ID NO: 11395 - protein, 523 aa, Nicotiana tabacum
MSADNNLQVLNALDVAKTQLYHFTTIVIAGMGFFTDAYDLFSISLVTKLLGRLYYTKSDLLKPGTLPPTVSASVTGVALVGTLAGQLFFGWLGDKMGRKTVYGMTLIIMVLCSVASGLSFGSTPKGVMATLCFFRFWLGFGIGGDYPLSATIMSEYANKKTRGAFIAAVFAMQGFGILFSGIIALIVSAGFDHAYNVPSFQENAALSTVPQADYIWRIILMFGALPAFLTYYWRMKMPETARYTALVAKDAKRAAQDMGRVLQVEIDPEDAKIEQMSRDETNKFGLFSWEFVCRHGLHLFGTCSTWFLLDIAFYSQNLFQKDVFSAVGWIPAAKTMNAVQEVYKIARAQTLIALLSTVPGYWFTVAFIDIVGRFAIQLMGFFFMTVFMFAIAIPYEHWTKKDNHIGFVAMYALTFFFANFGPNATTFVVPAEIFPARLRSTCHGISAAAGKAGAIVGAYGFLYAAQSKDPTKTDAGYPAGIGIKNSLLALGAINALGMVCTFCVPESKGKSLEEASQETITEE

SEQ ID NO: 11396 - protein, 540 aa, Solanum tuberosum
MANDLQVLNALDVAKTQLYHFTAIVIAGMGFFTDAYDLFCISMVTKLLGRIYYHHDNALKPGSLPPNVSAAVNGVAFCGTLAGQLFFGWLGDKMGRKKVYGMTLMIMVICSIASGLSFGHTPKSVMTTLCFFRFWLGFGIGGDYPLSATIMSEYANKKTRGAFIAAVFAMQGFGILAGGMVAIIVSSAFKGAFPAPAYEVDALASTVSQADFVWRIILMFGAIPAGLTYYWRMKMPETARYTALVAKNLKQAANDMSKVLQVEIEAEPEKVAAISVANGANEFGLFSKEFLRRHGLHLLGTASTWFLLDIAFYSQNLFQKDIFSAIGWIPPAQTMNALEEVYKIARAQTLIALCSTVPGYWFTVAFIDRIGRFAIQLMGFFFMTVFMFALALPYHHWTLKDNRIGFVVMYSLTFFFANFGPNATTFVVPAEIFPARLRSTCHGISAAAGKAGAMVGAFGFLYAAQPTDPKKTDAGYPAGIGVRNSLIVLGCVNFLGMLFTFLVPESKGKSLEEMSRENEGEEETVAEMRATSGRTVLFKF

SEQ ID NO: 11397 - protein, 540 aa, Solanum tuberosum
MANDLQVLNALDVAKTQLYHFTAIVIAGMGFFTDAYDLFCISMVTKLLGRIYYHHDNALKPGSLPPNVSAAVNGVAFCGTLAGQLFFGWLGDKMGRKKVYGMTLMIMVICSIASGLSFGHTPKSVMTTLCFFRFWLGFGIGGDYPLSATIMSEYANKKTRGAFIAAVFAMQGFGILAGGMVAIIVSSAFKGAFPAPAYEVDALASTVSQADFVWRIILMFGAIPAGLTYYWRMKMPETARYTALVAKNLKQAANDMSKVLQVEIEAEPEKVGAISEAKGANEFGLFSKEFLRRHGLHLLGTASTWFLLDIAFYSQNLFQKDIFSAIGWIPPAQTMNALEEVYKIARAQTLIALCSTVPGYWFTVAFIDRIGRFAIQLMGFFFMTVFMFALALPYHHWTLKDNRIGFVVMYSLTFFFANFGPNATTFVVPAEIFPARLRSTCHGISAAAGKAGAMVGAFGFLYAAQPTDPKKTDAGYPPGIGVRNSLIVLGCVNFLGMLFTFLVPESNGKSLEEMSRENEGEEETVAEMRATSGRTVLFKF

SEQ ID NO: 11398 - protein, 527 aa, Solanum tuberosum
MAVEDNNLQVLNALDLAKTQLYHFTAIIIAGMGFFTDAYDLFSISLVTKLLGRLYYTKPDLLKPGTLPPARVGLRHGCALVGTLAGQLFFGCARLAKMGRKKVYGMTLVLMVVCSVASGLSLGNTPKVVMTTLCFFRFWLGFGIGGDYPLSATIMSEYANKKTRGAFIAAVFAMQGFGILFSGIVALITAAGFDHAYKAPTFAENAAVSTVPQADYIWRIILMFGSLPAALTYYWRMKMPETARYTALVAKDAKRAAQDMGRVLQVEIESEEAKIEQISRDETNQFGLFSWEFVRRHGLHLFGTCSTWFLLDIAFYSQNLFQKDVFSAVGWIPKAPTMNAVQELYKIARAQTLIALCSTVPGYWFTVAFIDIIGRFAIQLMGFFFMTVFMFAIAIPYHHWTLEANRIGFIVMYSLTFFFANFGPNATTFVVPAEIFPARLRSTCHGISAAAGKAGAIVGAYGFLYAAQSKDPMKTDAGYPAGIGIKNSLIVLGFINALGMVCTFCVPESKGKSLEEASQETISTGEA

SEQ ID NO: 11399 - protein, 520 aa, Amanita muscaria
MPPAATGNGGIDPKNKFTGIAMTAFSAFGGILYGYDTGIISGILAMDDFKRTFGQQASDGTCSLPLSSQSLFVSILSAGTFVGALFGAPMGDIIGRKWGIVIAAAIFSIGIALQTASVTAAPFVVGRVFAGLGVGLVSCLVPMYQSECSPKWIRGAVVSLYQWAITIGILLAAVINNATQGRSNHSAYQIPISIQFVWAFILGFGMMLLPESPRFLVRQGRDEDAALSLSRLTRLSPDDPVVRNELAEIRTNFEAELALGESSYLDCFRPSHNKILLRTLTGIFIQAWQQLTGINFIFYYGTQYFQNAGINQAFLITIATGIVNVFMTLPGLYGVERYGRRSLLLIGALGMTICEFIVAIVGVTIPASNLAGQRVLIAFVCIYIAFFASTWGPMLWVIVGEIFPLQVRAKGISLSVASNWLWNFGIAFATPYLVNTQAGSAGLGSKVFFIWGTTCACCLVFTYFCVPETKGLSLEQIDEMYQEVMPLKSYQYRRRLAIEGGFRTEKADIIHEETAEKESG

SEQ ID NO: 11400 - protein, 50 aa, Thinopyrum elongatum
VAFIDIIGRFWIQLMGFTMMTIFMLAIAIPYDYLVKPGHHTGFVVLYGLT

SEQ ID NO: 11401 - protein, 50 aa, Thinopyrum elongatum
VAFIDIIGRFWIQLIGFTMMTIFMLAIAIPYDYLVKPGHHTGFVVLYGLT

SEQ ID NO: 11402 - protein, 448 aa, Acinetobacter sp. ADP1
MQRDILSEINQNNMSRYQWFVIVVCVCLNIIDGFDVMVMAFTAPSVSAEWSLSGAQIGLLLSAGLFGMAAGSIFLAPLADKIGRRLLILICLAIAGISMLACGLVHSHSMLAALRFVTGIGVGGILASSNVLASEYANLRWRSLAVSLMSTGYGIGATLGGILSLLLIEHLGWRSIFLAGGVTTVVMLLVSLWLLPESLDYLLAKKPKQALEKINLTVQRIGLVRLNALPQHEKNTQQHSSDIAKLFQGKQGFQTLCLWFAFFLVMFGFYFVMSWTPKILIAMGMSPSQGVTTGILISIGGVFGAAIIGLLASRIKIFHALSLFLGLTAVCVWLFVAVSSQVSIALMVGLLLGTLINGCVAGLYSISPTIYDADIRSRGVGYAIGFGRIGAILSPTVAGIFLDKGLAPSTLYAYYGIVFILAIFLILSLSKAFYRQKEGLGSSIKTVA

SEQ ID NO: 11403 - protein, 460 aa, Ferroplasma acidarmanus
MGYNALDNARINSLHKKITALSVGGTFLDGYDISIISVALIVMSKTAFGLDTDFGKAMIAASTTIGMLVGAILFGYITDLYGRRTMYMYDMALFIVLTAAEAFSWSFASLFIMRFILGLGLGADYAIGTTIIGEFSPVKYRGKLLVTNVLSWFLGAAVAAVTGYLLLPLGNESWRYMFLLGIIPAAIILVLRRDVPESPRWLSNKGNASEAEDIERRLTGTSDNLTAIKRDNKNPLKELLSRKYIKSLLFVGIFWFTFDAAFYGISIFSPTILELLGLKARLAVLGSAVFDTFAIIGSLIAILLIDRIGRKGITIIGFSGMVISLLSLGIITFYVPDRSAFITDGILIFALFLIFYITEAIGPGSTDFVYPVELFPTEDRASAQGFGTSVSRIGAILGITTFPFIVSIYGFSTSLFFFTGLSVIGLLATIFLATETKGKTLEQVNEIEEGKISKFKAGAK

SEQ ID NO: 11404 - protein, 447 aa, Ferroplasma acidarmanus
MLSVHKRIDELPVSPILLKITLLSSMGIFMDGYVLSIYSIAILYMRDYFHLVSGTPFYVYYIAFMGSSLFIGMFFGSIILGNLSDKYGRKKIYEYDLIITMVFLIMSGISTNILEFIIFEILAGVGIGADYPISSSIQAEFSPKNKRGKFLVFNIFSWTIGGIVLLLVAIPVILYIPAAINWRILYLTGAIIPFFVILSRRNLPESPFWLTGKGRDSEALKSSNYLGKSAGMEVDELPVVESGNSKIRDLFSKKYLYYTIFVSVAWFSYDVSSYGVWEYTPSAFAYSNSNIVMVVLATLLEELPVFIGFLICMYYVEKTGRKSLELIGFGGAAVSLIIFAAVSNFIALGILLTFFSFATMHLFHNMGPTNLTYDYPVEIFPTRIRGTAMGFATSVSRIGAIVGTIAFPIILFTLPFTFVLIFLVVFEVIGFSITFLLAPETKGKSLN

SEQ ID NO: 11405 - protein, 442 aa, Ferroplasma acidarmanus
MNSYKTISDAPSSPFLRKITVLSSMGVMMDGYTLTVFSYALLYLINVMSLKSYEISIMGISSIGGVLIGSFISGYIADIYGRRFIYIYDLFLVSIFIFLTGLATNYINFSILELIVGIGIGADYPVSSSIQAEFSPTKSRGKFMFFNIFSFSIGSLIFLGFAVPLVLFTGVNAWRYMYMIGAVFPILVLYSRKKIPESPYWVQHKYGKVAGEEAKDKFEASTGYSIENLPEISPGKTRLRDVFKGKYAAYIIFISIAWFSYDIVSYGIWTYSPLIFSTEITSYYADLYVVFTGMAESIPVVIGFLIAIYYVDRIGRRFLLIIGFLGSFAVLILFFFVNQYMVVGLLMTFSAFGFVHFFHNVGPSPITYTYPVEIFPTRIRGTAMGFATSVSRIGSIVAVFSFPIIDALYGLKAIIIFFAIFEFIGLALTLKYAPETKGKALT

SEQ ID NO: 11406 - protein, 112 aa, Bartonella sp. MM5136CA
ANEACLKMLQEIGSIERIPEFIARAKDKNDPFRLMGFGHRVYKNYDPRAKIMQKTCHEVLKELNIQDDPLLDIAIELEKIALSDEYFIEKKLYPNVDFYSGITLKALGFPTE

SEQ ID NO: 11407 - protein, 112 aa, Bartonella sp. RN10149MD
ANEACLKMLQEIGSIKRIPEFIARAKDKNDPFRLMGFGHRVYKNYDPRAKILQKTCHEVLKELNIQDDPLLDIAIELEKIALNDEYFIEKKLYPNVDFYSGITLKALGFPTE

SEQ ID NO: 11408 - protein, 112 aa, Bartonella sp. RN10616LA
ANEACLKMLQEIGSIQRIPEFIARAKDKNDPFRLMGFGHRVYKNYDPRAKIMQKTCHEVLKELNIQDDPLLDIAIELEKIALSDEYFIEKKLYPNVDFYSGIILKALGFPTE

SEQ ID NO: 11409 - protein, 112 aa, Bartonella sp. RN10627LA
ANEACLKMLQEIGSIKRIPEFIARAKDKNDPCRLMGFGHRVYKNYDPRAKIMQKTCHEVLKELNIQDDPLLDIAIELEKIALSDEYFIEKKLYPNVDFYSGITLKALGFPTE

SEQ ID NO: 11410 - protein, 429 aa, Streptomyces coelicolor A3(2)
MSDNSVVLRYGDGEYTYPVIDSTVGDKGFDIGKLRAQTGLVTLDSGYGNTAAYKSAITYLDGEAGILRYRGYPIEQLAERSSFVEVAYLLINGELPTVDELSAFKGEITQHTLLHEDVKNFYKGFPRDAHPMAMLSSVVSALSTFYQDSHNPFDERQRNLSTIRLLAKLPTIAAYAYKKSIGHPFVYPANNLGYVENFLRMTFSVPAQEYELDPTVVAALDKLLILHADHEQNCSTSTVRLVGSSQANMFASISAGINALWGPLHGGANQSVLEMLEGIRDAGGDVDSFIRKVKNKEDGVRLMGFGHRVYKNFDPRAKIIKAAAHDVLSALGKSDELLDIALKLEEHALSDDYFVSRSLYPNVDFYTGLIYRAMGFPTEMFTVLFALGRLPGWIAQWHEMIKEPGSRIGRPRQIYTGVVERDFVPVEER

SEQ ID NO: 11411 - protein, 390 aa, Streptomyces coelicolor A3(2)
MSVNRTAAAATPVEVPRGLAGVVVADTEVGDVRGLEGFYHYRQYSAVELARSRGFEDVWHLLVHGELPDARTGAAFAAETAALRRLPDAVRAALPAIAEAGAGSGPLAGMRTGLSLLGAALGFRPVYDLSVDQRRQDTLVAAAAVPTLLTALHRLGRGLEPVEPREDLSYAANYLYMLTGQEPDEACTRAIEQYLISTIDHGFNASTFTARVIASTGADVAACLAGAVSALSGPLHGGAPSRALDTLDAIGTPDRIDAWIRERVLAGDRIMGFGHAVYRTEDPRSRMLREVAQSFGGPRVEFAVEVERQVEAILAELKPGRELHTNVEFYAGVVMELCGLPREMFTPTFAAARVVGWSANILEQASDSKIIRPAARYVGPGAPVGVPAVA

SEQ ID NO: 11412 - protein, 387 aa, Streptomyces coelicolor A3(2)
MEAPHRLRTGRRTPLITRSRLMSDFVPGLEGVVAFETEIAEPDKEGGALRYRGVDIEDLVGHVSFGNVWGLLVDGAFNPGLPPAEPFPIPVHSGDIRVDVQSALAMLAPAWGLKPLLDIDAAQARDDLARAAVMALSYVAQSARGQSLPMVPQREIDKAQSVVERFMIRWRGEPDPKHVAAVDAYWTSAAEHGMNASTFTARVIASTGADVAAALSGAVGAMSGPLHGGAPSRVLHMIEEIERTGDAEAYVKKTLDAGERLMGFGHRVYRAEDPRARVLRRTARELGAPRYEVAEALEKAALAELHARRPDRVLATNVEFWAAIMLDFAEVPAPMFTSMFTCARTAGWSAHILEQKRTGRLVRPSARYTGPGTRDPREIEGYADIAG

SEQ ID NO: 11413 - protein, 421 aa, Streptomyces coelicolor A3(2)
MRDHEPDHPADSERRLTTREAAELLGVKPETVYAYVSRGQLGSRRAPGSRGSTFDADEVRALARRNRRDGGINPAPAAGQELTVRTRLTLIENDRFSYRGVDAVELAARHTYEEVAEWLWTGELRPGAAFSAPESSVAVARRAVDALPEHAGPADRLRVAAIAAAVTDPLRFDLSEEAVLGTARVLIPTLVAALPPVLRDGHDRDPIARRLWTRLSGQEPDEPTLQALDTALGLLVDHDLAASTLAVRVAASARAHAYAAVSAGLGVIEGPLHGAAGGLAHRMLLEVLELGSAAPVVAEELRAGRRIPGLGHRLYPGEDPRARALFALLEDVPRAAPAIAAARDVQATAARHTPLHANVDLALAVLTVSSGMASTAAETIFAVARTAGWIAHALEEYGERPLRMRPSGLYSGPRPPRPLPE

SEQ ID NO: 11414 - protein, 464 aa, Mus musculus
MALLTAATRLLGAKNSSCLVLAARHASASSTNLKDVLSNLIPKEQARIKTFKQQHGKTVVGQITVDMMYGGMRGMKGLVYETSVLDPDEGIRFRGYSIPECQKMLPKAKGGEEPLPEGLFWLLVTGQMPTEEQVSWLSREWAKRAALPSHVVTMLDNFPTNLHPMSQLSAAITALNSESNFARAYAEGMNRAKYWELIYEDCMDLIAKLPCVAAKIYRNLYREGSSIGAIDSRLDWSHNFTNMLGYTDPQFTELMRLYLTIHSDHEGGNVSAHTSHLVGSALSDPYLSFAAAMNGLAGPLHGLANQEVLVWLTQLQKEVGKDVSDEKLRDYIWNTLNSGRVVPGYGHAVLRKTDPRYSCQREFALKHLPKDPMFKLVAQLYKIVPNILLEQGKAKNPWPNVDAHSGVLLQYYGMTEMNYYTVLFGVSRALGVLAQLIWSRALGFPLERPKSMSTDGLMKFVDSK

SEQ ID NO: 11415 - protein, 466 aa, Mus musculus
MALLTAAAWFLGTKNPPCLVLAARHASASSTNLKDVLRNLIPKEQARIKTFRKKHGKTVVGQITVDMMYGGMRGMKGLVYETSVLDPDEGIRFRGYSIPECQKLLPKAKGGKEPLPEGLFWLLVTGQMPTEEQVSWLSQEWVKRAALPSHVVTMLDNFPTKLHPMSQLSAAITVLNNESNFARAYAQGMNRTKYWELTYEDCMDLLAKLPCVAAKIYRNLYREDRNIEAIDSKLDWSHNFTNMLGYTDPQFTELMRLYLTIHSDHEGGNVSAHTSHLVGSALSDPYLSFAAALNGLAGPLHGLANQEVLVWLTQLQKEVGEDASDEKLKNYIWNTLNSGRVVPGYGHAVLRKTDPRYSCQREFALKHLPKDPMFKLVGQLYKIVPDILLEQGKVKNPWPNVDAHSGVLLQYYGMREMNYYTVLFGVSRALGVLSQLIWSRALGFPLERPKSMSTDALMKFVNSESG

SEQ ID NO: 11416 - protein, 466 aa, Mus musculus
MALLTAAAWFLGTKNPPCLVLAARHASASSTNLKDVLRNLIPKEQARIKTFRKKHGKTVVGQITVDMMYGGMRGMKGLVYETSVLDPDEGIRFRGYSIPECQKLLPKAKGGKEPLPEGLFWLLVTGQMPTEEQVSWLSQEWVKRAALPSHVVTMLDNFPTKLHPMSQLSAAITVLNNESNFARAYAQGMNRTKYWELTYEDCMDLLAKLPCVAAKIYRNLYREDRNIEAIDSKLDWSHNFTNMLGYTDPQFTELMRLYLTIHSDHEGGNVSAHTSHLVGSALSDPYLSFAAALNGLAGPLHGLANQEVLVWLTQLQKEVGEDASDEKLKNYIWNTLNSGRVVPGYGHAVLRKTDPRYSCQREFALKHLPKDPMFKLVGQLYKIVPDILLEQGKAKNPWPNVDAHSGVLLQYYGMREMNYYTVLFGVSRALGVLSQLIWSRALGFPLERPKSMSTDALMKFVNSESG

SEQ ID NO: 11417 - protein, 466 aa, Rattus norvegicus
MALLTAAARLLGAKNSSCLVLAARHASASSTNLKDILSNLIPKEQARVKTFRQQHGKTVVGQITVDMMYGGMRGMKGLVYETSVLDPDEGIRFRGYSIPECQKLLPKAKGGEEPLPEGLFWLLVTGQMPTEEQVSWLSQEWAKRAALPSHVVTMLDNFPTNLHPMSQLSAAITALNSESNFARAYAEGINRTKYWELIYEDCMDLIAKLPCVAAKIYRNLYREGSSIGAIDSKLDWSHNFTNMLCYTEPQFTELMRLYLTIHSDHDGGNVSAHTSHLVGSALSDTYLSFAAAMNGLAGPLHGLANQEVLVWLTQLQKEVGKDVSDEKLRDYIWNTLNSGRVVPGYGHAVLRKTDPRYSCQREFALKHLPKDPMFKLVAQLYKIVPNILLEQGKAKNPWPNVDAHSGVLLQYYGMTEMNYYTVLFGVSRALGVLAQLIWSRALGFPLERPKSMSTDGLMKFVDSKSG

SEQ ID NO: 11418 - protein, 378 aa, Nostoc sp. PCC 7120
MMVCEYKPGLEGIPAAQSSISYVDGQKGILEYRGIRIEDLAQQSTFLETAYLLIWGELPTKEELQVFEEEVRLHRRIKYRIRDMMKCFPESGHPMDALQASAAALGLFYSRRDLHNPAYIRDAVVRLIATIPTMVAAFQLMRKGNDPVKPRDDLDYSANFLYMLNEKEPDALAAKIFDICLILHVEHTMNASTFSARVTASTLTDPYAVVASAVGTLGGPLHGGANEEVIQMLEEIGSVENVRSYVEERLQRKDKLMGFGHRVYKVKDPRATILQGLAEQLFAKFGADKYYDIAQEMERVVEEKLGHKGIYPNVDFYSGLVYRKMGIPTDLFTPIFAIARVAGWLAHWKEQLEENRIFRPTQVYNGKHSVTYTPIDQR

SEQ ID NO: 11419 - protein, 378 aa, Nostoc sp. PCC 7120
MMVCEYKPGLEGIPAAQSSISYVDGQKGILEYRGIRIEDLAQQSTFLETAYLLIWGELPTKEELQVFEEEVRLHRRIKYRIRDMMKCFPESGHPMDALQASAAALGLFYSRRDLHNRCYIRDAVVRLIATIPTMVAAFQLMRKGNDPVKPRDDLDYSANFLYMLNEKEPDALAAKIFDICLILHVEHTMNASTFSARVTASTLTDPYAVVASAVGTLGGPLHGGANEEVIQMLEEIGSVENVRSYVEERLQRKDKLMGFGHRVYKVKDPRATILQGLAEQLFAKFGADKYYDIAQEMERVVEEKLGHKGIYPNVDFYSGLVYRKMGIPTDLFTPIFAIARVAGWLAHWKEQLEENRIFRPTQVYNGKHSVTYTPIDQR

SEQ ID NO: 11420 - protein, 469 aa, Rhodobacter sphaeroides
MPRRPEPPPSPSVRAPVRRGTGTYRPRAIPCGAGPNERGSSMTKSAKLTIGEKVIDLPIHSPTLGPDVVDIRKLYAEADVFTYDPGFTSTAACESTITYIDGDKGELFYRGYPIEQLADRSHYLEVCYLLLYGELPNAAQQADFEYRITRHTMLHEQIHYFFRGFRRDSHPMATMVGVVGAMSAFYHDSLDINDPWQREVAAIRMIAKLPTIAAMAYKYSIGQPFNYPQNHLDYAGNFLHMCFAVPAEPYTVNPVLAKAMDRIMMLHADHEQNASTSTVRLAGSSGANPFACIAAGIACLWGPAHGGANRACLEMLREIGTVDRIPEYIRRAKDKDDPFRLMGFGHRVYKNFDPRAKVMKESADEVLGLLGIENNPTLQVAKELERIALEDDYFVAKKLYPNVDFYSGIILDAMGFPTSMFTPIFAISRTVGWISQWKEMIGDPTQKIGRPRQLYKGETRRDYVDLRHR

SEQ ID NO: 11421 - protein, 434 aa, Rhodopseudomonas palustris
MDATTNNKTATLTVGNKNFDLPVLTGTVGPDVIDIGKLYAQTGMFTYDPGFTSTASCQSKITYIDGDAGVLEYRGYPIEQLAEKGDFLETCYLLLYGELPTKAQKEDFDYRVTRHNMVHEQMARFFQGFRRDAHPMAVMVASVGALAAFYHDSTDINDPTQRMVASIRMIAKVPTLAAMAYKYSVGQPFIYPKNTLSYAANFLRMCFATPCEEYVVNPVLANALDKIFTLHADHEQNASTSTVRIAGSSGANPFACIAAGIACLWGPAHGGANEAALAMLKEIGTVENIPDFIAKVKDKSSSVRLMGFGHRVYKNYDPRAKIMQQVCHEVLAETGHHGDPLLKVAMELEKIALSDQYFIDRKLYPNVDFYSGITLKAMGFPTDMFTVLFAVARTVGWISQWSEMIEDPQQKIGRPRQLFTGATTRNYVEIGKRG

SEQ ID NO: 11422 - protein, 291 aa, Rhodopseudomonas palustris
MDVMRSGVSSLGCVLPEAGDLNHPGARDIADRLLASFGSMLLYWYHFAHTGRRIEVETDDDSIGGHFLHLLHRIKPRESHVRAMHTSLNLYAEHEFNASTFTARCIAGTGADFYSAIAGAIGALRGPKHGGANEAAFEIQKRYATAEEAEADIRRRVAAKEVVIGFGHPVYTIADPRNRVIKEVARRLSVEAGSVKMFEIADRIEAVMHESKKMFANLDWFSAVSYHAMGVPTSLFTPLFVISRTAGWSAHIIEQRQDNKIIRPTANYVGPENRLFVPIEQRGHVPSSRHA

SEQ ID NO: 11423 - protein, 424 aa, Acinetobacter calcoaceticus subsp. anitratus
MSEATGKKAVLHLDGKEIELPIYSGTLGPDVIDVKDVLASGHFTFDPGFMATASCESKITFIDGDKGILLHRGYPIDQLATQADYLETCYLLLNGELPTAEQKVEFDAKVRAHTMVHDQVSRFFNGFRRDAHPMAIMVGVVGALSAFYHNNLDIEDINHREITAIRLIAKIPTLAAWSYKYTVGQPFIYPRNDLNYAENFLHMMFATPADRDYKVNPVLARAMDRIFTLHADHEQNASTSTVRLAGSTGANPYACISAGISALWGPAHGGANEAVLKMLDEIGSVENVAEFMEKVKRKEVKLMGFGHRVYKNFDPRAKVMKQTCDEVLEALGINDPQLALAMELERIALNDPYFVERKLYPNVDFYSGIILKAIGIPTEMFTVIFALARTVGWISHWLEMHSGPYKIGRPRQLYTGEVQRDIKR

SEQ ID NO: 11424 - protein, 433 aa, Rhodospirillum rubrum
MTDSKQTVTLVDNRSGKSYEFPILSGSTGPDVVDIRKFYTETGMFTYDPGYTSTGSCSSAVTYIDGDAGILLHRGYAIEDLAMHCDFTEVAYLLLRGELPTAPKKTEFEKIITYHTMVHEQLHKFYDGFRRDAHPMAVMCGVVGALSAFYHDSIDITDPIQRMIAQHRLVAKMPTIAAWAYKYSQGQPFMYPRNNLTYAENFLHMMFATPCEEYKVSPVLARAMDRILILHADHEQNASTSTVRLAGSSGANPFACIAAGIASLWGPAHGGANEAVLKMLTEIGSPDRVDDFVKKAKDKNDPFRLMGFGHRVYKNYDPRAKIMAATCHEVLDELGIVDEPLLEIAMRLEKIALEDEYFIEKKLYPNVDFYSGIIFRAIGIPTSMFTCLFALARTVGWISQWKEMIEDPDQKIGRPRQLYNGATKRDFLPMDKR

SEQ ID NO: 11425 - protein, 148 aa, Rhodospirillum rubrum
PDRVDDFVKKAKDKNDPFRLMGFGHRVYKNYDPRAKIMAATCHEVLDELGIVDEPLLEIAMRLEKIALEDEYFIEKKLYPNVDFYSGIIFRAIGIPTSMFTCLFALARTVGWISQWKEMIEDPDQKIGRPRQLYNGATKRDFLPMDKR

SEQ ID NO: 11426 - protein, 386 aa, Rhodospirillum rubrum
MTETTFKPKKSVALSGIAAGNTALCTVGRSGNDLHYRGYNILDIAETCEFEEIAHLLIHGGLPTAAQYASYKAKLKVSRGLPRSVKEALETIPAAAHPMDVMRSGVSALGCALPEAYDHHPVDARDIADRLIASLGSMLLYWYHYAHHGRRIEVETDEDSIGGHFLRLLHGKPPSDDFVQAMHTSLILYAEHEFNASTFTARVIAGTGSDMYSCISGAIGALRGPKHGGANEVAFGIQKRYASLQHAEEDIRRRVEAKEVVIGFGHPVYTTADPRNAVIKRVAKGLADEVRSHLQYDVAERIEQVMWDTKAMFPNLDWYSAVSYHLMGVPTSMFTPLFVIARTCGWAAHVIEQRQDNKIIRPSANYTGPENLAFVPMSARSDHVSM

SEQ ID NO: 11427 - protein, 113 aa, Rickettsia monacensis
ANEAVINMLKEIGSSENIPKYIAKAKDKNDPFRLMGFGHRVYKNYDPRAAVLKETCKEVLKELEQLENNPLLQIAIELEAIALKDEYFIERKLYPNVDFYSGIIYKAMGIPSQ

SEQ ID NO: 11428 - protein, 326 aa, Bartonella henselae subsp. arupensis
DGDKGILLYRGYPIEQLAEKGDFLESCYLLLYGELPTKQEKSDFDRCIMQHTMVHEQFARFFHGFRRDSHPMAVMVACLGAMSAFYHDSIDITDPQQRMIASVRLISKVPTLAAMAYKYSIGQAFVYPRNDLSYAANFLRMCFSVPCEEYKTNPVLTRAMDRIFILHADHEQNASTSTVRLAGSSGANPFACIAAGVACLWGPAHGGANEACLKMLQEIGSVKRIPEFIARAKDKNDPFRLMGFGHRVYKNYDPRAKIMQKTCHEVLKELNIQDDPLLDIAIELEKIALNDEYFVEKKLYPNVDFYSGITLKALGFPTEMFTVLFE

SEQ ID NO: 11429 - protein, 430 aa, Chloroflexus aurantiacus
MAMTRNTLTVTDNRTGKTYEIPIENNTIRATDLRQIKVSEDDFGLMSYDPAYLNTASCKSSITYIDGDKGILEYRGYPIEQLAEQSSYLEVAYLLLYGELPSKERLAWWEYRISRHLFLHNSLVELIQAFRYDAHPMGILISSVAAMSTLYPEAKNIHDPAVREKQIWRIIGQIPTIAAFAYRHRIGRPFNLPDSSLSYTANLLYMMDYMNQREYEVNPVLAKALDVLFILHADHEQNCSTSVMRSVGSSHADPYNALAAAAAALYGPLHGGANEAVLRMLQQIGHPKNVPAFIERVKKGEMRLMGFGHRVYKNYDPRAKIIRKIAHEVFAATAANPLLDVAMELERTALEDEYFISRKLYPNVDFYSGLIYQALRFPIEYFPFLFAIPRASGWLAQWIEMLEDPEQKITRPRQVYVGPQRRDYVPIDQR

SEQ ID NO: 11430 - protein, 95 aa, uncultured Bartonella wbs089
TSQTCSYSGMDRIFILHADHEQNASTSTVRLAGSSGANPFACIAAGVACLWGPAHGGANEACLKMLQEIGSVERIPEFIARAKDKNDPFRLMGFG

SEQ ID NO: 11431 - protein, 114 aa, Bartonella birtlesii
GGANEACLKMLQEIGSVKRIPEFIARAKDKNDPFRLMGFGHRVYKNYDPRAKIMQKTCHKVLKELNIQDDPLLDIAIELEKIALNDEYFVEKKLYPNVDFYSGITLKALGFQPK

SEQ ID NO: 11432 - protein, 373 aa, Sulfolobus tokodaii
MEIKKGLEDVYVKETEITYIDGELGRLYYRGYSIYDLAEFSNFEEVSYLILYGKLPNREELNWFQEKLREERYLPDFIIKFLREVRKDAQPMDILRTAVSLLGIEDSKNDERTDIKGIKLISKFPTIVANYARLRKGLDIIEPDPKLSHSENFLYMLYGDRPNEIKSKAMDVTLILHIDHEMNASTFASLVVASTFSDLYSSIVAGISALKGPLHGGANYEALKMFKEIGSPEKVNDYILNRLSNKQRIMGFGHRVYKTYDPRARILKQYAKLLAEKEGGEIYTLYQIAEKVEEIGIKYLGPKGIYPNVDFFSSIVFYSLGFEPDFFPAVFASARVVGWVAHIMEYIKDNKIIRPKAYYKGEIGKKYIPIDSR

SEQ ID NO: 11433 - protein, 378 aa, Sulfolobus tokodaii
MSVEVSRGLENVIIKTTGLTYIDGINGILRYRGYDINDLVNYASYEELIHLMLYGELPNRQQLNQIKGIINESFEVPEQVISTIFSMPRNCDAIGMMETAFGILASIYDPKWNRATNKELAVQIIAKTATITANIYRAKEGLKPKIPEPSESYAESFLAATFGKKPTQEEIKAMDASLILYTDHEVPASTTAALVASSTLSDMYSCIVAALAALKGPLHGGAAEEAFKQFVEIGSVENADKWFEEKIIKGKSRLMGFGHRVYKTYDPRAKIFKTLAKSFAEKNENVKKYYEIAERIEKLGVDTFGSKHIYPNTDFYSGIVFYALGFPIYMFTSLFALSRVLGWLAHIIEYVEEQHRLIRPRALYIGPEKREFKPIELR

SEQ ID NO: 11434 - protein, 113 aa, Rickettsia sp. 'midichlorii'
ANEAVINMLKEIGSSENIPKYIAKAKDKNDPFRLMGFGHRVYKNYDPRAAVLKETCKEVLKELGQLENNPLLQIAIELEAIALKDEYFIERKLYPNVDFYSGIIYKAMGIPSQ

SEQ ID NO: 11435 - protein, 410 aa, Rickettsia sp. IRS3
DSEFAELKIRGKIFKLPILKASIGEDVIDISRVSAEADCFTYDPGFMSTASCQSTITYIDGDKGILRHRGYDIKDLAEKSDFLEVAYLLIYGELPSSEQYNNFTKQVAHHSLVNERLHYLFQTFCSSSHPMAIMLAAVGSLSAFYPDLLNFKEADYELTAIRMIAKIPTIAAMSYKYSIGQPFIYPDNSLDFTENFLHMMFTTHCTKYKVNPIIKNALNKIFILHADHEQNASTSTVRIAGSSGANPFACISTGIASLWGPAHGGANEAVINMLKEIGSSENIPKYIAKAKDKNDPFRLMGFGHRVYKNYDPRAAVLKETCKEVLKELEQLENNPLLQIAIELEAIALKDEYFIERKLYPNVDFYSGIIYKAMGIPSQMFTVLFAIARTVGWMAQWKEMHEDPEQKISRP

SEQ ID NO: 11436 - protein, 411 aa, Rickettsia sp. DnS14
DSEFAELKIRGKIFKLPILKASIGEDVIDISRVSAEADCFTYDPGFMSTASCQSTITYIDGDKGILRHRGYDIKDLAEKSDFLEVAYLLIYGELPSGEQYNNFTKQVAHHSLVNERLHYLFQTFCSSSHPMAIMLAAVGSLSAFYPDLLNFKEADYELIAIRMIAKIPTIAAMSYKYSIGQPFIYPDNSLDFTENFLHMMFATPCTKYKVNPIIKNALNKIFILHADHEQNASTSTVRIAGSSGANPFACISTGIASLWGPAHGGANEAVINMLKEIGSSEYIPKYIAKAKDKNDPFRLMGFGHRVYKNYDPRAAVLKETCKEVLKELGQLDNNPLLQIAIELEAIALKDEYFIERKLYPNVDFYSGIIYKAMGIPSQMFTVLFAIARTIGWMAQWKEMHEDPEQKISRPR

SEQ ID NO: 11437 - protein, 411 aa, Rickettsia sp. DnS28
DSEFAELKIRGKIFKLPILKASIGEDVIDISRVSAEADCFTYDPGFMSTASCQSTITYIDGDKGILRHRGYDIKDLAEKSDFLEVAYLLIYGKLPSGEQYNNFTKQVAHHSLVNERLHYLFQTFCSSSHPMAIMLAAVGSLSAFYPDLLNFKEADYELIAIRMIAKIPTIAAMSYKYSIGQPFIYPDNSLDFTENFLHMMFATPCTKYKVNPIIKNALNKIFILHADHEQNASTSTVRIAGSSGANPFACISTGIASLWGPAHGGANEAVINMLKEIGSSKYIPKYIAKAKDKNDPFRLMGFGHRVYKNYDPRAAVLKETCKEVLKELGQLDNNPLLQIAIELEAIALKDEYFIERKLYPNVDFYSGIIYKAMGIPSQMFTVLFAIARTIGWMAQWKEMHEDPEQKISRPR

SEQ ID NO: 11438 - protein, 397 aa, Synechocystis sp. PCC 6803
MNYMMTDNEVFKEGLAGVPAAKSRVSHVDGTDGILEYRGIRIEELAKSSSFIEVAYLLIWGKLPTQAEIEEFEYEIRTHRRIKYHIRDMMKCFPETGHPMDALQTSAAALGLFYARRALDDPKYIRAAVVRLLAKIPTMVAAFHMIREGNDPIQPNDKLDYASNFLYMLTEKEPDPFAAKVFDVCLTLHAEHTMNASTFSARVTASTLTDPYAVVASAVGTLAGPLHGGANEEVLNMLEEIGSVENVRPYVEKCLANKQRIMGFGHRVYKVKDPRAIILQDLAEQLFAKMGHDEYYEIAVELEKVVEEYVGQKGIYPNVDFYSGLVYRKLDIPADLFTPLFAIARVAGWLAHWKEQLSVNKIYRPTQIYIGDHNLSYVPMTERVVSVARNEDPNAII

SEQ ID NO: 11439 - protein, 433 aa, Ralstonia metallidurans
MTPSDVKATLSFSDGSPSVELPIYKGTVGPDVIDIRKLYGQTGKFTYDPGFMSTASCNSKITYIDGDKGELLYRGYPIEQLAQKCDHLETCYLLLKGELPNAKQKEEFVNSVMNHTMVHEQLQFFLRGFRRDAHPMAVLTGLVGAMSAFYHDAMDIDDPHQREISAIRLIAKMPTLVAMAYKYTMGQPYIYPQNDLSYSGNFMRMMFATPCAPYTVNPVLERALDRIFILHADHEQNASTSTVRLAGSSGTNPFAAIAAGVACLWGPAHGGANEAALKMLEEIGSVDNIGEFIKQVKDKNSGVRLMGFGHRVYKNYDPRAKLMRETCYEVLNELGLHNDPLFKLAMELEKIALEDEYFVSRKLYPNVDFYSGIVQRALGIPTSLFTCIFALARTPGWISQWEEMITDPEYKIGRPRQLFNGAAAREVPDLAKR

SEQ ID NO: 11440 - protein, 453 aa, Ralstonia metallidurans
MSSRRSAARAPRRTWSTRCRRAPNCTIASATMTSSRSSTRSSHKARAADPAPTAMTARKHTKLNQETQMSEAQPLATPKPKKSVALSGIAAGNTALCTVGRSGNDLHYRGYDILDIADTCEFEEIAHLLVHGKLPTKSELAAYKVKLKALRGLPANVKAALEWVPASAHPMDVMRTGVSVLGTVLPEKDDHNTPGARDIADRLMASLGSMLLYWYHYSHNGRRIEVETDDDSIAAHFLHLLHGEAPSKLWERAMQTSLILYAEHEFNASTFACRVVAGTGSDMYSAICGGIGALRGPKHGGANEVAFEIQKRYDTPDEAEADIRRRVENKEVVIGFGHPVYTISDPRNVVIKEVARKLSKDAGSMKMFNIAERLETVMADAKKMFPNLDWFSAVSYHMMGVPTAMFTPLFVIARTSGWAAHVIEQRVDNKIIRPTANYTGPENLKFVPIEKRA

SEQ ID NO: 11441 - protein, 355 aa, male-killing Rickettsia from Adalia decempunctata
GFMSTASCRSTITYIDGDKGILRYRGYDIKDLAEKSDFLEVAYLLIYGELPSSEQYNNFTKKVAVHSLVNERLHYLFQTFCSSSHPMAIMLAAVGSLSAFYPDLLNFKEADYELTAIRMIAKIPTIAAMSYKYSIGQPFIYPDNSLDFTENFLHMMFATPCEKYKVNPIIKNALNKIFILHADHEQNASTSTVRIAGSSGANPFACVSTGIASLWGPAHGGANEAVINMLKEIGSSENIPKYIAKAKDKNDPFRLMGFGHRVYKNYDLRAAVLKETCKEVLKELGQLDGNPLLQIAIELEAIALKDEYFIERKLYPNVDFYSGIIYKAMGIPSQMFTVLFAIARTVGWMAQWKEM

SEQ ID NO: 11442 - protein, 412 aa, Rickettsia hulinii
ELKIRGKIFKLPILKASIGEDVIDISRVSAEADCFTYDPGFMSTASCQSTITYIDGDKGILRHRGYDIKDLAEKSDFLEVAYLLIYGELPSGEQYNNFTKQVAHHSLVNERLHYLFQTFCSSSHPMAIMLAAVGSLSAFYPDLLNFKEADYELTAIRMIAKIPTIAAMSYKYSIGQPFIYPDNSLDFTENFLHMMFATPYTKYTVNPIIKNALNKIFILHADHEQNASTSTVRIAGSSGANPFACISTGIASLWGPAHGGANEAVINMLKEIGSSEYIPKYIAKAKDKNDPFRLMGFGHRVYKNYDPRAAVLKETCKEVLKELGQLDNNPLLQIAIELEAIALKDEYFIERKLYPNVDFYSGIIYKAMGIPSQMFTVLFAIARTVGWMAQWKEMHEDPEQKISRPRQLYTGG

SEQ ID NO: 11443 - protein, 91 aa, Bartonella sp. 'cattle-1'
STEKIPEFIERAKDKNDPFRLMGFGHRVYKNYDPRAKLMQKTCHEVLKELNIQDDPLLDIAMELEKIALNDEYFIEKKLYPNVDFYSGITL

SEQ ID NO: 11444 - protein, 91 aa, Bartonella sp. 'deer-1'
SIEKIPEFIARAKNKNDPFRLMGFGHRVYKNYDPRAKLMQKTCHEVLKELNIQDDPLLDIAMELEKIALNDEYFIEKKLYPNVDFYSGITL

SEQ ID NO: 11445 - protein, 91 aa, Bartonella sp. 'deer-4'
SIEKIPEFIARAKDKNDSFRLMGFGHRVYKNYDPRAKLMQKTCHEVLKELNIQDDPLLDIAMELEKIALNDEYFIEKKLYPNVDFYSGITL

SEQ ID NO: 11446 - protein, 91 aa, Bartonella sp. 'deer-6'
SIEKIPEFIARAKDKNDPFRLMGFGHRVYKNYDPRAKLMQKTCHEVLKELNIKDDPLLDIAMELEKIALSDKYFIEKKLYPNVDFYSGITL

SEQ ID NO: 11447 - protein, 91 aa, Bartonella sp. 'elk-3'
SIEKIPEFIARAKDKNDSFRLMGFGHRVYKNYDPRAKLMQKTCHEVLKELNIKDDPLLDIAMELEKIALSDEYFIEKKLYPNVDFYSGITL

SEQ ID NO: 11448 - protein, 427 aa, Neisseria meningitidis MC58
MSKSIKLNVPGQAGLELPVLEASIGHDVVDIRGLTKNTGLFSFDPGFVSTASCESKITYIDGDQGLLYYRGYPIEQLAEKSDYLEVCYLLIYGELPTPEQKAEFDNTVRRHTMVHEQLTWFFRGFRRDAHPMAMMVGVVGALSAFYQDSLDISNPEHRKIAIYRLISKIPTIAAMCYRYSNGLPFNYPKNNLSYSENFLHMMFATPCEDYKPNPVLARALDRIFILHADHEQNASTSTVRLAGSSGANPFACIAAGIACLWGASHGGANEAVLKMLDEIGDVSNVAAYMEGVKQRKYRLMGFGHRVYRNMDPRASIMRETCYEVLKELGLEDSPKFKLAMELEQIALKDPFFIERKLYPNVDFYSGIVLSALGIPTEMFTVIFALSRSVGWISHWHEMISDPSLKIGRPRQLYTGSERRDYVPPGER

SEQ ID NO: 11449 - protein, 384 aa, Neisseria meningitidis MC58
MTETTQTPTLKPKKSVALSGVAAGNTALCTVGRTGNDLSYRGYDILDLAQKCEFEEVAHLLIHGHLPNKFELAAYKTKLKSMRGLPIRVIKVLESLPAHTHPMDVMRTGVSMLGCVHPERESHPESEARDIADKLIASLGSILLYWYQYSHNGKRIEVESDEETIGGHFLQLLHGKRPSESHIKAMHVSLILYAEHEFNASTFTARVIAGTGSDMYSSITGAIGALKGPKHGGANEVAYDIQKRYRNADEAEADIRERIGRKEIVIGFGHPVYTISDPRNVVIKEVARGLSKETGDMRLFDIAERLESVMWEEKKMFPNLDWFSAVSYQKLGVPTAMFTPLFVISRTTGWSAHVLEQRKDGKIIRPSANYTGPEDLAFVEIEER

SEQ ID NO: 11450 - protein, 411 aa, Deinococcus radiodurans
MCPARSHLFVTPAGTFDRPFFAPWKKGRCYPLLTMSNIAKGLEGVLFTESKLTFINGSEGILTHLGIPIQEWAEKSTFEELSLALLDAKLPTAEELAKFDAELKANRAIPDQLVGIIRDMPKGVHPMQALRTAVSYLGLLDPQAEDITPEARRAISTRMIAQFSTIIAAINRAQEGQDIVAPRADLTHAGNFLYMLTGNEPTPEQARLFDIALVLHADHGMNASTFTAIATSSTLSDMYSCMVSAIGALKGPLHGGANEAVMTMLDEIGTVDKAEAYITGKLDNKEKIMGVGHRVYKYFDPRSRVLRDYAEHVANKEGKSNYYQILEAIEKIIVDRMGAKGIYPNVDFYSGTVYSDLGIKKEYFTPIFALARISGWCASVIEYSQDNRLLRPDAEYTGARDQHYVDIKDRQ

SEQ ID NO: 11451 - protein, 372 aa, Streptococcus mutans
MAETNGLKDMIACDTRISAIKDNKLSYAGYDIADLMDNKTRFEEVIYLLWNLHLPTAIELKQFEEKLRKNYAISDAIEQCILIQSRQHLHPMSVLRSTVSLLGVYNLKAEERSVEATYDQSIQLMAKIPTIIATFARLRQGLSPIAPRKDLGFAANFLYMLNGRLPSELEILAMNRALVLHAEHELNASTFAARVCASTLSDIYSCVTTAIGTLKGPLHGGANERVFDMLREIREYGDVDSYLQEKLNSKEKIMGFGHRVYQTQDPREKYLREMARELTKGTEHDIWYQLSKKVEMCMKQKKNLIPNVDFYSATVYHVLGIDSSIFTLIFAMSRVSGWIAHIQEQQKNNKLIRPRSHYTGMRKLRYIPIERR

SEQ ID NO: 11452 - protein, 413 aa, Rickettsia heilongjiangii
IAELKIRGKIFKLPILKASIGEDVIDISRVSAEADCFTYDPGFMSTASCQSTITYIDGDKGILRHRGYDIKDLAEKSDFLKVAYLLIYGELPSGEQYNNFTKQVAHHSLVNERLHYLFQTFCSSSHPMAIMLAAVGSLSAFYPDLLNFKEADYELTAIRMIAKIPTIAAMSYKYSIGQPFIYPDNSLDFTENFLHMMFATPYTKYTVNPIIKNALNKIFILHADHEQNASTSTVRIAGSSGANPFACISTGIASLWGPAHGGANEAVINMLKEIGSSEYIPKYIAKAKDKNDPFRLMGFGHRVYKNYDPRAAVLKETCKEVLKELGQLDNNPLLQIAIELEAIALKDEYFIERKLYPNVDFYSGIIYKAMGIPSQMFTVLFAIARTVGWMAQWKEMHEDPEQKISRPRQLYTG

SEQ ID NO: 11453 - protein, 413 aa, Rickettsia sp. BJ-90
IAELKIRGKIFKLPILKASIGEDVIDISRVSAEADCFTYDPGFMSTASCQSTITYIDGDKGILRHRGYDIKDLAEKSDFLEVAYLLIYGELPSGEQYNNFTKQVAHHSLVNERLHYLFQTFCSSSHPMAIMLAAVGSLSAFYPDLLNFKEADYELTAIRMIAKIPTIAAMSYKYSIGQPFIYPDNSLDFTENFLHMMFATPCTKYTVNPIIKNALNKIFILHADHEQNASTSTVRIAGSSGANPFACISTGIASLWGPAHGGANEAVINMLKEIGSSEYIPKYIAKAKDKNDPFRLMGFGHRVYKNYDPRAAVLKETCKEVLKELGQLDNNPLLQIAIELEAIALKDEYFIERKLYPNVDFYSGIIYKAMGIPSQMFTVLFAIARTVGWMAQWKEMHEDPEQKISRPRQLYTG

SEQ ID NO: 11454 - protein, 433 aa, Burkholderia fungorum
MTPSDVKATLSFSDNSPSVEMPIYKGTLGPDVIDIRKLYGQTGKFTYDPGFMSTAACNSAITYIDGDKGELLYRGYPIDNLAENADFLETCYLLLKGELPNAQQNAEFVKTVTNHTMVHEQMHFFFRGFRRDAHPMAILVAAVGALSAFYHDSLDINNPRHREVSAIRMIAKLPTLVAMAYKYSIGQPFAYPKNDLSYSANFMHMMFSNPCEEYKVNDVLVRALDRILILHADHEQNASTSTVRLAGSSGANPFACIAAGIACLWGPAHGGANEAALNMLEEIGSVDNIPEFIKQVKDKNSGVKLMGFGHRVYKNYDPRAKLMRETCHEVLEELGLHDDPLFKLAMALEKIALEDEYFVSRKLYPNVDFYSGIVQRALGIPTSMFTCIFAMARTVGWIAQWNEMIADPEQKIGRPRQLFIGDTQREAKPIAQR

SEQ ID NO: 11455 - protein, 432 aa, Burkholderia fungorum
MNSKTHATLSFSDSDQTIDLPIYQGALGPDVIDIRKLYGQTGKFTYDPGFMSTAACNSAITYIDGDKGELLYRGYPIDNLAQNADFLETCYLLLKGELPNAQQKEEFVKTVTQHTMVHDQMHFFFRGFRRDAHPMAILVAAVGALSAFYHDSLDISNPEHREISAIRMIAKLPTLVAMAYKYTVGQPFVYPKNDLSYSANFMRMMFANPAEEYKVNDVLVRALDRILILHADHEQNASTSTVRLAGSSGANPFACIAAGIACLWGPAHGGANEAALNMLEEIGSVDNIPEFIAQVKDKNSGVKLMGFGHRVYKNYDPRAKLMRETCHEVLEELGLHDDPLFKLAMALEKIALEDDYFVSRKLYPNVDFYSGIVQRALGIPTAMFTCIFAMARTVGWIAQWNEMIADPEQKIGRPRQLFVGETQREAKPLAKR

SEQ ID NO: 11456 - protein, 519 aa, Burkholderia fungorum
MKRSPRPPKSCWPRSPPNGVPRAITTRCMTARVIAITGLCYAARKPLAALFRKTRRRFSRKWALTCKPHHEHGRASGNRHGGAERRICTPSCNRSTESSDAADPPHRTCRSTRSNEQAQRRLREMSETTQTAGTPGGNEPKSGFKPKKSVALSGVTAGNTALCTVGKTGNDLHYRGYDILDIASACEFEEIAYLLVHEKLPTQAELTAYKTKLKALRGLPANVKAALEWIPAAAHPMDVMRTGVSVLGTVLPEKDDHNLPGARDIADRLMASLGSMLLYWYHYSHNGKRIEVETDDDSIGGHFLHLLHGVEPSNAWVDAMHVSLNLYAEHEFNASTFTGRVIAGTGSDIYSALTGAIGALRGPKHGGANEVAFEIQSRYQTPDEAEADIRRRVENKEVVIGFGHPVYTISDPRNKVIKEVAKKLSKEAGNTRLFSIAERLESVMWDAKKMFPNLDWFSAVSYHMMGVPTAMFTPLFVIARTAGWSAHIIEQRIDNKIIRPSANYTGPENLKYLPLNRRK

SEQ ID NO: 11457 - protein, 389 aa, Burkholderia fungorum
MSEADNSTPNTGAFKPKKSVALSGVTAGNTALCTVGKTGNDLHYRGYDILDIASACEFEEIAYLLVHEKLPTQAELTAYKTKLKALRGLPANVKAALEWIPAAAHPMDVMRTGVSVLGTVLPEKDDHNLPGARDIADRLMASLGSMLLYWYHYSHNGKRIEVETDDDSIGGHFLHLLHGVEPSNAWVDAMHVSLNLYAEHEFNASTFTGRVIAGTGSDIYSALTGAIGALRGPKHGGANEVAFEIQSRYQTPDEAEADIRRRVENKEVVIGFGHPVYTISDPRNKVIKEVAKKLSKEAGNTRLFSIAERLESVMWDAKKMFPNLDWFSAVSYHMMGVPTAMFTPLFVIARTAGWSAHIIEQRIDNKIIRPSANYTGPDDLPFVPLAKRV

SEQ ID NO: 11458 - protein, 545 aa, Burkholderia fungorum
MSTSNSLTAAEAAAALGISLPTLYAYVSRGMLSSSPDAQGKHRLYDAGEVRRLARRKEDGKRAGKVAQKVLDWGVPVLESSITLVAEGRLLYRGHDAMDLAQSASLEEIAALLWECSARRIADAPAVPFATAQWAAWLKLWSDSTPLDRALVLLPAAAAQMPRVWALGRDAQLDTACAVMRLLAAAMISAAPSNEPLHRQLASTWRVRNRQQANVLRAALVACADHELNASTFTVRCITSTGAHLFGAVAGGLAALSGPRHGGETVRVGALLEEASRAPDLDRYLANRLARHEHGAHGPILSGFGHPLYQEGDPRARLLLGMLADCAPARSPLAEVLGLARAVRDTTGAEPTVDFALAAIERVLALPAGAAFTLFAVGRTVGWIAHAMEQTRDGRLIRPRARYIGEYEATGRAWGTAQTRHRFGERSGHTQPARQPAQRRHARRRLRGATQGAASQRKTRPGLSRTDPRHRAARQFDRLAGSEPVILAVAFDRQPDFARDHLEDGRTRDTPGRRGLAMFQFENPHFTHRLSPSKNFSVVPIIDVR

SEQ ID NO: 11459 - protein, 441 aa, Lactococcus lactis subsp. lactis
MNLLSKEEKMIKNSQIPSEFYKKYNVKKGLRDINGKGVLAGLTNISAIHSFDKEGNQIPGILEYRAYNIKDIINDLRKENRFGFEEMTYLLLFGELPTANELQEFQNLLASRRTLPEFFIRETILTNPSSDVMNSMSRCILALASYDEKVSDISIENVLEQSFGLIADFPLLAIYSYQSYVHYFKKESLYIHYPDPKMTTAENILRMLRPDCHYTEVEAKVLDIALILHMEHGGGNNSTFTTHVVTSSGTDTYATIAAALSSLKGPKHGGANIKAAKMLENIKENISNYEDDAEIEKYLHKILNKEVFDKQGLIYGIGHAIYSLSDPRFEVFKSYVETLVKEKGLEEEFKLYEKVARLAPKVISENRKIYKTICPNVDFYSGFVYRILEIPQELFTPLFAIARIVGWLAHRIEELINMNKIIRPAYESVLESKNYIKLGER

SEQ ID NO: 11460 - protein, 441 aa, Lactococcus lactis subsp. lactis
MNLMNKEEKMIKNSQIPSEFYKKYNVKKGLRDINGKGVLAGLTNISAIHSFDKEGNQIPGVLEYRAYNIKDIVSDLRSKNRFGFEEMTYLLLFGELPSAKELQEFQILLASKRTLPEFFVRETILTNPSSDVMNSMSRCLLALASYDKKASDISIENVLEQSLALIADFPLLAIYSYQAYIHYFKKESLYIHFPDPELTTAENILRMLRPDCHYSDMEAKVLDIALILHMEHGGGNNSTFTTHVVTSSGTDTYATIAAALSSLKGPKHGGANIKAAKMLENIKENISDYNNDEEIKKYLHQILNKEVFDKQGLIYGIGHAIYSVSDPRFEVFKSYVESLAKEKGLEEEFKLYEKVAFLAPKVISENRKIYKTICPNVDFYSGFVYKILEIPQELFTPLFAIARIVGWLAHRMEELINMNKIIRPAYESILESKAYTRLEER

SEQ ID NO: 11461 - protein, 373 aa, Bacillus coagulans
MVNTNQFIPGLEGVIASETKISFLDTVNSEIVIKGYDLLALSKTKGYLDIVHLLLEGTIPNEAEKQHLEETLKQEYDVPDEIIQVLSLLPKTAHPMDALRTGVSVLASFDTELLNREHSTNLKRAYQLLGKIPNIVANSYHILHSEEPVQPLQDLSYSANFLYMITGKKPTELEEKIFDRSLVLYSEHELPNSTFTARVIASTLSDLYGALTGAVASLKGHLHGGANEAVMEMLQDAQTVEGFKHLLHDKLSKKEKIMGFGHRVYMKKMDPRAAMMKEALKELSAVNGDDLLLQMCEAGEQIMREEKGLFPNLDYYAAPVYWKLGIPIPLYTPIFFSSRTVGLCAHVMEQHENNRIFRPRVLYTGARNLRVED

SEQ ID NO: 11462 - protein, 411 aa, Rickettsia sp. A-167
DSEFAELKIRGKIFKLPILKASIGEDVIDISRVSAEADCFTYDPGFMSTASCQSTITYIDGDKGILRHRGYDIKDLAEKSDFLEVAYLLIYGELPSGEQYNNFTKQVAHHSLVNERLHYLFQTFCSSSHPMAIMLAAVGSLSAFYPDLLNFKEADYELTAIRMIAKIPTIAAMSYKYSIGQPFIYPDNPLDFTENFLHMMFATPCTKYTVNPIIKNALNKIFILHADHEQNASTSTVRIAGSSGANPFACISTGIASLWGPAHGGANEAVINMLKEIGSSEYIPKYIAKAKDKNDPFRLMGFGHRVYKNYDPRAAVLKETCKEVLKALGQLDNNPLLQIAIELEAIALKDEYFIERKLYPNVDFYSGIIYKAMGIPSQMFTVLFAIARTVGWMAQWKEMHEDPEQKISRPR

SEQ ID NO: 11463 - protein, 372 aa, Bacillus subtilis
MTATRGLEGVVATTSSVSSIIDDTLTYVGYDIDDLTENRSFEEIIYLLWHLRLPNKKELEELKQQLAKEAAVPQEIIEHFKSYSLENVHPMAALRTAISLLGLLDSEADTMNPEANYRKAIRLQAKVPGLVAAFSRIRKGLEPVEPREDYGIAENFLYTLNGEEPSPIEVEAFNKALILHADHELNASTFTARVCVATLSDIYSGITAAIGALKGPLHGGANEGVMKMLTEIGEVENAEPYIRAKLEKKEKIMGFGHRVYKHGDPRANDLKEMSKRLTNLTGESKWYEMSIRIEDIVTSEKKLPPNVDFYSASVYHSLGIDHDLFTPIFAVRRMSGWLAHILEQYDNNRLIRPRADYTGPDKQKFVPIEERA

SEQ ID NO: 11464 - protein, 372 aa, Bacillus methanolicus
MTVTRGLEGVVATTSSISSIIDDTLTYVGYNIDDLADNASFEEVIFLLWHRKLPTKSELEELKILLAENAELPKEILDHFKMYPIDKVHPMAALRSAVSLLGLYDEEADLMDEEANYRKAIRLQAKIPSIVAAFARVRKGLEPVAPRKDLSFAANFLYMLKGKEPEDIAVEAFNKVLVLHADHELNASTFTARVCVATLSDIYSGVTAAIGALKGPLHGGANEAVMKMLTEIGSLENVEPYIREKLAKKEKIMGFGHRVYRKGDPRAKHLREMSKKLTELTGEPHWYEMSTKIEAIVTGEKGLPPNVDFYSASIYHSLGIDHDLFTPIFAVSRISGWLAHILEQYENNRLIRPRADYIGPGMQKFIPIEQRG

SEQ ID NO: 11465 - protein, 404 aa, Rickettsia sp. California 2
KIRGKIFRLPILKASIGEDVIDISRVSSEADCFTYDPGFMSTASCQSTITYIDGDKGILRHRGYDIKDLAEKSDFLEVAYLLIYGELPSIEQYNNFTKQVAHHSLVNERLHYLFQTFCSSSHPMAIMLAAVGSLSAFYPDLLNFKEADYELTAIRMIAKIPTIAAMSYKYSIGQPFIYPDNSLDFTENFLHMMFATPCTKYKVNPIIKNALNKIFILHADHEQNASTSTVRIAGSSGANPFACVSTGIASLWGPAHGGANEAVINMLKEIGSSENIPKYIAKAKDKNDPFRLMGFGHRVYKNYDPRAAVLKETCKEVLKELGQLENNPLLQIAIELEAIALKDEYFIERKLYPNVDFYSGIIYKAMGIPSQMFTVLFAIARTVGWMAQWKEMHEDPEQKISRPR

SEQ ID NO: 11466 - protein, 105 aa, Rickettsia sp. RAv1
GQPFIYPNNSLDFTENFLHMMFATPCTKYTVNPIIKNALNKIFILHADHEQNASTSTVRIAGSTGANPFACISTGIASLWGPAHGGANEAVINMLKEIGSSEYIP

SEQ ID NO: 11467 - protein, 105 aa, Rickettsia sp. RAv3
GQPFIYPNNSLDFTENFLHMMFATPCTKYTVNPIIKNALNKIFILHADHEQNASTSTVRIAGSSGANPFACISTGIASLWGPAHGGANEAVINMLKEIGSSEYIP

SEQ ID NO: 11468 - protein, 105 aa, Rickettsia sp. RAv9
GQPFIYPNNSLDFTENFLHMMFATPCTKYTVNPIIKNALNKIFILHADHEQNASTSTVRIAGSSGANPFASISTGIASLWGPAHGGANEAVINMLKEIGSSEYIP

SEQ ID NO: 11469 - protein, 396 aa, Ehrlichia sp. EHt224
KVKLPVLCDTNGNKVVDITSLYKSTGILTYDPGFMSTAACESKITFIDGSKGILCYRGYNIADLVNSNKSFIEIVYLLFYGSFPSVDDFKDFMLQISQEYMPPKMICDVIKSFSQDAHPMTILMACFSGLASYYNNQQHCENELKYARLAVSQIAGIIAMIYRHITDQDFIQANTELSYSENFIHMMFDISSYEFTKIVSKALDIIFILHADHEQNASTATVRLTGSTGANLFACLAAGAATLWGPAHGGANEAVINMLMEIEQPSNVKQFVQKVKDKNNGIRLMGFGHRVYKNYDPRAKIICEICKEVLKDLKVSHPLLEIALELENIALQDSYFIERNLYPNVDFYSGIVLKAIGIPVSMFTTLFALARTSGWSAQWYEMIKDKNYKICRPRQL

SEQ ID NO: 11470 - protein, 380 aa, Ehrlichia sp. ERm58
VDITCLYKDTGILTYDPGFMSTAACESRITFIDGNKGILRYRGYNIADLVNSNKSFIEIVYLLFYGVLPDANDLQNFVLQVSQEYMPIKIVNDIIKSFPRNSHPMAILISCFSGLASYYNNQRHNEDELKYARLAVSQIAGIVAMIYRHITDQDFIQANTELSYSENFIHMMFDISSYEFTKVVSKALDVIFILHADHEQNASTATVRLTGSTGANLFACLAAGAATLWGPAHGGANEAVINMLMEIEKPSNVKQFVQKVKDKNNGIRLMGFGHRVYKNYDPRAKIICEICKEVLNDLKTSHPLLEVALELESIALQDSYFIERSLYPNVDFYSGIVLKAIGIPVSMFTTLFALARTSGWSAQWYEMIKGRDYKICRPRQ

SEQ ID NO: 11471 - protein, 107 aa, Bartonella capreoli
GGANEACLKMLQEIGSIEKIPEFIARAKDKNDPFRLMGFGHRVYKNYDPRAKLMQKTCHEVLKELNIKDDPLLDIAMELEKIALSDEYFIEKKLYPNVDFYSGITLK

SEQ ID NO: 11472 - protein, 109 aa, Bartonella bovis
ANEACLKMLQEIGSTEKIPEFIERAKDKNDPFRLMGFGHRVYKNYDPRAKLMQKTCHEVLKELNIQDDPLLDIAMELEKIALNDEYFIEKKLYPNVDFYSGITLKALGF

SEQ ID NO: 11473 - protein, 112 aa, Bartonella sp. Rf1570yn
ANEACLKMLQEIGSIKRIPEFIARAKDKNDPFRLMGFGHRVYKNYDPRAKIMQKTCHEVLKELNIQDDPLLDIAIELEKIALNDEYFIEKKLYPNVDFYSGITLKALGFPTE

SEQ ID NO: 11474 - protein, 112 aa, Bartonella sp. Rf1554yn
ANEACLKMLQEIGSIKRIPEFIARAKDKNDPFRLIGFGHRVYKNYDPRAKIMQKTCHKVLKELNIQNDPLLDIAIELEKIALSDEYFIEKKLYPNVDFYSGIILKALGFPTE

SEQ ID NO: 11475 - protein, 112 aa, Bartonella sp. Rf1561yn
ANEACLKMLQEIGSIKRIPEFIARAKDKNDPFRLIGFGHRVYKNYDPRAKIMQKTCHKVLKELNIQDDPLLDIAIELEKIALSDEYFIEKKLYPNVDFYSGIILKALGFPTE

SEQ ID NO: 11476 - protein, 427 aa, Escherichia coli O157:H7 EDL933
  unsure (1)..(427): unsure at all Xaa locations
MADTKAKLTLNGDTAVELDVLKGTLGXDVIDIRTLGSKGVFTFDPGFTSTASCESKITFIDGDEGILLHRGFPIDQLATDSNYLEVCYILLNGEKPTQEQYDEFKTTVTRHTMIHEQITRLFHAFRRDSHPMAVMCGITGALAAFYHDSLDVNNPRHREIAAFRLLSKMPTMAAMCYKYSIGQPFVYPRNDLSYAGNFLNMMFSTPCEPYEVNPILERAMDRILILHADHEQNASTSTVRTAGSSGANPFACIAAGIASLWGPAHGGANEAALKMLEEISSVKHIPEFVRRAKDKNDSFRLMGFGHRVYKNYDPRATVMRETCHEVLKELGTKDDLLEVAMELENIALNDPYFIEKKLYPNVDFYSGIILKAMGIPSSMFTVIFAMARTVGWIAHWSEMHSDGMKIARPRQLYTGYEKRDFKSDVKH

SEQ ID NO: 11477 - protein, 389 aa, Escherichia coli O157:H7 EDL933
MSDTTILQNSTHVIKPKKSVALSGVPAGNTALCTVGKSGNDLHYRGYDILDLAEHCEFEEVAHLLIHGKLPTRDELAAYKTKLKALRGLPANVRTVLEALPAASHPMDVMRTGVSALGCTLPEKEGHTVSGARDIADKLLASLSSILLYWYHYSHNGERIQPETDDDSIGGHFLHLLHGEKPSQSWEKAMHISLVLYAEHEFNASTFTSRVIAGTGSDMYSAIIGAIGALRGPKHGGANEVSLEIQQRYETPDEAEADIRKRVESKEVVIGFGHPVYTIADPRHQVIKRVAKQLSQEGGSLKMYNIADRLETVMWESKKMFPNLDWFSAVSYNMMGVPTEMFTPLFVIARVTGWAAHIIEQRQDNKIIRPSANYVGPEDRQFVALDKRQ

SEQ ID NO: 11478 - protein, 429 aa, Xylella fastidiosa Dixon
MSDLDKVTLNAGETSLVLPVLKPTLGNGCVDIAKLTKETGLFTYDSGFTATASCKSAITYIDGEKGVLLYRGYPIEQLAEHSSFLEVAYLLMNGELPRKDEFAKFDDEITHHTMMHESLKNFLGGFHYDAHPMAMLAASVASLSAFYHDTLDLNDLEQRRLAAIRLIAKVPTLAAAVHRYSIGWPIRYPRNNLGYVERFLHMMFEVPSEPLQLNPVVTKALDLLFILHADHEQNASTSTVRLVGSTGANPYASVAAGITALWGPAHGGANEAVLKMLEEIGDAKNVDLVIAKAKTKDKNSPFRLMGFGHRVYKHFDPRAKIIRETAHTVLGELGVNDPLLEVALKLEEVALKDDYFVQRKLYPNVDFYSGIIYKAINIPLEMFTVMFAIARTAGWVSHWLEQQVDPEMKISRPRQIYTGHSERDYKDAR

SEQ ID NO: 11479 - protein, 429 aa, Xylella fastidiosa Ann-1
MSDLDKVTLNAGETSLVLPVLKPTLGNGCVDIAKLTKETGLFTYDSGFTATASCKSAITYIDGEKGVLLYRGYPIEQLAEHSSFLEVAYLLMNGELPRKDEFAKFDDEITHHTMMHESLKNFLGGFHYDAHPMAMLAASVASLSAFYHDTLDLNDLEQRRLAAIRLIAKVPTLAAAAHRYSIGWPIRYPRNNLGYVERFLHMMFEVPSEPLQLNPVVTKALDLLFILHADHEQNASTSTVRLVGSTGANPYASVAAGITALWGPAHGGANEAVLKMLEEIGDAKNVDLVIAKAKTKDKNSPFRLMGFGHRVYKHFDPRAKIIREMAHTVLGELGVNDPLLEVALKLEEAALKDDYFVQRKLYPNVDFYSGIIYKAINIPLEMFTVMFAIARTAGWVSHWLEQQVDPEMKISRPRQIYTGHRERDYKDAR

SEQ ID NO: 11480 - protein, 433 aa, Magnetococcus sp. MC-1
MSKETITIRDNRTGKEVELPIQQGTAGPPVVDVTKFYKDFGLFTLDPGFRSTGSCRSTITFIDGDKGVLLHRGYPIEQLAAKSSFLEVCYLLLNEKLPTKAEFDDFDDKITHHTMVHEQLLRFFAGYRRDAHPMAIMVGVVGALSAFYHDALDISDPKHREISAHRLIAKIPTIAACSYKYHYGQPFVYPNNKMSYAENFLNMTFRTPCDDDFKIDPRLVSAMDKIFILHADHEQNASTSTVRLAGSSRANPFAAVSAGISALWGPAHGGANEAVLKMLGEIGSVERIDEYIAKAKDPNDPFRLMGFGHRVYKNYDPRAAVLKGACQEVLDAVGKHDEPLFKIAMKLEEIALNDDYFISKKLFPNVDFYSGIILSAMGFPTNMFTVIFALARTVGWVSQWKEMIEEEGQAIGRPRQLYMGAPQRDYVPMDQRG

SEQ ID NO: 11481 - protein, 113 aa, Bartonella sp. Rn1691yn
ANEACLKMLQEIDSVKRIPKFIARAKDKNDPFRLMGFGHRVYKNYDPRAKIMQQTCHEVLKELNIQDDPLLDIAIELEKIALNDEYFVEKKLYPNVDFYSGITLKALGFPTEM

SEQ ID NO: 11482 - protein, 373 aa, Staphylococcus aureus subsp. aureus Mu50
MAELQRGLEGVIAAETKISSIIESQLTYAGYDIDDLAENAQFEEVIFLLWNYRLPNEEELAHLKGKLNQYMTLNPRVYTHFEEYVTDHVHPMTALRTSLSYIAHFDPDAENESDENRYERAMRIQAKVASLVTAFARVRQDKEPLKPNPDLSYAANFLYMLRGELPTDIEVEAFNKALILHADHELNASAFTARCAVSSLSDMYSGIVAAVGSLKGPLHGGANEQVMTMLSEIGSIENVDAYLDEKFANKDKVMGFGHRVYKDGDPRAKYLREMSRQITKDAGREELFEMSVKMEKRMAEEKGLIPNVDFYSASVYHCMEIPHDLFTPIFAVSRSAGWIAHILEQYKDNRIMRPRAKYIGETNRKYIPLEERK

SEQ ID NO: 11483 - protein, 388 aa, Burkholderia sacchari
MSETDNTTQAAGAIKPKKSVALSGVCAGNTALCTVGRTGNDLHYRGYDILDLATACEFEEVAYLLVHGKLPNIAELAAYKTKLKALRGLPANVKAALEWVPASAHPMDVMRTGVSVLGTVLPEKDDHNLPGARDIADRLMASLGSMLLYWYHNSHNGKRIEVETDDDSIGGHFLHLLHGREPSKSWVDAMHVSLNLYAEHEFNASTFTGRVIAGTGSDMYSAITGAIGALRGPKHGGANEVAFEIQSRYDTPDQAESDIRRRVEAKAVVIGFGHPVYTISDPRNKVIKEVAKKLSKEQSNLKLFDIAERLESTMWEIKKMFPNLDWFSAVSYHMMGVPTAMFTPLFVISRTAGWSAHIIEQRIDNKIIRPSANYTGPENLKFTLIGKR

SEQ ID NO: 11484 - protein, 429 aa, Pseudomonas putida KT2440
MADKKAQLVIEGAAPVELPILTGTVGPDVIDVRGLGATGHFTFDPGFMATASCESKITYIDGDKGILLHRGYPIEQLAEQSDYLETCYLLLNGELPNAEQKAQFVSTVKNHTMVHEQLKSFFNGFRRDAHPMAVMCGVVGALSAFYHDSLDINNPQHREISAVRLVAKMPTLAAMVYKYSMGQPMMYPRNDLSYAENFLHMMFNTPCEIKPISPVLAKAMDRIFILHADHEQNASTSTVRLAGSSGANPFACIAAGIAALWGPAHGGANEAVLTMLDEIGDVSNIDKFIAKAKDKNDPFKLMGFGHRVYKNRDPRATVMKQTCDEVLRELGIKNDPQLELAMRLEEIALTDPYFIERSLYPNVDFYSGIILKAIGIPTSMFTVIFALARTVGWISHWKEMLSSPYKIGRPRQLYTGEQKRDIVALKDRK

SEQ ID NO: 11485 - protein, 375 aa, Pseudomonas putida KT2440
MAEAKVLSGAGLRGQVAGQTALSTVGQAGAGLTYRGYDVRDLAAGAEFEEVAYLLLYGELPTQAELADYKRKLKGLRDLPQALKEVLERIPRDAHPMDVMRTGCSVLGTLEPELTFEAQRDKTDRLLALFPAVMCYWYRFTHHGVRIDCTTDEDTLGGHFLHLLHGKKPSELHVKVMNVSLILYAEHEFNASTFTARVCASTLSDLYSCVTAAIGSLRGPLHGGANEAAMELIERFQSPQEATAELLRMLERKDKIMGFGHAIYKESDPRNEVIKGWSKQLADEVGDKVLYPVSEAIDKTMWEQKRLFPNADFYHASAYHFMGIPTKLFTPIFVCSRLTGWAAHVFEQRANNRIIRPSAEYVGVEQRQFVPIEQR

SEQ ID NO: 11486 - protein, 429 aa, Xylella fastidiosa 9a5c; identical to SEQ ID NO: 478

SEQ ID NO: 11487 - protein, 437 aa, Beta vulgaris
SSNLDLRSELQELIPEQQERLKKIKKEFGSFQLGNINVDMVLGGMRGMTGLLWETSLLDPEEGIRFRGFSIPECQKLLPAASAGAEPLPEGLLWLLLTGKVPSKEQVDALSADLRKRASIPDHVYKTIDALPITAHPMTQFCTGVMALQTRSEFQKAYEKGIHKSKFWEPTYEDCLSLIAQVPVVAAYVYRRMYKNGQVIPLDDSLDYGGNFAHMLGFDSPQMLELMRLYVTIHSDHEGGNVSAHTGHLVGSPLSDPYLSFAAALNGLAGPLHGLANQEVLLWIKSVVDECGENISTEQLKDYVWKTLNSGKVVPGFGLGVLRKTDPRYTCQREFALKHLPDDPFFQLVSKLYEVVPPILLELGKVKNPWPNVDAHSGVLLNHYGLTEARYYTVLFGVSRSLGICSQLIWDRALGLPLERPKSVTMEWLEKFCKRRA

SEQ ID NO: 11488 - protein, 474 aa, Emericella nidulans
MASTLRLSTSALRSSTLAGKPVVQSVAFNGLRCYSTGKTKSLKETFADKLPGELEKVKKLRKEHGNKVIGELTLDQAYGGARGVKCLVWEGSVLDSEEGIRFRGLTIPECQKLLPKAPGGEEPLPEGLFWLLLTGEVPSEQQVRDLSAEWAARSDLPKFIEELIDRVPSTLHPMAQFSLAVTALEHESAFAKATAKGINKKEYWHYTFEDSMDLIAKLPTIAAKIYRNVFKDGKVAPIQKDKDYSYNLANQLGFADNKDFVELMRLYLTIHSDHEGGNVSAHTTHLVGSALSSPMLSLAAGLNGLAGPLHGLANQEVLNWLTEMKKVVGNDLSDQSIKDYLWSTLNAGRVVPGYGHAVLRKTDPRYTSQREFALRKLPDDPMFKLVSQVYKIAPGVLTEHGKTKNPYPNVDAHSGVLLQYYGLTEANYYTVLFGVSRALGVLPQLIIDRAFGAPIERPKSFSTEAYAKLVGAKL

SEQ ID NO: 11489 - protein, 474 aa, Emericella nidulans
MASTLRLSTSALRSSTLAAKPVVQSVAFNGLRCYSTGKTKSLKETFADKLPGELEKVKKLRKEHGNKVIGELTLDQAYGGARGVKCLVWEGSVLDSEEGIRFRGLTIPECQKLLPKAPGGEEPLPEGLFWLLLTGEVPSEQQVRDLSAEWAARSDLPKFIEELIDRVPSTLHPMAQFSLAVTALEHESAFAKATAKGINKKDYWNYTFEDSMDLIAKLPTIAAKIYRNVFKDGKVAPIQKDKDYSYNLANQLGFADNKDFVELMRLYLTIHSDHEGGNVSAHTTHLVGSALSSPMLSLAAGLNGLAGPLHGLANQEVLNWLTEMKKVVGNDLSDQSIKDYLWSTLNAGRVVPGYGHAVLRKTDPRYTSQREFALRKLPDDPMFKLVSQVYKIAPGVLTEHGKTKNPYPNVDAHSGVLLQYYGLTERNYYTVLFGVSRALGVLPQLIIDRAFGAPIERPKSFSTEAYAKLVGAKL

SEQ ID NO: 11490 - protein, 460 aa, Emericella nidulans
MALPLRTARHASRLAQTIGRRGYATAEPDLKSALKAVIPAKRELLAEVKKQGDEVIGEVKVSNVIGGMRGLKSMLWEGSVLDADEGIRFHGKTIKDCQKELPKGPTGTEMLPEAMFWLLLTGEVPSTSQVRAFSKQLAEESHLPDHILDLAKSFPKHMHPMTQISIITAALNTESKFAKLYEKGINKADYWEPTFDDAISLLAKIPRVAALVFRPNEIDVVGRQKLDPAQDWSYNFAELLGKGGANNADFHDLLRLYLALHGDHEGGNVSAHATHLVGSALSDPFLSYSAGLLGLAGPLHGLAAQEVLRWILAMQEKIGTKFTDEDVRAYLWDTLKSGRVVPGYGHGVLRKPDPRFQALMDFAATRKDVLANPVFQLVKKNSEIAPGVLTEHGKTKNPHPNVDAASGVLFYHYGFQQPLYYTVTFGVSRALGPLVQLIWDRALGLPIERPKSINLLGLKK

SEQ ID NO: 11491 - protein, 373 aa, Listeria innocua
MTLSKGLENVYVAETSISSIIDDMLTYVGYGIDDLMENNASFEEVIYLLWHLRLPNKEEFKKFKLEIQENMAVSETIITSLRMQNHQKLHPMSVLRTTVSMLGVFDTEAELDDGEAVYRKGLRLQAKMPTIVAAFSRIRRGLDPIPPREDLNMAANFLYMITGEEADELSVEAMNKALVLHADHEFNASTFTARVCVATLSDVYSGVTSAIGALKGPLHGGANERVFDMLEEIDAAGDVRNYIQEKIDTKQKIMGFGHRVYRGGDPRAKHLREMSRKLTAEKGEEKWFDISLQVEEAVWELKHLKPNVDFYSASVYHALGIDRDLFTLVFSVSRVSGWLAHIFEQYRDNRLIRPRAIYVGPENRSYLPVEERI

SEQ ID NO: 11492 - protein, 344 aa, Bartonella schoenbuchensis
DPGFTSTASCESKITYIDGDKGVLLYHGYSIDQLAENGDFLEVCYLLLYGELPTQQEKADFDRRIMHHTMVHEQFSRFFHGFRRDSHPMAVMVACLGAMSAFYHDSIDITDAKQRMIASIRLIAKVPTLAAMAYKYSIGQPFVYPRNDLGYAANFLHMCFSVPCEEYKVNPVLARAMDRIFTLHADHEQNASTSTVRLAGSSGANPFACIAAGVACLWGPAHGGANEACLKMLQEIGSIEKIPEFIARAKDKNDPFRLMGFGHRVYKNYDPRAKLMQKTCHEVLKELNIKDDPLLDIAMELEKIALSDEYFIEKKLYPNVDFYSGITLKALGFPTEMFTVLFHL

SEQ ID NO: 11493 - protein, 342 aa, Bartonella schoenbuchensis
DPGFTSTASCESKITYIDGDEGVLLYHGYSIDQLAENGDFLEVCYLLLYGELPTKQEKDDFDRRIMHHTMVHEQFSRFFHGFRRDSHPMAVMVACLGAMSAFYHDSIDITDAKQRMIASIRLIAKVPTLAAMAYKYSIGQPFVYPRNDLSYAANFLHMCFSVPCEEYKVNPVLARAMDRIFTLHADHEQNASTSTVRLAGSSGANPFACIAAGVACLWGPAHGGANEACLKMLQEIGSIEKIPEFIARAKDKNDPFRLMGFGHRVYKNYDPRAKLMQKTCHEVLKELNIKDDPLLDIAMELEKIALSDEYFIEKKLYPNVDFYSGITLKALGFPTEMFTVLL

SEQ ID NO: 11494 - protein, 341 aa, Bartonella schoenbuchensis
DPGFTSTASCESKITYIDGDEGVLLYHGYSIDQLAENGDFLEVCYLLLYGELPTKQEKDDFDRRIMHHTMVHEQFSRFFHGFRRDSHPMAVMVACLGAMSAFYHDSIDITDAKQRMIASIRLIAKVPTLAAMAYKYSIGQPFVYPRNDLSYAANFLHMCFSVPCEEYKVNPVLARAMDRIFTLHADHEQNASTSTVRLAGSSGANPFACIAAGVACLWGPAHGGANEACLKMLQEIGSIEKIPEFIARAKDKNDPFRLMGFGHRVYKNYDPRAKLMQKTCHEVLKELNIKDDPLLDIAMELEKIALSDEYFIEKKLYPNVDFYSGITLKALGFPTEMFTVL

SEQ ID NO: 11495 - protein, 337 aa, Bartonella schoenbuchensis
STASCESKITYIDGDEGVLLYHGYSIDQLAENGDFLEVCYLLLYGELPTKQEKDDFDRRIMHHTMVHEQFSRFFHGFRRDSHPMAVMVACLGAMSAFYHDSIDITDAKQRMIASIRLIAKVPTLAAMAYKYSIGQPFVYPRNDLGYAANFLHMCFSVPCEEYKVNPVLARAMDRIFTLHADHEQNASTSTVRLAGSSGANPFACIAAGVACLWGPAHGGANEACLKMLQEIGSIEKIPEFIARAKDKNDPFRLMGFGHRVYKNYDPRAKLMQKTCHEVLKELNIKDDPLLDIAMELEKIALSDEYFIEKKLYPNVDFYSGITLKALGFPTEMFTVLL

SEQ ID NO: 11496 - protein, 409 aa, Ehrlichia sp. Yamaguchi
MIKEATLELDGQKIKLPVLYDTNGDKAVDITSLYKNTGILTYDPGFMSTAACESKITFIDGNKGILCYRGHNIVDLVNKNKSFVEIIYLLFYGVFPSAEDLQNFTLQISQEYMPPQVVYDVIKSFSQDSHPMSILMACFSALASYYHDQEADKDELKYAKLAVAKIASMVALIYRYITNQDFITADTKLSYSKNFVHMMFDISSYKFTQVVAKALDIIFILHADHEQNASTATVRLAGSSGADLFACLVAGTATLWGPAHGGANEAVINMLMTIEKPSNVKQFIQKVKDGSKTTRLMGFGHRVYKNYDPRAKIMCKICREVLNDLGIDDPLLEVAQELENIALQDSYFIERNLYPNVDFYSGIILKAIGIPVRMFTTLFALARTTGWSAQWYEMVANKNYKICRPRQLY

SEQ ID NO: 11497 - protein, 113 aa, Bartonella sp. Ac1692yn
ANEACLKMLQEIGSIKRIPEFIARAKDKNDPFRLMGFGHRVYKNYDPRAKIMQKTCHEVLKELNIQDDPLLDIAIELEKIALSDEYFIEKKLYPNVDFYSGITLKALGFPTEM

SEQ ID NO: 11498 - protein, 112 aa, Bartonella sp. Ac1693yn
NEACLKMLQEIGSVERIPEFIARAKDKNDPFRLMGFGHRVYKNYDPRAKIMQKTCHEVLKELNIQDDPLLDIAMELEKIALNDEYFVEKKLYPNVDFYSGITLKALGFPTEM

SEQ ID NO: 11499 - protein, 112 aa, Bartonella sp. Ac1825yn
NEACLKMLQEIGSIKRIPEFIARAKDKNDPFRLMGFGHRVYKNYDPRAKIMQKTCHEVLKELNIKNDPLLDIAMELEKIALNDKYFIEKKLYPNVDFYSGITLKALGFPTEM

SEQ ID NO: 11500 - protein, 112 aa, Bartonella sp. Ac1826yn
NEACLKMLQEIGSVKRIPEFIARAKDKNDPFRLMGFGHRVYKNYDPRAKIMQQTCHEVLKELNIQDDPLLDIAIELENIALNDEYFVEKRLYPNVDFYSGITLKALGFPTEM

SEQ ID NO: 11501 - protein, 112 aa, Bartonella sp. Ap1707yn
NEACLKMLQEIGSIKRIPEFIARAKDKNDPFRLMGFGHRVYKNYDPRAKIMQKTCHEVLKELNIQDDPLLDIAIELERIALSDEYFIEKKLYPNVDFYSGITLKALGFPTEM

SEQ ID NO: 11502 - protein, 112 aa, Bartonella sp. Ac1723yn
NEACLKMLQEIDSVKRIPKFIARAKDKNDPFRLMGFGHRVYKNYDPRAKIMQQTCHEVLKELNIQDDPLLDIAIELEKIALNDEYFVEKKLYPNVDFYSGITLKALGFPTEM

SEQ ID NO: 11503 - protein, 112 aa, Bartonella sp. Ac1727yn
NEACLKMLQEIGSIKRIPEFIARAKDKNDPFRLMGFGHRVYKNYDPRAKIMQKTCHEVLKELNIKDDPLLDIAMELEKIALNDEYFIEKKLYPNVDFYSGITLKALGFPTEM

SEQ ID NO: 11504 - protein, 112 aa, Bartonella sp. Ad1734yn
NEACLKMLQEIGSIKRIPEFIARAKDKNDPFRLMGFGHRVYKNYDPRAKIMQKTCHEVLKELNIQDDPLLDIAIELEKIALSDEYFIEKKLYPNVDFYSGITLKALGFPTEM

SEQ ID NO: 11505 - protein, 112 aa, Bartonella sp. Em1531yn
NEACLKMLQEIGSVERIPEFIARAKDKNDPFRLMGFGHRVYKNYDPRAKIMQKTCHEVLKELNIQDDPLLDIAIELEKIALNDEYFVEKKLYPNVDFYSGITLKALGFPTEM

SEQ ID NO: 11506 - protein, 373 aa, Listeria monocytogenes EGD-e
MTLSKGLENVYVAETSISSIIDDMLTYVGYGIDDLMENNASFEEVIYLLWHLRLPNKDEFKKFKREIQENMAVSETIITSLRMQNHQKLHPMSVLRTTVSMLGVFDTEAELDDGEAVYRKGLRLQAKMPTIVAAFSRIRRGLDPIPPREDLNMAANFLYMITGEEADELSVEAMNKALVLHADHEFNASTFTARVCVATLSDVYSGVTAAIGALKGPLHGGANERVFDMLEEIDQAGDVRNYIQEKIDTKQKIMGFGHRVYRGGDPRAQHLREMSRKLTAEKGEEKWFDISLQVEESVWELKHLKPNVDFYSASVYHALGIDRDLFTLVFSVSRVSGWLAHIFEQYRDNRLIRPRAIYVGPENRSYLPVEERI

SEQ ID NO: 11507 - protein, 410 aa, Rickettsia sp. AT1
DSEFAELKIRGKIFKLPIFKASIGEDVIDISRVSAEADCFTYDPGFMSTASCQSTITYIDGDKGILRHRGYDIKDLAEKSDFLEVAYLLIYGELPNSEQYNNFTKQVAHHSLVNERLHYLFQTFCSSSHPMAIMLAAVGSLSAFYPDLLNFKEADYELTAIRMIAKIPTIAAMSYRYSIGQPFIYPDNSLDFTENFLHMMFATHCTKYKVNPIIKNALNKIFILHADHEQNASTSTVRIAGSSGANPFACISTGIASLWGPAHGGANEAVINMLKEIGSSENIPKYIAKAKDKNDPFRLMGFGHRVYKNYDPRAAVLKETCKEVLKELGQLENNPLLQIAIELEAIALKDEYFIERKLYPNVDFYSGIIYKAMGIPSQMFTVLFAIARTVGWMAQWKEMHEDPEQKISRP

SEQ ID NO: 11508 - protein, 373 aa, Staphylococcus epidermidis ATCC 12228
MAELKRGLEGVIAAETKISSIIDSQLTYAGYDIDDLAENAQFEEIIFLLWNYRLPNENELSELKEKLFDYMTLNNRVYKHFEEYVTDHVHPMTALRTSVSYVAHFDPEAENESDENKYDRAIRIQAKIASLVTAFARVRDGKEPVKPNSELSYAANFLYMLRGELPTEVEVEAFNKALILHADHELNASAFTARCAVSSLSDMYSGVVAAIGSLKGPLHGGANERVMSMLKEIGSIDNVDHYLDERFANKDKIMGFGHRVYKDGDPRAKYLREMSRKITEETGQSELFEMSLAIEKRMKEEKGLIPNVDFFSATVFHSMNIPHDLFTPIFAVSRTSGWIAHILEQYRDNRIMRPRAKYIGEQNRKYVPIEERP

SEQ ID NO: 11509 - protein, 431 aa, Mycobacterium leprae
MADTDDTVTLKYPGGEIDLQIVRATEGNDGIAIVPVLAKTGYTTFDVGYGNTASTKSSITYIDGDAGILRYRGYPIEQLAEKSTFIEVCYLLIYGELPATDQLAEFTHRIQRHTMLHEDLKRFYDGFPRNAHPMPVLSSVVNALSAYYQDALDPMDNGQVELSTIRLLAKLPTIAAYAYKKSVGQPFLYPDNAFSLVENFLRMTFGLPAEPYEPDPEVVRALDMLFILHADHEQNCSTSTVRLVGSSRANLFTSISGGINALWGPLHGGANQAVLEMLEGIRESGDDVGGFVQKVKNCQAGVKLMGFGHRVYKNYDPRARIVKEQADKILVKLGGDDDLLNIAKGLEEAALTDDYFIERKLYPNVDFYTGLIYRALGFPTRMFTVLFALGRLPGWIAHWREMHDEGDSKIGRPRQIYTGYTERDYTAIETR

SEQ ID NO: 11510 - protein, 441 aa, Mycobacterium smegmatis
MCMLKQSQPTRRPTRPQRTFTYPGGKLELPILKATEGTDSVALGKFLAETNLTTFDSGFMNTASTKSAITYIDGEQGILRYRGIPIEQLAEKSTFIEVSYLLIYGELPTPTQLEEFTTKIQRHTLLHEDLKRFFDGFPRNAHPMPVLSSAVNALSAYYQDSLDPKDDEQVELSTIRLLAKLPTIAAYAYKKSAGQPFLYPDNSLSLVENFLRMTFGFPAEPYEVNPDVAKALDMLFILHADHEQNCSTSTVRLVGSSQANLFTSISGGINALWGPLHGGANQAVLEMLDAIKADGGDTKKFMERVKNKEAGVKLMGFGHRVYKNYDPRAAIVKKTADQILETLGVQDDLLEIAKGLEEVALNDDYFIERKLYPNVDFYTGVIYRAMGFPTRMFTVLFALGRLPGWIAHWREMHEDPTTKIGRPRQLYTGYTERDYVPMSDR

SEQ ID NO: 11511 - protein, 375 aa, Mycobacterium smegmatis
MTTATESEAPRIHKGLAGVVVDTTAISKVVPETNSLTYRGYPVQDLAAQCSFEQVAYLLWHGELPTDQLALFSQRERASRRIDRSMQALLAKLPDNCHPMDVVRTAISYLGAEDLEEDVDTAEANYAKSLRMFAVLPTIVATDIRRRQGLTPIPPHSQLGYAQNFLNMCFGEVPEPVVVRAFEQSMVLYAEHSFNASTFAARVVTSTQSDIYSAVTAAIGALKGSLHGGANEAVMHDMLEIGSAEKAPEWLHGKLSRKEKVMGFGHRVYKNGDSRVPTMKVALEQVAQVRDGQRWLDIYNTLESAMFAATRIKPNLDFPTGPAYYLMDFPIESFTPLFVMSRITGWTAHIMEQAASNALIRPLSEYSGQPQRSLV

SEQ ID NO: 11512 - protein, 409 aa, Pyrobaculum aerophilum str. IM2
MSEQTVQVKTTGKILQSPCGPIIHGLEDVLIKSTSISDIDGEKGILWYRGYRIEELARLSTYEEVSYLILYGRLPTKRELEDYINRMKKYRELHPATVEVIRNLAKAHPMFALEAAVAAEGAYDEDNQKLIEALSVGRYKAEEKELAYRIAEKLVAKMPTIVAYHYRFSRGLEVVRPRDDLGHAANFLYMMFGREPDPLASRGIDLYLILHADHEVPASTFAAHVVASTLSDLYSSVAAAIAALKGPLHGGANEMAVRNYLEIGTPAKAKEIVEAATKPGGPKLMGVGHRVYKAYDPRAKIFKEFSRDYVAKFGDPQNLFAIASAIEQEVLSHPYFQQRKLYPNVDFWSGIAFYYMGIPYEYFTPIFAMSRVVGWVAHVLEYWENNRIFRPRACYIGPHDLQYIPLEQR

SEQ ID NO: 11513 - protein, 342 aa, Pyrobaculum aerophilum str. IM2
MRIFKTPGPIKYINCLLTAAMYFPGLEGVVVKETKICHIDLENSKIYYRGYDLEELAQYSTFEEVAYLLWFGKLPAGAELERFKAELMMYRKPPEHVDEAVKIAPKNAEPIDVLRTAVSAMALGEDLSDRSPEAELVRGLKITAAMPYIVASFDRLRRGSQPLHPGEAKSHAEYFLWALRGERPGEREVRALDVMLIIYAEHSMNNSAFTAVTVASTLSDMYAAITAAIASLKGPLHGGANVDAAKMLEEIGDAKRVESWVDQQLSRGRRIPGFGHRLYKKGPDPRLRVLRKLARDLASEKGDFKWVELAERLEEYVTAHLSQKGIYPNTDLYAAVIFKYLG

SEQ ID NO: 11514 - protein, 484 aa, Anopheles gambiae str. PEST
SAAKRQQLPAAPAAAPATMALSRIYASKLACAANKNSLPVIATFVRNASDSTDLKAVLTEKIPKEQERVKNFRKQHGNTKVGEVTVDMMYGGMRGIKGLVCETSVLDPDEGIRFRGLSIPECQQVLPKAPGGQEPLPEGLFWLLITGDVPSKAQVDALSREWANRAALPSHVVTMLNNMPTSLHPMSQLSCAVTALNHESKFAKAYSEGVHKSKYWEYVYEDSMDLIAKLPVIAATIYRNTYRDGKGIGAIDPKKDWSANFTKMLGYEDEKFTELMRLYLTIHSDHEGGNVSAHTVHLVGSALSDPYLSFAAGMNGLAGPLHGLANQEVLVWLQKLRKELGDNASEDKVKEFIWKTLKSGQVVPGYGHAVLRKTDPRYTCQREFALKHLPNDPLFGLVSNIYKVVPPILTELGKVKNPWPNVDAHSGVLLQYYGLKEMNYYTVLFGVSRALGVLASLVWDRALGLPIERPKSMSTDGLMKATSK

SEQ ID NO: 11515 - protein, 342 aa, Agrobacterium tumefaciens str. C58 (U. Washington)
MLSHVDGQAGELVVRGHHLAELADWSFEQVLELLWSGQTATKITAEDIRSQLGKARLRAFELMQLLFPGLAALTSVEALRLLLSWLPDDETTPHHLVAVAAVPVFATAIIRNRQGFAPIAPDASLTHSADFLRMLSGTLPSTEKVRALDTYLTTVADHGLNASTFTARVIASTGAGLFSSVVGALCALKGPLHGGAPGPVLDMLDAIGAEAEIEPWLLDALGRGERLMGFGHRIYRVRDPRADVLKHAVSTLKEGSDRIAFAGKVEEAALALLKEKKPLRPLQTNVEFYTALVLEAVGFPRDSFTNVFAAGRMAGWTAHVLEQERTGRLIRPQSHYIGPHPR

SEQ ID NO: 11516 - protein, 335 aa, Agrobacterium tumefaciens str. C58 (U. Washington)
MQKVRGETATKPKGFPASTMPPSMRCWPDRKRRSKRRSGPGVLILANESLEDVARLLWDCGEVDPFDDLKAAPTPWPQPVLDYVRDLPLTERCQALLPLLEAGRVTTWRRDNRRLWPGAAALLRGIAGACISSQPKTQAVHLSLADAWQTDAAGADLIRRALVLQADHELNTSAFAVRVVASTGASLGACLNAGLSALSGPLHGGMTSLVEILFDELDRYGDVERVIDERLRRGEAIPGFRHPLYPDGDPRATGLLLYLPPDAQRDELLQMMNDTTGQLPTCDVALVSLRRSLKLPRGAALALFAVARTVGWVAHALEQKLDDKLIRPRARYMGQ

SEQ ID NO: 11517 - protein, 434 aa, Agrobacterium tumefaciens str. C58 (U. Washington)
MPTRAGVADMVNLLIQRETCLRMLWYTYMVNLDLYNQYEIIMRHSDKFMTADRAAAELGISRATLYAYVSRGMIHTSDAADDPRRRLYSAHDIEALKKRKNVGRRPRQVAAAALDWGLPVLESAITEIAEGQLRYRGQDALALSQAASLEDVARLLWDCGEVDPFDDLKAAPTPWPQPVLDYVRDLPLTERCQALLPLLEAGRVTTWRRDNRRLWPGAAALLRGIAGACISSQPKTQAVHLSLADAWQTDAAGADLIRRALVLQADHELNTSAFAVRVVASTGASLGACLNAGLSALSGPLHGGMTSLVEILFDELDRYGDVERVIDERLRRGEAIPGFRHPLYPDGDPRATGLLLYLPPDAQRDELLQMMNDTTGQLPTCDVALVSLRRSLKLPRGAALALFAVARTVGWVAHALEQKLDDKLIRPRARYIGR

SEQ ID NO: 11518 - protein, 113 aa, Bartonella sp. Tm918nv
ANEACLKMLQEIGSVKRIPEFIARAKDKNDPFRLMGFGHRVYKNYDPRAKIMQQTCHEVLKELNIQDDPLLDIAIELENIALNDEYFVEKRLYPNVDFYSGITLKALGFPTEM

SEQ ID NO: 11519 - protein, 112 aa, Bartonella sp. Tm1794nv
NEACLKMLQEMGSVKRIPEFIARAKDKNDPFRLMGFGHRVYKNYDPRAKIMQQTCHEVLKELNIQDDPLLDIAIELENIALNDEYFVEKRLYPNVDFYSGITLKALGFPTEM

SEQ ID NO: 11520 - protein, 429 aa, Agrobacterium tumefaciens str. C58 (Cereon)
MTEKSATVTLGEKQVELPVREGTIGPSVVDIATLYKHTGSFTYDPGFTSTASCESKITYIDGDEGVLLHRGFPIEQLAEQGDFLETCYLLLYGELPTAAQKKDFDTRVTRHTMVHEQMSRFFTGYRRDAHPMAVMCGTVGALSAFYHDSTDITDPHQRMVASLRMIAKMPTIAAMAYKYHIGQPFVYPKNDLDYASNFLHMCFAVPCEDYKVDPVLARAMDRIFILHADHEQNASTSTVRLAGSSGANPFACIAAGIACLWGPAHGGANEAALNMLNEIGSVDRIPEYIARAKDKNDPFRLMGFGHRVYKNYDPRAKIMQKTMYEVLEATGNSDDPIMQVALELEKIALSDPYFVEKKLYPNVDFYSGITLKALGFPTTMFTVLFALARTVGWIAQWNEMIEDPQQRIGRPRQLYTGAGKRDYVPVSKR

SEQ ID NO: 11521 - protein, 313 aa, Agrobacterium tumefaciens str. C58 (Cereon)
MLELLWSGQTATKITAEDIRSQLGKARLRAFELMQLLFPGLAALTSVEALRLLLSWLPDDETTPHHLVAVAAVPVFATAIIRNRQGFAPIAPDASLTHSADFLRMLSGTLPSTEKVRALDTYLTTVADHGLNASTFTARVIASTGAGLFSSVVGALCALKGPLHGGAPGPVLDMLDAIGAEAEIEPWLLDALGRGERLMGFGHRIYRVRDPRADVLKHAVSTLKEGSDRIAFAGKVEEAALALLKEKKPLRPLQTNVEFYTALVLEAVGFPRDSFTNVFAAGRMAGWTAHVLEQERTGRLIRPQSHYIGPHPR

SEQ ID NO: 11522 - protein, 425 aa, Agrobacterium tumefaciens str. C58 (Cereon)
MVNLLIQRETCLRMLWYTYMVNLDLYNQYEIIMRHSDKFMTADRAAAELGISRATLYAYVSRGMIHTSDAADDPRRRLYSAHDIEALKKRKNVGRRPRQVAAAALDWGLPVLESAITEIAEGQLRYRGQDALALSQAASLEDVARLLWDCGEVDPFDDLKAAPTPWPQPVLDYVRDLPLTERCQALLPLLEAGRVTTWRRDNRRLWPGAAALLRGIAGACISSQPKTQAVHLSLADAWQTDAAGADLIRRALVLQADHELNTSAFAVRVVASTGASLGACLNAGLSALSGPLHGGMTSLVEILFDELDRYGDVERVIDERLRRGEAIPGFRHPLYPDGDPRATGLLLYLPPDAQRDELLQMMNDTTGQLPTCDVALVSLRRSLKLPRGAALALFAVARTVGWVAHALEQKLDDKLIRPRARYIGR

SEQ ID NO: 11523 - protein, 294 aa, Agrobacterium tumefaciens str. C58 (Cereon)
MLILANESLEDVARLLWDCGEVDPFDDLKAAPTPWPQPVLDYVRDLPLTERCQALLPLLEAGRVTTWRRDNRRLWPGAAALLRGIAGACISSQPKTQAVHLSLADAWQTDAAGADLIRRALVLQADHELNTSAFAVRVVASTGASLGACLNAGLSALSGPLHGGMTSLVEILFDELDRYGDVERVIDERLRRGEAIPGFRHPLYPDGDPRATGLLLYLPPDAQRDELLQMMNDTTGQLPTCDVALVSLRRSLKLPRGAALALFAVARTVGWVAHALEQKLDDKLIRPRARYMGQ

SEQ ID NO: 11524 - protein, 113 aa, Bartonella sp. Pm1780nv
ANEACLKMLQEIGSVKRIPEFIARAKDKNDPFRLMGFGHRVYKNYDPRAKIMQKTCHEVLKELNIQDDPLLDIAIELEKIALNDEYFVEKKLYPNVDFYSGITLKALGFPTEM

SEQ ID NO: 11525 - protein, 112 aa, Bartonella sp. Pm1783nv
NEACLKMLQEIGSVKRIPEFIARAKDKNDPFRLMGFGHRVYKNYDPRAKIMQKTCHEVLKELNIQDDPLLDIAIELEKIALNDEYFVEKKLYPNVDFYSGITLKALGFPTEM

SEQ ID NO: 11526 - protein, 112 aa, Bartonella sp. Sb1859nv
NEACLKMLQEIGSVKRIPEFIARAKDKNDPFRLMGFGHRVYKNYDPRAKIMQKTCHEVLKELNIQDDPLLDIAIELENIALNDEYFVEKRLYPNVDFYSGITLKALGFPTEM

SEQ ID NO: 11527 - protein, 429 aa, Xylella fastidiosa Temecula1
MSDLDKVTLNAGETSLVLPVLKPTLGNGCVDIAKLTKETGLFTYDSGFTATASCKSAITYIDGEKGVLLYRGYPIEQLAEHSSFLEVAYLLMNGELPRKDEFAKFDDEITHHTMMHESLKNFLGGFHYDAHPMAMLAASVASLSAFYHDTLDLNDLEQRRLAAIRLIAKVPTLAAAAHRYSIGWPIRYPRNNLGYVERFLHMMFEVPSEPLQLNPVVIKALDLLFILHADHEQNASTSTVRLVGSTGANPYASVAAGITALWGPAHGGANEAVLKMLEEIGDAKNVDLVIAKAKTKDKNSPFRLMGFGHRVYKHFDPRAKIIREMAHTVLGELGVNDPLLEVALKLEEAALKDDYFVQRKLYPNVDFYSGIIYKAINIPLEMFTVMFAIARTAGWVSHWLEQQVDPEMKISRPRQIYTGHRERDYKDAR

SEQ ID NO: 11528 - protein, 112 aa, Bartonella sp. af170up
ANEACLKMLQEIGSVERIPEFIARAKDKNDPFRLMGFGHRVYKNYDPRAKIMQKTCHEVLKELNIQDDPLLDIAIELETIALNDEYFVEKKLYPNVDFYSGITLKALGFPTE

SEQ ID NO: 11529 - protein, 112 aa, Bartonella sp. af82up
AYETCLKMLQEIGAVQKIPEFIARAKNKNDRFRLMGFGHRVYKNYDPRAKIMQQTCHEVLKELNIQDDPLLDIAMELEKIALNDEYFIEKKLYPNVDFYSGITLKALGFPTE

SEQ ID NO: 11530 - protein, 112 aa, Bartonella sp. ma106up
LNEACLKMLQEIGSIERIPEFIARAKDKNDPFRLMGFGHRVYKNYDPRAKIMQKTCHEVLKELNIQDDPLLDIAIELEKIALSDEYFIEKKLYPNVDFYSGITLKALGFPTE

SEQ ID NO: 11531 - protein, 112 aa, Bartonella sp. sa192up
ANEACLKMLQEIGSVERIPEFIARAKDKNDPFRLMGFGHRVYKNYDPRAKIMQKTCHEVLKELNIQDDPLLDIAIELEKIALSDEYFVEKKLYPNVDFYSGITLKALGFPTE

SEQ ID NO: 11532 - protein, 411 aa, Rickettsia sp. DT1
DSEFAELKIRGKIFKLPILKASIGEDVIDISRVSAEADCFTYDPGFMSTASCQSTVTYIDGDKGILRHRGYDIKDLAEKSDFLEVAYLLIYGELPSGEQYNNFTKQVAHHSLVNDRLHYLFQTFCSSSHPMAIMLAAVGSLSAFYPDLLNFKEADYELTAIRMIAKIPTIAAMSYKYSIGQPFIYPDNSLDFTENFLHMMFATPYTKYTVNPIIKNALNKIFILHADHEQNASTSTVRIAGSSGANPFACISTGIASLWGPAHGGANEAVINMLKEIGSSEYIPKYIAKAKDKNDPFRLMGFGHRVYKNYDPRAAVLKETCKEVLKELGQLDNNPLLQIAIELEAIALKDEYFIERKLYPNVDFYSGIIYKAMGIPSLMFTVLFAIARTVGWMAQWKEMHEDPEQKISRPR

SEQ ID NO: 11533 - protein, 411 aa, Rickettsia sp. IO1
DSKFAELKIRGKIFKLPILKASIGEDVIDISRVSAEADCFTYDPGFMSTASCQSTITYIDGDKGILRHRGYDIKDLAEKSDFLEVAYLLIYGELPSSEQYNNFTKQVAHHSLVNERLHYLFQTFCSSSHPMAIMLAAVGSLSAFYPDLLNCKEADYKLTAIRMIAKIPTIAAMSYKYSIGQPFIYPDNSLDFTENFLHMMFAMPCTKYKVNPIIKNALNKIFILHADHEQNASTSTVRIAGSSGANPFACISTGIASLWGPAHGGANEAVINMLKEIGSSENIPKYIAKAKDKNDPFRLIGFGHRVYKNYDPRAAVLKETCKEVLKELGQLENNPLLQIAIELEAIALKDEYFIERKLYPNVDFYSGIIYKAMGIPSQMFTVLFAIARTIGWMAQWKEMHGDPEQKISRPR

SEQ ID NO: 11534 - protein, 377 aa, Pyrococcus furiosus DSM 3638
MNTEKYLAKGLEDVYIDQTNICYIDGKEGKLYYRGYSVEELAELSTFEEVVYLLWWGKLPSLSELENFKKELAKSRGLPKEVIEIMEALPKNTHPMGALRTIISYLGNIDDSGDIPVTPEEVYRIGISVTAKIPTIVANWYRIKNGLEYVPPKEKLSHAANFLYMLHGEEPPKEWEKAMDVALILYAEHEINASTLAVMTVGSTLSDYYSAILAGIGALKGPIHGGAVEEAIKQFMEIGSPEKVEEWFFKALQQKRKIMGAGHRVYKTYDPRARIFKKYASKLGDKKLFEIAERLERLVEEYLSKKGISINVDYWSGLVFYGMKIPIELYTTIFAMGRIAGWTAHLAEYVSHNRIIRPRLQYVGEIGKKYLPIELRR

SEQ ID NO: 11535 - protein, 438 aa, Magnetospirillum magnetotacticum
MTNENKTPKESVTLINNSTGKTTEFPLLAGSIGPKVADIRSLYASQDIFTYDPGYMSTGSCKSAITYIDGDAGVLLHRGFAIADLAENCSFLEVAYLILKGELPNAEQKTKFEFDIAHHSMVHEQINFFFRGFRRDSHPMAVLCGVVGAMAAFYHDSIDINDPHHRMVASYRLVAKMPTIVAWAYKYAQGQPFMFPQNKLSYSENFLHMMYATPCEEYKVSPVLARAMDRILILHADHEQNASTSTVRLAGSSGANPFACIAAGIASLWGPAHGGANEAVLQMLHEIGSVERIPEFIKKAKDKDDPFRLMGFGHRVYKNYDPRAKIMQKTCHEVLSELGVHDEPLLKLAMELERIALEDPYFVERKLFPNVDFYSGIIFRAMGIPTQVFTCLFALARTVGWIAQWNEMLTDPDQKIGRPRQLYVGPAQRDFVPLHKRG

SEQ ID NO: 11536 - protein, 456 aa, Magnetospirillum magnetotacticum
GHCAGEAGYGRPRGNGASSSRKGTMNTTQQAKVRLLVDDQAQDLPVVAATEGNDGIVVSSLLKSTGLVTVDPGFMNTASCESSITYIDGEAGILRYRGYPIEQLAERSSFLEVAYLLIHGELPDAATLDAFVERVNRHTLVHEDFRTFMGTFPRNAHPMAVLSSAINALSTFYPESLDPFDDETVELATVLLLAKSRTITSYLHRRRVGEPLLYPDYSRGYVDDFLRMTFATPYQQYEADPVVVDALDKLLILHADHEQNCSTSTVRVVGSSHANLYASVAAGVNALSGPLHGGANESVLTMLDKIAGAEYDVDTFMKKVKNKEDGVRLMGFGHRVYKNYDPRAAIVKKSADAVLSTLGKKDQLLDIAMGLEEIALNDDYFIERKLYPNVDFYTGLIYKAMGFSPAMFTPLFALGRMPGWIAQWREMMKDPQTKIGRPRQVYVGETERDYVAVSDR

SEQ ID NO: 11537 - protein, 196 aa, Magnetospirillum magnetotacticum
MWAGTLFAAVPSGCRPPPSLVPRHRCLWGPAHGGANEAALKMLMEIGHPENVSKYVAKAKDKNDPFRLMGFGHRVYKNYDPRARIMQKTTHEVLNELGLKDDLLEVAVQLEKIALEDEYFIEKKLYPNIDFYSGITLKALGFPTSMFTVLFAVARTVGWIAQWAEMIEDPSQKIGRPRQLYVGPDRRDYVAIGQRS

SEQ ID NO: 11538 - protein, 146 aa, Magnetospirillum magnetotacticum
MLFPSRERVRDPMSASASTIIVGDNHVELPIKTGTIGPDVVDIGKLYAKTGKFTFDPGFTSTASCESKITYIDGDEGVLLYRGYPIEQLAEQGASSKPLTDAFGECELRQKRFRYGSAPLVPTITVSRSRSPVGFALGPAFPEAAP

SEQ ID NO: 11539 - protein, 355 aa, Methanosarcina acetivorans C2A
MSKNICFIDGLEGVLKYREVDINELVKLPYDAVSYLLIRGRLPGEQELAEYSARLHAERRINKEVIDVIRMCNFNIDAMAALRTVISFISQFDPDLNDSSPEGNMRKAIRLIAIVPTIVATYYRMANGKEPLPPDPSLSHGANFLYMIKGSKPDPLDAEVMEKDFILSAEHELNASTFSSRVTASTMSDLYSAVVSGLCTLKGPLHGGARAEVMTMLDEVASPENAEKFVLEKISQREKIMGFGHRVYKTYDPRGVIFKQLSKKLAESKGDMHWYTTAEAVENVVVRELVEKRGKPIYPNVDFYSGVIYKYMEIPPQLATSIFAIGRVSGWIAHCFDQYERKKIIRPRAFMLDEC

SEQ ID NO: 11540 - protein, 101 aa, Rickettsia sp. Bar29-like
GSSEYIPKYIAKAKDKNDPFRLMGFGHRIYKNYDPRAAVLKETCKEVLKELGQLDNNPLLQIAIELEAIALKDEYFIERKLYPNVDFYSGIIYKAMGIPSQ

SEQ ID NO: 11541 - protein, 429 aa, Leptospira interrogans serovar lai str. 56601
MAEVAILKIDGKEYELPIVIGTEKEKAIDISKLRQQTGYVTLDNGYLNTGACTSAVTFLDGELGILRYRGIPIEQLAENSTFTEVAYLLIYGKIPSDSELKKWNDELTMHTLIHEDLKRLYNGFPKDGHPMAIMSSMIGSLSTYYQDSYDPENAEHRHISMIRLLAKFPTIAAFAYKKSIGQPTIHPLNSLDYCANFMNMMFSVPSEDYKIDPEIVKALNLLLILHADHEQNCSTSTVRLVGSSLANLYGAISAGICALWGPRHGGANQEVLEMLQEIQASGLPVKKIVEKAKDKNDSFRLSGFGHRVYKNFDPRAKIIKKACDSVLKRLGVQDSLLDIAKELEETALHDPYFVERKLYPNVDFYSGIIYRALGIPVNMFTVMFAMGRLPGWIAQWKEMIESPDMKIGRPRQIYTGSTETSYKEAKKKA

SEQ ID NO: 11542 - protein, 426 aa, Leptospira interrogans serovar lai str. 56601
MSEFIEIKVGEKSYQFPLISGTDGKKGIDIRELHQKTGLISYDPGFFNTAYAVSRISRRDPNSGELNYRGYDIADLVQHSTFVETSYLLIYGKLPTEQQLKDFSLKLSKHSLIHEDMINLFDGFPGKGHPLAVLSVMVTSLSSYYPEEYEESLDKGIDHSARLLAKIRTIAAFSYKKIVGQPFVYPLDKHPYCTNFLYMLFSIPSKDYIPTEDIDRILNQLWILYADHEQNVSNTTVQVIGSTQANLFASISSAINALWGSREGGRQVAAVGLIEDILKSRKSVPEYFEKFKGDSEKLFGNGFGHKAYEAKSRRAIIASKLFHDFYKKNPIGPIAEVALKIEEYMQNDEYYINQNLYPNLEFYSAVIFNSLGIPKELFTAMQVIGKLPGWLAHWREQRVSGNYSKARPKQIYSGEMGRKYIPLSER

SEQ ID NO: 11543 - protein, 112 aa, Bartonella sp. strain Pm650nm
GANEACLKMLQEIGSVKRIPEFIARAKDKNDPFRLMGFGHRVYKNYDPRAKIMQKTCHEVLKELNIQDDPLLDIAIELEKIALNDEYFVEKKLYPNVDFYSGITLKALGFPT

SEQ ID NO: 11544 - protein, 429 aa, Xanthomonas campestris pv. campestris str. ATCC 33913
MSDLDQVTLNAGDTSVVLPVLKPTLGNDCVDISKLTKETGLFTYDSGFTATASCKSAITYIDGDNGVLLYRGYPIEQLAEKSSFLEVSYLLMNGELPTADEFKKFDHEVTHHTMMHESLKNFLGGFRHDAHPMAMLAGSVASLSAFYHDTLDLNDPEQRRQAAIRLIAKVPTLAAAAYRYSIGWPIRYPRNNLNYVDRFLHMMFEVPSEPLEINPVVAKALDLLFILHADHEQNASTSTVRLVGSTGANPYASVAAGITALWGPAHGGANEAVLKMLEEIGTADNVESAVAKAKDKNSSFRLMGFGHRVYKNFDPRAKIIREMTHKVLGELGVNDPLLEVALKLEEAALKDDYFVQRKLYPNVDFYSGLIYKALNIPVEMFTVMFAIARTAGWVSHWLEQQVDPEMKIGRPRQIYTGYDKRDYTDAGKR

SEQ ID NO: 11545 - protein, 384 aa, Xanthomonas campestris pv. campestris str. ATCC 33913
MNDTVIPGFKPKKSVALSGTAAGNTALCTVGRSGNDLHYRGYDILDLATSSEFEEIAYLLVHGKLPNSGELRGYKAKLRSLRGVPAAVKTALEQLPPSAHPMDVMRTGVSVLGCLQPEKDDHNHPGARDIADKLMASLGSMLLYWYHYSHNGKRIEVETDDDSIGGHFLHLLHGFAPKESWVRAMHTSLILYAEHEFNASTFASRVIAGTGSDMYSAIAGGIGALRGPKHGGANEVAFEVQKRYDTPDEAEADIKARVERKEVVIGFGHPVYTVSDPRNKVIKDVARELSDEQGSRKMYDIAERLETVMWDIKKMFPNLDWFSAVSYHMMGVPTAMFTPLFVLARTAGWSAHIIEQRVDGKIIRPSANYTGPEDQAFVPLDQRA

SEQ ID NO: 11546 - protein, 429 aa, Xanthomonas axonopodis pv. citri str. 306
MSDLDQVTLNAGDKSVVLPVLKPTLGNDCVDISKLTKETGLFTYDSGFTATASCKSAITYIDGDNGVLLYRGYPIEQLAEKSSFLEVSYLLMNGELPTADEFKKFDHEVTHHTMMHESLKNFLGGFRHDAHPMAMLAGSVASLSAFYHDTLDLNDPEQRRQAAIRLIAKVPTLAAAAYRYSIGWPIRYPRNNLNYVDRFLHMMFEVPSEPLEINPVVAKALDLLFILHADHEQNASTSTVRLVGSTGANPYASVAAGITALWGPAHGGANEAVLKMLEEIGTADNVESAVAKAKDKNSSFRLMGFGHRVYKNFDPRAKIIREMTHKVLGELGVNDPLLEVALKLEEAALKDDYFVQRKLYPNVDFYSGIIYKALNIPVEMFTVMFAIARTAGWVSHWLEQQVDPEMKIGRPRQIYTGYDKRDYTDSAKR

SEQ ID NO: 11547 - protein, 384 aa, Xanthomonas axonopodis pv. citri str. 306
MNDTATPGFKPKKSVALSGTAAGNTALCTVGRSGNDLHYRGYDILDLATTSEFEEIAYLLVHGKLPNRGELRGYKAKLRSLRGVPAAVKTALEQLPPSAHPMDVMRTGVSVLGCLQPEKDDHNHPGARDIADKLMASLGSMLLYWYHYSHNGKRIEVETEDDSIGGHFLHLLHGFAPKDSWVRAMHTSLILYAEHEFNASTFASRVIAGTGSDMYSAIAGGIGALRGPKHGGANEVAFEVQKRYDTPDEAEADIKARVERKEVVIGFGHPVYTVSDPRNKVIKVVARELSDEQGSRKMYDIAERLESVMWDIKKMFPNLDWFSAVSYHMMGVPTAMFTPLFVLARTAGWSAHIIEQRVDGKIIRPSANYTGPEDQVFVPLDQRS

SEQ ID NO: 11548 - protein, 426 aa, Caulobacter crescentus CB15
MTDKATLTIGDKSYELPILKGSTGPDVIDVRKIYGESDHFTFDPGFTSTASCESKITYIDGDAGILLHRGYPIDQLAEKSSFLEVCYLLLNGELPKADEFAKFEHNITYHTMLHAQFDRFFEGFRRDAHPMAVMTGAVGALSAFYSDSINVDDAREREISAHRLIAKMPTIAARAYKYTVGQPFVSPRNDLSYSENFLRMCFAVPAEDWKPNPVLTRAMDRIFILHADHEQNASTSTVRLAGSSGAHPFACIAAGIACLWGPSHGGANQEALEMLETIGSVDNIKDYVQGVKDRKYKLMGFGHRVYKNFDPRAKVMQKTAHEVLAELGHNNDPLLQVAQELEKVALNDPYFVDRKLYPNIDFYSGITLRAMGFPTNMFTVLFALARTVGWISQWKEMFEDPTRKIGRPRQLYTGATHRDYVTLDKR

SEQ ID NO: 11549 - protein, 361 aa, Caulobacter crescentus CB15
MSDGLEGVIAAQTVLSDVDGAHGRLVIRGYAVEDLAGRTRFEDAAHLLLDGFFDDAPSDLSSALGEARVGVFAEVAALDEGLARRDPVEALRALLARIPDGDDLKTALRLIAAPAVFTPAVLRVANGDAPIAPDPALSHAADILRMIRGVPATDAEAAALDAYLVTVCDHGLNASTFAARVVASTRAGLTSAVLAGLSALKGPLHGGAPGPVIDMLDAIGTPENARPWLERALARGDRLMGFGHRIYRVRDPRADALKAAVRRLSSASGGLPGRLAFAEAVERAALEILREHKPDRPLDTNVEFYTALLLEALGLPPSSFTCVFAMGRVAGWLAHAREQLAGGRLIRPQSVYVGPEVRVAA

SEQ ID NO: 11550 - protein, 388 aa, Caulobacter crescentus CB15
MDAEQVLERLGIRPQTLYAYVSRGRIEAAAHPSDPRRSLYRASDVTALARKKARGRRVADVAAEAIAWGEPVLPSAITTVSGGKLWYRGEDAAGLADQGLTLENVARLLRGGHGAALKASSRPPPPATDSARSRMFLTLAERAGREPPARGRAPLALAMEAADLLDAIVDAATGQAGDGPAHQRFAHAWNLTADGADLVRRALVLMADHELNASTFAARVAASTGASLSAACLAGLSALSGPLHGGMAARVEALVEEADRRDAARAVSSRLEQGASLPGFDHPLYPGGDPRAAALLARFEPPEPLTALWQATRAATGLAPNIDFALVALARGLALPQDAPFILFATARSAGWTAHAIEQLQTGRLIRPRARYIGTVPSAAGYSPSSSS

SEQ ID NO: 11551 - protein, 371 aa, Bacillus anthracis str. A2012
MTVIRGLEGVVATTSSVSSIIDDTLTYAGYNIDDLAENATFEEVVYLLWHRKLPNEQELAKFNEIVSEYYKVPGEILAYLKQVDLKIAHPMSVLRTAISMLSLYDESAEIMDEKSNYLKAVKLQAQVGTLVAAYARIRKGLDVVEPRNDLSLAANFLYMLNDREPNEVEIEAFDKALVLHADHELNASTFTARVCVATLSDVYSGITAAIGALKGPLHGGANENVMKMLTEIGEEENVESYIHNALQNKVKIMGFGHRVYEQGDPRAKHLREMSKRLCVLLGEEKWYNMSIKIEDIVTKEKGLPPNVDFYSASVYHCLGIDHDLFTPIFAISRMSGWLAHILEQYENNRLIRPRADYNGPTHQVYVPIAQR

SEQ ID NO: 11552 - protein, 372 aa, Bacillus anthracis str. A2012
MKAEEKFSPGLDGIVAAETKISFLDTVKGEIVIQGYDLIELSKTKEYLDIVHLLLEEHLPNEDEKATLEKKLKEEYAVPEGVFNVLKALPKETHPMDGLRTGVSALAGYDNDIENRSLEVNKSRGYKLLSKVPNIVANSYHILNNEEPIEPLKELSYSANFFYMLTGKKPTELEEKIFDRSLVLYSEHEMPNSTFTARVIASTQSDLYGALTGAVASLKGSLHGGANEAVMYMLLEAGNVEKFEELLQKKLYNKEKIMGFGHRVYMKKMDPRALMMKEALKQLCDVKGDYTLYEMCEAGEKIMEKEKGIYPNLDYYAAPVYWMLGIPIQLYTPIFFSSRTVGLCAHVIEQHTNNRLFRPRVNYIGERHVLSK

SEQ ID NO: 11553 - protein, 110 aa, Bartonella sp. SC12uk
ANEACLKMLQEIGSVRRIPEFITRAKDKNDPFRLMGFGHRVYKNYDPRAKIMQQTCHEVLKELNIQDDPLLDIAIELEKIALNDQYFGEKKLYPNVDFYSGITLKALGFP

SEQ ID NO: 11554 - protein, 110 aa, Bartonella sp. SV06uk
ANEACLKMLQEIGSVKRIPEFIARAKNKNDPFRLMGFGHRVYKNYDPRAKIMQKTCHEVLKELNIQDDPLLDIAIELEKIALNDEYFVEKKLYPNVDFYSGITLKALGFP

SEQ ID NO: 11555 - protein, 422 aa, Campylobacter jejuni subsp. jejuni NCTC 11168
MSNSVTITDNRNGKSYEFPIYDGTTGPSVVDMSSFYKQTGMFSYDEGLTSTATCKSKITYIDGENGILMHRGYPIEWLAENKLYLDVVHLLLYKELPDATRLEAFRYEMKKRSFIHEGMHRLFDSFPDNAHPMAVLQGAVSSLSAFYPDHLNMNVKEEYMEMAARIVAKIPTIVATAYRYKHGFPMAYPNLDRGFTENFLYMLRTYPYDHVELKPIEVKALDTVFMLHADHEQNASTSTVRAVGSTHAHPYACIAAGIGALWGHAHGGANEGVIRMLEQIGSVDRVDEFIKRAKDKNDPFRLMGFGHRVYKNFDPRAKVLKKLRDQLIDELGIDTNLIKVATRIEEIALSDDYFVQRGLYPNVDFHSGLILKALGIPNEMFATLFVIGRTPGWIAQWIEQKEQESLKIVRPRQLYLGETSKI

SEQ ID NO: 11556 - protein, 355 aa, Methanosarcina mazei Goe1
MNKNICFIDGLEGILKYRDVDINELIDLPYDAVSYLLIKGELSEEKELAEYSARLHAERGINREVMDVIRMCNLNIDSMEALLTVVSFISQFDPDLYDNSLEGNMRKAIRLIAVVPTIVAAYYRTANGKEPVPPDPSLAHGANFLYMIKGSKPDPLEAEVMEKDFILSAEHELNASTFSSRVTASTMSDLYSAVVSGLCTLKGPLHGGARSEVMTMIETIGSPENAEKFVLEKIEKREKIMGFGHRVYKTYDPRGTIFKQLSRRLAEAKGDMHWYETAEAIENAVIRELVEKRGKPIYPNIDFYSGVIYKYMEIPPQLATSIFAIGRISGWIAHCFDQYEKKKIIRPRIFMLDEC

SEQ ID NO: 11557 - protein, 447 aa, Chlorobium tepidum TLS
MSDSDHRNSLTIIDNRTGKSYELPIENGTIRTMDLRKIKESEDDFGLLGYDPAFLNTCSCKSTITFIDGDKGILRYRGYPIEQLAEKSSFLETAYLLIKGELPDKERLAVWTYNIRHHTMTHANLTKFMDGFRYDAHPMGILVGTLGALSTFYPDAKNVGEEESRKLQVRRLIGKMPTLAAMSFRHSLGFPYVLPDNDLSYAGNFLSMMFRMTEKNYKPNPVLEHALDVLFILHADHEQNCSTNAVRSVSSSMVDPYSAIAAGCAALYGPLHGGANEAVIHMLKQIGSVDKIPEFIKLVKSGEGRLMGFGHRVYKNYDPRARIIKKIAFDVFEETGRNPLLDIAIELERIALEDDYFIQRKLYPNVDFYSGLIYQAMGFPTEMFPVLFAIGRTPGWLAQWIEHVKDPEQKIARPRQIYLGEKCRDYVPIDERPRKGDDEQKFGICRL

SEQ ID NO: 11558 - protein, 470 aa, Corynebacterium efficiens YS-314
METFVSRNNILAARDASDLVIESGDLPQPGGTDKKFEREIVASDNNKAVLHYPGGEFEMGIKQATEGNSGVILGKMLSETGLVTFDPGYVSTGSTESKITYIDGDAGILRYRGYDIADLAENATFNEVSYLLIKGELPTPEELHKFNDEIRHHTLLDEDFKSQFNVFPRDAHPMATLASSVNILSTYYQDQLDPLDEAQLDKATVRLMAKVPMLAAYAHRARKGAPYMYPDNSLNARENFLRMMFGYPTEPYEVDPIMVKALDKLLILHADHEQNCSTSTVRMIGSAQANMFVSIAGGINALSGPLHGGANQAVLEMLEEIAANGGDATDFMNRVKNKEKGVRLMGFGHRVYKNYDPRAAIVKDTAHEILEHLGGDPLLDLALKLEEIALNDDYFISRKLYPNVDFYTGLIYRAMGFPTDFFTVLFAIGRLPGWIAHYREQLADPGAKINRPRQIYTGETARKIIPREER

SEQ ID NO: 11559 - protein, 382 aa, Corynebacterium efficiens YS-314
MNDKNVEVRRGLYGVVSDYTAISKVMPETNSLTYRGYPVQDLVEHCSFEEVIYLLWNGELPTAEQLREFNTRGRSYRVLDAGLIALIHSLPMGCHPMDVLRTAVSYMGTKDPEPFTTGADHVLRIGHNLLAQLPMVVAMDIRRRSGADIIAPDPDKGIAENFLSMVFGTASASVATNPEDVRDFEKSLILYAEHSFNASTFTSRVITSTRSDAYSAIAGAIGALKGPLHGGANEFVMHTMLDIDDPDNAAAWVHRALDNKDLIMGFGHRVYKSGDSRVPSMEKSMRALAQRHDAEKWVRMYEQMQQVMEDRTGIKPNLDFPAGPAYHILGFPVDFFTPLFVLARLAGWTAHIVEQYENNSLIRPLAAYNGVEQREVVPIDQR

SEQ ID NO: 11560 - protein, 437 aa, Corynebacterium glutamicum ATCC 13032 [sequence omitted]

SEQ ID NO: 11561 - protein, 383 aa, Corynebacterium glutamicum ATCC 13032
MSSATTTDVRKGLYGVIADYTAVSKVMPETNSLTYRGYAVEDLVENCSFEEVFYLLWHGELPTAQQLAEFNERGRSYRSLDAGLISLIHSLPKEAHPMDVMRTAVSYMGTKDSEYFTTDSEHIRKVGHTLLAQLPMVLAMDIRRRKGLDIIAPDSSKSVAENLLSMVFGTGPESPASNPADVRDFEKSLILYAEHSFNASTFTARVITSTKSDVYSAITGAIGALKGPLHGGANEFVMHTMLAIDDPNKAAAWINNALDNKNVVMGFGHRVYKRGDSRVPSMEKSFRELAARHDGEKWVAMYENMRDAMDARTGIKPNLDFPAGPAYHLLGFPVDFFTPLFVIARVAGWTAHIVEQYENNSLIRPLSEYNGEEQREVAPIEKR

SEQ ID NO: 11562 - protein, 381 aa, Corynebacterium glutamicum ATCC 13032
MSDSQVRKGLNGVISDYTSISKVMPESNSLTYRGYAVEDLVENCSFEEVIYLLWFGELPTTEQLRTFNTTGRSYRSLDAGLISLIHSLPNTCHPMDVLRTAVSYMGTFDPDPFTRDADHIRSIGHNLLAQLPMVVAMDIRRRSGEEIIAPDHNKGIASNFLSMVFGNDDGSVANSADDIRDFERSLILYAEHSFNASTFSARVISSTRSDTYSAITGAIGALKGPLHGGANEFVMHTMLDIDDPNNAADWMGKALDRKERIMGFGHRVYKNGDSRVPSMEKSMRSLAARHRGQKWVHMYESMQEVMEARTGIKPNLDFPAGPAYYMLGFPVDFFTPLFVLARVSGWTAHIVEQFENNALIRPLSAYNGVEEREVVPISERT

SEQ ID NO: 11563 - protein, 394 aa, Corynebacterium glutamicum ATCC 13032
MTSTFSPTEKEKTMSDSQVRKGLNGVISDYTSISKVMPESNSLTYRGYAVEDLVENCSFEEVIYLLWFGELPTTEQLRTFNTTGRSYRSLDAGLISLIHSLPNTCHPMDVLRTAVSYMGTFDPDPFTRDADHIRSIGHNLLAQLPMVVAMDIRRRSGEEIIAPDHNKGIASNFLSMVFGNDDGSVANSADDIRDFERSLILYAEHSFNASTFSARVISSTRSDTYSAITGAIGALKGPLHGGANEFVMHTMLDIDDPNNAADWMGKALDRKERIMGFGHRVYKNGDSRVPSMEKSMRSLAARHRGQKWVHMYESMQEVMEARTGIKPNLDFPAGPAYYMLGFPVDFFTPLFVLARVSGWTAHIVEQFENNALIRPLSAYNGVEEREVVPISERT

SEQ ID NO: 11564 - protein, 382 aa, Thermosynechococcus elongatus BP-1
MVACEFSPGLDGIPVAQSAISYVDGQAGILEYRGVPIQELAEKSTFLETAFLLIWGYWPNREELAAFEHDITYHRRVKYRIRDMMKCFPESGHPMDALQASAGALGLFYSRRALEDPEYIRAAVIRLLAKIPTMVAAFQLIRKGNDPVMPCDELDYAANFLYMLNERRPDPFAARVFDICLILHAEHTMNASTFSARVTASTLTDPYAVVASAVGTLAGPLHGGANEDVINMLEEIGSVENVRPYVEKCIQNKIKIAGFGHRVYKVKDPRATILQKLAEQLFDKFGGDRYYDIALKLEEVVGEYLSYKGIYPNVDFYSGLVYRRLGIPSDLFTPVFAIARVAGWLAHWKEQLEANRIYRPTQVYTGAHNQPYVPMEERNHRP

SEQ ID NO: 11565 - protein, 427 aa, Shigella flexneri 2a str. 301
MADTKAKLNLNGDTAVELDVLKGTLGQDVIDIRTLGSKGVFTFDPGFTSTASCESKITFIDGDEGILLHRGFPIDQLATDSNYLEVCYILLNGEKPTQEQYDEFKTTVTRHTMIHEQITRLFHAFRRDSHPMAVMCGITGALAAFYHDSLDVNNPRHREIAAFRLLSKMPTMAAMCYKYSIGQPFVYPRNDLSYAGNFLNMMFSTPCEPYEVNPILERAMDRILILHADHEQNASTSTVRTAGSSGANPFACIAAGIASLWGPAHGGANEAALKMLEEISSVKHIPEFVRRAKDKNDSFRLMGFGHRVYKNYDPRATVMRETCHEVLKELGTKDDLLEVAMELENIALNDPYFIEKKLYPNVDFYSGIILKAMGIPSSMFTVIFAMARTVGWIAHWSEMHSYGMKIARPRQLYTGYEKRDFKSDIKR

SEQ ID NO: 11566 - protein, 389 aa, Escherichia coli CFT073
MSDTTILQNSTHVIKPKKSVALSGVPAGNTALCTVGKSGNDLHYRGYDILDLAEHCEFEEVAHLLIHGKLPTRDELAAYKTKLKALRGLPANVRTVLEALPAASHPMDVMRTGVSALGCTLPEKEGHTVSGARDIADKLLASLSSILLYWYHYSHNGERIQPETDDDSIGGHFLHLLHGEKPSQSWEKAMHISLVLYAEHEFNASTFTSRVIAGTGSDMYSAIIGAIGALRGPKHGGANEVSLEIQQRYETPGEAEADIRKRVENKEVVIGFGHPVYTIADPRHQVIKRVAKQLSQEGGSLKMYNIADRLETVMWESKKMFPNLDWFSAVSYNMMGVPTEMFTPLFVIARVTGWAAHIIEQRQDNKIIRPSANYVGPEDRQFVALDKRQ

SEQ ID NO: 11567 - protein, 113 aa, Rickettsia sp. ATT
VNEAVINMLKEIGSSEYIPKYIAKAKDKNDPFRLMGFGHRVYKNYDPRAAVPKETCKEVLKELGQLDNNPLLQIAIELEAIALKDEYFIERKLYPNVDFYSGIIYKAMGIPSQ

SEQ ID NO: 11568 - protein, 113 aa, Rickettsia sp. HOT1
ANEAVINMLKEIGSSEYIPKYIAKAKDKNDPVRLMGFGHRVYKNYDPRAAILKETCKEVLKELRQLDNNPLLQIAIELEAIALKDEYFIERKLYPNVDFYSGIIYKAMGIPSQ

SEQ ID NO: 11569 - protein, 113 aa, Rickettsia sp. HOT2
ANEAVINMLKEIGSSEYIPKYIAKAKDKNDPFRLMGFGHRVYKNYDPRAAVLKETCKEVLKELRQLDNNPLLQIAIELEAIALKDEYFIERKLYPNVDFYSGIIYKAMGIPSQ

SEQ ID NO: 11570 - protein, 401 aa, Thermobifida fusca
MGGPLTAPRMSAKDPRTVQWITNPRTEETEEAGMSDFKPGLEGVVAFETEIAEPDKEGGALRYRGVDIEQLVGHVTFGRVWGLLVDNSFNPGLPFADPIDLPVSTGDVRVDVQSALATLAPRWGFKPLLDIDEAEARDNVARAASAALSIIAQSARGDQPKVPQSRVDEGKTIVERFMIQLRGEPDPLHVKAVDAYWTSAAEHGMNASTFTARVIASTGADVAAALSGAVGAMSGPLHGGAPARVLHMLDETERLGDARKYVTQALDRGERLMGFGHRVYRAEDPRARVLRRTAKELNAPRFEVASALEKAALEELQARKPDRVLATNVEYWAAVVLDFAQIPASMFTSMFTCARTAGWSAHILEQKRTGRLVRPSARYVGPAVRDIKSVEGADEALAQGI

SEQ ID NO: 11571 - protein, 456 aa, Clostridium thermocellum ATCC 27405
MMNANFMEFEKNKLEELTELATKCSYIDPELFVKYQVKRGLRDLDGKGVLVGLTEIGEVHSYIIDENEIVPVPGRLIYRGIDIFDLVDGFISEGRFGFEETTYLLLFGDLPTREQLNEFEKLLSSYRELPEEFLNDMILNLPGKDIMNVLARSVLAYYTYDSNPDDTSVKNVLRQCMRLIGSMPTIAVYAYQAMAHYYDRKSLVIHPPRPELSTAENILHMLRPDSKYTDLEARLLDLALVLHAEHGGGNNSTFVTHVVTSTGTDTYSVIAAALGSLKGPRHGGANIKVCQMFEDLKQNVRDWKDDEEIENYLMKLLNKEAFDRAGLIYGIGHAVYSISDPRCILLKEQAEKLAKEKGLEDEFELYDRVERLAPQIIGRVRKMYKGVSANVDFYSGFVYKMLNLPLELYTPIFAISRMSGWAAHRIEEIVNAGKIIRPAYKSVAERRDYVAMKDRK

SEQ ID NO: 11572 - protein, 454 aa, Microbulbifer degradans 2-40
MADVISYNLFILLQESVMTDKKATLTVDGLDDSIELPVYSGSVGPDVIDVRALTGKGYFTYDPGFVSTASCESKITYIDGDKGVLMHRGYPIETLAEKSDYLETCYLLLHGELPSAAEYEEFKGIITHHTMVHESIARFFRGFHYDSHPMAMMCGIVGALSAFYHDSLDISNPEHRLISAHRLIAKMPTLAAMCYKHSQGQPFMYPDNNLGYAENFLHMMFGTPCDDPKVNPVIARAMDRIFLLHADHEQNASTSTVRLAGSSGANPFACIAAGIATLWGPAHGGANEAVLSMLEEIGDEKNIDAYVAKAKDKNDPFRLMGFGHRVYKNFDPRAKVMKETCDEVLTELGLENDPLLKIAKRLEQIALEDEYFIQKKLYPNVDFYSGIIMKAIGIPTDMFTVIFATGRTVGWIAHWHEMISEGFKIGRPRQLYTGSVLREFEERDSRPKANPAKF

SEQ ID NO: 11573 - protein, 383 aa, Trichodesmium erythraeum IMS101
MSVVCIEFKPGLEGVPATQSSVSYVDGQKGILEYRGINIEELAKKSSFLEAAYLLIWGNLPTQEELQSFEQEICLNRRIKYRIRDMMKCFPETGHPMDALQTSAAALGLFYSRRALDNPEYIRKAVVRLLANIPTMVAAFELMRKGNDPVKPRDDLGYAANFLYMLNEREPDPLAAKVFDICLTLHAEHTINASTFSAMVTASTLTDPYGVIASAVGTLAGPLHGGANEDVISMLSEIGSVENVKPYLKRCFETKAKIAGFGHRVYKVKDPRAIILQELAVDLFEKFGDDKYYQIALEMEKVVEEKLGHKGIYPNVDFYSGLVYRKLGIPSDLFTPVFAIARVAGWLAHWKEQLAANRIFRPTQIYSGDHNIAYTSLEERALI

SEQ ID NO: 11574 - protein, 362 aa, Rickettsia sp. RDa420
WQDVIDISKVYSEADCFTYDPGFMSTASCRSTITYIDGDQGILRHRGYDIKDLAEKSDFLEVAYLLIYGELPNSKQYNDFTKKVAHHALVNERLHYLFQTFCSSSHPMAIMLAAVGSLSAFYPDLLNFFKEADYELTAIRMIAKIPTIAAMSYKYSIGQPFVYPDNSIDFTENFLHMMFATPCEKYKVNPVIKNALNKIFILHADHEQNASTSTVRIAGSSGANPFACVSTGIASLWGPAHGGANEAVINMLKEIGSVENIPKYIAKAKDKNDNFRLMGFGHRVYKNYDPRAAVLKETCKEVLKELGQLDNNPLLQIAIELEAIALKDEYFIERKLYPNVDFYSGIIYKAMGIPPQMFTVLF

SEQ ID NO: 11575 - protein, 369 aa, Rickettsia sp. RDla440
DSEFAELKIRGKIFKLPILKASIGEDVIDISRVSAEADCFTYDPGFMSTASCQSTITYIDGDKGILRHRGYDIKDLAEKSDFLEVAYLLIYGELPSGEQYNNFTKQVAHHSLVNERLHYLFQTFCSSSHPMAIMLAAVGSLSAFYPDLLNFKEADYELTAIRMIAKIPTIAAMSYKYSIGQPFIYPDNSLDFTENFLHMMFATPCTKYKVNPIIKNALNKIFILHADHEQNASTSTVRIAGSSGANPFACISTGIASLWGPAHGGANEAVINMLKEIGSFEYIPKYIAKAKDKNDPFRLMGFGHRVYKNYDPRAAVLKETCKEVLKELGQLDNNPLLQIAIELEAIALKDEYFIERKLYPNVDFYSGII

SEQ ID NO: 11576 - protein, 430 aa, Brucella suis 1330
MSDKTASFTLDGKTFDLPVRKGTVGPDVVDIGPLYKNSHAFTYDPGFTSTASCESKITYIDGDEGVLLYRGYPIDQLAEHGDFLETCYLLLYGELPTATQKADFDYRVTRHTMLHEQMTKFFTGFRRDAHPMAVMVGCLGAMSAFYHDSTDITDPHQRMVASIRLIAKVPTLAAMAYKYHIGQPFVYPKNDLDFASNFLHMCFTVPCEEYKVNPVLARAMDRIFILHADHEQNASTSTVRLAGSSGANPFACIAAGVACLWGPAHGGANEAALNMLSEIGSVDRIPEYIARAKDKNDPFRLMGFGHRVYKNYDPRAKIMQKTCHEVLGELGIKDDPLLDVAMELERIALTDEYFIEKKLYPNIDFYSGITLKALGFPTEMFTVLFALARTVGWVAQWKEMIEDPQQKIGRPRQLYTGATERDYVPLAKRK

SEQ ID NO: 11577 - protein, 439 aa, Bifidobacterium longum DJO10A
MVHEEEGARMATAQLDVDSNKFNLPVVKASAGPDGIVVSKLRNDGWVTLDPGFLTTAQCESKITYIDGKHSILRYCGYPIEQLCENSDFLEVAWLLRHGELPSRAEYEQFCADINHKTMVGEDFRTFMGSFPRSAHPMSVLASAINALATFYPDTTDISDTDQLDEAAKIIMAKARTIVSYIFRRRRDEPMLYPDYARGYVDDFLRMCFAVPYEPFESDPLYVHALGRLLIIHADHEQNCSTSVVRIAGSAHANLYSAVAAGVNALSGPLHGGANEAVLRQLKAIRDSGKSVAEFVRDAKENGQKISGLGHRVYKSYDPRAAIARKYLEKIMEREDTQKLPSDERALFAVATELEDIALNDEYFVSRNLYPNVDFYTGLIYRAIGFDPAMFTTLFALGRIPGWIAQYREMLADPNTKIGRPRQVYTGPVERDFVPMDER

SEQ ID NO: 11578 - protein, 427 aa, Haemophilus somnus 129PT
MSKLTAKLTLSDGREFDLNVQQGTLGYDAVDVQPLVKNKLFTFDPGFMSTASCVSEITYIDGDNGILLHRGYPIADLAKNADYLEVAHLLLFGERPNKEEYANFIKLVKNHTLVHEQISRFFHGFRRDSHPMAIMCGVSGALAAFYHDSLDINDIEHRELTAIRLLAKMPTLAAMCYKYSIGQPFMFPLNKLSYAGNFLYMMFATPCEPYEVNPVLEKAMDRIFILHADHEQNASTSTVRTAASSGANPFACIAAGIASLWGPAHGGANEACINMLEEIGSVDRIPEYIARAKDKNDPFRLMGFGHRVYKNYDPRAKVMRQTCHEVLKELNIQTPLFDVAMELERIALNDPYFIDHKLYPNVDFYSGIILKAIGIPTSMFTVIFALARTVGWIAHWKEMFKPGNMKIVRPRQLYKGHTERNFDAIEK

SEQ ID NO: 11579 - protein, 429 aa, Pseudomonas syringae pv. syringae B728a
MADKKAQLIIEGAAPVELPILTGTVGPDVIDVRGLTATGRFTFDPGFMSTASCDSKITYIDGDNGILLHRGYPIEQLAEQSDYLETCYLLLNGELPTAEQKAQFVAVVKNHTMVHEQLKTFFNGFRRDAHPMAVMCGVVGALSAFYHDSLDINNPQHREISAVRLVAKMPTLAAMVYKYSMGQPMMYPRNDLSYAENFLHMMFNTPCEIKPISPVLAKAMDKIFILHADHEQNASTSTVRMAGSSGANPFACIAAGIAALWGPAHGGANEAVLTMLDEIGDVSNIDTFIAKAKDKNDPFKLMGFGHRVYKNRDPRATVMKQTCDEVLKELGITNDPQLELAMRLEEIALTDPYFIERSLYPNVDFYSGIILKAIGIPTSMFTVIFALARTVGWISHWKEMLSSPYKIGRPRQLYTGNVQRDIVALQDRK

SEQ ID NO: 11580 - protein, 375 aa, Pseudomonas syringae pv. syringae B728a
MAEAKVLSGAGLRGQVAGQTALSTVGMAGAGLTYRGYDVRDLAAEARFEEVAYLLLYGELPNQAELSAYMDKLKRLRDLPQALKEVLERIPADTHPMDVMRTGASMLGTLEPERSFDQQRDSTGRLLAAFPAIMCYWYRFSHDGRRIDCTSAEDSIGGHFLHLLLDKAPSELHRKVMDVSLILYAEHEFNASTFTARVCASTLSDLYSCVTAAIGTLRGPLHGGANEAAMEMIQRFASAEEATKGTLGMLERKEKIMGFGHAIYKESDPRNEVIKGWSKKLADEVGDTVLFPVSEAIDKVMWEQKKLFPNADFYHASAYHFMGIPTKLFTPIFVCSRLTGWAAHVFEQRANNRIIRPSAEYIGVEQRAFVPLEQR

SEQ ID NO: 11581 - protein, 429 aa, Pseudomonas fluorescens PfO-1
MADKKAQLIIEGAAPVELPILTGTVGPDVIDVRGLTATGRFTFDPGFMSTASCESKITYIDGDNGILLHRGYPIEQLAEKSDYLETCYLLLNGELPTAEQKAQFVGTVKNHTMVHEQLKTFFNGFRRDAHPMAVMCGVVGALSAFYHDSLDINNPQHREISAIRLVAKMPTLAAMVYKYSMGQPMMYPRNDLSYAENFLHMMFNTPCEIKPISPVLAKAMDRIFILHADHEQNASTSTVRLAGSSGANPFACIAAGIAALWGPAHGGANEAVLTMLDEIGDVSNIDKFIAKAKDKNDPFKLMGFGHRVYKNRDPRATVMKQTCDEVLKELGIQNDPQLELAMRLEEIALTDPYFIERSLYPNVDFYSGIILKAIGIPTSMFTVIFALARTVGWISHWKEMLSSPYKIGRPRQLYTGYESRDITKLEDRK

SEQ ID NO: 11582 - protein, 423 aa, Pseudomonas fluorescens PfO-1
MSSTPCRLAWSFTIASITTPSSRSSTRCLRRRSKPQPYSLINSRLETTMAEAKVLSGAGLRGQVAGQTALSTVGQAGAGLTYRGYDVRELAADAQFEEVAYLLLYGELPTKAQLADYQGKLSKLRDLPQALKEVLERIPADAHPMDVMRTGCSFLGNIEPEKDFSEQRDKTDRLLAAFPAIMCYWYRFSHDGKRINCVSDEPSIGGHFLHLLHDKKPSELHVKVMNVSLILYAEHEFNASTFTARVCASTLSDLYSCVTAAIGSLRGPLHGGANEAAMEMIERFSSPEEAVKGTLGMLERKDKIMGFGHAIYKDSDPRNEVIKGWSKKLADEVGDKVLFAVSEAIDKTMWEQKKLFPNADFYHASAYHFMGIPTKLFTPIFVCSRLTGWAAHVFEQRANNRIIRPSAEYTGVEQRKFVPIEQR

SEQ ID NO: 11583 - protein, 430 aa, Bifidobacterium longum NCC2705
MATAQLDVDSNKFNLPVVKASAGPDGIVVSKLRNDGWVTLDPGFLTTAQCESKITYIDGKHSILRYCGYPIEQLCENSDFLEVAWLLRHGELPSRAEYEQFCADINHKTMVGEDFRTFMGSFPRSAHPMSVLASAINALATFYPDTTDISDNDQLDEAAKIIMAKARTIVSYIFRRRRDEPMLYPDYARGYVDDFLRMCFAVPYEPFESDPLYVHALGRLLIIHADHEQNCSTSVVRIAGSAHANLYSAVAAGVNALSGPLHGGANEAVLRQLKAIRDSGKSVAEFVRDAKENGQKISGLGHRVYKSYDPRAAIARKYLEKIMEREDTQKLPSDERALFAVATELEDIALNDEYFVSRNLYPNVDFYTGLIYRAIGFDPAMFTTLFALGRIPGWIAQYREMLADPNTKIGRPRQVYTGPVERDFVPMDER

SEQ ID NO: 11584 - protein, 126 aa, Rickettsia sp. HL-30
GPAHGGANEAVINMLKEIGSSENIPKYIAKAKDKNDPFRLMGFGHRVYKNYDPRAAVLKETCKEVLKELGQLENNPLLQIAIELEAIALKDEYFIERKLYPNVDFYSGIIYKAMGIPSQMFTVLFA

SEQ ID NO: 11585 - protein, 428 aa, Pseudomonas aeruginosa PAO1
MADKKAQLIIEGSAPVELPVLSGTMGPDVVDVRGLTATGHFTFDPGFMSTASCESKITYIDGDKGVLLHRGYPIEQLAEKSDYLETCYLLLNGELPTAAQKEQFVGTIKNHTMVHEQLKTFFNGFRRDAHPMAVMCGVIGALSAFYHDSLDINNPKHREVSAHRLIAKMPTIAAMVYKYSKGEPMMYPRNDLNYAENFLHMMFNTPCETKPISPVLAKAMDRIFILHADHEQNASTSTVRLAGSSGANPFACIASGIAALWGPAHGGANEAVLRMLDEIGDVSNIDKFVEKAKDKNDPFKLMGFGHRVYKNFDPRAKVMKQTCDEVLQELGINDPQLELAMKLEEIARHDPYFVERNLYPNVDFYSGIILKAIGIPTSMFTVIFALARTVGWISHWQEMLSGPYKIGRPRQLYTGHTQRDFTALKDRG

SEQ ID NO: 11586 - protein, 375 aa, Pseudomonas aeruginosa PAO1
MAEAKVLSGAGLRGQVAGQTALSTVGQEGAGLTYRGYDVRDLAAAAIFEEVAYLLLYGELPNKQQLDAYLKKLQGQRDLPQALKEVLERIPKDAHPMDVMRTGASVLGTLEPELSFDQQRDVADRLLAAFPAIMTYWYRFTHEGQRIDCNSDEPTIGGHFLALLHGKKPSELHVKVMNVSLILYAEHEFNASTFTARVCASTLSDLYSCVTGAIGSLRGPLHGGANEAAMELIERFSSPQEATAELLKMLERKDKIMGFGHAIYKDSDPRNEVIKGWSKQLADEVGDKVLFAVSEAIDKTMWEQKKLFPNADFYHASAYHFMGIPTKLFTPIFVCSRTSGWTAHVFEQRANNRIIRPSAEYTGVEQRAFVPLEQR

SEQ ID NO: 11587 - protein, 372 aa, Streptococcus mutans UA159
MAETNGLKDMIACDTRISAIKDNKLSYAGYDIADLMDNKARFEEVIYLLWNLHLPTAIELKQFEEKLRKNYAISDAIEQCILIQSRQHLHPMSVLRSTVSLLGVYNLKAEERSVEATYDQSIQLMAKIPTIIATFARLRQGLSPIAPRKDLGFAANFLYMLNGRLPSELEILAMNRALVLHAEHELNASTFAARVCASTLSDIYSCVTTAIGTLKGPLHGGANERVFDMLREIREYGDVDSYLQEKLNSKEKIMGFGHRVYQTQDPREKYLREMARELTKGTEHDIWYQLSKKVEICMKQKKNLIPNVDFYSATVYHVLGIDSSIFTLIFAMSRVSGWIAHIQEQQKNNKLIRPRSHYTGMRKLRYIPIERR

SEQ ID NO: 11588 - protein, 428 aa, Shewanella oneidensis MR-1
MADLKAKLELPGNDSIELPVKQGSAGFDVIDISKLGSKGYFTFDPGFLATASCESAITYIDGDQGILLHRGYPIEQLAVDSDYLDLCYLLLYGELPTKEQYAEFVHTVKTHTMVHEQIAFFFRGFRRDAHPMAMLCGVTGALSAFYQDSLDVNDPRHREIAAYRLVSKMPTIAAMCYKYSSGQPFVYPRNDLSYAGNFLSMMFAVPCEEYKVNPIVERAMDRIFILHADHEQNASTSTVRLAGSSGANPFACIAAGIASLWGPAHGGANEACLQMLEEIGSVDRIPEFIARAKDKNDPFRLMGFGHRVYKNFDPRAKVMRETCHEVLKELKVQDPLLDVAMELERIALEDEYFISKKLYPNVDFYSGIIMKAIGIPTSMFTVLFALSRTVGWIAHWKEMLDQPGHKISRPRQLYTGETARDFVDLDKR

SEQ ID NO: 11589 - protein, 375 aa, Shewanella oneidensis MR-1
MSDAKKLTGAGLRGQSAGETALSTVGVSGSGLTYRGYDVKDLAENATFEEVAYLILYGELPTTAQLAAYKTKLKGMRGLPQALKEVLERIPADAHPMDVMRTGCSMLGNLEAEHSFSEQSQIADRLLAAFPSIICYWYRFSHDGVRIDTETDDDQIGAHFLHLLHGKAPSALHTKVMDVSLILYAEHEFNASTFTARVCASTLSDMHSCVTGAIGSLRGPLHGGANEAAMELIQDMKDEADARDVLMGKLERKEKIMGFGHAIYRDSDPRNAIIKEWSEKLAADYGDDRLYRVSVACEALMWEQKKLFCNADFFHASAYHFMGIPTKLFTPIFVCSRVTGWTAHVMEQRSNNRIIRPSADYVGVSPRKVIPIANR

SEQ ID NO: 11590 - protein, 426 aa, Yersinia pestis CO92
MADKKATLNLGEAAIELGVLSPTLGTDVIDVRTLGSKGYFTFDPGFTSTASCESKITYIDGDQGILLHRGFPIAQLAKDSTYLEVCYILLYGETPTPEEYKTFKTTVTRHTMIHEQITRLFHGFRRDSHPMAVLCGVTGALAAFYHDALDVNNERHREITAFRLLSKMPTVAAMCYKYSLGQPFVYPRNDLSYAGNFLHMMFSTPCEKYEVNPVLERAMDRILILHADHEQNASTSTVRTAGSSGANPFACIAAGIASLWGPAHGGANEACLKMLEEIKTVEHIPEFIRRAKDKNDSFRLMGFGHRVYKNYDPRATVMRETCHEVLEELKLNNSLLEVAMELENIALNDPYFIEKKLYPNVDFYSGIILKAMGIPSSMFTVIFAIARTIGWIAHWNEMHNDGIKIARPRQLYTGYTERDFQSQLKK

SEQ ID NO: 11591 - protein, 429 aa, Vibrio vulnificus CMCP6
MADKKATLHVEGKAPIELPIMEGSLGTPVIDVRKLGANGYFTFDPGFLATASCESQITYIDGGKGILLHRGYPIDQLANNADYLEVCYILLYGEAPTREQYEKFKTTVTRHTMVHEQIASFFHGFRRDAHPMAVMCGVVGALAAFYHDSLDINNDLHREITAYRLLSKMPTLAAMCYKYSTGQPFIYPRNDLSYAENFLHMMFATPCEEYEVNPVVARAMDKIFTLHADHEQNASTSTVRLAGSSGANPFACIAAGIASLWGPAHGGANEACLKMLEEIGSVDNIPEYVDRAKDKDDPFRLMGFGHRVYKNYDPRATVMRETCHEVLKELNIQDPLLDVAMELERIALSDEYFVSKKLYPNVDFYSGIILKAIGIPVSMFTVIFAISRTIGWIAHWNEMHSDPLNRIGRPRQLYTGEVQRDFQPMHERE

SEQ ID NO: 11592 - protein, 380 aa, Vibrio vulnificus CMCP6
MPSSLTKKGELGGAGLRGQSAGSTALCTVGKTGTGLTYRGYDITDLANHAQFEEVAYLLLRGHLPTQQELDAYKTRLIGLRGLPVELKQALELIPASAHPMDVMRTGCSVLGNLEQETDFSQQLDATERMLALFPAIICYWYRFSHDGVRIDTQDQSQDCIGGYFLKMLTGKEPSELHKQVMHCSLILYAEHEFNASTFAARVCASTLSDIHSCVTAAIGTLRGPLHGGANEAAMEMIENWQTPEEAESNILRMLANKEKIMGFGHAIYRESDPRNALIKRWSKALSEAVGDTHLYAVSERVEAVMKREKDLFCNADFFHASAYHFMDIPTKLFTPIFVMSRLTGWTAHVFEQRANNRIIRPSADYIGPDHQDWVPIEQR

SEQ ID NO: 11593 - protein, 359 aa, Methanosarcina barkeri
MRYKMSKNICFIDGLEGILKYREIDINQLVDLPYDAVSYLLILGDLPGDQELAEYSACLHGEREVNREVIDVIHMCNFNIDSIEALRTIVSFISQFDPDINDSSPEGNMRKATRLIAKIPTIVAAYYRIANGKEPVPPDPSLSHGANFLYMLRGNKPTQLEAEVMEKDFILSAEHELNASTFSSRVTASTLSDLYSAVVSGLCTLKGPLHGGARAEVTAMIEEIACPENAENYVLDKLSKKEKIMGFGHRVYKTYDPRGMIFKQLAKQLAEAKGDMHWYNIAEVVENTVIRELVEKKGKPIYPNVDFYSGVIYKYMDIPPQLATSIFAIGRVSGWIAHCFDQYEKKKIIRPRAFMLDEC

SEQ ID NO: 11594 - protein, 373 aa, Oceanobacillus iheyensis HTE831
MTASTKGLEGIVATQSSISSIIDDQLSYVGYRIDDLAENSSFEEIIYLLWNQKLPNKSELDELKSQLAENMDIPDAIINHLRSYDLNTVHPMAALRTAISLLGLYDNEADVMDEQANKRKAVRIQAQIATIVTTFSRIRKGQEPVKPKKDLSYAENFIYMLNGKEPEDIEVEAINKALVLHADHELNASTFTARVCVATLSDIYSGITAAIGALKGPLHGGANENVMKMLTEIGEEENAIPYIKEKLANKDKIMGMGHRVYRTGDPRAKFLREMSKELTKLTGQEKWYNMSVKIEDYIKENKGLPANVDFYSASVYHSLGLDHDIFTPLFAVSRTSGWIAHILEQYENNRLIRPRAEYTGPELRDYVSIEQRG

SEQ ID NO: 11595 - protein, 368 aa, Oceanobacillus iheyensis HTE831
MKTDEKFVPGLDGVIASETAISFLDVEKEKIIINGHDLIELSLKQDYLDILYLLLEGDLPKKVEITKTEKLLKDHYEVPQAVLDILKLLPKETHPMDGMRTALSVLAGYDKNIEDRSASANKDRAYQLLGQLPTITVNSYRILNNQEVVQPATELSYSANFLYMITGKEPSDLQVEIFDRLLLLYSEHEMPNSTFTARVISSTNSDMYGALTGAISSLKGNLHGGANEAVMYMLNEVETADEFEQLLYKKLENKEKIMGFGHRVYMKKMDPRALITKEALKKLCEKDNDYTLLEMCEAGEEVMKKEKGLYPNLDYYAAPVYWKLGIPISLYTPIFFSARTAGLAAHIVEQHSNNRIFRPRVKYIGKDY

SEQ ID NO: 11596 - protein, 429 aa, Pseudomonas syringae pv. tomato str. DC3000
MADKKAQLIIEGAAPVELPILTGTVGPDVIDVRGLTATGRFTFDPGFMSTASCESKITYIDGDNGILLHRGYPIEQLAEQSDYLETCYLLLNGELPTAEQKAQFVAVVKNHTMVHEQLKTFFNGFRRDAHPMAVMCGVVGALSAFYHDSLDINNPQHREISAVRLVAKMPTLAAMVYKYSMGQPMMYPRNDLSYAENFLHMMFNTPCEIKPISPVLAKAMDKIFILHADHEQNASTSTVRMAGSSGANPFACIAAGIAALWGPAHGGANEAVLTMLDEIGDVSNIDTFIAKAKDKNDPFKLMGFGHRVYKNRDPRATVMKQTCDEVLKELGIKNDPQLELAMRLEEIALTDPYFIERSLYPNVDFYSGIILKAIGIPTSMFTVIFALARTVGWISHWKEMLSSPYKIGRPRQLYTGNVQRDIIALKDRK

SEQ ID NO: 11597 - protein, 375 aa, Pseudomonas syringae pv. tomato str. DC3000
MAEAKVLSGAGLRGQVAGQTALSTVGMAGAGLTYRGYDVRELAAEAQFEEVAYLLLYGELPTQSQLAAYLGKLKGLRDLPQALKEVLERIPADTHPMDVMRTGASMLGTLEPELSFDQQRDATDRLLAAFPAIMCYWYRFSHDGQRIDCTTDESSIGGHFLHLLLDKTPSELHRKVMDVSLILYAEHEFNASTFTARVCASTLSDLYSCVTAAIGTLRGPLHGGANEAAMEMIQRFASADEATQGTLGMLERKEKIMGFGHAIYKESDPRNEVIKGWSKKLADEAGDSVLFPVSEAIDKVMWEQKKLFPNADFYHASAYHFMGIPTKLFTPIFVCSRLTGWAAHVFEQRANNRIIRPSAEYIGVEQRSFVPIEQR

SEQ ID NO: 11598 - protein, 429 aa, Vibrio parahaemolyticus RIMD 2210633
MADKKATLHVEGQAPIELPIMDGTLGTPVIDVRKLGANGYFTFDPGFLATASCESSITYIDGGKGILLHRGYPIDQLANNADYLEVCYILLYGEAPTREQYEQFKTTVTRHTMVHEQIASFFHGFRRDAHPMAVMCGVVGALAAFYHDSLDINNDEHREIAAYRLLSKMPTLAAMCFKYSVGQPFIYPRNDLSYAENFLHMMFANPCEEYEVNPVVARAMDKIFTLHADHEQNASTSTVRLAGSSGANPFACIAAGIASLWGPAHGGANEACLKMLEEIGSVDNIPEYVERAKDKDDPFRLMGFGHRVYKNYDPRATVMRETCHEVLKELNIKDPLLDVAMELERIALSDEYFVSKKLYPNVDFYSGIILKAIGIPVSMFTVIFAISRTIGWIAHWNEMHSDPLNRIGRPRQLYKGETQREFSPLHERE

SEQ ID NO: 11599 - protein, 380 aa, Vibrio parahaemolyticus RIMD 2210633
MPQTVAKKAELGGAGLRGQSAGSTALCTVGKTGTGLTYRGYDITDLANNAQFEEVAHLLLRGHLPSQQELDAYKTHLLSLRGLPTELKQALELIPASAHPMDVMRTGCSVLGNLEQEMSFDEQLQATERMLALFPAIICYWYRFSHDGVRIDTEDQTEDCIGGYFLRLLTDKEPSVLHKQVMHCSLILYAEHEFNASTFAARVCASTLSDIHSCITAAIGTLRGPLHGGANEAAMEMIEDWQTPDEAEANIMQMLANKDKIMGFGHAIYRESDPRNALIKRWSEELSKHVGDTHLYAVSERVESVMKREKGLFCNADFFHASAYHFMDIPTKLFTPIFVMSRLTGWAAHVYEQRANNRIIRPSADYTGPDHQEWVPIENR

SEQ ID NO: 11600 - protein, 372 aa, Bacillus subtilis subsp. subtilis str. 168
MTATRGLEGVVATTSSVSSIIDDTLTYVGYDIDDLTENASFEEIIYLLWHLRLPNKKELEELKQQLAKEAAVPQEIIEHFKSYSLENVHPMAALRTAISLLGLLDSEADTMNPEANYRKAIRLQAKVPGLVAAFSRIRKGLEPVEPREDYGIAENFLYTLNGEEPSPIEVEAFNKALILHADHELNASTFTARVCVATLSDIYSGITAAIGALKGPLHGGANEGVMKMLTEIGEVENAEPYIRAKLEKKEKIMGFGHRVYKHGDPRAKHLKEMSKRLTNLTGESKWYEMSIRIEDIVTSEKKLPPNVDFYSASVYHSLGIDHDLFTPIFAVSRMSGWLAHILEQYDNNRLIRPRADYTGPDKQKFVPIEERA

SEQ ID NO: 11601 - protein, 366 aa, Bacillus subtilis subsp. subtilis str. 168
MVHYGLKGITCVETSISHIDGEKGRLIYRGHHAKDIALNHSFEEAAYLILFGKLPSTEELQVFKDKLAAERNLPEHIERLIQSLPNNMDDMSVVRTVVSALGENTYTFHPKTEEAIRLIAITPSIIAYRKRWTRGEQAIAPSSQYGHVENYYYMLTGEQPSEAKKKALETYMILATEHGMNASTFSARVTLSTESDLVSAVTAALGTMKGPLHGGAPSAVTKMLEDIGEKEHAEAYLKEKLEKGERLMGFGHRVYKTKDPRAEALRQKAEEVAGNDRDLDLALHVEAEAIRLLEIYKPGRKLYTNVEFYAAAVMRAIDFDDELFTPTFSASRMVGWCAHVLEQAENNMIFRPSAQYTGAIPEEVLS

SEQ ID NO: 11602 - protein, 372 aa, Bacillus subtilis subsp. subtilis str. 168
MEEKQHYSPGLDGVIAAETHISYLDTQSSQILIRGYDLIELSETKSYLELVHLLLEGRLPEESEMETLERKINSASSLPADHLRLLELLPEDTHPMDGLRTGLSALAGYDRQIDDRSPSANKERAYQLLGKMPALTAASYRIINKKEPILPLQTLSYSANFLYMMTGKLPSSLEEQIFDRSLVLYSEHEMPNSTFAARVIASTHSDLYGALTGAVASLKGNLHGGANEAVMYLLLEAKTTSDFEQLLQTKLKRKEKIMGFGHRVYMKKMDPRALMMKEALQQLCDKAGDHRLYEMCEAGERLMEKEKGLYPNLDYYAAPVYWMLGIPIPLYTPIFFSARTSGLCAHVIEQHANNRLFRPRVSYMGPRYQTKS

SEQ ID NO: 11603 - protein, 259 aa, Aquifex aeolicus VF5
MADKKWKTAISTHVNHEPYVRGYRLLDLVGNLTFSEAIYLLLKGELPSEAEAKMMDAIFVSVIEHSIAPPSVIATRAVISGGNSLNVGVGAGVLAFGSAHGGALEDAMKFMQEGVKSNRPVEEIVKEYLSQKKPIPGYGHRYYKEFDPRTKRLFELAEKYGFCKEHCEFAKKVEEEIYKQKGKRIVLNVDGAIAAITSDMGFDWRLGKGFFIIGRVPGLVAHAYEELTQEKPFSKRLSEEEYEYTGVEPRELPPERKKV

SEQ ID NO: 11604 - protein, 372 aa, Archaeoglobus fulgidus DSM 4304
MKDGLEDVIACKTTISRIALENGRAILEYRGYDIRDLARKASYEEVAYLLLYGELPKKYELQDFKIELAERRELPPQIIGLLTHLPPYTHPMVVLRTATSYLGSLDKKIAVRTREETFNKAKDLIAKFPTIVAYYHRIRTGRNIIPPALEFSHAANFLYMLHGEEPTKTAERALDMDLILHAEHELNASTFAARIAASTLADIYACVVAATGTLMGPLHGGAAQEVMRMLREVASPRRAEEYVKRKIEAGERIMGFGHRVYRGVMDPRAELLRYLAKRLAAEGSTKWFEISEAIAKAAYKYKKLLPNVDFYSASVYANLGIPDDLFVNIFAMGRISGWTAHIIEQYENNRLIRPRAEYVGEKEKKFIPLSKR

SEQ ID NO: 11605 - protein, 379 aa, Haloferax volcanii
MSGELKRGLEGVLVAESKLSFIDGDAGQLVYCGYDIEDLARDASYEEVLYLLWHGALPTGEELDAFSDELAAHRDLDDGVLDVARELAEQDESPMAALRTLVSAMSAYDESADFEDVTDREVNLEKAKRITAKMPSVLAAYARFRRGDDYVEPDESLNHAANFLYMLNGEEPNEVLAETFDMALVLHADHGLNASTFSAMVTSSTLSDLYSAVTSAIGTLSGSLHGGANANVMRMLKDVDDSDMDPTEWVKDALDRGERVAGFVHRVYNVKDPRAKILGAKSEALGEAAGDMKWYEMSVAIEEYIGEEKGLAPNVDFYSASTYYQMGIPIDLYTPIFAVSRAGGWIAHVLEQYEDNRLIRPRARYTGEKDLDFTPVDER

SEQ ID NO: 11606 - protein, 434 aa, Bradyrhizobium japonicum USDA 110
MDAKASNKTATLTVGNKNYDLPIHSGSVGPDVIDIGKLYGQSGLFTYDPGFTSTASCQSKITYIDGDAGVLEYRGYPIEQLAENGDFLETCYLLLYGNLPTAAQKKDFDDRVIHHTMVHEQMARFFQGFRRDAHPMAVMVASVGALAAFYHDSTDINDPKQRMIASMRMIAKIPTLAAMAYKYTIGQPFVYPKNSLKFAENFLHMCFAVPCEEYKINPVLADALDKIFILHADHEQNASTSTVRIAGSSGANPFACIAAGIACLWGPAHGGANEAALAMLAEIGSVDKIPEFIAKVKDKNSEVRLMGFGHRVYKNYDPRAKIMQKMCHAVLKETGHGDDPMLKVAMELEKIALSDQYFIDRKLYPNVDFYSGITLKAMGFPVSMFTVLFAVARTVGWISQWSEMIEDPQQKIGRPRQLYTGVTRRDYVAIKDRK

SEQ ID NO: 11607 - protein, 364 aa, Bradyrhizobium japonicum USDA 110
MNIHLTKSQIGLDGVPAAETVLSHVDGERGELIIAGEHVGRLAAKSSFEGVTARLWNGASKTSLSEANVRASLGAARERAFARLAELLPATHGMGIVDGFRAAVAGLRAEHGLEHEATIVGAFPVISGALVRRAKGLDPVAPDPSASHAADTLRMLHGRAPATREVTALDAYLVTVCDHGMNASTFTTRVVASTQADLFAAVTAGYCALTGPLHGGAPEPVLEMLDAIGSRERIQPWVDAALARGERMMGFGHRVYRVRDPRADVLKTAIEALASNGADLPFAGEVEAYIRAALRKKNPDRPLETNVEFFTAILLDALAIPRQAFTPIFAVARAAGWTAHAREQQRTGRLIRPSSSYVGAVPEA

SEQ ID NO: 11608 - protein, 405 aa, Bradyrhizobium japonicum USDA 110
MKNSDELYLSAREAAAELAISPATLYAYVSRGLIRSEPTPDSRKNRYRAEDVRALKERRVPSPEPRGLRSFDADLPVMDTEISTITEEGAIYRGVNCVDLAENDTLEHTATLLWDVSGVDPFAPDNQPEISEEMRTIAGAARRAAPIDRAIAVLALAASADPRAFTRAPDGRAMVGARIVRLLVATMLNAEASAEPLHQQVARVWAADNKHAPDLIRRALVLLADHELNASTFTARCAASTGLNLYDAVIAGLAALKGPKHGGAGVLASQLVKTLVDRDVAPVVRERVALGERFAGFGHGVYKRGDPRAQSLLNALSRAGAPRKFTREVPERIAEATGEFVNIDYALAVLVHALRLPAGSELALFAMARSVGWIAHASEQLQFGKLIRPRARYVGPAPGRRTGGS

SEQ ID NO: 11609 - protein, 437 aa, Brucella melitensis 16M
MDMKGKTMSDKTASFTLDGKTFDLPVRKGTVGPDVVDIGPLYKNSHAFTYDPGFTSTASCESKITYIDGDEGVLLYRGYPIDQLAEHGDFLETCYLLLYGELPTATQKADFDYRVTRHTMLHEQMTKFFTGFRRDAHPMAVMVGCLGAMSAFYHDSTDITDPHQRMVASIRLIAKVPTLAAMAYKYHIGQPFVYPKNDLDFASNFLHMCFTVPCEEYKVNPVLARAMDRIFILHADHEQNASTSTVRLAGSSGANPFACIAAGVACLWGPAHGGANEAALNMLSEIGSVDRIPEYIARAKDKNDPFRLMGFGHRVYKNYDPRAKIMQKTCHEVLGELGIKDDPLLDVAMELERIALTDEYFIEKKLYPNIDFYSGITLKALGFPTEMFTVLFALARTVGWVAQWKEMIEDPQQKIGRPRQLYTGATERDYVPLAKRK

SEQ ID NO: 11610 - protein, 371 aa, Pyrococcus furiosus
LAKGLEDVYIDQTNICYIDGKEGKLYYRGYSVEELAELSTFEEVVYLLWWGKLPSLSELENFKKELAKSRGLPKEVIEIMEALPKNTHPMGALRTIISYLGNIDDSGDIPVTPEEVYRIGISVTAKIPTIVANWYRIKNGLEYVPPKEKLSHAANFLYMLHGEEPPKEWEKAMDVALILYAEHEINASTLAVMTVGSTLSDYYSAILAGIGALKGPIHGGAVEEAIKQFMEIGSPEKVEEWFFKALQQKRKIMGAGHRVYKTYDPRARIFKKYASKLGDKKLFEIAERLERLVEEYLSKKGISINVDYWSGLVFYGMKIPIELYTTIFAMGRIAGWTAHLAEYVSHNRIIRPRLQYVGEIGKKYLPIELRR

SEQ ID NO: 11611 - protein, 447 aa, Bacteroides thetaiotaomicron VPI-5482
MKKEYLIYKLSEEMKEATRIDNELFPKFDVKRGLRNEDGTGVLVGLTKIGNVVGYERIPGGGLKPIPGKLFYRGYDVEDISHAIIKEKRFGFEEVAYLLLSGRLPDKEELASFRELINDNMALEQKTKMNIIELEGNNIMNILSRSVLEMYRFDPDADDTSRDNLMRQSIDLISKFPTIIAYAYNMLRHATFGRSLHIRHPQEKLSIAENFLYMLKKDYTELDARTLDLLLILQAEHGGGNNSTFTVRVTSSTGTDTYSAIAAGIGSLKGPLHGGANIQVADMFHHLQENIKDWKSVDEIDTYFTRMLNKEVYNKTGLIYGIGHAVYTISDPRALLLKELARDLAREKGKEEEFAFLELLEERAIATFGRVKNNGKTVSSNIDFYSGFVYEMIGLPQEIFTPLFAMARIVGWCAHRNEELNFEGKRIIRPAYKNVLDDLAYIPIKKR

SEQ ID NO: 11612 - protein, 371 aa, Bacillus cereus ATCC 14579
MTVIRGLEGVVATTSSVSSIIDDTLTYVGYNIDDLAENATFEEVVYLLWHRKLPNEKELAEFNEIVSEYYKVPGEILTYLKQVDLKIAHPMSVLRTAISMLSLYDESAEIMDEKSNYLKAVKLQAQVGTLVAAYARIRKGLDIVEPRKDLSLAANFLYMLNDREPNEVEIEAFDKALVLHADHELNASTFTARVCVATLSDVYSGITAAIGALKGPLHGGANENVMKMLTEIGEEENVESYIHNALQNKVKIMGFGHRVYEQGDPRAKHLREMSKRLCVLLGEEKWYNMSIKIEDIVTKEKGLPPNVDFYSASVYHCLGIDHDLFTPIFAISRMSGWLAHILEQYENNRLIRPRADYNGPTHQVYVPIAQR

SEQ ID NO: 11613 - protein, 373 aa, Bacillus cereus ATCC 14579
MMKAEEKFSPGLDGIVAAETKISFLDTVKGEIVIQGYDLIELSKTKEYLDIVHLLLEEHLPNEDEKVTLEKKLKEEYAVPEGVFNVLKALPKETHPMDGLRTGVSALAGYDNDIENRSLEVNKSRGYKLLSKVPNIVANSYHILNNEEPIEPLKELSYSANFFYMLTGKKPTELEEKIFDRSLVLYSEHEMPNSTFTARVIASTQSDLYGALTGAVASLKGSLHGGANEAVMYMLLEAGNVEKFEELLQKKLYNKEKIMGFGHRVYMKKMDPRALMMKEALKQLCDVKGDYTLYEMCEAGEKIMEKEKGIYPNLDYYAAPVYWMLGIPIQLYTPIFFSSRTVGLCAHVIEQHANNRLFRPRVNYIGERHVLSK

SEQ ID NO: 11614 - protein, 430 aa, Coxiella burnetii RSA 493
MSNRKAKLSFENQSVEFPIYSPTLGKDVIDVKTLGNHGAYALDVGFYSTAACESKITFIDGEKGILLYRGYPIDQLADKSDYMEVCYLLMYGELPNKGEKEKFVRTIKEHTSVYEQVTKFFNGFHYDAHPMAMVLSTIGALSAFYHDALDITKPADRELSAIRLIAKMPTLAAMSYKYSIGQPFMHPRRAMNYAENFLHMLFGTPYEETEPDPVLARAMDRIFILHADHEQNASTTTVRVAGSTGANPFACISAGISALWGPAHGGANEACLNMLRKIGDEKNIGQYIKKAKDKNDPFRLMGFGHRVYKNYDPRAKVMQKTCYEVLDAVGRHNEPLFKLAIKLEKIALEDDYFIEKKLYPNVDFYSGLTLNAIGIPSNMFTVIFALSRTVGWISHWMEMMSSPDHRLARPRQLYTGETEREVISLDKRQA

SEQ ID NO: 11615 - protein, 372 aa, Coxiella burnetii RSA 493
MTKTAKGLRGQSAGETSIATVGKEGHGLTYRGYRIEDLAANATFEEVAYLLLKNKLPTKSELDAYTKKLVNLRSLPPALKDTLERIPASSHPMDVMRTGCSMLGNLEPENGFENEQNIADRLVAIFPAIQCYWYHYSHHGKRIDTELDDLTLAGYFLHLLLGKKAAQMAIDCMNASLILYAEHEFNASTFAARVCSATLSDIYSAVTAAIATLRGPLHGGANEAAMDLIMLYKTPSEAIAGIKRKLANKELIMGFGHAVYRERDPRNAIIKSWAQKLAPNAADGYLFDISDAIENTMQDEKKLFPNLDFYSATAYHFLNIPTKLFTPIFVMSRVTGWCAHIFEQRKDNRIIRPNADYIGPEEQGWVPIEKRR

SEQ ID NO: 11616 - protein, 429 aa, Streptomyces avermitilis MA-4680
MSDNSVVLRYGDGEYTYPVIDSTVGDKGFDIGKLRAQTGLVTLDSGYGNTAAYKSAITYLDGEQGILRYRGYPIEQLAERSTFLEVAYLLINGELPTVDELSTFKGEITQHTLLHEDVKNFYRGFPRDAHPMAMLSSVVSALSTFYQDSHNPFDEKQRNLSTIRLLAKLPTIAAYAYKKSIGHPFVYPRNDLGYVENFLRMTFSVPAQDYDLDPVVVSALDKLLILHADHEQNCSTSTVRLVGSSQANMFASISAGISALWGPLHGGANQSVLEMLEGIQTSGGDVDTFIRKVKNKEDGVKLMGFGHRVYKNFDPRAKIIKAAAHDVLSALGKSDELLDIALKLEEHALADDYFVERKLYPNVDFYTGLIYRAMGFPTEMFTVLFALGRLPGWIAQWHEMIKEPGSRIGRPRQIYTGEVLRDFVPVEGR

SEQ ID NO: 11617 - protein, 388 aa, Streptomyces avermitilis MA-4680
MPINRAASTSVDVPRGLAGVVVTDTSLGDVRGLEGFYHYRQYSAVELAQTRGFEDVWHLMVHGELPDAEQRAVFTARTAALRWLPDGVRATLPAVAAAAGRSGPLAGLRTALSLLGAAKGFRPVYDIDREQRRADTVMASAAVPTLLTALYRLGQGLDPVEPREDLSYAANYLYMLTGSEPDAARTRAIEQYLISTIDHGFNASTFTARVITSTGADVAAALVGAVGALSGPLHGGAPSRALDTLDAIGTPERIDSWIRERVLAGDRIMGFGHPVYRTEDPRSRMLRGVAEQFGGPLVDFAVEVERHVEAILAELKPGRELHTNVEFYAGVVMELCGLPREMFTPTFAAARVVGWSANILEQAEDPKIIRPAARYVGPVPPVAVPLMV

SEQ ID NO: 11618 - protein, 366 aa, Streptomyces avermitilis MA-4680
MSDFVPGLEGVIAFETEIAEPDKEGGALRYRGVDIEDLVGHVSFGNVWGLLVDGAFNPGLPPAEPFPIPVHSGDIRVDVQSALAMLAPVWGLKPLLDIDAEQARHDLARAAVMALSYVAQSARGQGLPMVPQSEIDKAHSVVERFMIRWRGEPDPKHVAAVDAYWTSAAEHGMNASTFTARVIASTGADVAAALSGAVGAMSGPLHGGAPSRVLGMIEEIERTGDAEAYVKKALDKGERLMGFGHRVYRAEDPRARVLRRTARELGAPRFEIAEALEKAALEELHNRRPDRVLATNVEFWAAIMLDFAEVPAHMFTSMFTCARTAGWSAHILEQKRTGRLVRPSARYVGPGSRGPQEIEGYEDIAR

SEQ ID NO: 11619 - protein, 418 aa, Streptomyces avermitilis MA-4680
MTDHEAAPTHPDRRLSTKEAAELLGVKPETVYAYVSRGQLSSRREPGGRGSTFDAKEVAALARRNRREPSGSSAIGGELSVRTRITLIDKDRYFFRGVDATELAARHSYEEIAEWLWTGRLRPGVTFAAPDASVAVARRAVDALPEHSGPTDRLRVATIAAATADPLRFDLSEDAVLGTARTLIPTLVAALPPLRRDHRDEGPLARHLWGRLTGRAPDAASVRVLDTALGLLIDHDLAASTLAVRVAASARAHPYAAVSAGLGVLEGPLHGAASGLAHRLLLDVLDQGSAAPVVADELRAGRRIPGLGHRLYPGEDPRARALFALLEEVPDAAPALAAAHDVVATTARHAPLHANVDLALAVLTVSSGMPASAGETVFAVARTAGWIAHALEEYEERPLRMRPSGRYVGARPPQPLPR

SEQ ID NO: 11620 - protein, 112 aa, Bartonella sp. Rt222sm
NEACLKMLQEINSVKRIPKFIARAKDKNDPFRLMGFGHRVYKNYDPRAKIMQQTCHEVLKELNIQDDPLLDIAIELEKIALNDEYFVEKKLYPNVDFYSGITLKALGFPTEM

SEQ ID NO: 11621 - protein, 377 aa, Sulfolobus solfataricus
MSVVSKGLENVIIKVTNLTFIDGEKGILRYRGYNIEDLVNYGSYEETIYLMLYGKLPTKKELNDLKAKLNEEYEVPQEVLDTIYLMPKEADAIGLLEVGTAALASIDKNFKWKENDKEKAISIIAKMATLVANVYRRKEGNKPRIPEPSDSFAKSFLLASFAREPTTDEINAMDKALILYTDHEVPASTTAALVAASTLSDMYSSLTAALAALKGPLHGGAAEEAFKQFIEIGDPNRVQNWFNDKVVNQKNRLMGFGHRVYKTYDPRAKIFKKLALTLIERNADARRYFEIAQKLEELGIKQFSSKGIYPNTDFYSGIVFYALGFPVYMFTALFALSRTLGWLAHIIEYVEEQHRLIRPRALYVGPEYQEYVSIDKR

SEQ ID NO: 11622 - protein, 377 aa, Sulfolobus solfataricus
MSVVSKGLENVIIKVTNLTFIDGEKGILRYRGYNIEDLVNYGSYEETIYLMLYGKLRTKKELNDLKAKLNEEYEVPQEVLDTIYLMPKEADAIGLLEVGTAALASIDKNFKWKENDKEKAISIIAKMATLVANVYRRKEGNKPRIPEPSDSFAKSFLLASFAREPTTDEINAMDKALILYTDHEVPASTTAALVAASTLSDMYSSLTAALAALKGPLHGGAAEEAFKQFIEIGDPNRVQNWFNDKVVNQKNRLMGFGHRVYKTYDPRAKIFKKLALTLIERNADARRYFEIAQKLEELGIKQFSSKGIYPNTDFYSGIVFYALGFPVYMFTALFALSRTLGWLAHIIEYVEEQHRLIRPRALYVGPEYQEYVSIDKR

SEQ ID NO: 11623 - protein, 385 aa, Thermoplasma acidophilum
MPETEEISKGLEDVNIKWTRLTTIDGNKGILRYGGYSVEDIIASGAQDEEIQYLFLYGNLPTEQELRKYKETVQKGYKIPDFVINAIRQLPRESDAVAMQMAAVAAMAASETKFKWNKDTDRDVAAEMIGRMSAITVNVYRHIMNMPAELPKPSDSYAESFLNAAFGRKATKEEIDAMNTALILYTDHEVPASTTAGLVAVSTLSDMYSGITAALAALKGPLHGGAAEAAIAQFDEIKDPAMVEKWFNDNIINGKKRLMGFGHRVYKTYDPRAKIFKGIAEKLSSKKPEVHKVYEIATKLEDFGIKAFGSKGIYPNTDYFSGIVYMSIGFPLRNNIYTALFALSRVTGWQAHFIEYVEEQQRLIRPRAVYVGPAERKYVPIAERK

SEQ ID NO: 11624 - protein, 391 aa, Thermoplasma acidophilum
MEKTANIDKGLENVNIKWTKLTYIDGNNGILKYGGYNVNDLIENGAKEDEIQYLFLYGELPNRLDLELFQSKVQKGYELPDFVKDIIFELPRESDAVAMQMAAFSALATSTYNFKWNADLDRDQAAKAIGLMSAVTANVYRHIMGKGPVDLEPSDSFAESFLRSTLDRTPSEDEIDAMNAALILYTDHEVPASTTAGLVAVSTLSDMYSGIAAALAALKGPLHGGAAEASIMQFQEIGDPDNVDAWFRDNIVNGNKRLMGFGHRVYKTYDPRARIFRRYAEKLSANDPEAKKMFDIATRLEKIGIDTFGSKKIYPNTDYFSGIVYLALGYPLRNNIYTSFFALSRVTGWISHFMEYVENQHRLIRPRAVYVGPEDLQFVKIDERRGPIITS

SEQ ID NO: 11625 - protein, 367 aa, Thermotoga maritima
MIQKGLEGVKICESSICYLDGINGRLYYRGIPVEELAEKSTFEETAYFLWYGKLPTKSELEEFKRKMADYRELPAEALGILYHLPKNLHYIDVLKIFLSIHGSMDGNDEDLREKAIRVASVFPTILAYYYRYSKGKELIRPRKDLSHVENFYYMMFGERNEKIRLLESAFILLMEQDINASTFAALVIASTLSDLYSCIVGALGALKGPLHGGASEKVPPMLEEIGSEDRVEEFVQKCLKEKRKIMGFGHRVYKTYDPRAVFLKRVLQEHFPDSKLFRIASKLEEYIVSNKIKNIYPNVDLYSSVLFEELGFPRNMFTALFATARVVGWTAHVIEYVSDNKLIRPTSEYVGPMDVEYIPIERRDENG

SEQ ID NO: 11626 - protein, 377 aa, Thermus aquaticus
MEVARGLEGVLFTETRMCFIDGEAGRLYYYGIPIQELAEKSTFEETTYLLLHGRLPQRGELEAFKKDLAARRALPSHLLESFRRYPASAHPMSFLRTAVSELGMLDPTEGDISREALYQKGLDLIAKFATIVAANKRLKEGKEPLPPREDLSHAANFLYMANGVEPSPEQERLMDAALILHAEHGFNASTFTAIAAFSTETDLYSAITAAVASLKGPRHGGANEAVMKMIQEIGAPERAREWVREKLSKKERIMGMGHRVYKAFDPRAGVLEKLARRVAEKHGHSPEYQILKIVEEEAGKVLNPRGIYPNVDFYSGVVYSDLGFGLEFFTPIFAVARISGWVGHILEYKEQDNRLLRPDAKYIGELDRPYVPLEARG

SEQ ID NO: 11627 - protein, 476 aa, Saccharomyces castellii
MSAVLSTQTTRSILSNSGRRAATIALIHRLYTTASAEPTLKETFSQLIPSKIDEIKQFKKDHGKTVIGNVLLEQAYGGMRGIKGIVWEGSVLDPEEGIKFRGLTIPEIRDQLPKLGDEPLPEGIFWLLLTGEIPSRAQVEQLSADLASRAELPEHVVNLLNGLPKHLHPMAQFSIAVNALESESKFAKAYAQGVNKKEYWKYTFEDSLDLLGKLPTIAATIYRNVFKDGKLGAWDPQADYGKNLATLMGFKNKDFMELMRLYLTIHSDHEGGNVSAHTTHLVGSALSSPYLSLAAGLNGLAGPLHGRANQEVLEWLFKLREEVKGDYSKETIEKYLWDTLNSGRVVPGYGHAVLRKTDPRYTAQREFALKHFPDYELFKLVSSIYEVAPKVLTKQGKTKNPWPNVDSHSGVLLQYYGLTEASFYTVLFGVARAFGVLPQLIIDRAVGAPIERPKSFSTEKYKELVAKIESGETKVV

SEQ ID NO: 11628 - protein, 473 aa, Saccharomyces castellii
MLRFSRQLHNSTRLCSQATGLKESLKAIIPKRKEEFLKLKKECMGTKVDDITIGSILSGMRGNRSMFWEGSMVDAQRGITFHGKTIEQCQRELPGDESGNFYPESMLWLLMTGEVPTKQQTKQLMEELAVRGSEANFPIATSRVIDSLPNDMHPMTQLAIGLASMNKVSRFASNYEKGLLNKNNYWEDTFEDTLNLISFLPILTGKIYSKITNDGKPLGKFSPTEDWSSNICSLMGMSNSTYSVNKNNFNASESKDFLSLMRLYTGIHADHEGGNVSAHTTHLVGSALSDPYLSYSSGIMGLAGPLHGLAAQEVVRFLVEMNGQISSPNQPDEIERYLWDLLNSKRVIPGYGHATLRKPDPRFTAMLKFTKDRKSEFENDKNVVLMQNLSSIAPKVLKAHGKCQNPYPNVDSASGILFHHYGLKESLFFTVIFGCSRSMGPLTQLVWDRIYGLPIERPKSVNMETLKLLSNSQ

SEQ ID NO: 11629 - protein, 377 aa, Thermus thermophilus
MEVARGLEGVLFTESRMCYIDGQQGKLYYYGIPIQELAEKSSFEETTFLLLHGRLPRRQELEEFSAALARRRAMPAHLLESFKRYPVSAHPMSFLRTAVSEFGMLDPTEGDISREALYEKGLDLIAKFATIVAANKRLKEGKEPIPPREDLSHAANFLYMANGVEPSPEQARLMDAALILHAEHGFNASTFTAIAAFSTETDLYSAITAAVASLKGPRHGGANEAVMRMIQEIGTPERAREWVREKLAKKERIMGMGHRVYKAFDPRAGVLEKLARLVAEKHGHSKEYQILKIVEEEAGKVLNPRGIYPNVDFYSGVVYSDLGFSLEFFTPIFAVARISGWVGHILEYQELDNRLLRPGAKYVGELDVPYVPLEARE

SEQ ID NO: 11630 - protein, 438 aa, Geobacter metallireducens
MGLKETLKQKIEEFRPRTTRLVKEFGKVKIDEVTIEQCIGGARDIRSLVTDISYLDPQEGIRFRGKTIPETFAALPKAPGSDYPTVESFWYFLLTGEVPTQAQVDEVLTEWKVRQEVPQYVFDTIRTLPRDSHPMAMLSVGITAMQRDSKFAALYNAGKFNKLSAWESVYEDACDIVARIPVIAAFIYNLKYKGDKQIAIDPALDMGANFAHMIDQGDAYKDVARMYFILHSDHESGNVSAHTTHLVHSALSDPYYAYAAGLNGLAGPLHGRANQEVLDWTIKFQEKYCKDQEPTKELITRALWDTLNSGQVIPGYGHAVLRKTDPRYISQREFCQKHLPEDPLFKLVSMIFEVAPGVLTEHGKTKNPWPNVDAQSGVIQWHYGVKEWDFYTVLFGVGRALGCMANITWDRGLGYAIERPKSVTTPMLEEWAAKGGRL

SEQ ID NO: 11631 - protein, 441 aa, Geobacter metallireducens
MALKETLKQKIEEFRPRTTRLVKEFGKVVIDQVTIDQAIGGARDIRSLVTDISYLDPQEGIRFRGKTIPETFEALPKASGSDYPTVESFWYFLLTGEVPTQAQVDEVVAEWKTRQVVPQYVFDAISALPKESHPMVMLSVGILALQKDSKFAGFYNSGKFNKMTAWEYVYEDASDLVARIPIIAAFIYNLKYRGGKQSAIDPTADCGANFARMIGQCKEYEDVARMYFILHSDHESGNVSAHTTHLVHSALSDPYYAYSAGLNGLAGPLHGLANQEVLDWTIKFQQKYCKDVEPTKELVTKALWDTLNAGQVVPGYGHAVLRKTDPRYMSQREFCLKTPGLKDDPLFKLVAMIFETAPGVLMEHGKAKNPWPNVDAQSGVIQWYYGLREWDFYTVLFGVGRALGCMANITWDRGLGYAIERPKSVTTPMLEKWAEEGGRKF

SEQ ID NO: 11632 - protein, 428 aa, Pseudomonas aeruginosa
MADKKAQLIIEGSAPVELPVLSGTMGPDVVDVRGLTATGHFTFDPGFMSTASCESKITYIDGDKGVLLHRGYPIEQLAEKSDYLETCYLLLNGELPTAAQKEQFVGTIKNHTMVHEQLKTFFNGFRRDAHPMAVMCGVIGALSAFYHDSLDITNPKHRQVSAHRLIAKMPTIAAMVYKYSKGEPMMYPRNDLNYAENFLHMMFNTPCETKPISPVLAKAMDRIFILHADHEQNASTSTVRLAGSSGANPFACIASGIAALWGPAHGGANEAVLRMLDEIGDVSNIDKFVEKAKDKNDPFKLMGFGHRVYKNFDPRAKVMKQTCDEVLQELGINDPQLELAMKLEEIARHDPYFVERNLYPNVDFYSGIILKAIGIPTSMFTVIFALARTVGWISHWQEMLSGPYKIGRPRQLYTGHTQRDFTALKDRG

SEQ ID NO: 11633 - protein, 428 aa, Pseudomonas aeruginosa
MADKKAQLIIEGSAPVELPVLSGTMGPDVVDVRGLTATGHFTFDPGFMSTASCESKITYIDGDKGVLLHRGYPIEQLAEKSDYLETCYLLLNGELPTAAQKEQFVGTIKNHTMVHEQLKTFFNGFRRDAHPMAVMCGVIGALSAFYHDSLDITNPKHREVSAHRLIAKMPTIAAMVYKYSKGEPMMYPRNDLNYAENFLHMMFNTPCETKPISPVLAKAMDRIFILHADHEQNASTSTVRLAGSSGANPFACIASGIAALWGPAHGGANEAVLRMLDEIGDVSNIDKFVEKAKDKNDPFKLMGFGHRVYKNFDPRAKVMKQTCDEVLQELGINDPQLELAMKLEEIARHDPYFVERNLYPNVDFYSGIILKAIGIPTSMFTVIFALARTVGWISHWQEMLSGPYKIGRPRQLYTGHTQRDFTALKDRG

SEQ ID NO: 11634 - protein, 482 aa, Kluyveromyces lactis
MSTTMLSTRNALARGLLRTSGGAAGASRNNLLLSLVASRYYSNGEKTLKQRFAEIFPEKAEEIKRLKKEHGKTVIGEVLLEQAYGGMRGIKGLVWEGSVLDPEEGIRFRGRTIPDIQKELPKAADGEEPLPEAIFWLLLTGEVPTETQVKALSADLASRSELPAHVESLLDNLPKDLHPMAQFSMAVTALESESKFAKAYAQGVSKKDYWNYTFEDSLDLLGKLPVIASKIYRNVFKDGKITSIDQNADYGKNLAHLLGYQNKEFVDLMRLYLTIHSDHEGGNVSAHTTHLVGSALSSPYLSLSAGLNGLAGPLHGRANQEVLEWLFKLREEVKGDYSPATIEKYLWDTLNSGRVVPGYGHAVLRKTDPRYTAQREFALKHFPDYELFKLVSTIYEVAPKVLTKHGKTKNPWPNVDSHSGVLLQYYGLTEASFYTVLFGVARAFGVLPQLIIDRAVGQPIERPKSFSTEKYIELVQSINAKK

SEQ ID NO: 11635 - protein, 433 aa, Ralstonia solanacearum
MTPSDVKATLSFSDGSPSVELPIYTGTVGPDVIDIRKLYGQTGKFTYDPGFMSTASCNSKITYIDGDKGELLYRGYAIDDLAGKCDFLEICYLLLKGELPNAKQKDEFNSTVMNHTMVHEQMQFFLRGFRRDAHPMAVLTGLVGAMSAFYPDAANINDSREREISQIRLIAKLPTLVAMAYKYNIGQPLIYPQNNLSYTGNFMRMMFATPCEDYKVNPVLERALDRIFILHADHEQNASTSTVRLAGSSGTNPIAAIAAGIACLWGPAHGGANEAALNMLEEIGSVDKIDEFIKQVKDKNSGVRLMGFGHRVYKNYDPRAKLMRETCHEVLQELGLENDRLFKLAMALEKIALEDEYFVSRKLYPNVDFYSGIVQRALGIPTSMFTCIFALARSVGWIAQWEEMITDPEYKIGRPRQLFNGAATRAVPELGKR

SEQ ID NO: 11636 - protein, 387 aa, Ralstonia solanacearum
MSEADSSTPAGAFKPKKSVALSGVTAGNTALCTVGRTGNDLHYRGYDILDLAAACEFEEVAYLLVHGKLPNKAELTTYKARLKALRGLPANVKAALEWVPASAHPMDVMRTGVSVLGTVLPERDDHNLPGARDIADRLMASLGSMLLYWYHYSHNGRRIEVETDDDSIGGHFLHLLHGVEPSKSWVDAMHVSLNLYAEHEFNASTFTGRVIAGTGSDIYSAITGAIGALRGPKHGGANEVAFEIQKRYDTPDEAEADVRRRVEAKEVIIGFGHPVYTISDPRNKVIKEVARKLSKEAGNTRMFDIAERLETVMWDVKKMFPNLDWFSAVSYHMMGVPTAMFTPLFVISRTSGWAAHVIEQRIDNKIIRPSANYTGPEDLKFVPLGKR

SEQ ID NO: 11637 - protein, 75 aa, Helicobacter hepaticus
YKNYDPRAKILKKLKDDLDAKGIKMNTRLSDLAHKVEEVALSDSYFVERNLYPNVDFYSGIILSALKIPVSLFTP

SEQ ID NO: 11638 - protein, 320 aa, Bartonella doshiae
TYIDGDKGILLYRGYPIEQLAEKGDFLESCYLLLYGELPTQQEKNDFDRRIMQHTMVHEQFSRFFQGFRRDSHPMAVMVACLGAMSAFYHDSIDITDPQQRMIASIRLISKVPTLAAMAYKYSIGQAFVYPHNSLSYAANFLRMCFAVPCEEYQVNPVLTRAMDRIFILHADHEQNASTSTVRLAGSSGANPFACIAAGVACLWGPAHGGANEACLKMLKEIGSVKKIPEFIARAKDKNDPFRLMGFGHRVYKNYDPRAKIMQKTCHEVLKELNRQDDPLLDIAIELEHIALNDEYFIEKKLYPNVDFYSGITLKALGFP

SEQ ID NO: 11639 - protein, 218 aa, Bartonella doshiae
IASIRLISKVPTLAAMAYKYSIGQAFVYPNNNLSYAANFLRMCFAVPCEEYQVNPVLTRAMDRIFILHADHDQNASTSTVRLAGSSGANPFACIAAGVACLWGPAHGGANEACLKMLQEIGSVKKIPEFIARAKDKNDPFRLMGFGHRVYKNYDPRAKIMQKTCHEVLKELNRQDDPLLDIAIELEHIALNDEYFIEKKLYPNVDFYSGITLKALGFP

SEQ ID NO: 11640 - protein, 319 aa, Bartonella grahamii
DGDKGILLYRGYPIDQLAEKGDFLESCYLLLYGELPTQQEKNEFDRCIMQHTMVHEQFARFFHGFRRDSHPMAVMVACLGAMSAFYHDSIDITDPHQRMIASVRLISKVPTLAAMAYKYSIGQAFVYPRNDLSYAANFLRMCFAVPCEEYKTNPVLARAMDQIFILHADHEQNASTSTVRLAGSSGANPFACIAAGVACLWGPAHGGANEACLKMLQEIGSIERIPEFIARAKDKNDPFRLMGFGHRVYKNYDPRAKIMQKTCHEVLKELNIQDDPLLDIAIELEKIALSDEYFIEKKLYPNVDFYSGITLKALGFPTE

SEQ ID NO: 11641 - protein, 322 aa, Bartonella taylorii
TYIDGNKGILLYRGYPIDQLAERGDFLESCYLLLYGELPTKQEKHDFDRCIMQHTMVHEQFARFFHGFRRDSHPMAVMVACLGAMSAFYHDSIDITDPQQRMIASVRLISKVPTLAAMAYKYSIGQAFVYPRNDLSYAANFLRMCFSVPCEGYNINSVLTRAMDRIFTLHADHEQNASTSTVRLAGSSGANPFACIAAGVACLWGPAHGGANEACLKMLQEIGSVERIPEFIARAKDKNDPFHLMGFGHRVYKNYDPRAKIMQKTCHEVLKELNIQDDPLLDIAMELEKIALNDEYFVEKKLYPNVDFYSGITLKALGFPTE

SEQ ID NO: 11642 - protein, 206 aa, Bartonella taylorii
AYKYSIGQAFVYPRNDLSYAANFLRMCFCVPCEEYKVNSVLTRAMDRIFILHADHEQNASTSTVRLAGSSGANPFACIAAGVACLWGPAHGGANEACLKMLQEIGSVERIPEFIARAKDKNDPFRLMGFGHRVYKNYDPRAKIMQKTCHEVLKELNIQDDPLLDIAIELEKIALNDEYFVEKKLYPNVDFYSGITLKALGFPTESL

SEQ ID NO: 11643 - protein, 319 aa, Bartonella vinsonii
DGNKGILLYRGYPIEQLAEKGDFLESCYLLLYGELPTQQEKSDFDRCIMQHTMVHEQFARFFHGFRRDSHPMAVMVACLGAMSAFYHDSIDITDPQQRMIASVRLISKVPTLAAMAYKYSIGQAFVYPRNDLSYAANFLRMCFSVPCEEYKTNPVLTRAMDRIFILHADHEQNASTSTVRLAGSSGANPFACIAAGVACLWGPAHGGANEACLKMLQEIGSVKRIPEFIARAKDKNDPFRLMGFGHRVYKNYDPRAKIMQKTCHEVLKELNIQDDPLLDIAIELEKIALNDEYFVEKKLYPNVDFYSGITLKALGFPTE

SEQ ID NO: 11644 - protein, 112 aa, Bartonella vinsonii
ANEACLKMLQEIGSVKRIPEFIARAKDKNDPFRLMGFGHRVYKNYDPRAKIMQKTCHEVLKELNIQDDPLLDIAIELEKIALNDEYFVEKKLYPNVDFYSGITLKALGFPTE

SEQ ID NO: 11645 - protein, 412 aa, Rickettsia bellii
NTEFAELKIRDKIFKLPILKASIGQDVIDISKVYSEADCFTYDPGFMSTASCRSTITYIDGDQGILRHRGYDIKDLAEKSDFLEVAYLLIYGELPNNKQYNDFTKKVAHHALVNERLHYLFQTFCSSSHPMAIMLAAVGSLSAFYPDLLNFFKEADYELTAIRMIAKIPTIAAMSYKYSIGQPFVYPDNSLDFTENFLHMMFATPCEKYKVNPVIKNALNKIFILHADHEQNASTSTVRIAGSSGANPFACVSTGIASLWGPAHGGANEAVINMLKEIGSVENIPKYIAKAKDKNDNFRLMGFGHRVYKNYDPRAAVLKETCKEVLKELGQLDNNPLLQIAIELEAIALKDEYFIERKLYPNVDFYSGIIYKAMGIPPQMFTVLFATARTVGWMAQWKEMHEDPEQKISRPR

SEQ ID NO: 11646 - protein, 411 aa, Rickettsia montanensis
DSEFAELKIRGKIFELPILKASIGEDVIDISRVSAEADCFTYDPGFMSTASCQSTITYIDGDKGILRHRGYDIKDLAEKSDFLEVAYLLIYGELPSGEQYNNFTKQVAHHSLVNERLHYLFQTFCSSSHPMAIMLAAVGSLSAFYPDLLNFKEADYELTAIRMIAKIPTIAAMSYKYSIGQPFIYPDNSLDFTENFLHMMFATPCTKYKVNPIIKNALNKIFILHADHEQNASTSTVRIASSSGANPFACISTGIASLWGPAHGGANEAVINMLKEIGSSEYIPKYIAKAKDKNDPFRLMGFGHRVYKNYDPRAAVLKETCKEVLKELGQLDNNPLLQIAIELEAIALKDEYFIERKLYPNVDFYSGIIYKAMGIPSQMFTVLFAIARTVGWMAQWKEMHEDPEQKISRPR

SEQ ID NO: 11647 - protein, 403 aa, Neorickettsia helminthoeca
MDTDEVTIKIQATVKSSGGPNGILISSEPRSFIYDPGYVSTASCKSEITFVDGEEGVLLYRGYPVDELATQCDFLRVVYLLLYGELPDPVRAKEFRTFIQNFPQLPDCVLENICSFPRDAHPMVILISAFAALASAHHDSDFETHKEVLIANVPRLVAYIYRYITSQDFIPPDACLSYVGNFFYMMFGEKKPDYESILDKILILHADHEQNASTSTARMVVSSGASPIAAVSAATATLWGPLHGGANEKVLHMLGEIEKQGGSVEEFIERVKRKEERLMGFGHRVYKNYDPRAVILKSTAQDILKGSSSILSIASKLESIASNDEYFISRKLYPNVDFYSGIILNALGIPTYMFTPIFALARTSGWVAQIKEFLSDKEQKIARPRQIYIGKPFRKVASQSEKL

SEQ ID NO: 11648 - protein, 427 aa, Azotobacter vinelandii
MADKKAQLIIEGNAPVELPMLTGTVGPDVIDVRGLTSTGHFTFDPGFMSTASCESKITYIDGDKGILLHRGYPIEQLAEKSDYLETCYLLLNGELPNADQKAKFVNNIKNHTMVHEQLKNFLNGFRRDAHPMAVMCGVVGALSAFYHDSLDINDPQHREISAIRLVAKMPTLAAMVYKYSLGQPLMYPRNDLDYAENFLHMMFNTPCEVKPISPVLAKAMDRIFVLHADHEQNASTSTVRLAGSSGANPFACIAAGIAALWGPAHGGANEAVLTMLDEIGDVSNIEKFVAKAKDKNDPFKLMGFGHRVYKNFDPRAKVMKQTCDEVLSELGINDPQLELAMKLEEIARNDPYFKERNLYPNVDFYSGIILKAIGIPTSMFTVIFALARTVGWISHWKEMLSGPYKIGRPRQLYTGYEKRDYISVEKR

SEQ ID NO: 11649 - protein, 387 aa, Azotobacter vinelandii
MSATAETTTVGFKPKKSVALSGTAAGNTALCTVGRTGNDLHYRGYDILDFATTCEFEEVAHLLVHGKLPNVAELNGYKAKLKSLRGLPAGVKAALEQLPPSSHPMDVMRTGVSVLGCLSPEKEDHNYPGARDIADKLMASLGSMLLYWYHFSHNGKRIDVETDDDSIGGHFLHLLHGKKPSDSWVRAMHTSLILYAEHEFNASTFTSRVISGTGSDMFSCITGAIGALRGPKHGGANEVAFEIQKRYDTPDEAEADIRARVERKEVVIGFGHPVYTVGDPRNKVIKEVARELSVEQGNTKMYDIAERLESVMWEIKKMFPNLDWFSAVSYHMMGIPTAMFTPVFVIARTSGWAAHAIEQRIDGKIIRPSANYVGPENLKFVPLRERK

SEQ ID NO: 11650 - protein, 411 aa, Rickettsia africae
DSEFAELKIRGKIFKLPILKASIGEDVIDISRVSAEADCFTYDPGFMSTASCQSTITYIDGDKGILRHRGYDIKDLAEKSDFLEVAYLLIYGELPSGEQYNNFTKQVAHHSLVNERLHYLFQTFCSSSHPMAIMLAAVGSLSAFYPDLLNFKEADYELTAIRMIAKIPTIAAMSYKYSIGQPFIYPDNPLDFTENFLHMMFATPCTKYTVNPIIKNALNKIFILHADHEQNASTSTVRIAGSSGANPFACISTGIASLWGPAHGGANEAVINMLKEIGSSEYIPKYIAKAKDKNDPFRLMGFGHRVYKNYDPRAAVLKETCKEVLKELGQLDNNPLLQIAIELEAIALKDEYFIERKLYPNVDFYSGIIYKAMGIPSQMFTVLFVIARTVGWMAQWKEMHEDPEQKISRPR

SEQ ID NO: 11651 - protein, 411 aa, Rickettsia helvetica
DSEFAELKIRGKIFKLPILKASIGEDVINISRVSAEADCFTYDPGFMSTASCQSTITYIDGDKGILRHRGYDIKDLAEKSDFLEVAYLLIYGELPSSEQYNNFTKQVAHHSLVNERLHYLFQTFCSSSHPMAIMLAAVGSLSAFYPDLLNCKEADYKLTAIRMIAKIPTIAAMSYKYSIGQPFIYPDNSLDFTENFLHMMFATPCTKYKVNPIIKNALNKIFILHADHEQNASTSTVRIAGSSGANPFACISTGIASLWGPAHGGANEAVINMLKEIGSSENIPKYIAKAKDKNDPFRLIGFGHRVYKNYDPRAAVLKETCKEVLKELGQLENNPLLQIAIELEAIALKDEYFIERKLYPNVDFYSGIIYKAMGIPSQMFTVLFAIARTIGWMAQWKEMHGDPEQKISRPR

SEQ ID NO: 11652 - protein, 113 aa, Rickettsia helvetica
ANEAVINMLKEIGSSENIPKYIAKAKDKNDPFRLIGFGHRVYKNYDPRAAVLKETCKEVLKELGQLENNPLLQIAIELEAIALKDEYFIERKLYPNVDFYSGIIYKAMGIPSQ

SEQ ID NO: 11653 - protein, 411 aa, Rickettsia japonica
DSEFAELKIRGKIFKLPILKASIGEDVIDISRVSAEADCFTYDPGFMSTASCQSTVTYIDGDKGILRHRGYDIKDLAEKSDFLEVAYLLIYGELPSGEQYNNFTKQVAHHSLVNDRLHYLFQTFCSSSHPMAIMLAAVGSLSAFYPDLLNFKEADYELTAIRMIAKIPTIAAMSYKYSIGQPFIYPDNSLDFTENFLHMMFATPYTKYTVNPIIKNALNKIFILHADHEQNASTSTVRIAGSSGANPFACISTGIASLWGPAHGGANEAVINMLKEIGSSEYIPKYIAKAKDKNDPFRLMGFGHRVYKNYDPRAAVLKETCKEVLKELGQLDNNPLLQIAIELEAIALKDEYFIERKLYPNVDFYSGIIYKAMGIPSQMFTVLFAIARTVGWMAQWKEMHEDPEQKISRPR

SEQ ID NO: 11654 - protein, 411 aa, Rickettsia massiliae
DSEFAELKIRGKIFKLPILKASIGEDVIDISRVSAEADCFTYDPGFMSTASCQSTITYIDGDKGILRHRGYDIKDLAEKSDFLEVAYLLIYGELPSGEQYNNFTKQVAHHSLVNERLHYLFQTFCSSSHPMAIMLAAVGSLSAFYPDLLNFKEADYELTAIRMIAKIPTIAAMSYKYSIGQPFIYPDNSLDFTENFLHMMFATPCTKYKVNPIIKNALNKIFILHADHEQNASTSTVRIAGSSGANPFACISTGIASLWGPAHGGANEVVINMLKEIGSSEYIPKYIAKAKDKNDPFRLMGFGHRIYKNYDPRAAVLKETCKEVLKELGQLDNNPLLQIAIELEAIALKDEYFIERKLYPNVDFYSGIIYKAMGIPSQMFTVLFAIARTVGWMAQWKEMHEDPEQKISRPR

SEQ ID NO: 11655 - protein, 411 aa, Rickettsia parkeri
DSEFAELKIRGKIFKLPILKASIGEDVIDISRVSAEADCFTYDPGFMSTASCQSTITYIDGDKGILRHRGYDIKDLAEKSDFLEVAYLLIYGELPSGEQYNNFTKQVAHHSLVNERLHYLFQTFCSSSHPMAIMLAAVGSLSAFYPDLLNFKEADYELTAIRMIAKIPTIAAMSYKYSIGQPFIYPDNSLDFTENFLHMMFATPCTKYTVNPIIKNALNKIFILHADHEQNASTSTVRIAGSSGANPFACISTGIASLWGPAHGGANEAVINMLKEIGSSEYIPKYIAKAKDKNDPFRLMGFGHRVYKNYDPRAAVLKETCKEVLKELGQLDNNPLLQIAIELEAIALKDEYFIERKLYPNVDFYSGIIYKAMGIPSQMFTVLFAIARTVGWMAQWKEMHEDPEQKISRPR

SEQ ID NO: 11656 - protein, 435 aa, Rickettsia sibirica
MTNENNNDSEFAELKIRGKIFKLPILKASIGEDVIDISRVSAEADCFTYDPGFMSTASCQSTITYIDGDKGILRHRGYDIKDLAEKSDFLEVAYLLIYGELPSGEQYNNFTKQVAHHSLVNERLHYLFQTFCSSSHPMAIMLAAVGSLSAFYPDLLNFKEADYELTAIRMIAKIPTIAAMSYKYSIGQPFIYPDNSLDFTENFLHMMFATPCTKYTVNPIIKNALNKIFILHADHEQNASTSTVRIAGSSGANPFACISTGIASLWGPAHGGANEAVINMLKEIGSSEYIPKYIAKAKDKNDPFRLMGFGHRVYKNYDPRAAVLKETCKEVLKELGQLDNNPLLQIAIELEAIALKDEYFIERKLYPNVDFYSGIIYKAMGIPSQMFTVLFAIARTVGWMAQWKEMHEDPEQKISRPRQLYTGYVHREYKGIRER

SEQ ID NO: 11657 - protein, 101 aa, Rickettsia slovaca
GSSEYIPKYIAKAKDKNDPFRLMGFGHRVYKNYDPRAAVLKETCKEVLKELGQLDNNPLLQIAIELEAIALKDEYFIERKLYPNVDFYSGIIYKAMGIPSQ

SEQ ID NO: 11658 - protein, 416 aa, Ehrlichia muris
MIKEAVLELDDQRIKLPVLYDTNGNKAVDITSLYKDTGVLTYDPGFMSTAACESKITFIDGNKGILCYRGHNIVDLVNGNKSFVEIIYLLFYGVFPSSEDLQNFTLQISQEYTPPQVVYDVIKAFSQDSHPMAILMACFSALAAYYHDREADKDELKCAKLAVAKIASIVALIYRYITNQDFITADTKLSYSENFVHMMFDISSYKFTQVVAKALDIIFVLHADHEQNASTATVRLAGSAGADLFACLVAGTATLWGPAHGGANEAVINMLMTIEKPSNVKQFIQKVKDGSKTTRLMGFGHRVYKNYDPRAKMMCEICREVLNDLGIDDPLLEVAVELENIALQDSYFIERNLYPNVDFYSGIVLKAIGIPVKMFTTLFALARTSGWSAQWYEMVANKNYKICRPRQLYTGHITKI

SEQ ID NO: 11659 - protein, 563 aa, Plasmodium falciparum 3D7
MEGIRYLSCNKILYKRTGSTKTLINSLRKRYVHNNFKKKTCEQVLNTVNKLHNEKRYFNFSCSFTKSSRWNICMNRHNSRFFSSNESNKNLYLENYANIRKHINSIDNEESVIMNILKEKTYECIKKTREQLKEIIHTYPNTPISICTPNNVIGGLRNTITLITDTSILEKKKGILFRGKPVEKILREFPKWDNTCEYPMAEAMLWFLLTKEVPAVDDLKLLSRELYCRAKKIPQFVFDFIDNIPPFTHPMSQLVSTVSFLESLSLFKYKYSEGILKTDYWKYILEDAISLISQIQVIGAYIFKRTFINNDIRKGEGMNLDLDLDWSANFAKLIGYENKEVQDLLRLYFLLHSDHEGGNASAHVSHLIGSTLGNPYLSYSGCVIALSGPLHGLANQECLKFLLDIKKQLGDNQLTYEFIEKYAKNLLKSGRVIPGYGHAVLRVPDPRFLALRSFALSHFPDDPIIQILEMCYKVIPGILSATGKVKNPYPNVDCSSGSVLHHYGIKYPEYYTVLFALSRSIGVMSQLVLSRGLMYPLERPKSVDIYNLRKICEKNYVKIEEYE

SEQ ID NO: 11660 - protein, 516 aa, Cucurbita maxima
MPTDMELSPSNVARHRLAVLAAHLSAASLEPPVMASSLEAHCVSAQTMVAPPELVKGTLTIVDERTGKRYQVQVSEEGTIKATDLKKITTGPNDKGLKLYDPGYLNTAPVRSSISYIDGDLGILRYRGYPIEELAESSTYVEVAYLLMYGNLPSQSQLADWEFAISQHSAVPQGLVDIIQAMPHDAHPMGVLVSAMSALSVFHPDANPALRGQDLYKSKQVRDKQIARIIGKAPTIAAAAYLRLAGRPPVLPSSNLSYSENFLYMLDSLGNRSYKPNPRLARVLDILFILHAEHEMNCSTSAARHLASSGVDVFTALSGAVGALYGPLHGGANEAVLKMLSEIGTVNNIPEFIEGVKNRKRKMSGFGHRVYKNYDPRAKVIRKLAEEVFSIVGRDPLIEVAVALEKAALSDEYFVKRKLYPNVDFYSGLIYRAMGFPPEFFTVLFAIPRMAGYLAHWRESLDDPDTKIIRPQQVYTGEWLRHYIPPNERLVPAKADRLGQVSVSNASKRRLSGSGI

SEQ ID NO: 11661 - protein, 339 aa, Populus balsamifera subsp. trichocarpa X Populus deltoides
MPTKEQVGALSKELRDRALVHDYVFKAIDALPVTAHPMTQFATGVMALQVQSEFQKAYEKGIHKSKYWEPTYEDSLSLIARVPIVASYIYRRIYKDGKVIPMNDSLVIGGNFSHMLGFDSPEMQELMRLYVTNHSDHEGGNVSAHTGHLVASALSDPYLSFAAALNGLAGPLHGLANQEVLLWIKSVVEECGENITTEQLKDYVWKTLNSGKVVPGFGHGVLRKTVPRYTCQREFALKHLPDDPLFQLVSKLYEVVPPVLTQLGKVKNPWPNVDAHSGVLLNYYGLTEARYYTVLFGVSRSIGICSQLIWDRALGLPLERPKSVTMELLENHCKKAPAN

SEQ ID NO: 11662 - protein, 509 aa, Arabidopsis thaliana
MEISERVRARLAVLSGHLSEGKQDSPAIERWCTSADTSVAPLGSLKGTLTIVDERTGKNYKVPVSDDGTVKAVDFKKIVTGKEDKGLKLYDPGYLNTAPVRSSISYIDGDEGILRYRGYPIEEMAENSTFLEVAYLLMYGNLPSESQLSDWEFAVSQHSAVPQGVLDIIQSMPHDAHPMGVLVSAMSALSIFHPDANPALRGQDIYDSKQVRDKQIIRIIGKAPTIAAAAYLRMAGRPPVLPSGNLPYADNFLYMLDSLGNRSYKPNPRLARVLDILFILHAEHEMNCSTAAARHLASSGVDVYTAVAGAVGALYGPLHGGANEAVLKMLSEIGTVENIPEFIEGVKNRKRKMSGFGHRVYKNYDPRAKVIKNLADEVFSIVGKDPLIEVAVALEKAALSDDYFVKRKLYPNVDFYSGLIYRAMGFPPEFFTVLFAIPRMAGYLSHWKESLDDPDTKIMRPQQVYTGVWLRHYTPVRERIVTDDSKESDKLGQVATSNASRRRLAGSSV

SEQ ID NO: 11663 - protein, 514 aa, Arabidopsis thaliana
MEISQRVKARLAVLTAHLAVSDTVGLEQVLPAIAPWCTSAHITAAPHGSLKGNLTIVDERTGKKYQVPVSEHGTVKAVDLKKITTGKDDKGLKLYDPGYLNTAPVRSSICYIDGDEGILRYRGYPIEELAESSTFIEVAYLLMYGNLPSQSQLADWEFTVSQHSAVPQGVLDIIQSMPHDAHPMGVLVSAMSALSIFHPDANPALSGQDIYKSKQVRDKQIVRILGKAPTIAAAAYLRTAGRPPVLPSANLSYSENFLYMLDSMGNRSYKPNPRLARVLDILFILHAEHEMNCSTAAARHLASSGVDVYTACAGAVGALYGPLHGGANEAVLKMLAEIGTAENIPDFIEGVKNRKRKMSGFGHRVYKNYDPRAKVIKKLADEVFSIVGRDPLIEVAVALEKAALSDEYFVKRKLYPNVDFYSGLIYRAMGFPPEFFTVLFAVPRMAGYLSHWRESLDDPDTRIMRPQQAYTGVWMRHYEPVRERTLSSDSDKDKFGQVSISNASRRRLAGSSAL

SEQ ID NO: 11664 - protein, 480 aa, Arabidopsis thaliana
MEISERARARLAVLNAHLTVSEPNQVLPAIEPWCTSAHITAAPHGSLKGNLKIVDERTGNEYQVPVSEHGTVKTVDLKKITTGKDDKGLNLYDPGYLNTAPVRSSISYIDGDEGILRYRGYPVEELAEKSTYTEVTYLLIYGNLPSQRQLADWEFAISQNSAVPQGVLDMIQSMPNDVHPVGALVTAMSALSIFYPDANPSLMGLGVYKSKQVRDKQIVRVLGQAPTIAAAAYLRKAGKPPVQPLSNLSYSENFLYMVESMGDRSYKPNPRLARVLDILFILQAEHEMNCSTAAARHLSSSGGDVYTAVSGGVGAIYGPLHGGAVEATINMLSEIGTVENIPEFIESVKNKKRRLSGFGHRIYKNYDPRGKVVKKLADEVFSILGRDPLVEVGDALEKAALSDEYFVKRKLYPNVDFYSGLINRAMGIPSSFTAVSRIAGYLSHWRESLDDPDTKIMRPQQVYTGAGIRHYETVRERTKL

SEQ ID NO: 11665 - protein, 474 aa, Arabidopsis thaliana
MVFFRSVSAFTRLRSRVQGQQSSLSNSVRWIQMQSSTDLDLKSQLQELIPEQQDRLKKLKSEHGKVQLGNITVDMVIGGMRGMTGLLWETSLLDPEEGIRFRGLSIPECQKVLPTAQSGAEPLPEGLLWLLLTGKVPSKEQVEALSKDLANRAAVPDYVYNAIDALPSTAHPMTQFASGVMALQVQSEFQKAYENGIHKSKFWEPTYEDCLNLIARVPVVAAYVYRRMYKNGDSIPSDKSLDYGANFSHMLGFDDEKVKELMRLYITIHSDHEGGNVSAHTGHLVGSALSDPYLSFAAALNGLAGPLHGLANQEVLLWIKSVVEECGEDISKEQLKEYVWKTLNSGKVIPGYGHGVLRNTDPRYVCQREFALKHLPDDPLFQLVSKLYEVVPPVLTELGKVKNPWPNVDAHSGVLLNHYGLTEARYYTVLFGVSRSLGICSQLIWDRALGLALERPKSVTMDWLEAHCKKASSA

SEQ ID NO: 11666 - protein, 473 aa, Arabidopsis thaliana
MVFFRSVSAFTRLRSRVGQQSSLSNSVRWIQMQSSTDLDLKSQLQELIPEQQDRLKKLKSEHGKVQLGNITVDMVIGGMRGMTGLLWETSLLDPEEGIRFRGLSIPECQKVLPTAQSGAEPLPEGLLWLLLTGKVPSKEQVEALSKDLANRAAVPDYVYNAIDALPSTAHPMTQFASGVMALQVQSEFQKAYENGIHKSKFWEPTYEDCLNLIARVPVVAAYVYRRMYKNGDSIPSDKSLDYGANFSHMLGFDDEKVKELMRLYITIHSDHEGGNVSAHTGHLVGSALSDPYLSFAAALNGLAGPLHGLANQEVLLWIKSVVEECGEDISKEQLKEYVWKTLNSGKVIPGYGHGVLRNTDPRYVCQREFALKHLPDDPLFQLVSKLYEVVPPVLTELGKVKNPWPNVDAHSGVLLNHYGLTEARYYTVLFGVSRSLGICSQLIWDRALGLALERPKSVTMDWLEAHCKKASSA

SEQ ID NO: 11667 - protein, 473 aa, Arabidopsis thaliana
MVFFRSVSAFTRLRSRVGQQSSLNNSVRWIQMQSSTDLDLKSQLQELIPEQQDRLKKLKSEHGKVQLGNITVDMVIGGMRGMTGLLWETSLLDPEEGIRFRGLSIPECQKVLPTAQSGAEPLPEGLLWLLLTGKVPSKEQVEALSKDLANRAAVPDYVYNAIDALPSTAHPMTQFASGVMALQVQSEFQKAYENGIHKSKFWEPTYEDCLNLIARVPVVAAYVYRRMYKNGDSIPSDKSLDYGANFSHMLGFDDEKVKELMRLYITIHSDHEGGNVSAHTGHLVGSALSDPYLSFAAALNGLAGPLHGLANQEVLLWIKSVVEECGEDISKEQLKEYVWKTLNSGKVIPGYGHGVLRNTDPRYVCQREFALKHLPDDPLFQLVSKLYEVVPPVLTELGKVKNPWPNVDAHSGVLLNHYGLTEARYYTVLFGVSRSLGICSQLIWDRALGLALERPKSVTMDWLEAHCKKASSA

SEQ ID NO: 11668 - protein, 433 aa, Arabidopsis thaliana
MVMQDLKSQMQEIIPEQQDRLKKLKSEQGKVPVGNITVDMVLGGMRGMTGLLWETSLLDADEGIRFRGMSIPECQKILPSAESGEEPLPESLLWLLLTGKVPTKEQANALSTELAHRAAVPAIDALPSTAHPMTQFASGVMALQVQSEFQKAYEQGDISKSKYWEPTFEDALNLIARVPVVASYVYRRMYKDGSIIPLDDSLDYGANFSHMLGFDSPQMKELMRLYVTIHSDHEGGNVSAHAGHLVGSALSDPYLSFAAALNGLAGPLHGLANQEVLLWIKLVVEECGESISKEQLKDYVWKTLNSGKVVPGYGHGVLRKTDPRYICQREFALKHLPDDPLFQLVSKLYEVVPPILTELGKVKNPWPNVDAHSGVLLNYYGLTEARYYTVLFGVSRSLGICSQLIWDRALGLPLERPKSVNMDWLDNFTRLNR

SEQ ID NO: 11669 - protein, 472 aa, Arabidopsis thaliana
MVFFRSVSAFTRLRSRVQGQQSSLSNSVRWIQMQSSTDLDLKSQLQELIPEHKDRLKKLKSEHGKVQLGNITVDMVIGGMRGMTGLLWETSLLDPEEVFALGDCRLPECQKALLPTAQSGGLNHYRRSFVASLNWKGTLAKSKLKHCRKTWNRAAVSDYVYNAIDALPSTAHPMTQFASGVMALQVQSEFQKAYENGIHKSKFWEPTYEDCLNLIARVPVVAAYVYRRMYKNGDSIPSDKSLDYGANFSHMLGFDDERLKELMRLTSPSTVMHEGGNVSAHTGHLVGSALSDPYLSFAAALNGLAGPLHGLANQEVLLWIKSVVEECGEDISKEQLKEYVWKTLNSGKVIPGYGHGVLRNTDPRYVCQREFALKHHPDDPLFQCCKLMKLASCLTELESEEPWPNVDAHSGVLLNHYGLTEARYYTVLFGVSRSLGICSQLIWDRELLLALERPKSVTMDWLEAHCKKASSA

SEQ ID NO: 11670 - protein, 471 aa, Citrus maxima
MASLRSATALSRLRSRAGQQSNLSNSVRWLQMQSSADLDLHSQLKEMIPEQQERLKKVKSDLGKAQLGNITIDVVIGGMRGMTGLLWETSLLDPDEGIRFRGLSIPECQKLLPAAKPDGEPLPEGLLWLLLTGKVPSKEQVDGLSKELRDRATVPDYVYKAIDALPVSAHPMTQFASGVMALQVQSEFQEAYEKGIHKSKSWEPTSEDSLNLIARVPVVAAYVYQRIYKDGKIIPKDDSLDYGGNFSHMLGFDDPKMLELMRLYVTIHSDHEGGNVSAHTGHLVASALSDPYLSFLAALNGLAGPLHGLANQEVLLWIKSVVDECGENVTTEQLKDYVWKTLNSGKVVPGFGHGVLRKTDPRYTCQREFALKHLPDDPLFQLVSKLYEVVPPILTKLGKVKNPWPNVDAHSGVLLNHFGLAEARYYTVLFGVSRSLGICSQLIWDRALGLPLERPKSVTLDWIEKNCKKAA

SEQ ID NO: 11671 - protein, 469 aa, Fragaria x ananassa
MAFFRTVTKLRSRLGQPPSLRDSVRCLQTQASSDLDLHSQLKELIPEQQERLKKLKKEHGKVQLGTITVDMVIGGMRGMTGLLWETSLLDPDEGIRFRGLSIPECQKVLPGATPGGEPLPEGLLWLLLTGKVPSRSKNMHYPVNNGVVPKFQIMCSRPLMLCLLEHIPMTQFTTGVMALQVQSEFQKAYDKGIPKSRYWEPTYEDSLSLIAQLPVVASYVYRRIYKGGRMIPVDDSLDYGGNFSHLLGFDDHKMQELMRLYVTIHSDHEGGNVSAHTGHLVASALSDPFLSFAAALNGLAGPLHGLANQEVLLWIKSVVDECGENITKDQLKDYVWKTLNSGKVVPGFGHGVLRKTDPRYTCQREFALKHLPDDPLFRLVSKLYDVVPPILTELGKVKNPWPNVDAHSGVLLNHFGLTEARYFTVLFGVSRSIGIGSQLIWDRALGLPLERPKSVTMESLESFCKKAAS

SEQ ID NO: 11672 - protein, 434 aa, Bradyrhizobium japonicum
MDAKASNKTATLTVGNKNYDLPIHSGSVGPDVIDIGKLYGQSGLFTYDPGFTSTASCQSKITYIDGDAGVLEYRGYPIEQLAENGDFLETCYLLLYGNLPTAAQKKDFDDRVIHHTMVHEQMARFFQGFRRDAHPMAVMVASVGALAAFYHDSTDINDPKQRMIASMRMIAKIPTLAAMAYKYTIGQPFVYPKNSLKFAENFLHMCFAVSCEEYKINPVLADALDKIFILHADHEQNASTSTVRIAGSSGANPFACIAAGIACLWGPAHGGANEAALAMLGEIGSVDKIPEFIAKVKDKNSEVRLMGFGHRVYKNYDPRAKIMQKMCHAVLKETGHGDDPMLKVALELEKIALSDQYFIDRKLYPNVDFYSGITLKAMGFPVSMFTVLFAVARTVGWISQWSEMIEDPQQKIGRPRQLYTGVTRRDYVAIKDRK

SEQ ID NO: 11673 - protein, 473 aa, Prunus persica
  unsure (1)..(473): unsure at all Xaa locations
MVFFRSVNALSKLRSRLGQQSNLRDSVRWLQTQTSTDLDLRSQLKELIPEQQERLKKIKAEYGKVQLGNITVDMVLGGMRGMTGLLWETSLLDPDEGIRFRGLSIPECQKVLPGAKPGGEPLPEGLLWLLLTGKVPSKEQVDALSXELRSRAAVPDYVYKAIDALPITAHPMTQFTTGVMALQVQSEFQKAYDXGIYKSKYWEPTFEDSLSLIAQLPVVASYVYQRIFKDGKVIPVDDSLDYGANFSHLWGFDDPKMHELMRLYVTIHSDHEGGNVSAHTGHLVASALSDPYLSFAAALNGLAGPLHGLANQEVLLWIKSVVDEVGENVTTEQLKDYVWKTLNSGKVVPGFGHGVLRKTDPRYSCQREFALKHLPDDPLFQLVSKLYEVVPPILIELGKVKNPWPNVDAHSGVLLNHFGLTEARFFTVLFGVSRSIGIGSQLIWDRALGLPLERPKSVTMESLENYCKKAASS

SEQ ID NO: 11674 - protein, 411 aa, Rickettsia honei
GSEFAELKIRGKIFKLPILKASVGEDVIDISMVSAEADCFTYDPGFMSTASCQSTITYIDGDKGILRHRGYDIKDLAEKSDFLEVAYLLIYGELPSGEQYNNFTKQVAHHSLVNERLHYLFQTFCSSSHPMAIMLAAVGSLSAFYPDLLNFKEADYELTAIRMIAKIPTIAAMSYKYSIGQPFIYPDNALDFTENFLHMMFATPCTKYTVNPIIKNALNKIFILHADHEQNASTSTVRIAGSSGANPFACISTGIASLWGPAHGGANEAVINMLKEIGSSEYIPKYIAKAKDKNDPFRLMGFGHRVYKNYDPRAAVLKETCKEVLKELGQLDNNPLLQIAIELEAIALKDEYFIERKLYPNVDFYSGIIYKAMGIPSQMFTVLFAIARTVGWMAQWKEMHEDPEQKISRPR

SEQ ID NO: 11675 - protein, 349 aa, Rickettsia honei
ISMVSAEADCFTYDPGFMSTASCQSTITYIDGDKGILRHRGYDIKDLAEKSDFLEVAYLLIYGELPSGEQYNNFTKQVAHHSLVNERLHYLFQTFCSSSHPMAIMLAAVGSLSAFYPDLLNFKEADYELTAIRMIAKIPTIAAMSYKYSIGQPFIYPDNALDFTENFLHMMFATPCTKYTVNPIIKNALNKIFILHADHEQNAFTSTVRIAGSSGANPFACISTGIASLWGPAHGGANESVISMLKEIGSSEYIPKYIAKAKDKNDPFRLMGFGHRVYKNYDPRAAVLKETCKEVLKELGQLDNNPLSQIAIELEAIALKDEYFIERELYPNVDFYSGIIYKAMGIPSQ

SEQ ID NO: 11676 - protein, 429 aa, Sinorhizobium fredii
MSGTNATISIDGKTADLPVRSGSIGPDVVDIWSLYKQTKMFTYDPGFTSTASCESKITYIDGDEGVLLHRGYPIEQLADHGDFLEVCYLLLYGELPTKAQKDDFDYRVTHHTMIHEQMSRFFTGFRRDAHPMAVMCGCVGALSAFYHDSTDITDPHQRMVASLRMIAKMPTIAAMAYKYHIGQPFIYPKNDLDYASNFLRMCFAVPCEDYVVNPVLSRAMDRIFILHADHEQNASTSTVRLAGSSGANPFACIAAGIACLWGPAHGGANEAALNMLAEIGSVDRIPEFITRAKDKNDPFRLMGFGHRVYKNYDPRAKIMQKTTHEVLAELGHKDDPLLEVAMELERIALTDEYFIEKKLYPNIDFYSGITLKALGFPTTMFTVLFALARTVGWIAQWNEMIEDPEQRIGRPRQLYVGAPLRDYVPLSKR

SEQ ID NO: 11677 - protein, 355 aa, male-killing Rickettsia from Adalia bipunctata
GFMSTASCRSTITYIDGDKGILRYRGYDIKDLAEKSDFLEVAYLLIYGELPSSEQYNNFTKKVAVHSLVNERLHYLFQTFCSSSHPMAIMLAAVGSLSAFYPDLLNFKEADYELTAIRMIAKIPTIAAMSYKYSIGQPFIYPDNALDFTENFLHMMFATPCEKYKVNPIIKNALNKIFILHADHEQNASTSTVRIAGSSGANPFACVSTGIASLWGPAHGGANEAVINMLKEIGSSENIPQYIAKAKDKNDPFRLMGFGHRVYKNYDLRAAVLKETCKDVLKELGQLDGNPLLQIAIELEAIALKDEYFIERKLYPNVDFYSGIIYKAMGIPSQMFTVLFAIARTVGWMAQWKEM

SEQ ID NO: 11678 - protein, 355 aa, male-killing Rickettsia from Adalia bipunctata
GFMSTASCRSTITYIDGDKGILRYRGYDIKDLAEKSDFLEVAYLLIYGELPSSEQYNNFTKKVAVHSLVNERLHYLFQTFCSSSHPMAIMLAAVGSLSAFYPDLLNFKEADYELTAIRMIAKIPTIAAMSYKYSIGQPFIYPDNALDFTENFLHMMFATPCEKYKVNPIIKNALNKIFILHADHEQNASTSTVRIAGSSGANPFACVSTGIASLWGPAHGGANEAVINMLKEIGSSENIPKYIAKAKDKNDPFRLMGFGHRVYKNYDLRAAVLKETCKEVLKELGQLDGNPLLQIAIELEAIALKDEYFIERKLYPNVDFYSGIIYKAMGIPSQMFTVLFAIARTVGWMAQWKEM

SEQ ID NO: 11679 - protein, 355 aa, male-killing Rickettsia from Adalia bipunctata
GFMSTASCRSTITYIGGDKGILRYRGYDIKDLAEKSDFLEVAYLLIYGELPSSEQYNNFTKKVAVHSLVNERLHYLFQTFCSSSHPMAIMLAAVGSLSAFYPDLLNFKEADYELTAIRMIAKIPTIAAMSYKYSIGQPFIYPDNSLDFTENFLHMMFAAPCEKYKVNPIIKNALNKIFILHADHEQNASTSTVRIAGSSGANPFACVSTGIASLWGPAHGGANEAVINMLKEIGSSENIPKYIAKAKDKNDPFRLMGFGHRVYKNYDLRAAVLKETCKEVLKELGQLDGNPLLQIAIELEAIALKDEYFIERKLYPNVDFYSGIIYKAMGIPSQMFTVLFAIARTVGWMAQWKEM

SEQ ID NO: 11680 - protein, 117 aa, male-killing Rickettsia from Adalia bipunctata
HGGANEAVINMLKEIGSSENIPKYIAKAKDKNDPFRLMGFGHRVYKNYDLRAAVLKETCKEVLKELGQLDGNPLIQIAIELEAIALKDEYFIERKLYPNVDFYSGIIYKAMGIPSQM

SEQ ID NO: 11681 - protein, 433 aa, Mesorhizobium loti
MGGANQEATATLQFAGKTHEFKVRSGSVGPDVIDIASLYSTTGAFTYDPGFTSTASCESEITFIDGDAGILLHRGYPIDQLAEHGDFLEVCYLLLYGELPTKAQKDDFDYRVTRHTMVHEQMSRFFTGFRRDAHPMAVMCGVVGALSAFYHDSTDISDPYQRMVASMRLIAKMPTIAAMAYKYHIGQPFIYPKNDLGFAANFLHMCFAVPCEEYKINPVLARAMERIFILHADHEQNASTSTVRLAGSSGANPFACIAAGIACLWGPAHGGANEAALNMLGEIGHVDHIPEFIARAKDKNDPFRLMGFGHRVYKNYDPRAKIMQKTAHEVLGELGIKDDPLLDIAMELEKIALTDPYFIEKKLYPNVDFYSGITLKALGFPTTMFTVLFAVARTVGWIAQWKEMIEDPRQKIGRPRQLYTGAPERDYVPIAKR

SEQ ID NO: 11682 - protein, 362 aa, Mesorhizobium loti
MANGLDDVVAAETVLSDVDGLGGRLTIRGHSLAELAGRWSFPQVVRLLLDGFFEDLAGDAELAAQLGEARVDVFERLQPSLPLLAPLDIYSAMRAGMALLPDGETLADALRLIAAPAVLTPALLRLQRGEQPVAPDGKAAHAADMLRMLRGSVPSPALAKALDTYLVTVCDHGLNASTFATRVVASTLAGLTSSVLAGLGALKGPLHGGAPGPVIEMLDAIEAHGDAAGWLRNEIAQGRRIMGFGHRIYRVRDPRADVLKAVVRQLGGEGETGRRLAFAEEVEKTALEVLRIAKPQRSLQTNVEFYTALVLEAAGFPPQAFSNVFAAGRVAGWIAHAREQQTTGRLIRPQSRYVGPVPDLVA

SEQ ID NO: 11683 - protein, 379 aa, Mesorhizobium loti
MSEWLSREEALERLRVRPQTLYAYVSRGRIGMRPDRADPRRSQYRADDIAALATRRARGRSPSAIAESAIAWGEPSIATAISTVWHGHLIYRGRDAAVLSDNATLEETAAVLWGLPEPIRFEAPAPDAPRQPGRASAFAQLALLAGQARPSLGRSAASLCADAARAIGVLAGALGAEAGPDPVHRRLARGWSVDDAGADAIRRALVLLADHELNASTFAARVAASTGASPAACLLAGLATLSGPRHGGAGEAVMQLAEDAARHGADAAIRRWLGHDRPLPAFGHPLYPDGDPRTTALSAAIPVDETLQQLEKAAIAMTGARPNIDFALAALTRGLGLPRDAPFQLFALGRSVGWAAHMVEQIVSGSIIRPRGRYEGLLP

SEQ ID NO: 11684 - protein, 429 aa, Sinorhizobium meliloti
MSEKSATVTFGGKSADLPVRSGSIGPDVVDIGSLYKQTTMFTYDPGFTSTASCESKITYIDGDEGVLLHRGFPIEQLAEHGDFLEVCYLLLYGELPTKAQKADFDYRVTHHTMVHEQMSRFFTGFRRDAHPMAVMCGCVGALSAFYHDSTDITDPHQRMVASLRMIAKMPTIAAMAYKYHIGQPFVYPKNDLDYASNFLRMCFAVPCEDYVVNPVLARAMDRIFILHANHEQNASTSTVRLAGSSGANPFACIAAGIACLWGPAHGGANEAALNMLAEIGTADRIPEYIAKAKDKNDPFRLMGFGHRVYKNYDPRAKIMQKTTHEVLAELGHKDDPLLEVAMELERIALTDEYFVEKKLYPNIDFYSGITLKALGFPTTMFTVLFALARTVGWIAQWNEMIEDPEQRIGRPRQLYVGAPLRDYVPITKR

SEQ ID NO: 11685 - protein, 429 aa, Sinorhizobium meliloti
MSEKSATVTFGGKSADLPVRSGSIGPDVVDIGSLYKQTTMFTYDPGFTSTASCESKITYIDGDEGVLLHRGFPIEQLAEHGDFLEVCYLLLYGELPTKAQKADFDYRVTHHTMVHEQMSRFFTGFRRDAHPMAVMCGCVGALSAFYHDSTDITDPHQRMVASLRMIAKMPTIAAMAYKYHIGQPFVYPKNDLDYASNFLRMCFAVPCEEYVVNPVLARAMDRIFILHADHEQNASTSTVRLAGSSGANPFACIAAGIACLWGPAHGGANEAALNMLAEIGTVDRIPEYITKAKDKNDPFRLMGFGHRVYKNYDPRAKIMQKTTHEVLAELGHKDDPLLEVAMELERIALTDEYFIEKKLYPNIDFYSGITLKALGFPTTMFTVLFALARTVGWIAQWNEMIEDPEQRIGRPRQLYVGAPLRDYVPISKR

SEQ ID NO: 11686 - protein, 431 aa, Bartonella henselae
MSKNKAHITVNDKKIELSVRKGTLGPDVIEIASLYKETDTFTYDPGFTSTASCESKITYIDGNEGILLYRGYPIDQLAEKGDFLESCYLLLYGELPTKQEKIDFDRCIMQHTMVHEQFARFFHGFRRDSHPMAVMIACLGAMSAFYHDSIDITDPQQRMIASIRLISKVPTLAAMAYKYSIGQAFVYPRNDLSYAANFLRMCFSVPCEEYKINPVLTRAMDRIFTLHADHEQNASTSTVRLAGSSGANPFACIAAGVACLWGPAHGGANEACLKMLQEIGSVERIPEFIARAKDKNDSFRLMGFGHRVYKNYDPRAKIMQQTCHEVLKELNIQNDPLLDIAITLENIALNDEYFIEKKLYPNVDFYSGITLKALGFPTEMFTVLFALARSVGWVAQWKEMIEDPAQKISRPRQLYTGYAAREYIPIDKRVN

SEQ ID NO: 11687 - protein, 309 aa, Bartonella henselae
DGNEGILLYRGYPIDQLAEKGDFLESCYLLLYGELPTKQEKIDFDRCIMQHTMVHEQFARFFHGFRRDSHPMAVMIACLGAMSAFYHDSIDITDPQQRMIASIRLISKVPTLAAMAYKYSIGQAFVYPRNDLSYAANFLRMCFSVPCEEYKINPVLTRAMDRIFTLHADHEQNASTSTVRLAGSSGANPFACIAAGVACLWGPAHGGANEACLKMLQEIGSVERIPEFIARAKDKNDSFRLMGFGHRVYKNYDPRAKIMQQTCHEVLKELNIQNDPLLDIAITLENIALNDEYFIEKKLYPNVDFYSGI

SEQ ID NO: 11688 - protein, 545 aa, Glycine max
  unsure (1)..(545): unsure at all Xaa locations
IHLHIQSFELFHFLQIIPIPQPTKKHHQHNTTMSKTTTSSEQTARNRLATLAAHXASLRPTSAAAILHPHRLSAPTGDLPPANLKGTLTVVDERTGKKYQIEVTPDGTVRASDFKKISSGKNDKGLKLYDPGYLNTAPVISRISYIDGDAGILRYRGYPIEDLAEKSTFTEVSYLILYGNLPSESQLAEWEFALSQHSAVPQGVLDMIESMPHDAHPMGMLVNAMSALSVFHPDANPALKGLDIYNSKQVRDKQIARVIGKITTIAAAINLRLAGRPPVLPSNKLSYTENFLYMLDSFGNRSYKPNPRLTRALDIIFVLHAEHEMNCSTSAVRHLSSSGVDVYTAIAGAVGALYGPLHGGANEAVLKMLSEIGTVENIPAFIEGVKARKRKLSGFGHRVYKNYDPRAKVLRKLTEEVFSIVGRDPLIEIAVALEKIALSDEYFIKRKLYPNVDFYSGLIYRAMGFQPEFFTVLFAIPRMAGYLAHWRESLDDPDTKIMRPQQVYVGEWLRHYAPINQRTASSNTDKLGQLAVSNASKRRLAGSGA

SEQ ID NO: 11689 - protein, 522 aa, Glycine max
  unsure (1)..(522): unsure at all Xaa locations
MHHQHNTTMSKTTTSSEQTARNRLATLAAHXASLRPTSAAAILHPHRLSAPTGDLPPANLKGTLTVVDERTGKKYQIEVTPDGTVRASDFKKISSGKNDKGLKLYDPGYLNTAPVISRISYIDGDAGILRYRGYPIEDLAEKSTFTEVSYLILYGNLPSESQLAEWEFALSQHSAVPQGVLDMIESMPHDAHPMGVLVNAMSALSVFHPDANPALRGLDIYDSKQIRDKQIARVIGKITTIAAAVYLRMAGRPPVLPSNQLSYTENFLYMLDSFGNRSYKPNPRLTRALDIIFILHAEHEMNCSTSAVRHLSSSGVDVYTAIAGAVGALYGPLHGGANEAVLKMLSEIGTVENIPAFIEGVKARKRKLSGFGHRVYKNYDPRAKVLRKLTEEVFSIVGRDPLIEVXAVALEKIALSDEYFIKRKLYPNVDFYSGLIYRAMGFQPEFFTVLFAIPRMAGYLAHWRESLDDPDTKIMRPQQVYVGEWLRHYAPINQRTASSNTDKLGQLAVSNASKRRLAGSGA

SEQ ID NO: 11690 - protein, 360 aa, Glycine max
  unsure (1)..(360): unsure at all Xaa locations
MSSNSDAAAATVHAHGRLAMLAAHLLPSQLTHPAPSTLSIXSSQLPPPPNLAGTLTVVDERTGKKYQLHVSKEGTVKASEFKKILTGKNDKGLKLYDPGYLNTAPVRSTISYIDGDEGILRYRGYPIEELADKSTFTEVSYLIMYGSLPSESQLAEWEFAISQHSAVPQGVLDMIQSMPHDAHPMGVLVNAMSALSVFHPDANPALRGLDIYDSKQIRDKQITRVIGKITTIAAAVYLRMAGRPPVLPSNHLSYTENFLYMLDSFGNRSYKPNPRLTRVLDIIFILHAEHEMNCSTSAVRHLASSGVDVYTAIAGXAVGALYGPLHGGANEAVLXXLSEIGTVQXIXRXIESVKARKRKX

SEQ ID NO: 11691 - protein, 132 aa, Glycine max
  unsure (1)..(132): unsure at all Xaa locations
EEVFSIVGRDPLIEVAVXALEKVALSDEYFIKRKLYPNVDFYSGLIYRAMGFPPEYFTVLFAIPRMAGYLAHWRESLDDPDTKILRPQQVYVGEWLRHYTQVNVRTTSSDADKLGEVAISNASKRRLAGSGV

SEQ ID NO: 11692 - protein, 484 aa, Glycine max
  unsure (1)..(484): unsure at all Xaa locations
MAFFRSVSALSRLRSRVGQQSNLANSVRWLQTPSSSNTDLYSELKELVPEYQERVKKLKKDHGSVELGKITVDMVLGGMRGMTALVWLGSAVDPDEGIRFRGMSIPECQKKLPGAFPGGEPLPEAVLWLLLTGKIPSKAQVDSLSKELRSRATIPDYAYKAIDALPVSAHPMTQFTTGVMALQVQSEFQKAYEGGIAKARYWEPTYEDTMNLIARLPAIAAYIYRRKYKDGKIIPLDDSLDYGANYAHMLGFDDPEMLEFMRLYISIHSDHEGGNVSSHTAHLVASPLSDPYLAFAAALNGLAGPLHGLANQEVLRWIRSIVAEFGTPNISTEQLADYINKTLSRGQVVPGYGHGVLRQTDPRYTCQREFALKHLPNDPYFQLVSKIKEVVPPILTKLGKVKNPWPNVDAHSGVLLNYYGLTEENYYTVLFGVSRSFGVGPQLIWDRALGMPLERPKSVTLEKLEQLVAKSSXNLKRHFSVNNF

SEQ ID NO: 11693 - protein, 146 aa, Glycine max
  unsure (1)..(146): unsure at all Xaa locations
XSSRANQTYRKPRTRGKQVARVWGKITTIAAAINLRLAGRPPVLSSNKLSYTENFLYMLDSFGNRSYKPNPRLTRALDIIFILHAEHEMNCSTSAVRHLLSSGXVDVYTAIAGXAVGALYGPLHGGANEXAVLKMXLSENGTAENX

SEQ ID NO: 11694 - protein, 137 aa, Glycine max
  unsure (1)..(137): unsure at all Xaa locations
XCSYLRMAGRPPVLPSNHLSYTXXNFLYMLDSFGNRSYKPNPRLTRVLDIIFILHAEHEMNCSTSAVRHLASSGVDVYTAIAGAVGALYGPLHGGANEVAISSXXSSHDLLCIARLNIVNKHKHYTVIXYGNMLMXX

SEQ ID NO: 11695 - protein, 203 aa, Glycine max
  unsure (1)..(203): unsure at all Xaa locations
MSKTTTSSSEQTARNRLATLAAHLLPSDAXPPPPRSSAXHRLSAPAGSSPPVNLKGTVTVVDERTGKKYQIEVTPDGTVRASDFKKISTGKNDKGLKLYDPGYLNTAPVISRISYIDGDAGILRYRGYPIEDLAEKSSFMEVSYLIRXXIQSMPHDAHPXGMLVNAMSALSVYHPEANPALKGLDIYNSKQVRNKQVARGIGX

SEQ ID NO: 11696 - protein, 429 aa, Rhizobium tropici
MTEQSAKLTWGEKTVDLPVKTGTIGPSVIDIGALYKNTSTFTYDPGFTSTASCESSITFIDGDEGVLLHRGYPIEQLAEHGDFLEVCYLLLYGELPTAAQKKDFDYRVVHHTMVHEQMSRFFTGFRRDAHPMAVMCGCVGALSAFYHDSTDITDPHQRMVASLRMIAKMPTLAAMAYKYHIGQPFVYPKNDLDYASNFLRMCFAVPCEEYVVNPVLARAMDRIFILHADHEQNASTSTVRLAGSSGANPFACIAAGIACLWGPAHGGANEAALNMLTEIGTVDRIPEYIARAKDKNDPFRLMGFGHRVYKNYDPRAKIMQKTAHEVLGELGIKDDPLLDIAIELERIALTDDYFIEKKLYPNVDFYSGITLKALGFPTTMFTVLFALARTVGWIAQWNEMIEDPDQRIGRPRHVYTGAPLREYVPVSKR

SEQ ID NO: 11697 - protein, 429 aa, Rhizobium tropici
MDNNNACVLVDGHSAELKLRSSTIGPNVLGIGSLYEQTKMFTYDPGFTSTASCESSITFIDGDEGVLLHRGYPIEQLAEHGDFLEVCYLLLYGELPTAAQKKDFDYRVVHHTMVHEQMSRFFTGFRRDAHPMAVMCGCVGALSAFYHDSTDITDPHQRMVASLRMIAKMPTLAAMAYKYHIGQPFVYPKNDLDYASNFLRMCFAVPCEEYVVNPVLARAMDRIFILHADHEQNASTSTVRLAGSSGANPFACIAAGIACLWGPAHGGANERALNMLTEIGTVDRIPEYIARAKDKNDPFRLMGFGHRVYKNYDPRAKIMQKTAHEVLGELGIKDDPLLDIAIELERIALTDDYFIEKKLYPNVDFYSGITLKALGFPTTMFTVLFALARTVGWIAQWNEMIEDPDQRIGRPRQLYTGAPLREYVPLSKR

SEQ ID NO: 11698 - protein, 493 aa, Oryza sativa (japonica cultivar-group)
MQSASDLDLKSQLQELIPEQQDRLKKLKSEHGKVQLGNITVDMVLGGMRGMTGMLWETSLLDPDEGIRFRGLSIPECQKVLPTAVKDGEPLPEGLLWLLLTGKKIKNIVTDTYRDYGVFVPTKLYSASTINTPSFLYNVPPDGSLGCITNLCFCKHTACYPLTYLALIRLTYDTDAGHVYEAIDALPVTAHPMTQFTTGVMALQVESEFQKAYDKGMSKSKFWEPTYEDCLNLIARLPAVASYVYRRIFKGGKTIAADNALDYAANFSHMLGFDDPKMLELMRLYITIHTDHEGGNVSAHTGHLVGSALSDPYLSFAAALNGLAGPLHGLANQEVLLWIKSVIGETGSDVTTDQLKEYVWKTLKSGKVVPGFGHGVLRKTDPRYTCQREFALKYLPEDPLFQLVSKLYEVVPPILTELGKVKNPWPNVDAHSGVLLNHFGLSEARYYTVLFGVSRSIGIGSQLIWDRALGLPLERPKSVTMEWLENHCKKVAA

SEQ ID NO: 11699 - protein, 472 aa, Daucus carota
MVFFRSVSLLNKLRSRAVQQSNLSNTVRWFQVQTSASDLDLRSQLKELIPEQQERIKKLKAEHGKVQLGNITVDMVLGGMRGMTGLLWETSLLDPEEGIRFRGLSIPECQKLLPGAKPGGEPLPEGLLWLLLTGKVPTKEQVDALSAELRSRAAVPEHVYKTIDALPVTAHPMTQFATGVMALQVQSEFQKAYEKGIHKTKYWEPTYEDSITLIAQLPVVAAYIYRRMYKNGQSISTDDSLDYGANFAHMLGYDSPSMQELMRLYVTIHTDHEGGNVSAHTGHLVASALSDPYLSFAAALNGLAGPLHGLANQEVLLWIKSVVSECGENVTKEQLKDYIWKTLNSGKVVPGYGHGVLRNTDPRYICQREFALKHLPDDPLFQLVSNLFEVVPPILTELGKVKNPWPNVDAHSGVLLNHYGLTEARYYTVLFGVSRAIGICSQLVWDRALGLPLERPKSVTMEWLENHCKKSS

SEQ ID NO: 11700 - protein, 309 aa, Bartonella vinsonii subsp. berkhoffii
ITYIDGNKGVLLYRGYPIEQLAEKGDFLESCYLLLYGELPTQQEKSDFDRCIMQHTMVHEQFARFFHGFRRDSHPMAVMVACLGAMSAFYHDSIDIIDPQQRMIASVRLISKVPTLAAMAYKYSIGQAFVYPRNDLSYAANFLRMCFSVPCEEYKTNPVLTRAMDRIFILHADHEQNASTSTVRLAGSSGANPFACIAAGVACLWGPAHGGANEACLKMLLEIGSVKRIPEFIARAKDKNDPFRLMGFGHRVYKNYDPRAKIMQKTCHEVLKELNIQNDPLLDIAIELEKIALNDEYFVEKKLYPSVDF

SEQ ID NO: 11701 - protein, 112 aa, Bartonella vinsonii subsp. berkhoffii
ANEACLKMLLEIGSVKRIPEFIARAKDKNDPFRLMGFGHRVYKNYDPRAKIMQKTCHEVLKELNIQNDPLLDIAIELEKIALNDEYFVEKKLYPNVDFYSGITLKALGFPTE

SEQ ID NO: 11702 - protein, 469 aa, Nicotiana tabacum
MVFYRGVSLLSKLRSRAVQQTNLSNSVRWLQVQTSSGLDLRSELQELIPEQQDRLKKLKSEHGKVQLGNITVDMVLGGMRGMTGLLWETSLLDPDEGIRFRGLSIYECQKVLPAAKPGGEPLPEGLLWLLLTGKVPSKEQVDSLSQELRSRATVPDHVYKTIDALPVTAHPMTQFATGVMALQVQSEFQKAYEKGIHKSKLWEPTYEDSMSLIAQVPLVAAYVYRRMYKNGNTIPKDDSLDYGANFAHMLGFSSSDMHELMKLYVTIHSDHEGGNVSAHTGHLVASALSDPYLSFAAALNGLAGPLHGLANQEVLLWIKSVVEECGENISKEQLKDYAWKTLKSGKVVPGFGHGVLRKTDPRYTCQREFALKHLPEDPLFQLVAKLYEVFLQFLQNLAKLNPWPNVDAHSGVLLNYYGLTEARYYTVLFGVSRALGICSQLIWDRALGLPLERPKSVTMEWLENHCKKA

SEQ ID NO: 11703 - protein, 471 aa, Solanum tuberosum
MVFYRSVSLLSKLRSRAVQQSNVSNSVRWLQVQTSSGLDLRSELVQELIPEQQDRLKKIKSDMKGSIGNITVDMVLGGMRGMTGLLWKPHYLDPDEGIRFRGLSIPECQKVLPAAKPGGEPLPEGLLWLLLTGKVPSKEQVNSIVSGIAESGIISLIIMYTTIDALPVTAHPMTQFATGVMALQVQSEFQKAYEKGIHKSKYWEPTYEDSMNLIAQVPLVAAYVYRRMYKNGDTIPKDESLDYGANFAHMLGFSSSEMHELLMRLYVTIHSDHEGGNVSAHTGHLVASALSDPYLSFAAALNGLAGPLHGLANQEVLLWIKSVVEECGENISKEQLKDYVWKTLNSGKVVPGFGHGVLRKTVPRYTCQREFAMKHLPEDPLFQLVSKLYEVFLLFLQNLAKLKPWPNVDAHSGVLLNYYGLTEARYYTVLFGVSRALGICSQLIWDRALGLPLERPKSVTMEWLENQCKKA

SEQ ID NO: 11704 - protein, 106 aa, Rickettsia felis
NMLKEIGSSENIPKYIAKAKDKNDPFRLMGFGHRVYKNYDPRAAVLKETCKEVLKELGQLENNPLLQIAIELEAIALKDEYFIERKLYPNVDFYSGIIYKAMGIPS

SEQ ID NO: 11705 - protein, 436 aa, Acetobacter aceti
MSASQKEGKLSTATISVDGKSAEMPVLSGTLGPDVIDIRKLPAQLGVFTFDPGYGETAACNSKITFIDGDKGVLLHRGYPIAQLDENASYEEVIYLLLNGELPNKVQYDTFTNTLTNHTLLHEQIRNFFNGFRRDAHPMAILCGTVGALSAFYPDANDIAIPANRDLAAMRLIAKIPTIAAWAYKYTQGEAFIYPRNDLNYAENFLSMMFARMSEPYKVNPVLARAMNRILILHADHEQNASTSTVRLAGSTGANPFACIAAGIAALWGPAHGGANEAVLKMLARIGKKENIPAFIAQVKDKNSGVKLMGFGHRVYKNFDPRAKIMQQTCHEVLTELGIKDDPLLDLAVELEKIALSDDYFVQRKLYPNVDFYSGIILKAMGIPTSMFTVLFAVARTTGWVSQWKEMIEEPGQRISRPRQLYIGAPQRDYVPLAKR

SEQ ID NO: 11706 - protein, 372 aa, Legionella pneumophila
MSSKSGGLAGVVAGQSAIATVGLAGKGLNYRGYSINDLAEYASFEEVAYLLHYGELPTQKELDVYIKKLVNLRHIPDVLKTVLKLIPKNTHPMDVLRTACSFLGTIEPEENFKQQYEIADRLLALFPGIMCYWYTYHFKNKEISGLSEENTTGGHFLALLHGRKPSKIETDMMNVSLILYAEHEFNASTFAARVTAATLADFYSAITSAIGTLRGPLHGGANEAAMELIERFKTPDEAAIGIKQMLASKELIMGFGHRVYTTCDPRSDIIKKWSFRLGEEKGNLLLYHISERIEEIMWQEKKLFPNLDFYSASAYHYCDIPTHLFTPIFVMSRITGWSAHVFEQRANNKLIRPTSEYIGPDSRPFPAIETRG

SEQ ID NO: 11707 - protein, 492 aa, Dictyostelium discoideum
MAHIDRINILANHLSKEEEEENELLTSPVSADKKKETVTVTDNRNGKSYDFKIKNDTINALNFKELQLAKGDGGLMIYDPGFQNTAVVTSYITYIDGDKGILRYRGYPIEELAERSNFLEVAYLLINGNLPNKSQLDGWSNKIMTHTFLHENLVGLMKTFRYDAHPMGMLISTVAALGTFYPEANPALAGGDIFKSENVRNKQIYRIVGKLPTIAACAWRHRIGRPYNTPVNHLGYTENFLYMLDKLSEPDYKPNPVLCRALEILFILHADHELNCSTAAMRHISSSGTDPYTSVAGAAGALYGPSHGGANEAVLDMLIHIGSKENIPQFISDVKSKKKKLMGFGHRIYKNYDPRAKIIRRVAYEVFESLGKEPLIEVATELEKQALEDEYFVSRKLYPNVDFYSGLIYKAMGFPTDMFPVLFTIPRAVGWLAHWVEHLEDPETKIYRPRQVYKGEWFRNYVPIDGRPPAKVRSQDSYSSATTKRYSKVTSH

SEQ ID NO: 11708 - protein, 512 aa, Dictyostelium discoideum
MSSNSQEDNNKTTEKKNTLTVIDNRTGKSYEIPINHETVKSIDFRAIKEQSIDFGTMIYDPGYYNTAVCKSQITYIDGDRGILEYRGYPIEQLAEKSSFLEVSYLLIYGDLPSKEQSNLWNTKIMNHTFIHENLISMMKSFRYDAHPMGMLISSLSAMSTFYPEANPALAGVDIYKNKQLMNKQIFRILGKLPTIAACAYRHRIGRPYNDPSNTLSYTENFLYMLDRLSESNYKPHPVLTRALDKLFIIHADHELNCSTATMRQIASTLVDPYTACAGSAGALYGPLHGGANEAVLRMLEAIGTIENIPKFIEQVKQKKQRLMGFGHRVYKSYDPRAKILKTVTMEIFALLGKNPLMQIATELERLALSDSYFIERQLYPNVDFYSGIIYKSMGFPTDMFPVLFSIPRAAGWLAHWVEELADPELRIFRPRQIYMGRRNMNYVPMDARQVQQHNSGEKLSSFSSGFDRRRDVSEELFNFEDGAIPKTATGSKSQLSASIEQSFGEKISPQSH

SEQ ID NO: 11709 - protein, 247 aa, Dictyostelium discoideum
ASTLVDPYTACAGSAGALYGPLHGGGNEAVLRMLEAIGTIENIPKFIEQVKQKKQRLMGFGHRVYKSYDPRAKILKTVTMEIFALLGKNPLMQIATELERLALSDSYFIERQLYPNVDFYSGIIYKSMGFPTDMFPVLFSIPRAAGWLAHWVEELADPELRIFRPRQIYMGRRNMNYVPMDARQVQQHNSGEKLSSFSSGFDRRRDVSEELFNFEDGAIPKTATGSKSQLSASIEQSFGEKISPQSH

SEQ ID NO: 11710 - protein, 460 aa, Dictyostelium discoideum
MFARLARANYLKNSGKYFSTEPTLKERLVQIIPGKIEQVKQLKTEHGDKIIGTCTVAQAYGGMRSVKSLVTETSSLDPEEGIRFRGLTIPECQEKLPKAPGGAEPLPEGILWLLLTGEVPTESQVKTLSKDLAKRAGLPKHVTSMIKAFPEQMHPMSQLAAAILALQGESKFVKAYNDGVKKDKYWESTLEDSLDVIAKLPEVAALIYQNTYKKSDITHKIDENLDWSANFNRMLGYTSKDFDELMRLYLTIHTDHEGGNVSAHTTHLVGSALSDSYLSLSAGMCGLAGPLHGLANQEVLSWTMKLQEKLGNKEVSNEVLSEAIWEGLNAGRVVPGFGHAVLRKTDPRYTCQREFALKHLPQDPLFKLVSQIYEVVPDILTKHGKTKNPYPNVDAHSGCLLQYYGLKEHNFYTVLFGVSRAIGVLSSLVWDRILGHPIERPKSVTTEWISIYLISDQSKK

SEQ ID NO: 11711 - protein, 411 aa, Israeli tick typhus rickettsia
DSEFAELKIRGKIFKLPILKASIGEDVIDISRVSAEADCFTYDPGFMSTASCQSTITYIDGDKGILRYRGYDIKDLAEKSDFLEVAYLLIYGELPSGEQYNNFTKQVAHHSLVNERLHYLFQTFCSSSHPMAIMLAAVGSLSAFYPDLLNFKEADYELTAIRMIAKIPTIAAMSYKYSIGQPFIYPDNSLDFTENFLHMMFATPCTKYTVNPIIKNALNKIFILHADHEQNASTSTVRIAGSSGANPFACISTGIASLWGPAHGGANEAVINMLKEIGSSEYIPKYIAKAKDKNDPFRLMGFGHRVYKNYDPRAAVLKETCKEVLKALGQLDNNPLLQIAIELEAIALKDEYFIERKLYPNVDFYSGIIYKAMGIPSQMFTVLFVIARIVGWMAQWKEMHEDPEQKISRPR

SEQ ID NO: 11712 - protein, 541 aa, Oryza sativa
  unsure (1)..(541): unsure at all Xaa locations
FPQSGSQTQTNPNLQPNADESSKQPPPAPTSAXALLSSPMDRARLAVLSAHLASPAXPPAGRRTRRGRXERSAASAGARGGALAVVDGRTGKRYEVKVSDEGTVRATDFKKITTGKDDKGLKIYDPGYLNTAPVRSSICYIDGDEGILRYRGYPIEELAESSSFVEVAYLLMYGSLPTQSQLAGWEFAISQHSAVPQGLLDIIQAMPHDAHPMGALASAMSTLSVFHPDANPALRGQDLYKSKQVRDKQIVRVLGKAPTIAAAAYLRLAGRPPILPTNSLSYSENFLYMLDSLGDKEYKPNPRLARVLDILFILHAEHEMNCSTAAARHLASSGVDVFTALSGAVGALYGPLHGGANEAVLKMLNEIGSVENIPDFIEGVKNRKRKMSGFGHRVYKRYDPRAKVIRKLAEEVFSIVGRDPLIEVAVALEKAALSDDYFVKRKLYPNVDFYSGLIYRAMGFPTEFFPVLFAIPRXMAGWLAHWKESLDDPDTKIMRPQQVYTGVWLRHYTPVRERVPASQGEQLGQIATSNATRRRRAGSAL

SEQ ID NO: 11713 - protein, 923 aa, Oryza sativa
  unsure (1)..(923): unsure at all Xaa locations
XAVQEYKRLMPGRIIGVSVDSSGKPALRMAMQTREQHIRRDKATSNICTAQALLANMAAMYAVYHGPEGLKAIADRVHGLAGTFAQGLKKLGTVTVQELPFFDTVKVKVADANAIAQEACKNEMNLRVVDATTITVAFDETTTLEDVDKLFKVFNGGKPVNFTAESLAPEVSSSIPSSLVRKSPYLTHPIFNMYHTEHELLRYLYKLQSKDLSLCHSMIPLGXSCTMKLNATVEMMPVTYPNFANMHPFAPTDQAAGYHEMFDDLGDLLCKITGFDSFSLQPNAGASGEYAGLMVIRAYHRARGDYHRDVCIIPVSAHGTNPASAAMCGMKIVAVGTDSKGNINIEELRKAAEANKDNLAALMVTYPSTHGVYEEGIDEICMIIHENGGQVYMDGANMNAQVGLTSPGFIGADVCHLNLHKTFCIPHGGGXGPGMGPIGVKKHLAPFLPSHPVITTGGFPLPEKTDPLGTISAAPWGXSALILPISYTYIAMMGSKGLTDASKIAILNANYMTKRLEKHYPVLFRGVNGTVAHEFIIDLRGFKTTAGIEPEDVAKRLMDYGFHAPTMSWPVPGTLMIEPTESESKAXELDRFCDALISIREEIAEIESGKADVNNNVLKSAPHPPQLLMSDSWTKPYSREYAAFPAAYLRLAGRPPILPTNSLSYSENFLYMLDSLGDKEYKPNPRLARVLDILFILHAEHEMNCSTAAARHLASSGVDVFTALSGAVGALYGPLHGGANEAVLKMLNEIGSVENIPDFIEGVKNRKRKMSGFGHRVYKNYDPRAKVIRKLAEEVFSIVGRDPLIEVAVALEKAALSDDYFVKRKLYPNVDFYSGLIYRAMGFPTEFFPVLFAIPRMAGWLAHWKESLDDPDTKIMRPQQVYTGVWLRHYTPVRERVPASQGEQLGQIATSNATRRRRAGSAL

SEQ ID NO: 11714 - protein, 476 aa, Oryza sativa
  unsure (1)..(476): unsure at all Xaa locations
GILPPLNRNSCYSSMFARTTPRVRISAPVKKANFGSVSSHSLKQRLQHLIPEKAAEIKNIKDKHGDKLLGTCTVSQAYGGMRGVKAMIYETSLLDADEGIRFRGFTIPEVQQKLPKAPGGAEPLPEGLLWLLLTGEVPTQAQVSELSADLAHRNKVPEWVFKLLKDLPPDMHPMTQFIIAINALQKESLFAQKYQEGMPKSKYWEYALEDSLNLIARLPTVAAAIYRYTYKNGQIIQPDSKLDWSANFSRMLGHNNKQFDDLMRLYLTIHSDHEGGNVSAHATQLVGSALSDPYLAFAAGMCGLAGPLHGLANQEVLRWIVNLKKKFGDRNITNEELKKALWDTLNSGQVVPGFGHAVLRKTDPRYTCQREFALKHLPNDPLFKLVAQLYEVVPGILKEHGKTKNPWPNVDAHSGVLLVHYGMTEENYYTVLFGVSRAIGVLSNLVWTRALGFPLERPKSVTTEWVXKLVSHRPYG

SEQ ID NO: 11715 - protein, 472 aa, Oryza sativa; identical to SEQ ID NO: 480

SEQ ID NO: 11716 - protein, 472 aa, Oryza sativa; identical to SEQ ID NO: 480

SEQ ID NO: 11717 - protein, 493 aa, Oryza sativa; identical to SEQ ID NO: 11698

SEQ ID NO: 11718 - protein, 104 aa, Oryza sativa
VAVALEKAALSDDYFVKRKLAMGFPTEFFPVLFAIPRMAGWLAHWKESLDDPDTKIMRPQQVYTGVWLRHYTPVRERVPASQGEQLGQIATSNATRRRRAGSAL

SEQ ID NO: 11719 - protein, 206 aa, Oryza sativa
  unsure (1)..(206): unsure at all Xaa locations
YXXALTSSFRAHDIQLQVGSALSDPYLSFAAALNGLAGPLHGLANQEVLLWIKSVIGETGSDVTTDQLKEYVWKTLKSGKVVPGFGHGVLRKTDPRYTCQREFALKYLPEDPLFQLVSKLYEVVPPILTELGKVKNPWPNVDAHSGVLLNHFGLSEARYYTVLFGVSRSIGIGSQLIWDRALGLPLERPKSVTMEWLENHCKKVAA

SEQ ID NO: 11720 - protein, 763 aa, Oryza sativa
  unsure (1)..(763): unsure at all Xaa locations
VGSALSDPYLSFAAALNGLAGPLHGLANQEVLLWIKSVIGETGSDVTTDQLKXYVWKTLKSGKVVPGFGHGVLRKTDPXRYTCQREFALKYLPEDPLFQLVSKLYEVVPPILTELGKVKNPWPNVDAHSGVLLNHFGLSEARYYTVLFGVSRSIGIGSQLILRFAPANEAASTALLSARWRSLWRSTGAVNLAVRLPEPDDGRRHGHRVSHDAVSSCHDAFVRSAQAALSAAAAAAGGRGRHVTRLTLDLRAATMDVIDRFVHTERPLGADAAPDTDVWLRLSDDVEREADRWVKRGDVVRDVVSHPAARRVEELRISASAPAVDDDDDDGEVGRLVGVFHLDLRYVPSETLRVLDLSRCSGLRMPPAVETPRLTTLRLQACAVNVNDLQRVIDAAPALATVHLDSVSFDGMEHGCYRLRLPAATTALVLARCRTDAEPYRYRRSGRPLGTSSVEIDAPGLRSFRYAGYARRFSLASPPDMARADLHFFHDMYASASTSRDLFWRFVRSFRGIRSLKLKVSDLKHVAVAGRATRAELLVAFPNVEHLELEGHHESASETAAAVAIGNLLRCCPAARHLALHLATAPPRERDSAMNGRYGRDLLRARQQADLAESLDRFARRRRRKPNPPPPPPPPTPVNSMDEHLSIVGLSGRSFACLKNSLRRFVIQFRMDRPNCIGVKLIKFFAENAIHLEEMRIDGGNQRMHDHINHMVEGWISDSSSAKKRANHESSQGIDATVVDIISMYICEYSEKSGNHLAMEHKP

SEQ ID NO: 11721 - protein, 542 aa, Triticum aestivum
  unsure (1)..(542): unsure at all Xaa locations
SKSRTQPETSKQPLPSLLLLCSSSLQSTLLASHRPIRWTAPXPARGRLAVLSSHLLAAGADPAAXRWXXRSPASAAAPGARAGVLAVVDSRTGKRYEVKVSEDGTVRATDFKKITAGKDDKGLKTYDPGYLNTAPVRSSICYIDGDEGILRYRGYPIEEVAESSSFVEVAYLLMYGNLPTQSQLAGWEFAISQHSAVPQGLLDIIQSMPHDAHPMGVLASAMSTLSVFHPDANPALRGQDLYNSKQVRDKQIVRVLGKAPAIAAAAYLRLAGRPAVLPSNNLSYSENFLYMLDSLGDKEYKPNPRLARVLDILFILHAEHEMNCSTAAVRHLASSGVDVFTALSGAVGALYGPLHGGANEAVLKMLNEIGAVENIPDFIEGVKNRKRKMSGFGHRVYKNYDPRAKVIRKLAEEVFSIVGRDPLIEVAVALEKAALSDEYFIKRKLYPNVDFYSGLIYRAMGFPTEFFPVLFAIPRMAGWLAHWKESLDDPDNKIMRPQQVYTGVWLRHYTPVRERVASNQGEELGQIATSNATRRRRAGSSL

SEQ ID NO: 11722 - protein, 513 aa, Triticum aestivum
  unsure (1)..(513): unsure at all Xaa locations
EAKAVPNXTSKHSLSSLALLVSSPPCSHRTDRSDGPRRSRAGPPPHAPPHPPRGVLAVVDSRTGKRYEVKVSEDGTVRATDFKKITAGKDDKGLKTYDPGYLNTAPVRSSICYIDGDEGILRYRGYPIEEVAESSSFVEVAYLLMYGNLPTQSQLAGWEFAISQHSAVPQGLLDIIQSMPHDAHPMGVLASAMSTLSVFHPDANPALRGQDLYKSKQVRDKQIVRVLGKAPAIAAAAYLRLAGRPAVLPSNNLSDSENFLYMLDSLGNKEYKPNPRLARVLDILFILHAEHEMNCSTAAVRHLASSGVDVFTALSGAVGALYGPLHGGANEAVLKMLNEIGAVENIPDFIEGVKNRKRKMSGFGHRVYKNYDPRAKVIRKLAEEVFSIVGRGPLIEVAVALEKAALSDDYFIKRKLYPNVDFYSGLVNRVLGFPSDFFPVLFAIPRMAGWLAHWKESLDDPDNKIMRPRQVYTGVWLRHYTPVRERVASNQGEELGQIATSNATRRRRAGSSL

SEQ ID NO: 11723 - protein, 472 aa, Triticum aestivum
MAFFRGLAAVSRLRSRMGQDATTLGGVRWLQMQSASDLDLRSQLQEMIPEQQDRLKKLKSEHGKVQLGNITVDMVLGGMRGMTGMLWETSLLDPEEGIRFRGLSIPECQKVLPAAVKDGEPLPEGLLWLLLTGKVPTKEQVDALSKELLSRSTVPGYVYKAIDALPVTAHPMTQFTTGVMALQVESEFQKAYNKGMPKTKFWEPTYEDCLNLISRFPQVASYVYRRIFKDGKAIAADNTLDYAANFSHMLGFDDPKMLELMRLYITIHTDHEGGNVSAHTGHLVGSALSDPYLSFAAALNGLAGPLHGLANQEVLLWIKSVMEETGSNITTDQLKEYVWKTLKSGKVVPGYGHGVLRNTDPRYSCQREFALKYLPEDPLFQLVSKLYEVVPPILTELGKVKNPWPNVDAHSGVLLNHFGLTEARYYTVLFGVSRSIGIGSQLIWDRALGLPLERPKSVTMEWLENHCKKAAA

SEQ ID NO: 11724 - protein, 100 aa, Triticum aestivum
  unsure (1)..(100): unsure at all Xaa locations
XDECLIKRTLDTNVDFDCGLTDRAIGYPTEIVPVLFALPRMAGWLAHCXERLDDPVHKMMRPQQVYAGGWLRHYTPVRERVASNQGEELGQIATSNATRX

SEQ ID NO: 11725 - protein, 529 aa, Zea mays
  unsure (1)..(529): unsure at all Xaa locations
MDRADPARGRLAVLSSHLRXXAGAEEAAGLERSPVSAPAPGPRAGALAVVDGRTGKRHEVQXVSEDGTVRATDFKKITTGKDDKGLKIYDPGYLNTAPVRSSICYIDGDEGILRYRGYPIEELAESSSFVEVAYLLMYGNLXPTQSQLAGWEFAISQHSAVPQGLLDIIQSMPHDAHPQGVLASAMSTLSVFHPDANPALQGQDLYKSKQVRDKQIVRVLGKAPTIAAAAYLRLAGRPPVLPLNTLSYSENFLYMLDSLGDRTYKPNPRLARALDILFILHAEHEMNCSTAAVRHLASSGVDVFTALSGGVGALYGPLHGGANEAVLKMLNEIGSMENIPDFIVGVKNRKRKMSGFGHRVYKNYDPRAKVIRKLADEVFSIVGRDPLIEVAIALEKAALSDEYFIKRKLYPNVDFYSGLIYRAMGXFPTEFFPVLFAIPRMGGWLAHWKESLDDPDTKIIRPQQVYTGFWXLRHYTPVRERVLSSQSXXELGQVATSNATRRRRAGSALXKLQRINAPAYSINIDHFCA

SEQ ID NO: 11726 - protein, 299 aa, Zea mays
  unsure (1)..(299): unsure at all Xaa locations
XLEPAERTTSALHPVWASAFAWLLLPXSHRPTRSRAMDRAGALAVVDGRTGKRHEVKVSEDGTVRATDFKKITTGKDDKGLKIYDPGYLNTAPVRSSICYIDGDEGILRYRGYPIEELAESSSFVEVAYLLMYGNLPTQSQLAGWEFAISQHSAVPQGLLDIIQSMPHDAHPMGVLASAMSTLSVFHPDANPALQGQDLYKSKQVRDKQIVRVLGKAPTIAAAAYLRLAGRPPVLPLNTLSYSENFLYMLDSLGDRTYKPNPRLARALDILFILHAEHEMNCSTAAXRHLASSSNEVYY

SEQ ID NO: 11727 - protein, 230 aa, Zea mays
  unsure (1)..(230): unsure at all Xaa locations
TSHXTDPMDRAGVLAVVDSRTGKRYEVKVSEDGTVRATDFKKITAGKDDKGLKTYDPGYLNTAPVRSSICYIDGDEGILRYRGYPIEEVAESSSFVEVAYLLMYGNLPSQSQLAAWGFAISQHSAVPQGLLDIIQSMPHDAHPMGVLASAMSTLSVFHPDANPALRGQDLYNSKQVRDKQIVRVLGKAPAIAAAAYLRLAGRPAVLPSKNLSYSQNXLDMLDSLGDQKYX

SEQ ID NO: 11728 - protein, 474 aa, Zea mays
  unsure (1)..(474): unsure at all Xaa locations
MAFYRGLTAVSRLRSRMAQEATTLGGVRWLQMQSASDLDLKSQLQELIPEQQDRLKKLKSEHGKTQLGNITVDMVLGGMRGMTGMLWETSLLDPEEGIRFRGLSIPECQKVLPTAVKGGEPLPEGLLWLLLTGKVPTKEQVDALSKELLARSTVPAHVYKTIDALPVDAHPMTQFTTGVMALQVESEFQKAYDNGLPKSKFWEPTYEDCLNLIARLPPVASYVYRRIFKSGKSIEADNSLDYAANFSHMLGFDDQKMLELMRLYVTIHTDHEGGNVSAHTGHLVGSALSDPYLSFAAALNGLAGPLHGLANQEVLLWIKSVIEETGSGVTTDQLKDYVWKTLKSGKVVPGFGHGVLRKTXDPRYSCQREFALKHLPEDPLFQLVSKLYEVVPPILTELGKVKNPWPNVDAHSGVLLNHFGLSEARYYTVLFGVSRSMGIGSXQLIWDRALGLPLERPKSVTMEWLENYCKNKAA

SEQ ID NO: 11729 - protein, 472 aa, Zea mays
MAFFRGLTAVSRLRSRMAQEATTLGGVRWLQMHSASELDLKSQLRELIPEQQDRLKKLKSEHGKVQLGNITVDMVLGGMRGIIGMLWETSLVDPEEGIRFRGLSIPECRKVLPTAVEGGEPLPEGLLWLLLTGKVPTKDQVDALSKELLARSTVPAHVYKVIDALPVTAHPMTQFTAGIMALQVESEFQKAYGNGLPKSKLWEPTYEDCLNLIARLPPVASYVYRRIFKDGKSIEADDSLDYAANLSHMLGFDDPRMLELMRLHVTIHADHEGGNISSHTGHLVGSALSDPYLSFASSVNGLAGPLHGLANQEALLWLKSIIQETGSDVTTDQLKDYVWKTLKSGKVVHGFGHGVLRRTDPRYLCQREFALKYLPEDPLFQLLSKLYEVVPPILTELGKVKNPWPNVDAHSGLLLNHFGLSETRYHTVLFGVSRSMGVGSQLIWDRALGLPLERPKSVTMEWLENYCKNKAA

SEQ ID NO: 11730 - protein, 473 aa, Zea mays
  unsure (1)..(473): unsure at all Xaa locations
MAFFRGLTAVSRLRSRMAQEATTLGGVRWLQMQSASDLDLKSQLQELIPEQQDRLKKLKSEHGKVQLGNITVDMVLGGMRGMIGMLWETSLLDPEEGIRFRGLSIPECQKVLPTAVKGGEPLPEGLLWLLLTGKVPTKXEQVDALSKELLERSTVPAHVYKAIDALPVTAHPMTQFTTGVMALQVESEFQKAYDNGLPKSKFWEPTYEDCLNLIARLPPVASYVYRRIFKGGKSIETDNSLDYAANFSHMLGFDDPKMLELMRLYVTIHTDHEGGNVSAHTGHLVGSALSDPYLSFAAALNGLAGPLHGLANQEVLLWIKSVIQETGSDVTTDQLKEYVWKTLKSGKVVPGFGHGVLRKTDPRYSCQREFALKHLPEDPLFQLVSKLYEVVPPILTELGKVKNPWPNVDAHSGVLLNHFGLSEARYYTVLFGVSRSMGIGSQLIWDRALGLPLERPKSVTMEWLENYCKNKAA

SEQ ID NO: 11731 - protein, 472 aa, Zea mays
  unsure (1)..(472): unsure at all Xaa locations
MAFFRGLTAVSRLRSRMMQSASDLVGQLVFLLLYIARKDDLKSQLRELIPEQQDRLKKLKSEHGKVQLGNITVDMVLGGMRGIIGMLWETSLVDPEEGIRFRGLSIPECRKVLPTAVEGGEPLPEGLLWLLLTGKVPTKDQVDALSKELLARSTVPAHVYKVIDALPVTAHPMTQFTAGIMALQVESEFQKAYGNGLPKSKLWEPTYEDCLNLIARLPPVASYVYRRIFKDGKSIEADNSLDYAANLSHMLGFDDPRMLELMRLHXDHEGGNISSHTGHLVGSALSDPYLSFASSVNGLAGPLHGLANQEALLWLKSIIQETGSDVTTDQLKDYVWKTLKSGKVVHGFGHGVLRRTDPRYLCQREFALKYLPEDPLFQLLSKLYEVVPPILTELGKVMWXKNPWPNVDAHSGLLLNHFGLSETRYHTVLFGVSRSMGVGSQLIWDRALGLPLERPKSVTMEWLENYCKNKAA

SEQ ID NO: 11732 - protein, 480 aa, Zea mays
  unsure (1)..(480): unsure at all Xaa locations
MAFYRGXLTAVSRLRSRMAQEATTLGGVRWLQMQSASDLDLKSQLQELIPEQQDRLKKLKSEHGKTQLGNITVDMVLGGXMRGMTGMLWETSLLDPEEGIRFRGLSIPECQKVLPTAVKGGEXPLPEGLLWLLLTGKVPTKEQVDALSKELLGALNXVPAHVYKTIDALPVDAHPMTQFTXTGVMALQVESEFXQKAYDNGLPKSKFWEXPTYEDCLXNLIARLPPVASYVYRRIFQSGKSIEADNSLDYAANFSHMLGFDDPKMLELMRLYVTIHTDHEGGNVSAHTGHLVGSALSDPYLSFAAALNGLAGPLHGLANQEVLLWIKSVIEETGSGVTTDQLKDYVWKTLKSGKVVPGFGHGVLRKTDPRYSCQREFALKHLPEDPLFQLVSKLYEVVPPILTELGKVKNPWPNVDAHSGVLLNHFGLSEARYYTVLFGVSRSMGIGSQLIWDRALGLPLERPKSVTMEWLENYCKNKAA

SEQ ID NO: 11733 - protein, 476 aa, Zea mays
  unsure (1)..(476): unsure at all Xaa locations
MAFFRGLTAVSRLRSRMAQEATTLGGVRWLQMQSASDLDLKSQLQELIPEQQDRLKKLKSEHGKVQLGNITVDMVLGGMRGMIGMLWETSLLDPEEGIRFRGLSIPECQKVLPTAVKGGEPLPEGLLWLLLTGKVPTKEQVDALSKELLARSTVPAHVYKAIDALPVTAHPMTQFTXTGVMAXLQVESEFQKAYDNGLPKSKFWEPTYEDCLNMIARLPPVASYVYRRIFKGGKSIETDNSLDYAANFSHMLGFDDPKMXLELMRLYVTIHTDHEGGNVSAHTGHLVGSALSDPYLSFAAALNGLAGPXLHGLANQEVLLWIKSVIQETGSDVTTDQLKEYVWKTLKSGKVVPGFGHGVLRKTDPRYSCQREFALKHLPEDPLFQLVSKLYEVVPPILTELGKVKNPWPNVDAHSGVLLNHFGLSEARYYTVLFGVSRSMGIGSQLIWDRALGLPLERPKSVTMEWLENYCNNKAA

SEQ ID NO: 11734 - protein, 247 aa, Zea mays
  unsure (1)..(247): unsure at all Xaa locations
HWVPRGRPGPLXXDKDYSFXLANQLGFAENKDFVELMRLYLTIHTDHEGGNVSAHTTHLVGSALSSPYLSLAAGLNGLAGPLHGLANQEVLVWLQKMKKAIGNDLSDQAIKDYLWSTLKAGQVVPGYGHAVLRKTDPRYVSQREFAQKHLPDDPMFKLVSQVYKIAPGVLTEHGKTKNPYPNVDAHSGVLLQYYGLTEQNYYTVLFGVSRALGVLPQLIIDRAVGAPIERPKSFSTEAYAKLVGAKL

SEQ ID NO: 11735 - protein, 207 aa, Zea mays
  unsure (1)..(207): unsure at all Xaa locations
XCFSDHEGGNISSHTGHLVGSALSDPYLSFASSVNGLAGPLHGLANQEALLWLKSIIQETGSDVTTDQLKDYVWKTLKSGKVVHGFGHGVLRRTDPRYLCQREFALKYLPEDPLFQLLSKLYEVVPPILTELGKVKNPWPNVDAHSGLLLNHFGLSETRYHTVLFGVSRSMGVGSQLIWDRALGLPLERPKSVTMEWLENYCKNKAA

SEQ ID NO: 11736 - protein, 319 aa, Bartonella sp.
ITYIDGDKGVLLYRGYPIDQLAEKGDFLESCYLLLYGELPTKQEKNDFDRCIMQHTMVHEQFARFFHGFRRDSHPMAVMVACLGAMSAFYHDSIDITDPQQRMIASVRLISKVPTLAAMAYKYSIGQAFVYPRNDLSYAANFLRMCFSVPCEEYKTNPVLTRAMDRIFILHADHEQNASTSTVRLAGSSGANPFACIAAGVACLWGPAHGGANEACLKMLQEIGDVKRIPEFIARAKDRNDPFRLMGFGHRVYKNYDPRAKIMQKTCHEVLKELNIQDDPLLDIAIELEKIALNDEYFVEKKLYPNVDFYSGITLKALG

SEQ ID NO: 11737 - protein, 318 aa, Bartonella sp.
ITYIDGDKGVLLYRGYPIDQLAEKGDFLESCYLLLYGELPTKQEKNDFDRCIMQHTMVHEQFARFFHGFRRDSHPMAVMVACLGAMSAFYHDSIDITDPQQRMIASVRLISKVPTLAAMAYKYSIGQAFVYPRNDLSYAANFLRMCFSVPCEEYKTNPVLTRAMDRIFILHADHEQNASTSTVRLAGSSGANPFACIAAGVACLWGPAHGGANEACLKMLQEIGSVKRIPEFIARAKDRNDPFRLMGFGHRVYKNYDPRAKIMQKTCHEVLKELNIQDDPLLDIAIELEKIALNDEYFVEKKLYPNVDFYSGITLKAL

SEQ ID NO: 11738 - protein, 322 aa, Bartonella sp.
TYIDGDKGLLLYRGYPIDQLAEKGDFLESCYLLLYGELPTKQEKNDFDRCIMQHTMVHEQFARFFHGFRRDSHPMAVMVACLGAMSAFYHDSIDITDPQQRMIASVRLISKVPTLAAMAYKYSIGQAFVYPRNDLSYAANFLRMCFSVPCEEYKTNPVLTRAMDQIFILHADHEQNASTSTVRLAGSSGANPFACIAAGVACLSGPAHGGANEACLKMLQEIGSVKRIPEFIARAKDKNDPFRLMGFGHRVYKNYDPRAKIMQKTCHKVLKELNIQDDPLLDIAIELEKIALNDEYFVEKKLYPNVDFYSGITLKALGFPTE

SEQ ID NO: 11739 - protein, 321 aa, Bartonella sp.
YIDGNAGVLLYRGYPIDQLAEKGDFLESCYLLLYGELPTKQEKNDFDRCIMQHTMVHEQFARFFHGFRRDSHPMAVMVACLGAMSALYHDSIDITDPQQRMIASVRLISKVPTLAAMAYKYSIGQAFIYPRNDLSYAANFLRMCFSVPCEEYKTNPVLTRAMDRIFILHADHEQNASTSTVRLAGSSGANPFACIAAGVACLWGPAHGGANEACLKMLQEIGSVERIPEFIARAKDKNDPFRLMGFGHRVYKNYDPRAKIMQKTCHEVLKELNIQDDPLLDIAIELEKIALNDEYFVEKKLYPNVDFYSGITLKALGFPTE

SEQ ID NO: 11740 - protein, 315 aa, Bartonella sp.
DGDKGVLLYRGYPIDQLAEKGDFLESCYLLLYGELPTKQEKNDFDRCIMQHTMVHEQFARFFHGFRRDSHPMAVMVACLGAMSAFYHDSIDITDPQQRMIASVRLISKVPTLAAMAYKYSIGQAFVYPRNDLSYAANFLRMCFSVPCEEYKTNPVLTRAMDRIFILHADHEQNASTSTVRLAGSSGANPFACIAAGVACLWGPAHGGANEACLKMLQEIGSVKRIPEFIARAKDRNDPFRLMGFGHRVYKNYDPRAKIMQKTCHEVLKELNIQDDPLLDIAIELEKIALNDEYFVEKKLYPNVDFYSGITLKALG

SEQ ID NO: 11741 - protein, 299 aa, Bartonella sp.
  unsure (1)..(299): unsure at all Xaa locations
DGDKGILLYRGYPIDQLAEKGDFLESXYLLLYGELPTQQEKNDFDRCIMQHTMVHEQFARFFHGFRRDSHPMAVMVSCLGAMSAFYHDSIDITDPHQRMIASVRXISKVPTLAAMAYKYSIGQPFVYPRNDLSYAANFLRMCFAVPCEEYKTNPVLSRAMDQIFILHADHEQNASTSTVRLAGSSGANPFACIAAGVACLSIKRIPEFIARAKDKNDPFHLMGFGNRVYKNYDPRAKIMQKTCHEVLKELNIQDDPLLDIAIELEKIALNDEYFIEKKLYPNVDFYSGITLKALGFPTE

SEQ ID NO: 11742 - protein, 99 aa, Bartonella sp.
QEIGSVKRIPEFIARAKDKNDPFRLMGFGHRVYKNYDPRAKIMQKTCHEVLKELNIQDDPLLDIAIELEKIALNDEYFVEKKLYPNVDFYSGITLKALG

SEQ ID NO: 11743 - protein, 317 aa, Novosphingobium aromaticivorans
MSDNQASLTADGKTVEMPVKSGTIGPDVIDIRKLYGQTGMFTYDPGFTSTASCDSALTYIDGDEGVLLHRGYPIGQLAEHSSFMEVSYLLLNGELPSQQELADFTRTITRHTMLHEQLATFYRGFRRDAHPMAIMCGVVGALSAFYHDSTDISDPTHRKISSHRLIAKMPTIAAMAYKYSVGQPFVYPDNKLSYTGNFLKMTFGVPAEEYEVIPAVEKAMDRIFILHADHEQNASTSTVRLAGSSGANPFACIAAGIACLWGPAHGGANEAALNMLKEIGTPDKIPHYIERAKDKNDPFRLMGFGHRVYRTTTRARP

SEQ ID NO: 11744 - protein, 473 aa, Schizosaccharomyces pombe
MTNTRLASTRRLASSLLSQASLRSRQLNPLFTSSYSTRSSSLKDRLAELIPEKQAEIKKFRAEHGQDVIGEVTINQMYGGARGVRSLIWEGSVLDPNEGIRFRGYTIPECQKLLPSSPNGKQPLPESLFWLLVTGEIPTLSQVQALSADWAARSQLPKFVEELIDRCPPTLHPMAQFSLAVTALEHDSAFAKAYERGMNKHDYWKYEYEDCMDLIAKTVPIAGRIYRNLYRDGVVAPIQMDKDHSYNFANVLGFANNEEFVELMRLYLTIHADHEGGNVSAHTGHLVGSALSSPFLSMAASLNGLAGPLHGLANQEVLNFLITMKKEIGDDLSEETIKSYLWKLLNSGRVVPGYGHAVLRKTDPRYTAQREFALEHLPKDPMFQLVSRLYEIVPGVLTEHGKTKNPYPNVDSHSGVLLQYYGLKEQSFYTVLFGVSRTLGVASQLIWDRALGLPIERPKSFSTEALKKMVETK

SEQ ID NO: 11745 - protein, 456 aa, Issatchenkia orientalis
MSLRNFARSATRAYSTAEPTLKERFAELLPGWQAEVKELKSKHGKTVIGEVLLEQAYGGMRGIKGLVWEGSVLDPVEGIRFRGKTIPDIQKELPKAEGSSEPLPEALFWLLLTGEVPTLAQTKAFSAELASRSALPKHVEDLLDTCPTTLHPMAQFSIAINALESESKFAKAYADGVNKKEYWKYTYEDSIDLLAKLPNVAAKIYRNVFKDGKVAPVNASLDYSHNFANMLGFGDNKEFVELMRLYLSIHSDHEGGNVSAHTTHLVGSALSSPYLSLAAGMNGLAGPLHGRANQEVLEWLVGMKKELGDDIFNKEKIEEYLWKTLNAGRVVPGYGHAVLRKTDPRYTAQREFALKHMPDYDMFKLVSNIYEVAPKVLAEQGKTKNPWPNVDSHSGILLQYYGLTQESYYTVLFGVARAFGVLPQLIIDRGLGMAIERPKSFSTQKYKELVENLNKA

SEQ ID NO: 11746 - protein, 479 aa, Saccharomyces bayanus
MSAILSTTSKNFLSRNPARQCQSAQKALFALLSSRHYSSATEQTLKERFAEIIPAKAEEIKKFKKEHGKTVIGEVLLEQAYGGMRGIKGLVWEGSVLDPDEGIRFRGRTIPEIQRELPKAEGSTEPLPEALFWLLLTGEIPTDAQVKALSADLAARSEIPEHVVQLLDSLPKDLHPMAQFSIAVTALESESKFAKAYAQGVSKKEYWSYTFEDSLDLLGKLPVIASKIYRNVFKDGKITTVDPNADYGKNLAQLLGYENKDFVDLMRLYLTIHSDHEGGNVSAHTTHLVGSALSSPYLSLAAGLNGLAGPLHGRANQEVLEWLFKLREEVKGDYSKETIEKYLWETLNSGRVVPGYGHAVLRKTDPRYMAQREFALKHFPDYELFKLVSTIYDVAPGVLTKHGKTKNPWPNVDSHSGVLLQYYGLTEASFYTVLFGVARAIGVLPQLIIDRAVGAPIERPKSFSTEKYKELVKKIESKN

SEQ ID NO: 11747 - protein, 460 aa, Saccharomyces cerevisiae
MTVPYLNSNRNVASYLQSNSSQEKTLKERFSEIYPIHAQDVRQFVKEHGKTKISDVLLEQVYGGMRGIPGSVWEGSVLDPEDGIRFRGRTIADIQKDLPKAKGSSQPLPEALFWLLLTGEVPTQAQVENLSADLMSRSELPSHVVQLLDNLPKDLHPMAQFSIAVTALESESKFAKAYAQGISKQDYWSYTFEDSLDLLGKLPVIAAKIYRNVFKDGKMGEVDPNADYAKNLVNLIGSKDEDFVDLMRLYLTIHSDHEGGNVSAHTSHLVGSALSSPYLSLASGLNGLAGPLHGRANQEVLEWLFALKEEVNDDYSKDTIEKYLWDTLNSGRVIPGYGHAVLRKTDPRYMAQRKFAMDHFPDYELFKLVSSIYEVAPGVLTEHGKTKNPWPNVDAHSGVLLQYYGLKESSFYTVLFGVSRAFGILAQLITDRAIGASIERPKSYSTEKYKELVKNIESKL

SEQ ID NO: 11748 - protein, 486 aa, Saccharomyces cerevisiae
MVQRLLPGAHICRRSFNSSAIIKSSALTLKEALENVIPKKRDAVKKLKACYGSTFVGPITISSVLGGMRGNQSMFWQGTSLDPEHGIKFQGLTIEECQNRLPNTGIDGDNFLPESMLWLLMTGGVPTFQQAASFRKELAIRGRKLPHYTEKVLSSLPKDMHPMTQLAIGLASMNKGSLFATNYQKGLIGKMEFWKDTLEDSLNLIASLPLLTGRIYSNITNEGHPLGQYSEEVDWCTNICSLLGMTNGTNSSNTCNLTSQQSLDFINLMRLYTGIHVDHEGGNVSAHTTHLVGSALSDPYLSYSSGIMGLAGPLHGLAAQEVVRFLIEMNSNISSIAREQEIKDYLWKILNSNRVIPGYGHAVLRKPDPRFTAMLEFAQKRPIEFENDKNVLLMQKLAEIAPKVLLEHGKSKNPFPNVDSASGILFYHYGIRELLFFTVIFGCSRAMGPLTQLVWDRILGLPIERPKSLNLEGLEALTKASNVNKL

SEQ ID NO: 11749 - protein, 480 aa, Saccharomyces cerevisiae
MSAILSTTSKSFLSRGSTRQCQNMQKALFALLNARHYSSASEQTLKERFAEIIPAKAQEIKKFKKEHGKTVIGEVLLEEQAYGGMRGIKGLVWEGSVLDPEEGIRFRGRTIPEIQRELPKAEGSTEPLPEALFWLLLTGEIPTDAQVKALSADLAARSEIPEHVIQLLDSLPKDLHPMAQFSIAVTALESESKFAKAYAQGVSKKEYWSYTFEDSLDLLGKLPVIASKIYRNVFKDGKITSTDPNADYGKNLAQLLGYENKDFIDLMRLYLTIHSDHEGGNVSAHTTHLVGSALSSPYLSLAAGLNGLAGPLHGRANQEVLEWLFKLREEVKGDYSKETIEKYLWDTLNAGRVVPGYGHAVLRKTDPRYTAQREFALKHFPDYELFKLVSTIYEVAPGVLTKHGKTKNPWPNVDSHSGVLLQYYGLTEASFYTVLFGVARAIGVLPQLIIDRAVGAPIERPKSFSTEKYKELVKKIESKN

SEQ ID NO: 11750 - protein, 479 aa, Saccharomyces cerevisiae
MSAILSTTSKSFLSRGSTRQCQNMQKALFALLNARHYSSASEQTLKERFAEIIPAKAEEIKKFKKEHGKTVIGEVLLEQAYGGMRGIKGLVWEGSVLDPEEGIRFRGRTIPEIQRELPKAEGSTEPLPEALFWLLLTGEIPTDAQVKALSADLAARSEIPEHVIQLLDSLPKDLHPMAQFSIAVTALESESKFAKAYAQGVSKKEYWSYTFEDSLDLLGKLPVIASKIYRNVFKDGKITSTDPNADYGKNLAQLLGYENKDFIDLMRLYLTIHSDHEGGNVSAHTTHLVGSALSSPYLSLAAGLNGLAGPLHGRANQEVLEWLFKLREEVKGDYSKETIEKYLWDTLNAGRVVPGYGHAVLRKTDPRYTAQREFALKHFPDYELFKLVSTIYEVAPGVLTKHGKTKNPWPNVDSHSGVLLQYYGLTEASFYTVLFGVARAIGVLPQLIIDRAVGAPIERPKSFSTEKYKELVKKIESKN

SEQ ID NO: 11751 - protein, 277 aa, Desulfitobacterium hafniense
SCLAEGPITLRFGEVHSYIIDEGEMVPVPGRLIYRGYDITDLARGFMEDNRFGFEETAYLLLFGRLPNRQELIDFHNLLDIYQKLPDNFARDMILNVPSKDIMNGMARSVLGFYCYDTNPDDTSIRNVLKQCIRLIAAFPALAVYCYQAYTHYHGNKSLVIHSPQPELSLAENILYMLRPNHKYTELEARLLDLALVLHAEHGGGNNSSFVTHVVTSTGTDTYSAVAAALGSLRGPKHGGANHKVIQMFQDIKEKISDWQDEDELSAYLDKFFLGCL

SEQ ID NO: 11752 - protein, 475 aa, Saccharomyces kluyveri
MTSILSSTYRSPVARNLLKSSKTRGGLFLAARNYSNGEKTLKERFAEIFPSKAEEIKKLKKEHGKTVIGEVLLEQAYGGMRGIKGLVWEGSVLDPEEGIRFRGRTIPEIQKELPKAADGSEPLPEAIFWLLLTGEIPTETQVKALSADLASRSELPEHVVDLLDRLPKDLHPMAQFSIAVTALESESKLPKAYAQGVAKKDYWNYTFEDSLDLLGKLPVIASKIYRNVFKDGKLASVDPNADYGKNLANLLGFQNKDFVDLMRLYLTIHSDHEGGNVSAHTTHLVGSALSSPYLSLAAGLNGLAGPFDGRANQEVLEWLFKLREEVKGDYSKETIEKYLWDTLNSGRVVPGYGHAVLRKTDPRYTAQREFALKHFPDYELFKLVSTIYEVAPGVLTKQGKTKNPWPNVDSHSGVLLQYYGLTEASFYTVLFGVARAFGVLPQLIIDRAVGQPIERPKSFSTEKYIELVNSIKAKN

SEQ ID NO: 11753 - protein, 332 aa, Saccharomyces kluyveri
ELHVVESVLLPKDMHPNLQLAIGLASMNKSSLFSAMYQEGTIGKGDYWEFVYEDALNLISALPLLTGKIYSNIVNDGEPLGQFNPDRDWSYNIASLLGMTFRDSVNKQHMTADQCEDFTNLVRLYCGIHVDHEGGNVSAHTTHLVGSALSDPYLSYSSGIMGLAGPLHGLAAQEVVRFLVEMNSEIESPENEKQVEEYLWKILKSNRVIPGYGHAVLRKPDPRFEAMLRFVEDRQQEFAQDKNVQLMKKMSQVAPKVLAKHGKTKNPFPNVDSASGILFHHYGIQELLFFTVIFGCSRSIGPLTQLVWDRALGLPIERPKSVDLNTIRSLCK

SEQ ID NO: 11754 - protein, 386 aa, Thermoplasma volcanium
MPETTEEISKGLEDVNIKWTRLTTIDGNKGILRYGGYSVEDIINNGAQAEEIQYLFLYGELPNAQELKIFKENVQKGYNIPDFVINSIRQLPRESDAVAMQMAAVASMAASEIKFKWNKDTDRDVAAQMIGSMSAITANVYRHILGMPAERPKPSDSYAESFLKAAFGRNVTKEEVDAINTALILYTDHEVPASTTAGLVAVSTLSDIYSGITAALAALKGPLHGGAAEAAIAQFDEIKEPSNVEKWFNDNIINGKKRLMGFGHRVYKTYDPRAKIFKGIAENLSKNNAEVKKIYDIATKLEDLGVKQFGSKGIYPNTDYFSGIVYMSVGFPLRNNIYTALFALSRVTGWEAHFIEYVEEQQRLIRPRAVYVGPAERKFVKLPDRK

SEQ ID NO: 11755 - protein, 474 aa, Aspergillus niger
MASTLRLGTSALRSTSIAAKPVVQSAAFNGLRCYSTGKAKSLKETFAEKLPAEIEKVKKLRKEHGSKVIGEVTLDQAYGGARGVKCLVWEGSVLDSEEGIRFRGRTIPECQELLPKAPGGQEPLPEGLFWLLLTGEIPTEQQVRDLSAEWAARSDLPKFIEELIDRCPSTLHPMSQFSLAVTALEHESAFAKAYAKGINKKDYWNYTFEDSMDLIAKLPTIAAKIYRNVFKDGKVAPIQKDKDYSYNLANQLGYGDNNDFVELMRLYLTIHSDHEGGNVSAHTTHLVGSALSSPMLSLAAGLNGLAGPLHGLANQEVLNWLTKMKAAIGNDLSDEAIKNYLWSTLNAGQVVPGYGHAVLRKTDPRYVSQREFALRKLPDDPMFKLVSQVYKIAPGVLTEHGKTKNPYPNVDAHSGVLLQYYGLTEANYYTVLFGVSRALGVLPQLIIDRALGAPIERPKSYSTEAFAKLVGAKL

SEQ ID NO: 11756 - protein, 475 aa, Aspergillus niger
MASTLRLGTSALRSSSIAAKPVVQSAAFNGLRCYSTGKAKSLKETFAEKLPAELEKVKKLRKEHGSKVIGEVTLDQAYGGARGVKCLVWEGSVLDSEEGIRFRGRTIPECQELLPKAPGGQEPLPEGLFWLLLTGEIPTEQQVRDLSAEWAARSDLPKFIEELIDRCPSTLHPMSQFSLAVTALEHESAFAKAYAKGINKKDYWNYTFEDSMDLIAKLPTIAAKIYRNVFKDGKVAPIQKDKDYSYNLANQLGYGDNNDFVELMRLYLTIHSDHEGGNVSAHTTHLVGSALSSPMLSLAAGLNGLAGPLHGLANQEVLNWLTKMKAAIGNDLSDEAIKNYLWSTLNAGQVVPGYGHAVLRKTDPRYVSQREFALRKLPDDPMFKLVSQVYKIAPGVLTEHGKTKNPYPNVDAHSGVLLQYYGLTEANYYTVLFGVSRALGVLPQLIIDRALGAPIERPKSYSTELSPSLLVLSCK

SEQ ID NO: 11757 - protein, 385 aa, Ralstonia eutropha
MSEAQPLVTPKPKKSVALSGVTAGNTALCTVGRTGNDLHYRGYDILDIAETCEFEEIAHLLVHGKLPTKSELAAYKAKLKSLRGLPANVKAALEWVPASAHPMDVMRTGVSVLGTVLPEKEDHNTPGARDIADRLMASLGSMLLYWYHYSHNGRRIEVETDDDSIGGHFLHLLHGEKPSALWERAMNTSLNLYAEHEFNASTFTARVIAGTGSDMYSSISGAIGALRGPKHGGANEVAFEIQKRYDNPDEAQADITRRVENKEVVIGFGHPVYTTGDPRNQVIKEVAKKLSKDAGSMKMFDIAEALETVMWDIKKMFPNLDWFSAVSYHMMGVPTAMFTALFVIARTSGWAAHIIEQRIDNKIIRQSANYTGPENLKFVPLKDRK

SEQ ID NO: 11758 - protein, 469 aa, Neurospora crassa
MAPVMRLGSAALRSSIHLTSRQTAFTAARCYSSKTQTLKERFAELLPENIEKIKALRKEHGSKVVDKVTLDQVYGGARGIKCLVWEGSVLDAEEGIRFRGKTIPECQELLPKAPGGKEPLPEGLFWLLLTGEVPSEQQVRDLSAEWAARSDVPKFIEELIDRCPSDLHPMAQLSLAVTALEHTSSFARAYAKGINKKEYWGYTFEDSMDLIAKLPTIAARIYQNVFKGGKVAAVQKDKDYSFNFANQLGFGDNKDFVELLRLYLTIHTDHEGGNVSAHTTHLVGSALSSPFLSVAAGLNGLAGPLHGLANQEVLNWLTEMKKVIGDDLSDEAITKYLWDTLNAGRVVPGYGHAVLRKTDPRYSAQRKFAQEHLPEDPMFQLVSQVYKIAPKVLTEHGKTKNPYPNVDAHSGVLLQHYGLTEANYYTVLFGVSRAIGVLPQLIIDRAVGAPIERPKSYSTDKWIEICKKL

SEQ ID NO: 11759 - protein, 469 aa, Neurospora crassa
MAPVMRLGSAALRSSIHLTSRQTAFTAARCYSSKTQTLKERFAELLPENIEKIKALRKEHGSKVVDKVTLDQVYGGARGIKCLVWEGSVLDAEEGIRFRGKTIPECQELLPKAPGGKEPLPEGLFWLLLTGEVPSEQQVRDLSAEWAARSDVPKFIEELIDRCPSDLHPMAQLSLAVTALEHTSSFARAYAKGINKKEYWGYTFEDSMDLIAKLPTIAARIYQNVFKGGKVAAVQKDKDYSFNFANQLGFGDNKDFVELLRLYLTIHTDHEGGNVSAHTTHLVGSALSSPFLSVAAGLNGLAGPLHGLANQEVLNWLTEMKKVIGDDLSDEAITKYLWDTLNAGRVVPGYAHAVLRKTDPRYSAQRKFAQEHLPEDPMFQLVSQVYKIAPKVLTEHGKTKNPYPNVDAHSGVLLQHYGLTEANYYTVLFGVSRAIGVLPQLIIDRAVGAPIERPKSYSTDKWIEICKKL

SEQ ID NO: 11760 - protein, 470 aa, Neurospora crassa
MAMNLRTGSRAFGGALRNHARVSRRGYATAEPDLKTVLKEAIPEKRELFKKVKAHGNKVLGEVKVENTIGGMRGLKAMIWEGSVLDANEGIRFHGRTIKDCQKELPKGKNGTEMLPEAMFWLLLTGKVPSTNQVRQFSRELAEQAALPDFVNKLLDGFPKDLHPMTQFAIAVSALNHTSKFAKAYEQGLNKADYWEPTFDDCISLLGKLPTIAAKIYQNSYKGGGALPAEVDLEQDWAYNFAAMLGKPGKENENFQDLLRLYLALHGDHEGGNVSAHTTHLVGSALSDPFLAYSAGLQGLAGPLHGLAAQEVLRWILQMKEAIPSSYTDEDVRSYLWNTLNSGRVVPGYGHAVLRKPDPRFEALMDYAASRPKIAADPVFQLVLKNSQIAPEVLKQHGKTKNPYPNVDSSSGVLFHHYGFHETLYYTATFGVSRGLGPLAQLIWDRALGLPIERPKSINLEGILKQVEGQ

SEQ ID NO: 11761 - protein, 472 aa, Podospora anserina
MAPAMRLTSSALRASLKASSFATKQTAFTAARCYSSKTQTLKERFAELLPEKIEEIKALRKEHGSKVVDKVTLDQVYGGARGIKCLVWEGSVLDAEEGIRFRGKTIPECQQVLPKAPGGSEPLPEGLFWLLLTGEVPTEQQVRDLSADWAARAEIPKFVEELIDRCPSDLHPMAQFSMAVTALEQTSSFARAYAKGINKKEYWGYTFEDSMDLIAKLPTIAARIYQNVFKGGKVAPVQKDKDYSFNFANQLGFGNNADFIELMRLYLTIHTDHEGGNVSAHTTHLVGSALSSPFLSLAAGLNGLAGPLHGLANQEVLNWLTEMKKVIGDDISDESITKYLWDTLNSGRVVPGYGHAVLRKTDPRYSAQREFAQKHMSEDPMFKLVSQVYKIAPKVLTEHGKTKNPYPNVDAHSGVLLQYYGLTEANYYTVLFGVSRAIGVLPQLIIDRAVGAPIERPKSFSTEKWIEICKKL

SEQ ID NO: 11762 - protein, 112 aa, Bartonella alsatica
ANEACLKMLQEIGSVKRIPEFIARAKDKNDPFRLMGFGHRVYKNYDPRAKIMQKTCHEVLKELNIQNDPLLDIAIELEKIALNDKYFVEKKLYPNVDFYSGITLKALGFPTK

SEQ ID NO: 11763 - protein, 113 aa, Rickettsia moreli
ANEAVINMLKEIGSSEYIPKYIAKAKDKNDPFRLMGFGHRVYKNYDPRAVVLKETCKEVLKELGQLDNNPLLQIAIELEAIALKDEYFIERKLYPNVDFYSGIIYKAMGIPSQ

SEQ ID NO: 11764 - protein, 467 aa, Candida tropicalis
MSALRSFQRSSNVAKSTLKNSVRTYATAEPTLKQRLEEILPAKAEEVKQLKKDYGKTVIGEVLLEQAYGGMRGIKGLVWEGSVLDPIEGIRFRGRTIPDIQKELPKAPGGEEPLPEALFWLLLTGEVPTEAQTRALSEEFAARSALPKHVEELIDRSPSHLHPMAQFSIAVTALESESQFAKAYAKGVHKSEYWKYTYEDSIELLAKLPTIAAKIYRNVFHDGKLPAQIDSKLDYGANLASLLGFGENKEFLELMRLYLTIHSDHEGGNVSAHTTHLVGSALSSPFLSLAAGLNGLAGPLHGRANQEVLEWLFKLREELNGDYSKEAIEKYLWDTLNAGRVGPGYGHAVLRKTDPRYTAQREFALKHMPDYELFKLVSNIYEVAPGVFDQHGMTKNPWPNVGSHSGVLLQYYGLTEESFYTVLFGVSRAFGVLPQLILDRGLGMPIERPKSFSTEKYIELVKSIGKN

SEQ ID NO: 11765 - protein, 426 aa, Escherichia coli
ADTKAKLTLNGDTAVELDVLKGTLGQDVIDIRTLGSKGVFTFDPGFTSTASCESKITFIDGDEGILLHRGFPIDQLATDSNYLEVCYILLNGEKPTQEQYDEFKTTVTRHTMIHEQITRLFHAFRRDSHPMAVMCGITGALAAFYHDSLDVNNPRHREIAAFRLLSKMPTMAAMCYKYSIGQPFVYPRNDLSYAGNFLNMMFSTPCEPYEVNPILERAMDRILILHADHEQNASTSTVRTAGSSGANPFACIAAGIASLWGPAHGGANEAALKMLEEISSVKHIPEFFRRAKDKNDSFRLMGFGHRVYKNYDPRATVMRETCHEVLKELGTKDDLLEVAMELENIALNDPYFIEKKLYPNVDFYSGIILKAMGIPSSMFTVIFAMARTVGWIAHWSEMHSDGMKIARPRQLYTGYEKRDFKSDIKR

SEQ ID NO: 11766 - protein, 127 aa, Escherichia coli
MADTKAKLTLNGDTAVELDVLKGTLGQDVIDIRTLGSKGVFTFDPGFTSTASCESKITFIDGDEGILLHRGFPIDQLATDSNYLEVCYILLNGEKPTQEQYDEFKTTVTRHTMIHEQITRLFHAFRR

SEQ ID NO: 11767 - protein, 98 aa, Escherichia coli
MADTKAKLTLNGDTAVELDVLKGTLGQDVIDIRTLGSKGVFTFDPGFTSTASCESKITFIDGDEGILLHRGFPIDQLATDSNYLEVCYILLNGEKPTQ

SEQ ID NO: 11768 - protein, 112 aa, Bartonella clarridgeiae
ANETCLKMLQEIGTVQKIPEFIARAKDKNDRFRLMGFGHRVYKNYDPRAKIMQQTCHEVLKELNIQDDPLLDIAMELEKIALNDEYFIEKKLYPNVDFYSGITLKALGFPTE

SEQ ID NO: 11769 - protein, 394 aa, Aeropyrum pernix
MSQQPECRVEGNYIIVPKGLVNVIVDETRISGVDPKGEATIYRGYTIEDIGEHASFYEAAHLILFGRLPCDEELKEIKSKIDKYRGQIPEKLFDAMKHVPVTHPMYYGIYGTALLGQYYAPEWRFDEDFLYDHALRLTAQLPVIFTTGWNLAHHGTFLRPDPSKDHAWDVLRMIVMREPSDIEARAFESTLVLYMDHGFNASTFTTRVIGSTLSDLYSAVAGGIAALKGPLHGGANEKAMEMFLDAMKKAEEKGVPLYDYIEEYIKEKLARKEKIMGFGHRIYKLHDPRTDVAAKFVAKLKDGEFWMKVLKKAEEVMWREKKIPANIDLYTAVLYYQLGIPIPMYTPIFAMGRVVGWSAHYIEQVLNNKLIRPTEKYVGPTGLKYQPIEERCRK

SEQ ID NO: 11770 - protein, 379 aa, Antarctic bacterium DS2-3R
MTEPTIHKGLAGVTADVTAISKVNSDTNSLLYRGYPVQELAAKCSFEQVAYLLWNSELPNDSELKAFVNFERSHRKLDENVKGAIDLLSTACHPMDVARTAVSVLGANHARAQDSSPEANLEKAMSLLATFPSVVAYDQRRRRGEELIEPREDLDYSANFLWMTFGEEAAPEVVEAFNVSMILYAEHSFNASTFTARVITSTLADLHSAVTGAIGALKGPLHGGANEAVMHTFEEIGIRKDESLDEAATRSKAWMVDALAQKKKVMGFGHRVYKNGDSRVPTMKSALDAMIKHYDRPEMLGLYNGLEAAMEEAKQIKPNLDYPAGPTYNLMGFDTEMFTPLFIAARITGWTAHIMEQVADNALIRPLSEYNGPEQRQVP

SEQ ID NO: 11771 - protein, 378 aa, Antarctic bacterium DS2-3R
TEPTIHKGLAGVTADVTAISKVNSDTNSLLYRGYPVQELAAKCSFEQVAYLLWNSELPNDSELKAFVNFERSHRKLDENVKGAIDLLSTACHPMDVARTAVSVLGANHARAQDSSPEANLEKAMSLLATFPSVVAYDQRRRRGEELIEPREDLDYSANFLWMTFGEEAAPEVVEAFNVSMILYAEHSFNASTFTARVITSTLADLHSAVTGAIGALKGPLHGGANEAVMHTFEEIGIRKDESLDEAATRSKAWMVDALAQKKKVMGFGHRVYKNGDSRVPTMKSALDAMIKHYDRPEMLGLYNGLEAAMEEAKQIKPNLDYPAGPTYNLMGFDTEMFTPLFIAARITGWTAHIMEQVADNALIRPLSEYNGPEQRQVP

SEQ ID NO: 11772 - protein, 462 aa, Tetrahymena thermophila
MRSINQLLKQASLSQKSQYNFSQTNLKKVIAEIIPQKQAELKEVKEKYGDKVVGQYTVKQVIGGMRGMKGLMSDLSRCDPYQGIIFRGYTIPQLKEFLPKADPKAADQANQEPLPEGIFWLLMTGQLPTHAQVDALKHEWQNRGTVNQDCVNFILNLPKDLHSMTMLSMALLYLQKDSKFAKLYDEGKISKKDYWEPFYEDSMDLIAKIPRVAAIIYRHKYRDSKLIDSDSKLDWAGNYAHMMGFEQHVVKECIRGYLSIHCDHEGGNVSAHTTHLVGSALSDPYLSYSAGVNGLAGPLHGLANQEVLKWLLQFIEEKGTKVSDKDIEDYVDHVISSGRVVPGYGHAVLRDTDPRFHHQVDFSKFHLKDDQMIKLLHQCADVIPKKLLTYKKIANPYPNVDCHSGVLLYSLGLTEYQYYTVVFAVSRALGCMANLIWSRAFGLPIERPGSADLKWFHDKYRE

SEQ ID NO: 11773 - protein, 307 aa, Prochlorococcus marinus subsp. pastoris str. CCMP1378
MHRRLSFRVRDMMKCFPATGHPMDALQSSAASLGLFYSRRAIDDPKYIYNAVIRLIAKIPTMIAAFQLIRKGQDPIQPRDDLSYSSNFLYMLTEKEQDPIAAKVFDRCLILHAEHSLNASTFSARVTASTLTDPYAVIASAVGTLAGPLHGGANEDVIAMLEDIKTPEKAASFLEDAIQNKSKIMGFGHREYKVKDPRAIILQKLAEELFVRFGKDEMYEVAKKLELEAIPRLGGKGIFPNVDFYSGLVYRKLGIPRDLFTPIFAISRVAGWLAHWREQLGANRIFRPSQIYTGSAPRDWITLENRK

SEQ ID NO: 11774 - protein, 389 aa, Salmonella typhimurium
MTDTTILQNNTHVIKPKKSVALSGVPAGNTALCTVGKSGNDLHYRGYDILDLAEHCEFEEVAHLLIHGKLPTRDELNAYKSKLKALRGLPANVRTVLEALPAASHPMDVMRTGVSALGCTLPEKEGHTVSGARDIADKLLASLNSILLYWYHYSHNGERIQPETDDDSIGGHFLHLLHGEKPTQSWEKAMHISLVLYAEHEFNASTFTSRVIAGTGSDVYSAIIGAIGALRGPKHGGANEVSLEIQQRYETPDEAEADIRKRVENKEVVIGFGHPVYTIADPRHQVIKRVAKQLSEEGGSLKMYHIADRLETVMWETKKMFPNLDWFSAVSYNMMGVPTEMFTPLFVIARVTGWAAHIIEQRQDNKIIRPSANYTGPEDRPFVSIDDRC

SEQ ID NO: 11775 - protein, 376 aa, Schistosoma japonicum
MMQFTRKAISISRDLTCRNVFRQLSLTSVVSASLKDIMADLIPKEQAKVASFRKEFGTTKVGDVTVDMMYGGMRGIKGLVTETSVLDINEGIRFRGLSIPDCQKQLPKAPGGQEPLPEGIFFLLLTGKVPTKAQVDNISKEFASRADLPSHVLNMLDSFPSSLHPMSQLVAACAALNSESKFARAYSQGIKKSVYWEYVYEDSMDLIAKLPTVASIIYRNLYRDGTSVAAIDSNTDWSHNFCRMLGYEDPGFTEMMRLYLTFHCDHEGGNVSAHSCHLVGSALSDPYLSFAASMCGLAGPLHGLANQEVLVFLNKMQEKVGKNPTDENVKQYVMDTLNSGQVIPGYGHAVLRKTDPRFTCAQEFVKDTFQMILYTN

SEQ ID NO: 11776 - protein, 468 aa, Caenorhabditis elegans
MSLSGMAIRRLITKGVIPVCQVAPLSTSAEGSTNLKEVLSKKIPAHNAKVKSFRTEHGSTVVQNVNIDMIYGGMRSMKGMVTETSVLDPEEGIRFRGYSIPECQKLLPKAKGGEEPLPEAIWWLLCTGDVPSEAQTAAITKEWNARADLPTHVVRMLDNFPDNLHPMAQFIAAIAALNNESKFAGAYARGVAKASYWEYAYEDSMDLLAKLPTVAAIIYRNLYRDGSAVSVIDPKKDWSANFSSMLGYDDPLFAELMRLYLVIHSDHEGGNVSAHTSHLVGSALSDPYLSFSAAMAGLAGPLHGLANQEVLVFLNKIVGEIGFNYTEEQLKEWVWKHLKSGQVVPGYGHAVLRKTDPRYECQREFALKHLPNDDLFKLVSTLYKITPGILLEQGKAKNPWPNVDSHSGVLLQYFGMTEMSFYTVLFGVSRALGCLSQLIWARGMGLPLERPKSHSTDGLIKLALAAKK

SEQ ID NO: 11777 - protein, 378 aa, Nostoc punctiforme
MMVCEYKPGLEGIPAAQSSISYVDGQKGILEYRGIRIEELAEKSTFLETAYLLIWGELPSKEELEGFEHEVRYHRRIKYRIRDMMKCFPESGHPMDALQASAAALGLFYSLRDLHNPAYIRDSVVRLIATIPTMVAAFQLMRKGNDPVRPRDDLDYSSNFLYMLDEKEPDPLMARIFDICLILQVEHTMNASTFSARVTASTLTDPYAVVASAVGTLGGPLHGGANEEVIQMLEKIGSVENVRPYIEHCLETKSKIMGFGHRVYKVKDPRAIILQGLAEKLFEKFGYDKFYDIAQEMERVVGEKLGSKGIYPNIDFYSGLVYRKMGIPTDLFTPIFAIARVAGWLAHWKEQLAENRIFRPTQVYNGLHEVTYTPIDQR

SEQ ID NO: 11778 - protein, 376 aa, Halobacterium sp. NRC-1
MSDELKKGLEDVLVAESDLSFIDGDAGKLVYCGYAIEDLARTASYEEVLYLLWHGDLPTRSELDAFRADMASHREIDDDVLALVENLAAADADPMAALRTAASALSAHDDTAGGSDPDDARESGKRITAKLPTIVAAFTRLRNGDDVVAPRDDLGHAANFLYMLNGEAPDDVLADVFDQALVLHADHGLNASTFSGMVTASTLADVHAAVTSAIGTLSGSLHGGANANVMRMLKEVDDSDKDPLSWVQDALANGERVMGFGHRVYNVKDPRAHILSERSEELGAAAGDTKWYEMSVAIEDYMADEKGLAPNVDFYSASTYYQMGIPVDIYTPIFAMSRVGGWVGHVLEQYDDNRLIRPRARYVGAEDRDSTPLDER

SEQ ID NO: 11779 - protein, 431 aa, Vibrio cholerae
MVMADKKATLHIEGKAPIELPIMDGSLGPQVIDVRTLGSNGYFTFDPGFLATASCESQITYIDGAKGILLHRGYPIDQLANNADYLEVCYILLYGEAPNRKQYEEFKKIVTRHTMVHEQIASFFHGFRRDAHPMAVMCGVVGALAAFYHDSLDINNDTHREIAAYRLLSKMPTLAAMCYKYSVGQPFIYPRNDLSYAENFLHMMFATPCEEYEVNPIVARAMDKIFTLHADHEQNASTSTVRLAGSSGANPFACIAAGIASLWGPAHGGANEACLRMLEEIGSVDKIPEYVRRAKDKDDPFRLMGFGHRVYKNYDPRATVMREACHEVLKELSIQDPLLDVAMELERIALSDEYFIEKKLYPNVDFYSGIILKAIGIPVSMFTVIFAMSRTIGWIAHWNEMHSDPDNRIGRPRQLYTGQKLRDFTPLHERS

SEQ ID NO: 11780 - protein, 377 aa, Vibrio cholerae
MSAAKELGGAGLRGQSAGSTALCTVGKTGTGLTYRGYDITDLAHHAQFEEVAHLLLVGYLPTQAELDQYKTRLIGLRGLPEKLKQALELIPAEAHPMDVMRTGCSILGNLEPEHTFAEQQAATERMLALFPAIICYWYRFSHEGVRIDTADQSEDSIGGYFLKMLTGQAPSELFKKVMHCSLTLYAEHEFNASTFAARVCASTLSDIHSCVTGAIGTLRGPLHGGANEAAMAMIEQWHSADEAEAGIMRMLASKEKIMGFGHAIYRESDPRNALIKEWSKALSEAVGDSHLYAVSERVEAVMKREKDLFCNADFFHASAYHFMGIPTKLFTPIFVMSRLTGWAAHVYEQRANNRIIRPSADYVGPEHQTWLPIEQRG

SEQ ID NO: 11781 - protein, 113 aa, Rickettsia cooleyi
ANEAVINMLKEIGSSENIPKYIAKAKDKNDPFRLMGFGHRVYKSYDPRAAVLKETCKEVLKELGQLENNPLLQIAIELEAIALKDEYFIERKLYPNVDFYSGIIYKAMGIPSQ

SEQ ID NO: 11782 - protein, 522 aa, Drosophila melanogaster
MFVRRFGNGSLGHHFAFQRRYLAKNSMWDSKSIGTPSSFRMRSKKDNVTGNLKEQQQSATPETLNMPDMQDAQKLPNVGAYVRMIAADGKSLRDVLAAKVPQEQERVKNFRKQHGATKMGETTIDMMYGGMRGIKALVTETSVLDADEGIRFRGLSIPECQKVLPAADGGTEPLPEGLFWLLLTGEVPTKSQVQQLSREWAERAALPQHVVTMLNNMPTTLHPMSQFAAAVTALNHDSKFAKAYSDGVHKSKYWEYVYEDSMDLIAKLPVVAATIYCNTYRGGKGSRSIDSSLDWSANFVKMLGYDNAPFTELMRLYLTIHSDHEGGNVSAHTVHLVGSALSDPYLSFAAGLNGLAGPLHGLANQEVLVWLRKLQKEAGNNPSEEQLKEYIWKTLKSGQVVPGYGHAVLRKTDPRYTCQREFALKHLPEDETFQLVSKIYKVVPPILTETGKVKNPWPNVDAHSGVLLQYYGMKEMNYYTVLFGVSRALGVLASLVWDRALGLPIERPKSFSTDLLVKMVQK

SEQ ID NO: 11783 - protein, 464 aa, Drosophila melanogaster
MSLYRISARKLSEAQKLPNVGAYVRMIAADGKSLRDVLAAKVPQEQERVKNFRKQHGATKMGETTIDMMYGGMRGIKALVTETSVLDADEGIRFRGLSIPECQKVLPAADGGTEPLPEGLFWLLLTGEVPTKSQVQQLSREWAERAALPQHVVTMLNNMPTTLHPMSQFAAAVTALNHDSKFAKAYSDGVHKSKYWEYVYEDSMDLIAKLPVVAATIYCNTYRGGKGSRSIDSSLDWSANFVKMLGYDNAPFTELMRLYLTIHSDHEGGNVSAHTVHLVGSALSDPYLSFAAGLNGLAGPLHGLANQEVLVWLRKLQKEAGNNPSEEQLKEYIWKTLKSGQVVPGYGHAVLRKTDPRYTCQREFALKHLPEDETFQLVSKIYKVVPPILTETGKVKNPWPNVDAHSGVLLQYYGMKEMNYYTVLFGVSRALGVLASLVWDRALGLPIERPKSFSTDLLVKMVQK

SEQ ID NO: 11784 - protein, 478 aa, Drosophila melanogaster
MQKTNNYKSFKIFFKNVPFRSYPDCKNGKGSGLKAKLAKKIPIEREKFLGIKCLHGKKIIGQISVNSVIGGMRGLPLLFCETSSLDKNKGIYYRGKLLKDVCAKLPRVQEGTQEGTPEGCFFLLTSGSMPTKKEAQEVTNEWLKRGSVPRYCLRMIDSMDKRVHPMAQLCAASACLNPQSQFVEAYTKGARRADYWKYSYEDSMNLIAMLPTVAAAIYSNVFRDGEGSREVNYEEDWSGNFCRMLGLPEKDFVDLMRLYMILHADHESGNVSAHACHLVGTALSDPFLSFSASMCGLAGPLHGLANQEVLVWLTKLRKAIGDDPSDEELKKFIDDTLKGGQVIPGYGHAVLRDTDPRFVLQNEFAMKHCKDDPGVKLVTRLWKIIPEVLKKLNKVANPYPNVDAHSGVLLQHYCLKELKFYTVLFGVSRALGVLSQLIWSRALGAPIERPKSFSSIEICKFINEADKKAGKKNNKKKC

SEQ ID NO: 11785 - protein, 261 aa, Drosophila melanogaster
MDLIAKLPVVAATIYCNTYRGGKGSRSIDSSLDWSANFVKMLGYDNAPFTELMRLYLTIHSDHEGGNVSAHTVHLVGSALSDPYLSFAAGLNGLAGPLHGLANQEVLVWLRKLQKEAGNNPSEEQLKEYIWKTLKSGQVVPGYGHAVLRKTDPRYTCQREFALKHLPEDETFQLVSKIYKVVPPILTETGKVKNPWPNVDAHSGVLLQYYGMKEMNYYTVLFGVSRALGVLASLVWDRALGLPIERPKSFSTDLLVKMVQK

SEQ ID NO: 11786 - protein, 566 aa, Plasmodium yoelii yoelii
MKKIKNISHNAGFTKNKRDFDIFKSQYKKVFFHSTQKKKICEKQLNTYNENFVNENKASISSVSSYMFPIKKENILNRNHARYFSTNNINEPNLYIENYSKIRQYINTIDGEESIIMNVLKEKTHACIKKTREQLKTIIHTYPNTPISICTPNNVIGGLRNTITLITDTSILEKKKGILFRGRSVDKILKDFPKWDETCKYPMAEAMLWYLLTKEIPGVENLKLFSRELYCRANKIPSFVFEFIDNIPPFTHPMSQLISTVSFLESLSLFKIKYSEGILKSDYWKYILEDAVSLIAQIQVVGAYIFRRTFIDNSIKKGEGINLDIDLDWSANFSKLIGYDSNQVKDLLRLYFLLHSDHEGGNASAHVSHLIGSTLGNPYLSFSGCAIALYGPLHGLANQECLNFLLDIKNKLGDNKASYEFIEKYAKNYLNSGRVIPGYGHAVLRVPDPRFLAFRNFALANFPNDPLVEILEMCYKVIPGILSATGKVKNPYPNVDCYSGSLLYHYGIKYPEYYTVLFAISRAIGVMSQLVLSRGLMYPLERPRSVDVYNLRKICEKNYVKIEEFE

SEQ ID NO: 11787 - protein, 112 aa, Bartonella sp. NVH1
ANEACLKMLQEIGSVKRIPEFIARAKDKNDPFRLMGFGHRVYKNYDPRAKIMQQTCHEVLKELNIQDDPLLDIAIELENIALNDEYFVEKRLYPNVDFYSGITLKALGFPTE

SEQ ID NO: 11788 - protein, 396 aa, Prochlorococcus marinus str. MIT 9313
MGQEQVGEIRHDRSGISFRPGLEGVPVTQSAICDIDGLQGRLAYRGYPIAELSAHSSFLETTYLLIWGDLPSPQQLRDFEAEVQMHRRVSFRVRDMMKCFPASGHPMDALQSSAASLGLFYSRRAIDDPKYVYNAVVRLIAKIPTMVAAFKLIRKGQDPIQPRDDLAYSANFLYMLTEREPDPLAARVLDRCLILHAEHSLNASTFSARVTASTLTDPYAVVASAVGTLAGPLHGGANEDVLAMLEEIGSPEHAGDYLDEAIASKRKVMGFGHREYRVKDPRAVILQGLAEELFARFGTDEMYDVAKALEQAAATRLGPKGIYPNVDFYSGLVYRKLGIPRDLFTPVFAISRVAGWLAHWREQLGANRIFRPSQIYTGPQNRTWIPSDERFSSTGA

SEQ ID NO: 11789 - protein, 428 aa, Pasteurella multocida
MSELTAKLTLSDGREYDLPVHKGSLGYDAIDVQSLVKNKLFTFDPGFMSTACCRSEITYIDGDNGVLLHRGYPIAELAKNADYLEVAHLLLFGERPSPEEYKNFTQLVRRHTLVHEQISRFFHGFRRDSHPMAIMCGVSGALAAFYHDSLDINDITHREITAIRLLAKMPTLAAMCYKYSIGQPFMFPQNHLSYSGNFLYMMFATPCEPYIVNPVLERAMDRIFILHADHEQNASTSTVRTAASSGANPFACIAAGIASLWGPAHGGANEACINMLEEIGTVDRIPEFIARAKDKNDPFRLMGFGHRVYKNYDPRAKVMRQTCHEVLKELNIQNPLFDVAMELERIALSDPYFIDHKLYPNVDFYSGIILKAIGIPTSMFTVMFALARTVGWIAHWKEMFKPGNMKIVRPRQLYMGEKERSFEAMDKS

SEQ ID NO: 11790 - protein, 417 aa, Anaplasma centrale
MVEKAILECGDCKVSLPVMRGNDGTLAIDVTGLYKDAKILTYDPGFLSTAACRSEITFIDGDKGILRTRGYDIADLVTTGGGFCSVAHLLLHGALPQGRELDDFASAVGNECHVPAQVVNVIKSLPSSAHPMAILIASFVTLAACYHAENSIDPLKSAIVAISKVPGIVAAIYRHTSGMPAVEADPNLGYVQNFVKMMFGDLGSTRQSVICRALESIFIMHADHEQNASTATVRVTGSAGANLFACLSAGAATLWGPAHGGANEAVVRMLEEIGSPERVGMFIQRVKDKKDGVRLMGFGHRVYKNYDPRALIIRDICKETLHELGTSDPLLDVAFELERVALQDEYFVKRFLYPNVDFYSGIVLKAIGVPVNMFTAFFALARTTGWSAQWYEMVTEHGDSNRICRPRQLYVGNMNAK

SEQ ID NO: 11791 - protein, 417 aa, Anaplasma marginale
MVEKAILECGDCKISLPVMHGSDGTLAVDTTSLYKDSKILTYDPGFMSTAACKSEITFIDGDEGILRYRGYDIADLTMADGGFCSIAYLLLYGTMPQGRELADFVATVSRECNVRTQVLDVIRALPRDAHPMAILIASFAALAAHYHGANSLDPLRSAIVAISQVPGIVASIYRHTSGAPLIEADPSLGYVQNFVHMMFGDLHETRKSIICKALEAIFIMHADHEQNASTATVRATGSAGANLFACLSAGAATLWGPAHGGANEAVVKMLEEIGRPERVGEFIEKVKEKESGVRLMGFGHRVYKNYDPRARIIRDICKETLSGLGADDPLLDVATALEKAALEDEYFVKRSLYPNVDFYSGIVLKAAGVPVNMFTAFFALARTTGWSAQWYEMLDKQHEGSKICRPRQLYTGKMNAE

SEQ ID NO: 11792 - protein, 321 aa, Bartonella bacilliformis
YIDGDEGILLYHGYSIDQLAENGDFLETCYLLLYGELPNKQQKIDFDRCIMRHTMVHEQFARFFHGFRRDSHPMAVMVACLGAMSAFYHDSINITDPQQRMIASIRLISKVPTLAAMAYKYSIGQPFVYPRNDLNYATNFLHMCFSVPCEEHKISPVIARAMDRIFTLHADHEQNASTSTVRLAGSSGANPYACIAAGVACLWGPAHGGANEACLKMLQEIGSVKKIPEFIARAKDKNDPFRLMGFGHRVYKNYDPRAKIMQKTCHEVLQELNIQDDPLLDIAMELEHIALNDEYFINKKLYPNVDFYSGITLKALGFPTE

SEQ ID NO: 11793 - protein, 303 aa, Bartonella bacilliformis
YIDGDEGILLYHGYSIDQLAENGDFLETCYLLLYGELPNKQQKIDFDRCIMRHTMVHEQFARFFHGFRRDSHPMAVMVACLGAMSAFYHDSINITDPQQRMIASIRLISKVPTLAAMAYKYSIGQPFVYPRNDLNYATNFLHMCFSVPCEEHKISPVIARAMDRIFTLHADHEQNASTSTVRLAGSSGANPYACIAAGVACLWGPAHGGANEACLKMLQEIGSVKKIPEFIARAKDKNDPFRLMGFGHRVYKNYDPRAKIMQKTCHEVLQELNIQDDPLLDIAMELEHIALNDEYFINKKLYP

SEQ ID NO: 11794 - protein, 112 aa, Bartonella bacilliformis
ANEACLKMLQEIGSVKKIPQFIARAKDKNDPFRLMGFGHRVYKNYDPRAKIMQKTCHEVLKELNIQDNPLFDIAMELEHIALNDEYFINKKLYPNVDFYSGITLKALGFPTE

SEQ ID NO: 11795 - protein, 112 aa, Bartonella bacilliformis
ANEACLKMLQEIGSVKKIPQFIARAKDKNDPFRLMGFGHRVYKNYDPRAKIMQKTCHEVLKELYIQDNPLFDIAMELEHIALNDEYFINKKLYPNVDFYSGITLKALGFPTE

SEQ ID NO: 11796 - protein, 110 aa, Bartonella bacilliformis
EACLKMLQEIGSVKKIPQFIARAKDKNDPFRLMGFGHRVYKNYDPRAKIMQKTCHEVLKELNIQDNPLFDIAMELEHIALNDEYFINKKLYPNVDFYSGITLKALGFPTE

SEQ ID NO: 11797 - protein, 109 aa, Bartonella bacilliformis
TCLKMLQEIGSVKKIPQFIARAKDKNDPFRLMGFGHRVYKNYDPRAKIMQKTCHEVLKELNIQDNPLFDIAMELEHIALNDEYFINKKLYPNVDFYSGITLKALGFPTE

SEQ ID NO: 11798 - protein, 109 aa, Bartonella bacilliformis
TCLKLLQEIGSVKKIPQFIARAKDKNDPFRLMGFGHRVYKNYDPRAKIMQKTCHEVLKELNIQDNPLFDIAMELEHIALNDEYFINKKLYPNVDFYSGITLKALGFPTE

SEQ ID NO: 11799 - protein, 415 aa, Ehrlichia ruminantium
MIKKAAVELDDQKITLPILYDTEGNEVLDITSLYKNTGVLTYDPGFMSTAACESKITFIDGNKGILRYRGYDIADLVYNNKSFIEVVYLLFYGVFPNAEQLQEFILHISQEYVLPQMVRDVITSFPQNSHPMAILIASFSSLAAYYCDQKTDGELECKLAVAKVASIVALIYRHITNQDFIQADVGLSYSKNFIHMMFDISSYKFTEIVDKALDVIFVLHADHEQNASTATVRMTGSSGPNLFACLAAGAATLWGPAHGGANEAVINMLMNIGKPENVKQFIQKVKDSNKSTKLMGFGHRVYKNYDPRARIMCTICKEILKDFGLNDPLLEVAVELENIALQDDYFIARNLYPNVDFYSGIVLKTIGIPVKMFTTLFALARTSGWSAQWYEMVSSKNYKISRPRQLYTGNPVQKV

SEQ ID NO: 11800 - protein, 112 aa, Bartonella weissi
ANEACLKMLQEIGSTEKIPEFIERAKDKNDPFRLMGFGHRVYKNYDPRAKLMQKTCHEVLKELNIQDDPLLDIAMELEKIALNDEYFIEKKLYPNVDFYSGITLKALGFPTE

SEQ ID NO: 11801 - protein, 112 aa, Bartonella sp. tm6313nv
ANEACLKMLQEIGSVKRIPEFIARAKDKNDPFRLMGFGHRVYKNYDPRAKIMQQTCHEVLKELNIQDDPLLDIAIELEKIALNDEYFVEKRLYPNVDFYSGITLKALGFPTE

SEQ ID NO: 11802 - protein, 435 aa, Rickettsia conorii
MTNENNNDSEFAELKIRGKIFKLPILKASIGEDVIDISRVSAEADCFTYDPGFMSTASCQSTITYIDGDKGILRHRGYDIKDLAEKSDFLEVAYLLIYGELPSGEQYNNFTKQVAHHSLVNERLHYLFQTFCSSSHPMAIMLAAVGSLSAFYPDLLNFKEADYELTAIRMIAKIPTIAAMSYKYSIGQPFIYPDNSLDFTENFLHMMFATPCTKYTVNPIIKNALNKIFILHADHEQNASTSTVRIAGSSGANPFACISTGIASLWGPAHGGANEAVINMIKEIGSSEYIPKYIAKAKDKNDPFRLMGFGHRVYKNYDPRAAVLKETCKEVLKELGQLDNNPFLQIAIELEAIALKDEYFIERKLYPNVDFYSGIIYKAMGIPSQMFTVLFAIARTVGWMAQWKEMHEDPEQKISRPRQLYTGYVHREYKGIRER

SEQ ID NO: 11803 - protein, 411 aa, Rickettsia conorii
DSEFAELKIRGKIFKLPILKASIGEDVIDISRVSAEADCFTYDPGFMSTASCQSTITYIDGDKGILRHRGYDIKDLAEKSDFLEVAYLLIYGELPSGEQYNNFTKQVAHHSLVNERLHYLFQTFCSSSHPMAIMLAAVGSLSAFYPDLLNFKEADYELTAIRMIAKIPTIAAMSYKYSIGQPFIYPDNSLDFTENFLHMMFATPCTKYTVNPIIKNALNKIFILHADHEQNASTSTVRIAGSSGANPFACISTGIASLWGPAHGGANEAVINMIKEIGSSEYIPKYIAKAKDKNDPFRLMGFGHRVYKNYDPRAAVLKETCKEVLKELGQLDNNPFLQIAIELEAIALKDEYFIERKLYPNVDFYSGIIYKAMGIPSQMFTVLFAIARTVGWMAQWKEMHEDPEQKISRPR

SEQ ID NO: 11804 - protein, 119 aa, Rickettsia conorii
AHGGANEAVINMLKEIGSSEYIPKYIAKAKDKNDPFRLMGFGHRVYKNYDPRAAVLKETCKEVLKELGQLDNNPFLQIAIELEAIALKDEYFIERKLYPNVDFYSGIIYKAMGIPSQMF

SEQ ID NO: 11805 - protein, 436 aa, Rickettsia prowazekii
MTNGNNNNLEFAELKIRGKLFKLPILKASIGKDVIDISRVSAEADYFTYDPGFMSTASCQSTITYIDGDKGILWYRGYDIKDLAEKSDFLEVAYLMIYGELPSSDQYCNFTKKVAHHSLVNERLHYLFQTFCSSSHPMAIMLAAVGSLSAFYPDLLNFNETDYELTAIRMIAKIPTIAAMSYKYSIGQPFIYPDNSLDFTENFLHMMFATPCTKYKVNPIIKNALNKIFILHADHEQNASTSTVRIAGSSGANPFACISTGIASLWGPAHGGANEAVINMLKEIGSSENIPKYVAKAKDKNDPFRLMGFGHRVYKSYDPRAAVLKETCKEVLNELGQLDNNPLLQIAIELEALALKDEYFIERKLYPNVDFYSGIIYKAMGIPSQMFTVLFAIARTVGWMAQWKEMHEDPEQKISRPRQLYTGYVHREYKCIVERK

SEQ ID NO: 11806 - protein, 411 aa, Rickettsia prowazekii
NLEFAELKIRGKLFKLPILKASIGKDVIDISRVSAEADYFTYDPGFMSTASCQSTITYIDGDKGILWYRGYDIKDLAEKSDFLEVAYLMIYGELPSSDQYCNFTKKVAHHSLVNERLHYLFQTFCSSSHPMAIMLAAVGSLSAFYPDLLNFNETDYELTAIRMIAKIPTIAAMSYKYSIGQPFIYPDNSLDFTENFLHMMFATPCTKYKVNPIIKNALNKIFILHADHEQNASTSTVRIAGSSGANPFACISTGIASLWGPAHGGANEAVINMLKEIGSSENIPKYVAKAKDKNDPFRLMGFGHRVYKSYDPRAAVLKETCKEVLNELGQLDNNPLLQIAIELEALALKDEYFIERKLYPNVDFYSGIIYKAMGIPSQMFTVLFAIARTVGWMAQWKEMHEDPEQKISRPR

SEQ ID NO: 11807 - protein, 126 aa, Rickettsia prowazekii
GPAHGGANEAVINMLKEIGSSENIPKYVAKAKDKNDPFRLMGFGHRVYKSYDPRAAVLKETCKEVLNELGQLDNNPLLQIAIELEALALKDEYFIERKLYPNVDFYSGIIYKAMGIPSQMFTVLFA

SEQ ID NO: 11808 - protein, 410 aa, Rickettsia rickettsii
DSEFAELKIRGKIFKLPILKASIGEDVIDISRVSAEADCFTYDPGFMSTASCQSTITYIDGDKGILRHRGYDIKDLAEKSDFLEVAYLLIYGELPSGEQYNNFTKQVAHHSLVNERLHYLFQTFCSSSHPMAIMLAAVGSLAAFYPDLLNFKEADYELTAIRMIAKIPTIAAMSYKYSIGQPFIYPDNSLDFTENFLHMMFATPCTKYTVNPIIKNALNKIFILHADHEQNASTSTVRIAGSSGANPFACISTGIASLWGPAHGGANEAVINMLKEIGSSEYIPKYIAKAKDKNDPFRLMGFGHRVYKNYDPRAVVLKETCKEVLKELGQLDNNLLQIAIELEAIALKDEYFIERKLYPNVDFYSGIIYKAMGIPSQMFTVLFAIARTVGWMAQWKEMHEDPEQKISRPR

SEQ ID NO: 11809 - protein, 146 aa, Rickettsia rickettsii
ANEAVINMLKEIGSSEYIPKYIAKAKDKNDPFRLMGFGHRVYKNYDPRAVVLKETCKEVLRELGQLDNNPLLQIAIELEAIALKDEYFIERKLYPNVDFYSGIIYKAMGIPSQMFTVLFAIARTVGWMAQWKEMHEDPEQKISRPR

SEQ ID NO: 11810 - protein, 411 aa, Rickettsia typhi
NLEFAELKIRGKMFKLPILKASIGKDVIDISRVSAEADCFTYDPGFMSTASCQSTITYIDGDKGILWHRGYDIKDLAEKSDFLEVAYLMIYGELPSSEQYHNFTTKIAHHALVNERLHYLFQTFCSSSHPMAIMLAAVGSLSAFYPDLLNFNETDYELTAIRMIAKIPTIAAMSYKYSIGQPFIYPDNSLDFTENFLHMMFATPCTKYKVNPIIKNALNKIFILHADHEQNASTSTVRIAGSSGANPFACISTGIASLWGPAHGGANEAVINMLKEIGSSENIPKYVAKAKDKNDPFRLMGFGHRVYKSYDPRAAVLKETCKEVLNELGQLENNPLLQIAIELEALALKDEYFIERKLYPNVDFYSGIIYKAMGIPSQMFTVLFAIARTVGWMAQWKEMHEDPEQKISRPR

SEQ ID NO: 11811 - protein, 119 aa, Rickettsia typhi
GGANEAVINMLKEIGSSENIPKYVAKAKDKNDPFRLMGFGHRVYKSYDPRAAVLKETCKEVLNELGQLENNPLLQIAIELEALALKDEYFIERKLYPNVDFYSGIIYKAMGIPSQMFTV

SEQ ID NO: 11812 - protein, 411 aa, Rickettsia akari
DSEFAELKIRGKIFQLPILKASIGEDVIDISRVSAEVNCFTYDPGFMSTASCKSTITYIDGDKGILRHRGYNIKDLAEKSDFLEVAYLLIYGELPSIEQYNNFTKQVAHHSLVNERLHYLFQTFCSSSHPMAIMLAAIGSLSAFYPDLLNFKEADYELTAIRMIAKIPTIAAMSYKYSIGQPFVYPDNSLDFTENFLHMMFATPCTKYKVNPIIKNALNKIFILHADHEQNASTSTVRIAGSSGANAFACISTGIASLWGPAHGGANEAVINMLKEIGSSENIPKYIAKAKDKSDPFRLMGFGHRVYKNYDPRASVLKETCKEVLKELGQLENNPLLQIAIELEAIALKDEYFIERKLYPNVDFYSGIIYKAMGIPSQMFTVLFAIARTVGWMAQWKEMHEDPGQKISRPR

SEQ ID NO: 11813 - protein, 127 aa, Rickettsia akari
WGPAHGGANEAVINMLKEIGSSENIPKYIAKAKDKSDPFRLMGFGHRVYKNYDPRASVLKETCKEVLKELGQLENNPLLQIAIELEAIALKDEYFIERKLYPNVDFYSGIIYKAMGIPSQMFTVLFA

SEQ ID NO: 11814 - protein, 411 aa, Rickettsia australis
DSEFAELKIRGKIFKLPILKASIGEDVIDISRVSAEADCFTYDPGFMSTASCQSTITYIDGDKGILRHRGYNIKDLAEKSDFLEVAYLLIYGELPTIEQYNNFTTQVAHHSLVNERLHYLFQAFCSSSHPMAIMLAAVGSLSAFYPDLLNFKEADYELTAIRMIAKIPTIAAMSYKYSIGQPFIYPDNSLDFTENFLHMMFATPCTKYKVNPIIKNALNKIFILHADHEQNASTSTVRIAGSSGANAFACISTGIASLWGPAHGGANEAVINMLKEIGSSENIPKFIAKAKDKNDPFRLMGFGHRVYKNYDPRAAVLKETCKAVLKELGQLENNPLLQIAIELEAIALKDEYFIERKLYPNVDFYSGIIYKAMGIPSQMFTVLFAIARTVGWMAQWKEMHEDPEQKISRPR

SEQ ID NO: 11815 - protein, 122 aa, Rickettsia australis
AHGGANEAVINMLKEIGSSENIPKFIAKVKDKNDPFRLMGFGHRVYKNYDPRAAALKETCKAVLKELGQLENNPLLQIAIELEAIALKDEYFIERKLYPNVDSHSGIIYKAMGIPSQMSTVL

SEQ ID NO: 11816 - protein, 411 aa, Rickettsia canadensis
DSEFVELKIRGKIFKLPILKASIGEDVIDISRVSSEADCFTYDPGFMSTASCRSTITYIDGDKGILRYRGYDIKDLADKSDFLEVAYLLIYGELPSSEQYNNFTKKVAVHSLVNERLHYLFQTFCSSSHPMAIMLAAVGSLSAFYPDLLNFKEADYELTAIRMIAKIPTMAAMSYKYSIGQPFIYPDNSLDFTENFLHMMFATPCMKYEVNPVIKNALNKIFILHADHEQNASTSTVRIAGSSGANPFACISTGIASLWGPAHGGANEAVINMLKEIGSSENIPKYIAKAKDKDDPFRLMGFGHRVYKNYDPRAAVLKETCNEVLKELGQLENNPLLQIAIELEAIALKDEYFIERKLYPNVDFYSGIIYKAMGIPSQMFTVLFAIARTVGWMAQWKEMHEDPEQKISRPR

SEQ ID NO: 11817 - protein, 119 aa, Rickettsia canadensis
GGANEAVINMLKEIGSSENIPKYIAKAKDKDDPFRLMGFGHRVYKNYDPRAAVLKETCNEVLKELGQLENNPLLQIAIELEAIALKDEYFIERKLYPNVDFYSGIIYKAMGIPSQMFTV

SEQ ID NO: 11818 - protein, 411 aa, Rickettsia sp.
DSEFAELKIRGKIFKLPILKASIGEDVIDISRVSAEADCFTYDPGFMSTASCQSTITYIDGDKGILRHRGYDIKDLAEKSDFLEVAYLLIYGELPSGEQYNNFTKQVAHHSLVNERLHYLFQTFGSSSHPMAIMLAAVGSLSAFYPDLLNFKEADYELTAIRMIAKIPTIAAMSYKYSIGQPFIYPDNSLDFTENFLHMMFATPCTKYTVNPIIKNALNKIFILHADHEQNASTSTVRIAGSSGANPFACISTGIASLWGPAHGGANEAVINMLKEIGSSEYIPKYIAKAKDKNDPFRLMGFGHRVYKNYDPRAAVLKETCKEVLKELGQLDNNPLLQIAIELEAIALKDEYFIERKLYPNVDFYSGIIYKAMGIPSQMFTVLFAIARTVGWMAQWKEMHEDPEQKISRPR

SEQ ID NO: 11819 - protein, 411 aa, Rickettsia sp.
DSEFAELKIRGKIFKLPILKASIGEDVIDISRVSAEADCFTYDPGFMSTASCQSTITYIDGDKGILRHRGYDIKDLAEKSDFLEVAYLLIYGELPNGEQYNNFTKQVAHHSLVNERLHYLFQTFCSSSHPMAIMLAAVGSLSAFYPDLLNFKEADYELTAIRMIAKIPTIAAMSYKYSIGQPFIYPDNSLDFTENFLHMMFATPCTKYKVNPIIKNALNKIFILHADHEQNASTSTVRIAGSSGANPFACISTGIASLWGPAHGGANEVVINMLKEIGSSEYIPKYIAKAKDKNDPFRLMGFGHRVYKNYDPRAAVLKETCKEVLKELGQLDNNPLLQIAIELEAIALKDEYFIERKLYPNVDFYSGIIYKAMGIPSQMFTVLFAIARTVGWMAQWKEMHEDPEQKISRPR

SEQ ID NO: 11820 - protein, 411 aa, Rickettsia sp.
DSEFAELKIRGKIFKLPILKASIGEDVIDISRVSAEADCFTYDPGFMSTASCQSTITYIDGDKGILRHRGYDIKDLAEKSDFLEVAYLLIYGELPSGEQYNNFTKQVAHHSLVNERLHYLFQTFCSSSHPMAIMLAAVGSLSAFYPDLLNFKEADYELTAIRMIAKIPTIAAMSYKYSIGQPFIYPDNSLDFTENFLHMMFATPCTKYTVNPIIKNALNKIFILHADHEQNASTSTVRIAGSSGANPFACISTGIASLWGPAHGGANEAVINMLKEIGSSEYIPKYIAKAKDKNDPFRLMGFGHRVYKNYDPRAAVLKETCKEVLKELGQLDNNPLLQIAIELEAIALKDEYFIERKLYPNVDFYSGIIYKAMGIPSQMFTVLFVIARTVGWMAQWKEMHEDPEQKISRPR

SEQ ID NO: 11821 - protein, 411 aa, Rickettsia sp.
DSEFAELKIRGKIFKLPILKASIGEDVIDISRVSAEADCFTYDPGFMSTASCRSTITYIDGDKGILRYRGYDIKDLAEKSDFLEVAYLLIYGELPSSEQYNNFTKKVAVHSLVNERLHYLFQTFCSSSHPMAIMLAAVGSLSAFYPDLLNFKEADYELTAIRMIAKIPTIAAMSYKYSIGQPFIYPDNALDFTENFLHMMFATPCEKYKVNPIIKNALNKIFILHADHEQNASTSTVRIAGSSGANPFACVSTGIASLWGPAHGGANEAVINMLKEIGSSENIPKYIAKAKDKNDPFRLMGFGHRVYKNYDLRAAVLKETCKEVLKELGQLDGNPLLQIAIELEAIALKDEYFIERKLYPNVDFYSGIIYKAMGIPSQMFTVLFAIARTVGWMAQWKEMHEDPEQKISRPR

SEQ ID NO: 11822 - protein, 373 aa, Rickettsia sp.
RVSAEADCFTYDPGFMSTASCQSTITYIDGDQGILRHRGYDIKDLAEKSDFLDVAYLLIYGELPSGEQYNNFTKQVAHHSLVNERLHYLFQTFCSSSHPMAIMLAAVGSLSAFYPDLLNFKEADYELTAIRMIAKIPTIAAMSYKYSIGQPFIYPDNSLDFTENFLHMMFATPCTKYKVNPIIKNALNKIFILHADHEQNASTSTVRIAGSSGANPFACISTGIASLWGPAHGGANEAVINMLKEIGSSEYIPKYIAKAKDKNDPFRLMGFGHRVYKNYDPRAAVLKETCKEVLKELGQLDNNPLLQIAIELEAIALKDEYFIERKLYPNVDFYSGIIYKAMGIPSQMFTVLFAIARTVGWMAQWKEMYEDPE

SEQ ID NO: 11823 - protein, 356 aa, Rickettsia sp.
GFMSTASCRSTITYIDGDQGILRHRGYDIKDLAEKSDFLEVAYLLIYGELPNSKQYNDFTKKVAHHALVNERLHYLFQTFCSSSHPMAIMLAAVGSLSAFYPDLLNFFKEADYELTAIRMIAKIPTIAAMSYKYSIGQPFVYPDNSLDFTENFLHMMFATPCEKYKVNPVVKNALNKIFILHADHEQNASTSTVRIAGSSGANPFACVSTGIASLWGPAHGGANEAVINMLKDIGSVENIPKYIAKAKDKNDNFRLMGFGHRVYKNYDPRAAVLKETCKEVLKELGQLDNNPLLQIAIELEAIALKDEYFIERKLYPNVDFYSGIIYKAMGIPPQMFTVLFATARTVGWMAQWKEM

SEQ ID NO: 11824 - protein, 468 aa, Danio rerio
MSFLSISRLAPRLLSSKNAACVVVAARNASASTNLKDVLSDLVPKEQSRIKNFKQQYGKTSIGQITVDMVYGGMRGVKGLVYETSVLDPDEGIRFRGYSIPECQQLLPKAPGGEEPLPEGLFWLLVTGQVPTEEQVSWLSKEWAKRAALPSHVVTMLDNFPTNLHPMSQFSAAITALNSESSFARAYSEGVNKAKYWEFVYEDSMDLIAKLPCVAAKIYRNLYREGSSIGAIDSNLDWSHNFTNMLGYTEPQFTELMRLYLTIHSDHEGGNVSAHTSHLVGSALSDPYLSFSAAMNGLAGPLHGLANQEVLVWLTALQKELGGEVSDEKMRDYIWNTLKSGRVVPGYGHAVLRKTDPRYTCQREFALKHLPNDPMFKLVAQLYKIVPNVLLEQGKAKNPWPNVDAHSGVLLQYYGMTEMNYYTVLFGVSRALGVLAQLVWSRALGFPLERPKSMSTDGLMALVGAKSG

SEQ ID NO: 11825 - protein, 320 aa, Bartonella quintana
IDGDKGILLYCGYPIDQLAEKGDFLESCYLLLYGELPTKQEKIDFDRCIMQHMMVHERFTRFFHGFRRDSHPMAVMVACLGAMSAFYHDSIDIKDAQQRMIAAIRLISKVPTLAAMAYKYSIGQAFVYPRNDLSYAANFLHMCFSVPCEEYKINPVLSRAMDRICTLHADHEQNASTSTVRLVGSSGANPFACIAAGVACLWGPAHGGANEACLKMLQKIGSVERIPEFIARAKDKNDPFRLMGFGHRVYKNYDPRAKIMQQTCHEVLKELNIQDDPLLDIAIALENTALNDEYFIEKKLYPNVDFYSGITLKALGFPTE

SEQ ID NO: 11826 - protein, 160 aa, Bartonella quintana
SIDQLAEKGDFLESCYLLLYGELPTKQEKIDFDRCIMQHMMVHEQFTRFFHGFRRDSHPMAVMVACLGAMSAFYHDSIDIKDAQQRMIAAIRLISKVPTLAAMAYKYSIGQAFVYPRNDLSYAANFLHMCFSVPCEEYKINPVLSRAMDRIFTLHADHEQ

SEQ ID NO: 11827 - protein, 112 aa, Bartonella quintana
ANEACLKMLQKIGSVERIPEFIARAKDKNDPFRLMGFGHRVYKNYDPRAKIMQQTCHEVLKELNIQDDPLLDIAIALENTALNDEYFIEKKLYPNVDFYSGITLKALGFPTE

SEQ ID NO: 11828 - protein, 321 aa, Bartonella elizabethae
YIDGDKGILLYRGYPIDQLAEKGDFLESCYLLLYGELPTQQEKNDFDRCIMQHTMVHEQFSRFFHGFRRDSHPMAVMVACLGAMSAFYHDSIDITDPHQRMIASVRLISKVPTLAAMAYKYSIGQAFVYPRNDLSYAANFLRMCFAVPCEEYKINPVLARAMDQIFILHADHEQNASTSTVRLAGSSGANPFACIAAGVACLWGPAHGGANEACLKMLQEIGSIKRIPEFIARAKDKNDPFRLMGFGHRVYKNYDPRAKIMQKTCHEVLKELNIQDDPLLDIAIELEKIALSDEYFIEKKLYPNVDFYSGITLKALGFPTE

SEQ ID NO: 11829 - protein, 112 aa, Bartonella elizabethae
ANEACLKMLQEIGSIKRIPEFIARAKDKNDPFRLMGFGHRVYKNYDPRAKIMQKTCHEVLKELNIQDDPLLDIAIELEKIALSDEYFIEKKLYPNVDFYSGITLKALGFPTE

SEQ ID NO: 11830 - protein, 112 aa, Bartonella sp. sh6700ga
ANEACLKMLQEIGSVERIPEFIARAKDKNDPFRLMGFGHRVYKNYDPRAKIMQKTCHEVLKELNIQDDPLLDIAIELEKIALNDEYFVEKKLYPNVDFYSGITLKALGFPTE

SEQ ID NO: 11831 - protein, 112 aa, Bartonella sp. sh6833ga
ANEACLKMLQEIGSVKRIPEFIARAKDKNDPFRLMGFGHRVYKNYDPRAKIMQKTCHEVLKELNIQDDPLLDIAIELEKIALNDEYFGEKKLYPNVDFYSGITLKALGFPTE

SEQ ID NO: 11832 - protein, 112 aa, Bartonella sp. sh6537ga
ANEACLKMLQEIGSVKKIPEFIARAKDKNDPFRLMGFGHRVYKNYDPRAKIMQKTCHEVLKELNRQDDPLLDIAIELEKIALNDEYFVEKKLYPNVDFYSGITLKALGFPTE

SEQ ID NO: 11833 - protein, 431 aa, Mycobacterium tuberculosis H37Rv
MADTDDTATLRYPGGEIDLQIVHATEGADGIALGPLLAKTGHTTFDVGFANTAAAKSSITYIDGDAGILRYRGYPIDQLAEKSTFIEVCYLLIYGELPDTDQLAQFTGRIQRHTMLHEDLKRFFDGFPRNAHPMPVLSSVVNALSAYYQDALDPMDNGQVELSTIRLLAKLPTIAAYAYKKSVGQPFLYPDNSLTLVENFLRLTFGFPAEPYQADPEVVRALDMLFILHADHEQNCSTSTVRLVGSSRANLFTSISGGINALWGPLHGGANQAVLEMLEGIRDSGDDVSEFVRKVKNREAGVKLMGFGHRVYKNYDPRARIVKEQADKILAKLGGDDSLLGIAKELEEAALTDDYFIERKLYPNVDFYTGLIYRALGFPTRMFTVLFALGRLPGWIAHWREMHDEGDSKIGRPRQIYTGYTERDYVTIDAR

SEQ ID NO: 11834 - protein, 393 aa, Mycobacterium tuberculosis H37Rv
MTGPLAAARSVAATKSMTAPTVDERPDIKKGLAGVVVDTTAISKVVPQTNSLTYRGYPVQDLAARCSFEQVAFLLWRGELPTDAELALFSQRERASRRVDRSMLSLLAKLPDNCHPMDVVRTAISYLGAEDPDEDDAAANRAKAMRMMAVLPTIVAIDMRRRRGLPPIAPHSGLGYAQNFLHMCFGEVPETAVVSAFEQSMILYAEHGFNASTFAARVVTSTQSDIYSAVTGAIGALKGRLHGGANEAVMHDMIEIGDPANAREWLRAKLARKEKIMGFGHRVYRHGDSRVPTMKRALERVGTVRDGQRWLDIYQVLAAEMASATGILPNLDFPTGPAYYLMGFDIASFTPIFVMSRITGWTAHIMEQATANALIRPLSAYCGHEQRVLPGTF

SEQ ID NO: 11835 - protein, 373 aa, Mycobacterium tuberculosis H37Rv
MTVVPENFVPGLDGVVAFTTEIAEPDKDGGALRYRGVDIEDLVSQRVTFGDVWALLVDGNFGSGLPPAEPFPLPIHSGDVRVDVQAGLAMLAPIWGYAPLLDIDDATARQQLARASVMALSYVAQSARGIYQPAVPQRIIDECSTVTARFMTRWQGEPDPRHIEAIDAYWVSAAEHGMNASTFTARVIASTGADVAAALSGAIGAMSGPLHGGAPARVLPMLDEVERAGDARSVVKGILDRGEKLMGFGHRVYRAEDPRARVLRAAAERLGAPRYEVAVAVEQAALSELRERRPDRAIETNVEFWAAVVLDFARVPANMMPAMFTCGRTAGWCAHILEQKRLGKLVRPSAIYVGPGPRSPESVDGWERVLTTA

SEQ ID NO: 11836 - protein, 427 aa, Escherichia coli K12; identical to SEQ ID NO: 479

SEQ ID NO: 11837 - protein, 427 aa, Escherichia coli K12
MADTKAKLTLNGDTAVELDVLKGTLGQDVIDIRTLGSKGVFTFDPGFTSTASCESKITFIDGDEGILLHRGFPIDQLATDSNYLEVCYILLNGEKPTQEQYDEFKTTVTRHTMIHEQITRLFHAFRRDSHPMAVMCGITGALAAFYHDSLDVNNPRHREIAAFRLLSKMPTMAAMCYKYSIGQPFVYPRNDLSYAGNFLNMMFSTPCEPYEVNPILERAMDRILILHADHEQNASTSTVRTAGSSGANPFACIAAGIASLWGPAHGGANEAALKMLEEISSVKHIPEFFRRAKDKNDSFRLMGFGHRVYKNYDPRATVMRETCHEVLKELGTKDDLLEVAMELENIALNDPYFIEKKLYPNVDFYSGIILKAMGIPSSMFTVIFAMARTVGWIAHWSEMHSDGMKIARPRQLYTGYEKRDFKSDIKR

SEQ ID NO: 11838 - protein, 389 aa, Escherichia coli K12
MSDTTILQNSTHVIKPKKSVALSGVPAGNTALCTVGKSGNDLHYRGYDILDLAKHCEFEEVAHLLIHGKLPTRDELAAYKTKLKALRGLPANVRTVLEALPAASHPMDVMRTGVSALGCTLPEKEGHTVSGARDIADKLLASLSSILLYWYHYSHNGERIQPETDDDSIGGHFLHLLHGEKPSQSWEKAMHISLVLYAEHEFNASTFTSRVIAGTGSDMYSAIIGAIGALRGPKHGGANEVSLEIQQRYETPDEAEADIRKRVENKEVVIGFGHPVYTIADPRHQVIKRVAKQLSQEGGSLKMYNIADRLETVMWESKKMFPNLDWFSAVSYNMMGVPTEMFTPLFVIARVTGWAAHIIEQRQDNKIIRPSANYVGPEDRPFVALDKRQ

SEQ ID NO: 11839 - protein, 427 aa, Escherichia coli O157:H7
MADTKAKLTLNGDTAVELDVLKGTLGQDVIDIRTLGSKGVFTFDPGFTSTASCESKITFIDGDEGILLHRGFPIDQLATDSNYLEVCYILLNGEKPTQEQYDEFKTTVTRHTMIHEQITRLFHAFRRDSHPMAVMCGITGALAAFYHDSLDVNNPRHREIAAFRLLSKMPTMAAMCYKYSIGQPFVYPRNDLSYAGNFLNMMFSTPCEPYEVNPILERAMDRILILHADHEQNASTSTVRTAGSSGANPFACIAAGIASLWGPAHGGANEAALKMLEEISSVKHIPEFVRRAKDKNDSFRLMGFGHRVYKNYDPRATVMRETCHEVLKELGTKDDLLEVAMELENIALNDPYFIEKKLYPNVDFYSGIILKAMGIPSSMFTVIFAMARTVGWIAHWSEMHSDGMKIARPRQLYTGYEKRDFKSDVKH

SEQ ID NO: 11840 - protein, 411 aa, Rickettsia sp. DaE100R
DSEFAELKIRGKIFKLPILKASIGEDVIDISRVSAEADCFTYDPGFMSTASCQSTITYIDGDKGILRHRGYDIKDLAEKSDFLEVAYLLIYGELPSGEQYNNFTKQVAHHSLVNERLHYLFQTFCNSSHPMAIMLAAVGSLSAFYPDLLNFKEADYELTAIRMIAKIPTIAAMSYKYSIGQPFIYPDNSLDFTENFLHMMFATPCTKYTVNPIIKNALNKIFILHADHEQNASTSTVRIAGSSGANPFACISTGIASLWGPAHGGANEAVINMLKEIGSSEYIPKYIAKAKDKNDPFRLMGFGHRVYKNYDPRAVVLKETCKEVLKELGQLDNNPLLQIAIELEAIALKDEYFIERKLYPNVDFYSGIIYKAMGIPSQMFTVLFAIARTVGWMAQWKEMHEDPEQKISRPR

SEQ ID NO: 11841 - protein, 468 aa, Xenopus laevis
MSLISAGRVCARILGAKNSPCALIAARQASSSTNLKDVLSDLIPKEQTRIKNFKQQHGKTVIGQVTVDMVYGGMRGMKGLVYETSVLDPDEGIRFRGYSIPECQKLLPKAPGGEEPLPEGLFWLLVTGEVPNQDQVNWISKEWAKRAALPSHVVTMLDNFPTNLHPMSQLSAAITALNSESNFARAYAEGVNKAKYWELVYEDSMDLIAKLPCVAAKIYRNLYREGSSIGAIDSNLDWSDNFTNMLGYTDQQFTELMRLYLTIHSDHEGGNVSAHTSHLVGSALSDPYLSFSAAMNGLAGPLHGLANQEVLVWLTSLQKDLGGEVSDEKLRDYIWNTLNSGRVVPGYGHAVLRKTDPRYTCQREFALKHLPDDPMFKLVAQLYKIVPNILLEQGKAKNPWPNVDAHSGVLLQYYGMTEMNYYTVLFGVSRALGVLSQLIWSRALGFPLERPKSMSTDGLMQLVGSKSG

SEQ ID NO: 11842 - protein, 396 aa, SYNECHOCOCCUS SP. WH 8102
MAQKQSGDLRHARTGIELRPGLDGVPATQSAICDIDGEQGLLTYRGYPMQDLAANSSFLETAFLLIWGELPSRDQLAEFEHAVQMHRRVSFRVRDMMKCFPASGHPMDALQSSAASLGLFYSRRAIDDPQYVYDAVVRLIAKIPTMVAAFQLIRKGQDPIQPRDDLAYSANFLYMLTEREPDPLAARIFDRCLMLHAEHSLNASTFSARVTASTLTDPYAVVASAVGTLAGPLHGGANEDVLAMLEEVGTAENAGAYLDEAMAAKRKIMGFGHREYKVKDPRAVILQALVEEMFARFGHDELYDVAVAIEREAESRLGPKGIYPNVDFYSGLVYRKLGIPRDLFTPVFAIARVAGWLAHWREQLGANRIFRPSQIYSGSQLRAWMPIDERVTAPAA

SEQ ID NO: 11843 - protein, 111 aa, Bartonella tribocorum
ANEACLKMLQEIGSIKRIPEFIARAKDKNDPFRLMGFGHRVYKNYDPRAKILQKTCHEVLKELNIQDDPLLDIAIELEKIALNDEYFIEKKLYPNVDFYSGITLKALGFPT

SEQ ID NO: 11844 - protein, 426 aa, Helicobacter pylori 26695
MSVTLVNNENNERYEFETIESTRGPKAVDFSKLFETTGFFSYDPGYSSTAGCQSKISYVNGKKGELYYRGHRIEDLVAKYKYVDVCKLLLTGELPKNQDESLEFELELRHRSFVHESLLNMFSAFPSNAHPMAKLSSGVSILSTLYSTHQNMHTEEDYQTMARRIVAKIPTLAAICYRNEVGAPIIYPDIARSYVENILFMLRGYPYSRLKHTTQGEVEITPLEVEAFDKILTLHADHSQNASSTTVRNVASTGVHPYAAISAGISALWGHLHGGANEKVLLQLEEIGDVKNVDKYIARVKDKNDNFKLMGFGHRVYKSYDPRAKILKGLKDELHQKGVKMDERLSEIAAKVEEIALKDEYFIERNLYPNVDFYSGTILRALKIPVRFFTPVFVIGRTVGWCAQLLEHVKSPQARITRPRQVYVGD

SEQ ID NO: 11845 - protein, 426 aa, Helicobacter pylori J99
MSVTLINNENNARYEFETIECTRGPKAVDFSKLFETTGFFSYDPGYSSTAGCQSKISYINGKKGELYYRGHRIEDLVAKYKYVDVCRLLLTGELPKNQDESLEFELELRHRSFVHESLLNMFSAFPSNAHPMAKLSSGVSILSTLYSTHQNMHTEEDYQTMARRIVAKIPTLAAICYRNEVGAPIIYPDIARSYVENILFMLRGYPYSRLKHTTQGEVGITPLEVEAFDKILTLHADHGQNASSTTVRNVASTGVHPYAAISAGISALWGHLHGGANEKVLLQLEEIGDVKNVDKYIARVKDKNDNFKLMGFGHRVYKSYDPRAKILKGLKDELHQKGVKMDERLSEIAAKVEEIALKDEYFIERNLYPNVDFYSGTILRALKIPVRFFTPVFVIGRTVGWCAQLLEHVKSPQARITRPRQVYVGD

SEQ ID NO: 11846 - protein, 372 aa, Bacillus halodurans
MSVTRGLEGVVATTSSVSSIIESVLTYQGYDIDELAEHASFEEVIYLLWNGKLPNKVELKELADELANNAEIPQEVIEQMKAYPLDRVHPMGALRTAISSLGLYDEEADLMDEAANKRKALKLQAQVSTVVTAFSRIREGKEPVAPRTDLSFAANFLYMLTGEEPDEIAVDAFNKALVLHADHELNASTFTARVCVATLSDVYSGITAAIGALKGPLHGGANEQVMAMLTEIGDVENVEPYIRKALDNKQKIMGFGHRVYKNGDPRAKHLREMSKKLTSITGESKWYEMSVKIEEIVTNEKGLLPNVDFYSASVYHSLGIKHDLFTPIFAVSRMSGWLAHILEQYSNNRLIRPRAEYVGPNKRQYVRLEERN

SEQ ID NO: 11847 - protein, 368 aa, Bacillus halodurans
MSIKQPFVPGLDRVIAAETAISFLDTEREKIIIRGHDLIDLSVSNDYLDIVHLLLDGTLPNASEKSALEDTLKKHYDIPSYVMEILSLLPETTHPMDGLRTGLSALSSVDKEIENRSTEANKARAYKLLGKLPAITVNSYRLINGLKTVQPVPTLSYSANFLYMITGKEPKPFEAKIFDRSLLLYSEHEMPNSTFTARVIASTHSDLYGALTGGVASLKGNLHGGANEAVMYMLQSVDSAAEFQQLIQKKLVNKEKVMGFGHRVYMKKMDPRALEMKESLKQLCEKKGDYSLLDRCEAGEKTMLEEKGLYPNLDYYAAPVYWMLGIPIELYTPIFFTARTAGLAAHVMEQHQNNRIFRPRVSYIGESY

SEQ ID NO: 11848 - protein, 112 aa, Bartonella sp. pn15646ga
ANEACLKMLQEIGSIKKIPEFIARAKDKNDPFRLMGFGHRVYKNYDPRAKIMQKTCHEVLKELNIQDDPLLDIAIELEKIALSDEYFIEKKLYPNVDFYSGITLKALGFPTE

SEQ ID NO: 11849 - protein, 112 aa, Bartonella sp. sh8784ga
ANEACLKMLQEIGSVKRIPEFIARAKDKNDPFRLMGFGHRVYKNYDPRAKIMQKTCHEVLKELNIQDDPLLDIAIELEKIALNDEYFAEKKLYPNVDFYSGITLKALGFPTE

SEQ ID NO: 11850 - protein, 429 aa, Gallus gallus
ASSTNLKDVLAALIPKEQARIKTFRQQHGGTALGQITVDMSYGGMRGMKGLVYETSVLDPDEGIRFRGFSIPECQKALPKGGGGEPLPEGLFWLLVTGQIPTGAQVSWLSKEWAKRAALPSHVVTMLDNFPTNLHPMSQLSAAITALNSESNFARAYAEGILRTKYWEMVYESAMDLIAKLPCVAAKIYRNLYRAGSSIGAIDSKLDWSHNFTNMLGYTDAQFTELMRLYLTIHSDHEGGNVSAHTSHLVGSALSDPYLSFAAAMNGLAGPLHGLANQEVLGWLAQLQKAAGADASLRDYIWNTLNSGRVVPGYGHAVLRKTDPRYTCQREFALKHLPGDPMFKLVAQLYKIVPNVLLEQGAAANPWPNVDAHSGVLLQYYGMTEMNYYTVLFGVSRALGVLAQLIWSRALGFPLERPKSMSTDGLIAL

SEQ ID NO: 11851 - protein, 433 aa, Gallus gallus
  unsure (1)..(433): unsure at all Xaa locations
ASSTNLKDVLAALIPKEQARIKTFRQQHGGTALGQITVDMSYGGMRGMKGLVYETSVLDPDEGIRFRGFSIPECQKLLPKGGXGGEPLPEGLFWLLVTGQIPTGAQVSWLSKEWAKRAALPSHVVTMLDNFPTNLHPMSQLSAAITALNSESNFARAYAEGILRTKYWEMVYESAMDLIAKLPCVAAKIYRNLYRAGSSIGAIDSKLDWSHNFTNMLGYTDAQFTELMRLYLTIHSDHEGGNVSAHTSHLVGSALSDPYLSFAAAMNGLAGPLHGLANQEVLGWLAQLQKAXXXAGADASLRDYIWNTLNSGRVVPGYGHAVLRKTDPRYTCQREFALKHLPGDPMFKLVAQLYKIVPNVLLEQGAAANPWPNVDAHSGVLLQYYGMTEMNYYTVLFGVSRALGVLAQLIWSRALGFPLERPKSMSTDGLIAL

SEQ ID NO: 11852 - protein, 437 aa, Gallus gallus
ASSTNLKDVLASLIPKEQARIKTFRQQHGNTAVGQITVDMSYGGMRGMKGLIYETSVLDPDEGIRFRGFSIPECQKLLPKAGGGEEPLPEGLFWLLVTGQIPTPEQVSWVSKEWAKRAALPSHVVTMLDNFPTNLHPMSQLSAAITALNSESNFARAYAEGINRTKYWEFVYEDAMDLIAKLPCVAAKIYRNLYRAGSSIGAIDSKLDWSHNFTNMLGYTDPQFTELMRLYLTIHSDHEGGNVSAHTSHLVGSALSDPYLSFAAAMNGLAGPLHGLANQEVLLWLSQLQKDLGADASDEKLRDYIWNTLNSGRVVPGYGHAVLRKTDPRYTCQREFALKHLPSDPMFKLVAQLYKIVPNVLLEQGKAKNPWPNVDAHSGVLLQYYGMTEMNYYTVLFGVSRALGVLAQLIWSRALGFPLERPKSMSTAGLEKLSAGG

SEQ ID NO: 11853 - protein, 435 aa, Gallus gallus
STNLKDVLASLIPKEQARIKTFRQQHGNTAVGQITVDMSYGGMRGMKGLIYETSVLDPDEGIRFRGFSIPECQKLLPKAGGGEEPLPEGLFWLLVTGQIPTPEQVSWVSKEWAKRAALPSHVVTMLDNFPTNLHPMSQLSAAITALNSESNFARAYAEGINRTKYWEFVYEDAMDLIAKLPCVAAKIYRNLYRAGSSIGAIDSKLDWSHNFTNMLGYTDPQFTELMRLYLTIHSDHEGGNVSAHTSHLVGSALSDPYLSFAAAMNGLAGPLHGLANQEVLLWLSQLQKDLGADASDEKLRDYIWNTLNSGRVVPGYGHAVLRKTDPRYTCQREFALKHLPSDPMFKLVAQLYKIVPNVLLEQGKAKNPWPNVDAHSGVLLQYYGMTEMNYYTVLFGVSRALGVLAQLIWSRALGFPLERPKSMSTAGLEKLSAGG

SEQ ID NO: 11854 - protein, 427 aa, Salmonella enterica subsp. enterica serovar Typhi
MADTKAKITLTGDTAIELDVLKGTLGQDVIDIRSLGSKGVFTFDPGFTSTASCESKITFIDGDEGILLHRGFPIDQLATDSNYLEVCYILLYGEKPTQEEYDEFRTTVTRHTMIHEQITRLFHAFRRDSHPMAVMCGITGALAAFYHDSLDVNNPRHREIAAFRLLSKMPTMAAMCYKYSIGQPFVYPRNDLSYAGNFLNMMFSTPCETYEVNPVLERAMDRILILHADHEQNASTSTVRTAGSSGANPFACIAAGIASLWGPAHGGANEAALKMLEEISSVKHIPEFVRRAKDKNDSFRLMGFGHRVYKNYDPRATVMRETCHEVLKELGTKDDLLEVAMGLEHIALNDPYFIEKKLYPNVDFYSGIILKAMGIPSSMFTVIFAMARTVGWIAHWNEMHTDGMKIARPRQLYTGYDKRDFKSALKR

SEQ ID NO: 11855 - protein, 389 aa, Salmonella enterica subsp. enterica serovar Typhi
MTDTTILQNNTHVIKPKKSVALSGVPAGNTALCTVGKSGNDLHYRGYDILDLAEHCEFEEVAHLLIHGKLPTRDELNAYKSKLKALRGLPANVRTVLEALPAASHPMDVMRTGVSALGCTLPEKEGHTVSGARDIADKLLASLSSILLYWYHYSHNGERIQPETDDDSIGGHFLHLLHGEKPTQSWEKAMHISLVLYAEHEFNASTFTSRVIAGTGSDVYSAIIGAIGALRGPKHGGANEVSLEIQQRYETPDEAEADIRKRVENKEVVIGFGHPVYTIADPRHQVIKRVAKQLSEEGGSLKMYHIADRLETVMWETKKMFPNLDWFSAVSYNMMGVPTEMFTPLFVIARVTGWAAHIIEQRQDNKIIRPSANYTGPEDRVFVPIEKRC

SEQ ID NO: 11856 - protein, 431 aa, Nitrosomonas europaea
MEKTMPPQNVATLSPGKGKQEIELPIVSGNEGPDVVDIRSLYAQSGMFTYDPGFVSTASCKSAITFIDGDKGVLLYRGYPIEQLATRCDFMEVSYLLLNGELPTPDQKAKFVDNIKNHTMLHEQLIKFLSGFRRDAHPMAVMVGVVGALSAFYHDAMDVSDAQHREQSAFRLIAKLPTITAIAYKYNIGQPFIYPHNDLGFTENFLHMMFATPAEQYTPNPVIVRALDRILILHADHEQNASTSTVRLAGSSGANPFACISAGITCLWGPAHGGANEACLNMLEQIGDVSRINEYIARAKDKNDPFRLMGFGHRVYKNFDPRATLMRETCHEVLDELGLHNDRLFKLALELEKIALEDDYFITKKLYPNVDFYSGIVQRALGIPTSMFTAIFATARTVGWVAQWNEMISDPEQKIGRPRQLYVGAPRRDVP

SEQ ID NO: 11857 - protein, 386 aa, Acidithiobacillus ferrooxidans
MAEPNFAPGLEGVAATQSSISNIDGAAGLLSYRGFAIADLAAHSSFEEVALLLLDGVLPGAADLERFDHGLRAHRQVKYNVREIMKFMPVTGHPMDMLHCAVASLGMFYPQQELSDAERGNTLHLDAMAMRIIARMPTIVAMWEQMRFGNDPISPRPDLSHAANFLYMLSGREPDPAHTKILDSCLILHAEHTINASTFSVLVTGSTLTNPYHVIGGAIGTLAGPLHGGANQKVVEMLEEISSVQQVGAYLDRKMANKEKIWGFGHRIYKTRDPRAVILKGMMEDMASHGNLRHSSLFEIAIEVERQATERLGAQGIHANVDFYSGVLYHEMGIKADLFTPIFAMARSAGWLAHWREQLADNRIFRPTQVYTGEQDRRYVPVAQRT

SEQ ID NO: 11858 - protein, 331 aa, Bartonella koehlerae
STASCESKITYIDGNEGILLYRGYPIDQLAEKGDFLESCYLLLYGELPTKQEKIDFDRCIMQHTVVHEQFARFFHGFRRDSHPMAVMIACLGAMSAFYHDSIDITDPQQRMIASIRLISKVPTLAAMAYKYSIGQAFVYPRNDLSYAANFLHMCFSIPCEEYKINPVLTRAMDRIFTLHADHEQNASTSTVRLAGSSGANPFACIAAGVACLWGPAHGGANEACLKMLQEIGSVERIPQFIARAKDKNDSFRLMGFGHRVYKNYDPRAKIMQQTCHEVLKELNIQDDPLLDIAIALENIALNDEYFVGKKLYPNVDFYSGITLKALGFPTE

SEQ ID NO: 11859 - protein, 416 aa, Ehrlichia canis
MVKEAVLELDGQKVKLPVLCDTNGNKVIDITSLYKGTGILTYDPGFMSTAACESKITFIDGNKGILCYRGYNIADLVNNNKSFIEIVYLLFYGSFPSVDNLKDFMLQISQEYMPPEMVCDVIKSFSQDSHPMTILMACFSALASYYHDQAVDKDGLKHPKLAVAKVASIIAMIYRYTTNQDFIEPNHGLSYSENFIHMMFDISSYKFTQVVAKALDVIFTLHADHEQNASTATVRLAGSSGADLFACLVAGIATLWGPAHGGANEAVINMLMAIEKPSNVKQFIQKVKDGNKSTRLMGFGHRVYKNYDPRAKIICEICKEVLNDLGVNDPLLEIALELENIALQDSYFIERSLYPNVDFYSGIILKAIGIPVRMFTTLFALARTSGWSAQWYEMVADKNYKICRPRQLYTGHIAKI

SEQ ID NO: 11860 - protein, 111 aa, Bartonella sp. pb18975nm
ANEACLKMLQEIGSVKRIPEFIARAKDKNDPFRLMGFGHRVYKNYDPRAKIMQKTCHEVLKELNIQDDPLLDIAIELEKIALNDEYFVEKKLYPNVDFYSWHYEMFTVLFA

SEQ ID NO: 11861 - protein, 112 aa, Bartonella sp. pb18980nm
ANEACLKMLQEIGSVKRIPEFIARAKDKNDPFRLMGFGHRVYKNYDPRAKIMQKTCHEVLKELNIQDNPLLDIAIELEKIALNDEYFVEKKLYPNVDFYSGITLKALGFPTE

SEQ ID NO: 11862 - protein, 112 aa, Bartonella sp. sa18991nm
ANEACLKMLQEIGSIKRIPEFIARAKDKNDPFRLMGFGHRVYKNYDPRAKIMQKTCHEVLKELNIQNDPLLDIAIELEKIALNDEYFVEKKLYPNVDFYSGITLKALGFPTE

SEQ ID NO: 11863 - protein, 112 aa, Bartonella sp. ed19224az
ANEACLKMLQEIGSIKRIPEFIARAKDKNDPFRLMGFGHRVYKNYDPRAKIMQQTCHEVLKELNIQDDPLLDIAIELENIALNDEYFVEKRLYPNVDFYSGITLKALGFPTE

SEQ ID NO: 11864 - protein, 433 aa, Ehrlichia chaffeensis
MLYKQDMCGVIINLGRIMVKEAVLELDGQRIKLPVLYDTHGNKAVDITSLYKNTGILTYDPGFMSTAACESRITFIDGNKGILCYRGHDIVNLVNNNKSFIEIVYLLFYGVLPGLEDLQNFISQISQEYNPPKIVHDVIKSFPRDSHPMSILMACFSALASCYHNQDNSADQLKCAKLAVAKVASIIALIYRYITNQDFVESDTKLSYSENFVHMMFDISSYKFTQVVAKALDIIFVLHADHEQNASTATVRLSGSSGADLFACLVAGTATLWGPAHGGANEAVINMLMAIEKPSNVKQFIQKVKDGNKSTRLMGFGHRVYKNYDPRAKIMYKICREVLNNLNVNDPLLEIALELENIALQDSYFIDRNLYPNVDFYSGIVLKAIGIPVRMFTTLFALARTSGWSAQWYEMVAEENYKICRPRQLYTGNIAEC

SEQ ID NO: 11865 - protein, 411 aa, Anaplasma phagocytophilum
MVEKAVLECGDRRISLPVLRGTDGTPVVDITTLYRENNVLTYDPGFMSTAACRSEITFIDGNKGTLRYRGIDIENLIGTPNSFSSIVYLLLNGTLPSETEHEEFARILGAEYDVPEQVMNVIRSFPRDSHPMAILIASFSALAANYHASRIDPLTGAIIAIAKVPGIVASIYRHTANLDFIQADANLEYTHHFIRMMFGDMDDAHRDIMHKALDAIFIMHADHEQNASTSTVRMTGSSGAGLFACLCAGVATLWGPAHGGANEAVIKMLAEIGSPENVSSFIDKVKNNKGKSRLMGFGHRVYKSYDPRARVLRTICKDVLDSLGRDENLLAVAEELESQALQDEYFIERKLYPNVDFYSGIVLRAMGVPVDMYTAFFALARTSGWASQWYEMIQSDEGKRISRPRQLYTGK

SEQ ID NO: 11866 - protein, 411 aa, Anaplasma phagocytophilum
MVEKAVLECGDRRISLPVLRGTDGTPVVDITTLYRENNVLTYDPGFMSTAACRSEITFIDGNKGTLRYRGIDIENLIGTPNSFSSIVYLLLKGTLPSETEHEEFARILGAEYDVPEQVMNVIRSFPRDSHPMAILIASFSALAANYHASRIDPLTGAIIAIAKVPGIVASIYRHTANLDFIQADANLEYTHHFIRMMFGDMDDAHRDIMHKALDAIFIMHADHEQNASTSTVRMSGSSGAGLFACLCAGVATLWGPAHGGANEAVIKMLAEIGSPENVSSFIDKVKNNKGKNRLMGFGHRVYKSYDPRARVLRTICKDVLDSLGRDENLLAVAEELESQALRDEYFIERKLYPNVDFYSGIVLRAMGVPVDMYTAFFALARTSGWASQWYEMIQSDEGKRISRPRQLYTGK

SEQ ID NO: 11867 - protein, 411 aa, Anaplasma phagocytophilum
MVEKAVLECGDRRISLPVLRGTDGTPVVDITTLYRENNVLTYDPGFMSTAACRSEITFIDGNKGTLRYRGIDIENLIGTPNSFSSIVYLLLKGTLPSETEHEEFVRILGAEYDVPEQVMNVIRSFPRDSHPMAILIASFSALAANYHASRIDPLTGAIIAIAKVPGIVASIYRHTANLDFIQADANLEYTHHFIRMMFGDMDDAHRDIMHKALDAIFIMHADHEQNASTSTVRMTGSSGAGLFACLCAGVATLWGPAHGGANEAVIKMLAEIGSPENVSSFIDKVKNNKGKSRLMGFGHRVYKSYDPRARVLRTICKDVLDSLGRDENLLAVAEELESQALQDEYFIERKLYPNVDFYSGIVLRAMGVPVDMYTAFFALARTSGWASQWYEMIQSDEGKRISRPRQLYTGK

SEQ ID NO: 11868 - protein, 411 aa, Anaplasma platys
MKENAVLMCGDKKVSLPMLSGTDGIQLIDITTLYRDHKVLTYDPGFMSTAACSSEITFIDGEKGILRHRGLDIADLIGIKGGFCSVAHLLLYGVLPSDTVFEQFLAAIGAQHALSSDVLGVISSFRRDAHPMAILMACFSTLAAKYHGDNRGNEELAVLAIAQVPSLVAAIYRHRMGLELVSPDPSLSYTGNFVKMMFGALEKTRADAIEEALDAIFIMHADHEQNASTATVRMAGSAGTELFACLAAGTATLWGPAHGGANEAVIRMLESIGSPDKVEEFIGFVKDNNSKVRLMGFGHRVYKSYDPRAKILGQISRSVLDNLGCSDELLGVAEELERCALQDEYFVERKLYPNVDFYSGIVLRAMGVPVEMYTTFFALARTAGWVSQWCELLRGSESLKICRPRQLYAGK

SEQ ID NO: 11869 - protein, 411 aa, Anaplasma platys
MKENAVLMCGDKKVSLPMLSGTDGIQLIDITTLYRDHKVLTYDPGFMSTAACSSEITFIDGEKGILRHRGLDIADLIGIKGGFCSVAHLLLYGVLPSDTVFEQFLAAIGAQHALSSDVLGVISSFRRDAHPMAILMACFSTLAAKYHGDNRGNEELAVLAIAQVPSLVAAIYLHRMGLELVSPDPSLSYTGNFVKMMFGALEKTRADAIEEALDAIFIMHADHEQNASTATVRMAGSAGTELFACLAAGTATLWGPAHGGANEAVIRMLESIGSPDKVEEFIGFVKDNNSKVRLMGFGHRVYKSYDPRAKILGQISRSVLDNLGCSDELLGVAEELERCALQDEYFVERKLYPNVDFYSGIVLRAMGVPVEMYTTFFALARTAGWVSQWCELLRGSESLKICRPRQLYAGK

SEQ ID NO: 11870 - protein, 398 aa, Neorickettsia risticii
MNSEKVKVNVEEFLKSTAGPSGVSASLEPRGFFYDPGYAKTAPCKSSITFIDGENGILLHRGYPIEELAQTSDFLQVGYLLINGKLPDSIATREFEEKIKHVPQLPECVLKNIRSFPTSAHPMAVLISALASLASVYGEMDFHEKKLLLVAYTPWLVAYIYRHINSQEFIEPDIRLPYTENFLYMMFGEKKPKDAEILDKIFILHADHGQTASTSVARMVVSSGASPIVACSAATASLWGPLHGGANERVLEMLRGIIESGENVENFIERVKRKEERLMGFGHRVYKNYDPRAAILKQKAHDVLKADSPILKTAGKLETIATREEYFLSRKLYPNVDFYSGIVLDALGIPSCMFTPIFALARTVGWVAQIAEFLSDSEQKLCRPRQIYVGEPRRSVHG

SEQ ID NO: 11871 - protein, 398 aa, Neorickettsia sennetsu
MNSEKVKVNVEEFLKSTAGPFGVSASLEPKGFFYDPGYAKTAPCKSSITFIDGENGILLHRGYPIEELAQTSDFLQVGYLLIDGKLPDSAATREFEERIKHVPQLPECVLKNIRSFPTSAHPMAVLISALASLASVYGEMDFNQKKLLLVAYTPWLIAHIYRHINSLEFVEPDIRLPYTENFLYMMFGEKKPKDAEILDKIFILHADHGQTASTSVARMVVSSGASPIAACSAATASLWGPLHGGANERVLEMLRGIVESGEKVENFIERVKRKEERLMGFGHRVYKNYDPRAAILKQKAHDVLKADSPILKTAGELETITAREEYFLSRKLYPNVDFYSGIVLDALGISSCMFTPIFALARTVGWVAQITEFLSDSEQKLCRPRQIYVGEPRRNVHG

SEQ ID NO: 11872 - protein, 413 aa, Wolbachia pipientis
MDKKALLELSNGSKIDLPVLSGTVGPDVLNIKDLYKKTGLFTYDPGFVSTASCSSTITFIDGDEGVLKYRGHNIADLAENNNFTAVIYLLLYGKLPSSEQHKKFLLKIQESSKVSEQVTNVIKAFPKTAHPMSILVACFANLSASYHEMHGKNVNGEDLDFGISAIAKVPAIVAMIYRHINNQEFINANNKLSYSENFLNMIFGSAVNNTLFVKALDKIFTLHADHEQNASTAAVRLVGSAGSNLFASLSAGVATLWGPAHGGANEAVINMLKEIEQSGDVDRFIEKAKDDKDPFKLMGFGHRVYKNYDPRALILKDACHEILSKLEQNNELLEIAKKLEEIALKDEYFITRKLYPNVDFYSGIIMNAIGIPSSMFTPIFALARTTGWVAQWYEMINDKETKICRPRQLYLGK

SEQ ID NO: 11873 - protein, 466 aa, Homo sapiens [sequence omitted]

SEQ ID NO: 11874 - protein, 466 aa, Homo sapiens
MALLTAAARLLGTKNASCLVLAARHASASSTNLKDILADLIPKEQARIKTFRQQHGKTVVGQITVDMMYGGMRGMKGLVYETSVLDPDEGIRFRGFSIPECQKLLPKAKGGEEPLPEGLFWLLVTGCIPTEEQVSWLSKEWAKRAALPSHVVTMLDNFPTNLHPMSQLSAAVTALNSESNFAQAYARGISRTKYWELIYEDSVDLIAKLPCVAAKIYRNLYWEGSGIGAIDSNLDWSHNFTNMLGYTDHQFTELMRLYLTIHSDHEGGNVSAHTSHLVGSALSDPYLSFAAAMNGLAGPLHGLANQEVLVWLTQLQKEVGKDVSDEKLRDYIWNTLNSGRVVPGYGHAVLRKTDPRYTCQREFALKHLPNDPMFKLVAQLYKIVPNVLLEQGKAKNPWPNVDAHSGVLLQYYGMTEMNYYTVLFGVSRALGVLAQLIWSRALGFPLERPKSMSTEGLMKFVDSKSG

SEQ ID NO: 11875 - protein, 264 aa, Homo sapiens
MDLIAKLPCVAAKIYRNLYREGSGIGAIDSNLDWSHNFTNMLGYTDHQFTELTRLYLTIHSDHEGGNVSAHTSHLVGSALSDPYLSFAAAMNGLAGPLHGLANQEVLVWLTQLQKEVGKDVSDEKLRDYIWNTLNSGRVVPGYGHAVLRKTDPRYTCQREFALKHLPNDPMFKLVAQLYKIVPNVLLEQGKAKNPWPNVDAHSGVLLQYYGMTEMNYYTVLFGVSRALGVLAQLIWSRALGFPLERPKSMSTEGLMKFVDSKSG

SEQ ID NO: 11876 - protein, 377 aa, Ferroplasma acidarmanus
MIKMAVSLGLEDVFIKYTGLTFIDGNAGVLRYRGYDINDLVQNTGFEEVCYLMTNGELPNSQQLAEFKKSVKEHYKLPDHVMELISDLPREADTLTMMETAFASLSSGDYQWNKENDRKQVPKILGENLGIISNIYRHKMGMGLQNPDPKYDYAEAFLRNCFGNADEKKISAMNAALVIYVDHEVPASTTAALVASSTLSDMYSCITAATAALKGPLHGGAAEAAYKQLLDIGNVDNVENWFKTNILDGKRRLMGFGHRVYRTYDPRMKIFKKLATTLEQTDEQKKLFEIAVKLEELGVKEFGGKGIYPNTDYYSGIVFNEIGFPIYMFTTLFGFSRVLGWLSHITEYVEEEERLIRPRAVYTGPDKRDFVKIQDRK

SEQ ID NO: 11877 - protein, 372 aa, Ferroplasma acidarmanus
MEEISPGLENVYIKYTELTFIDGQKGIMRYRGYDINELAEKSSFEKVSYLMLFGKFPDDSELKNFQNKINSHLALDDYLKDILRAMPETSDSLGILQTLLSAKASKESNYKYTKENDGEKIPEILGSVLSMVANIYRLKSGNNIIDPEPGESYAETFLKACSGSADKNKISAMDSALILYMDHEIPASTTAALVTASTLSDMYSSLASAIAALRGPLHGGAAEGAYRQFLEIGEPENVNAWFENNILNGKRRLVGFGHRVYRTYDPRLKTFKKYADILSTTEEQKKILAIAKRLEEAGVKAFGSKGIYTNTDFYAGMVFNAIGFPVDMFTTLFGLSRISGILAHITEYVETQERLIRPRAIYRGSGERKYPE

SEQ ID NO: 11878 - protein, 437 aa, Sus scrofa
ASSTNLKDILADLIPKEQARIKTFRQQHGNTVVGQITVDMMYGGMRGMKGLVYETSVLDPDEGIRFRGYSIPECQKMLPKAKGGEEPLPEGLFWLLVTGQIPTEEQVSWLSKEWAKRAALPSHVVTMLDNFPTNLHPMSQLSAAITALNSESNFARAYAEGIHRTKYWELIYEDCMDLIAKLPCVAAKIYRNLYREGSSIGAIDSKLDWSHNFTNMLGYTDAQFTELMRLYLTIHSDHEGGNVSAHTSHLVGSALSDPYLSFAAAMNGLAGPLHGLANQEVLVWLTQLQKEVGKDVSDEKLRDYIWNTLNSGRVVPGYGHAVLRKTDPRYTCQREFALKHLPHDPMFKLVAQLYKIVPNVLLEQGKAKNPWPNVDAHSGVLLQYYGMTEMNYYTVLFGVSRALGVLAQLIWSRALGFPLERPKSMSTDGLIKLVDSK

SEQ ID NO: 11879 - protein, 464 aa, Sus scrofa
MALLTAAARLFGAKNASCLVLAARHASASSTNLKDILADLIPKEQARIKTFRQQHGNTVVGQITVDMMYGGMRGMKGLVYETSVLDPDEGIRFRGYSIPECQKMLPKAKGGEEPLPEGLFWLLVTGQIPTEEQVSWLSKEWAKRAALPSHVVTMLDNFPTNLHPMSQLSAAITALNSESNFARAYAEGIHRTKYWELIYEDCMDLIAKLPCVAAKIYRNLYREGSSIGAIDSKLDWSHNFTNMLGYTDAQFTELMRLYLTIHSDHEGGNVSAHTSHLVGSALSDPYLSFAAAMNGLAGPLHGLANQEVLVWLTQLQKEVGKDVSDEKLRDYIWNTLNSGRVVPGYGHAVLRKTDPRYTCQREFALKHLPHDPMFKLVAQLYKIVPNVLLEQGKAKNPWPNVDAHSGVLLQYYGMTEMNYYTVLFGVSRALGVLAQLIWSRALGFPLERPKSMSTDGLIKLVDSK

SEQ ID NO: 11880 - protein, 437 aa, Sus scrofa
ASSTNLKDILADLIPKEQARIKTFRQQHGNTAVGQITVDMMYGGMRGMKGLVYETSVLDPDEGIRFRGYSIPECQKMLPKAKGGEEPLPEGLFWLLVTGQIPTEEQVSWLSKEWAKRAALPSHVVTMLDNFPTNLHPMSQLSAAITALNSESNFARAYAEGIHRTKYWELIYEDCMDLIAKLPCVAAKIYRNLYREGSSIGAIDSKLDWSHNFTNMLGYTDAQFTELMRLYLTIHSDHEGGNVSAHTSHLVGSALSDPYLSFAAAMNGLAGPLHGLANQEVLVWLTQLQKEVGKDVSDEKLRDYIWNTLNSGRVVPGYGHAVLRKTDPRYTCQREFALKHLPHDPMFKLVAQLYKIVPNVLLEQGKAKNPWPNVDAHSGVLLQYYGMTEMNYYTVLFGVSRALGVLAQLIWSRALGFPLERPKSMSTDGLIKLVDSK

SEQ ID NO: 11881 - protein, 427 aa, Cytophaga hutchinsonii
MSKEAEIILDGKSYKFPVIEGSEGEKAIDIAKLRDLTGYVTLDTGYKNTGATKSAITFLDGEQGILRYRGYPIEQLASKASFLEVSYLLIYGELPTTSQLENFKERIRKHTNLHEDIKKVFDGFPSSAHPMGVLSSAVSSLTAYYPGSIDPTANDDEVDMTIVRLMAKLPTIAAWSYRNSKGQPLMYPKPKLGYCENFLYMMFGQPNEDFELDPVVVEALNTLFILHADHEQNCSTSTVRIVGSAHASLYSSIAAGINALWGPLHGGANQEVIEMLEEIKASGISTKDYIAKVKTKEVRLMGFGHRVYKNFDPRAKIIKKACDDILNKLGVKDPALEIAKELEQAALSDPYFVERKLYPNVDFYSGIIYKALGLRSDLFTVMFAIGRLPGWIAQWKELRDAKEPIGRPRQIYTGYTERDYVSIDKRK

SEQ ID NO: 11882 - protein, 427 aa, Salmonella typhimurium LT2
MADTKAKITLTGDTTIELDVLKGTLGQDVIDIRSLGSKGVFTFDPGFTSTASCESKITFIDGDEGILLHRGFPIDQLATDSNYLEVCYILLYGEKPTQEEYDEFRTTVTRHTMIHEQITRLFHAFRRDSHPMAVMCGITGALAAFYHDSLDVNNPRHREIAAFRLLSKMPTMAAMCYKYSIGQPFVYPRNDLSYAGNFLNMMFSTPCETYEVNPVLERAMDRILILHADHEQNASTSTVRTAGSSGANPFACIAAGIASLWGPAHGGANEAALKMLEEISSVKHIPEFVRRAKDKNDSFRLMGFGHRVYKNYDPRATVMRETCHEVLKELGTKDDLLEVAMELEHIALNDPYFIEKKLYPNVDFYSGIILKAMGIPSSMFTVIFAMARTVGWIAHWNEMHTDGMKIARPRQLYTGYDKRDFKSALKR

SEQ ID NO: 11883 - protein, 389 aa, Salmonella typhimurium LT2
MTDTTILQNNTHVIKPKKSVALSGVPAGNTALCTVGKSGNDLHYRGYDILDLAEHCEFEEVAHLLIHGKLPTRDELNAYKSKLKALRGLPANVRTVLEALPAASHPMDVMRTGVSALGCTLPEKEGHTVSGARDIADKLLASLSSILLYWYHYSHNGERIQPETDDDSIGGHFLHLLHGEKPTQSWEKAMHISLVLYAEHEFNASTFTSRVIAGTGSDVYSAIIGAIGALRGPKHGGANEVSLEIQQRYETPDEAEADIRKRVENKEVVIGFGHPVYTIADPRHQVIKRVAKQLSEEGGSLKMYHIADRLETVMWETKKMFPNLDWFSAVSYNMMGVPTEMFTPLFVIARVTGWAAHIIEQRQDNKIIRPSANYTGPEDRPFVSIDDRC

SEQ ID NO: 11884 - protein, 77 aa, Streptococcus salivarius
EFMKEKKGLIPNVDFYSATVYHTLGIDSDIFTLIFAMSRVAGWIAHIQEQQKNNKLIRPRSQYIGQENMTYIPLEKR

SEQ ID NO: 11885 - protein, 312 aa, Methanothermobacter thermautotrophicus str. Delta H
MNKDALNALKFKYMKIRWSDMMNEGIINDILRVKNPRWRTSITRVEPNRIVTRGYSQEDLIGGVSFSEMVYLLIRGELPPQNVARMLEAVLVSFCDHGVTPPSTQAARMIASAGSPVHACIAGGLLAFGKNHAGAIERSMKLFQETVSSCESEDEIPDAALRLVDDHLQANRRIPGFGHRYHNADPRAVRLLELAEDYGCVGPHTSLALEVQEILLERKGVRMNVDGANAGILSDMGFDWRTGAGVFMIGRLPGLISHVYEEKVREPAFRKFFEIEEIQYDGEEKRILEADYRTLNGSEIWKTTNTKEPGRE

SEQ ID NO: 11886 - protein, 280 aa, Methanothermobacter thermautotrophicus str. Delta H
MAIGKESLEQVFRAGSPRWRTSITRVEPNRIVTRGYSQEDLIGGVSFSEMVYLLIRGELPPQNVARMLEAVLVSFCDHGVTPPSTQAARMIASAGSPVHACIAGGLLAFGKNHAGAIERSMKLFQETVSSCESEDEIPDAALRLVDDHLQANRRIPGFGHRYHNADPRAVRLLELAEDYGCVGPHTSLALEVQEILLERKGVRMNVDGANAGILSDMGFDWRTGAGVFMIGRLPGLISHVYEEKVREPAFRKFFEIEEIQYDGEEERDLSAGADLEPMPE

SEQ ID NO: 11887 - protein, 123 aa, Glycine max
  unsure (1)..(123): unsure at all Xaa locations
XDDPLFKLVSKLYEVVPPMRIELGKVKNPWPNVDAHSGVVLNHFGLTEAKYFTVLFGVARSIGVGPQLILDRILGLPLERPKSVTMAWLEEYCKNAAKXAFCVRTGNFRLIMEIPFERSAICD

SEQ ID NO: 11888 - protein, 188 aa, Sesbania rostrata
TGVMALQVQSEFQKAYEGGITKSRYWEPTYEDSMNLIARLPAIAAYIYRRKYKDGKIIPLDDSLDYGANYAHMLGFDDPEMLEFMRLYVSIHSDHEGGNVSSHTAHLVASPLSDPYLAFAAALNGLAGPLHGLANQEVLRWIRSIVKEFGTPNISTEQLSDYIHKTLSSGQVVPGYGHGVLRKTVQDT

SEQ ID NO: 11889 - protein, 258 aa, Zea mays
  unsure (1)..(258): unsure at all Xaa locations
PRAPAIAFFRGLAAVSRLRSRMGQDATTLGGVRWLQMQSASDLDLRSQLQEMIPEQQDRLKKLKSEHGKVQLGNITVDMVLGGMRGMTGMLWETSLLDPEEGIRFRGLSIPECQKVLPAAVKDGEPLPEGLLWLLLTGKVPTKEQVDALSKELLARSTVPAHVYKAIDALPVTAHPMTQFTXGIMALQVESEFXSAYDKGMPKTKFWEPTYEDCLXLIARLXQVAXYGYRRXFKDGKXYAADXTLDYAANFXHMLWFD

SEQ ID NO: 11890 - protein, 294 aa, Saccharomyces bayanus
MTVPYLNSGRNVASYLQTHSHQEKTLKERFSEIYPSHAQDVKQFVKEHGKTKISDVLLEQVYGGMRGVPGSVWEGSELDAEEGIRFRGRTIADIQKELPKAKGSSQPLPEALFWLLLTGEVPTQAQVENLSADLMSRSELPHHVVQLLDNLPKDLHPMAQLSIAVTALESESKFAKAYAQGISKQDYWSYTFEDSLDLLGKLPVIAAKIYRNVFKDGKIGEVDPNADYGKNLVNLIGSKDEDFVDLMRLYLTIHSDHEGGNVSAHTSHLVGSALSSPYLSLASGLNGLAGPLHG

SEQ ID NO: 11891 - protein, 138 aa, Bos taurus
LRGMKGLVYETSVLDPDEGIRFRGYSIPECQKLLPKAKGGEEPLPEGLFWLLVTGQIPTEEQVSWLSQEWAKRAALPSHVVTMLDNFPTNLHPMSQLSADVTALNSESTFARAYSEGINRTKYWELIYEDSMDLIAKL

SEQ ID NO: 11892 - protein, 327 aa, Mus musculus
MDSWVVLLGLQIIWLPLLTHGTAPTPTLRFVAVGDWGGVPNAPFHTAREMANAKEIARTVQTMGADFIMSLGDNFYFTGVHDASDKRFQETFEDVFSDRALRNIPWYVLAGNHDHLGNVSAQIAYSKISKRWNFPSPYYRLRFKIPRTNITVAIFMLDTVMLCGNSDDFASQQPKMPRDLGVARTQLSWLKKQLAAAKEDYVLVAGHYPIWSIAEHGPTRCLVKNLRPLLATYGVTAYLCGHDHNLQYLQDENGVGYVLSGAGNFMDPSVRHQRKVPNGYLRFHYGSEDSLGGFTHVEISPKEMTIIYVEASGKSLFKTSLPRRPRP

SEQ ID NO: 11893 - protein, 327 aa, Rattus norvegicus
MDTWMVLLGLQILLLPLLAHCTAPASTLRFVAVGDWGGVPNAPFHTAREMANAKEIARTVQIMGADFIMSLGDNFYFTGVHDANDKRFQETFEDVFSDRALRNIPWYVLAGNHDHLGNVSAQIAYSKISKRWNFPSPYYRLRFKVPRSNITVAIFMLDTVMLCGNSDDFVSQQPEMPRDLGVARTQLSWLKKQLAAAKEDYVLVAGHYPIWSIAEHGPTRCLVKNLRPLLAAYGVTAYLCGHDHNLQYLQDENGVGYVLSGAGNFMDPSVRHQRKVPNGYLRFHYGSEDSLGGFTYVEIGSKEMSITYVEASGKSLFKTSLPRRPRP

SEQ ID NO: 11894 - protein, 306 aa, Rattus norvegicus
TAPASTLRFVAVGDWGGVPNAPFHTAREMANAKEIARTVQIMGADFIMSLGDNFYFTGVHDANDKRFQETFEDVFSDRALRNIPWYVLAGNHDHLGNVSAQIAYSKISKRWNFPSPYYRLRFKVPRSNITVAIFMLDTVMLCGNSDDFVSQQPEMPRDLGVARTQLSWLKKQLAAAKEDYVLVAGHYPIWSIAEHGPTRCLVKNLRPLLAAYGVTAYLCGHDHNLQYLQDENGVGYVLSGAGNFMDPSVRHQRKVPNGYLRFHYGSEDSLGGFTYVEIGSKEMSITYVEASGKSLFKTSLPRRPRP

SEQ ID NO: 11895 - protein, 303 aa, Nostoc sp. PCC 7120
MNLKRRQFLFLSSLSAVGTGLLAWKFAHKYYQSSDLAIASPPKKDLLLRFVSVADTGTGARGQYAVARAMTLYHKQNPYDLVVLAGDNIYNNGEIEKVNAVFERPYQDLLKQGVKFQACLGNHDIRTDNGDPQVRYPGFNMNGRRYYTFRRDRVQFFALDTNSNADWQNQLTWLEKELSSSNAPWKVVFGHHPIYSSGVYGSNQAFIKTFTPLFQKYGVQLYINGHEHSYERTRAIDGTTYLTCGAGAGNRPVGRSKWTEYSTSDLSFATYEVYPDRIELNAIATNNRIFDRGIIRRVEVSGV

SEQ ID NO: 11896 - protein, 310 aa, Bacteroides thetaiotaomicron VPI-5482
MKIKSLFILLFLSVFTFAHAQLTDYSIFDKKFNFYVANDLSRNGYYDQKPIAELMGTMGEEIGPEFVLATGDVHHFDGVRSVNDPLWMTNYELIYSHPELMIDWFSILGNHEYRGSTQAVLDYTNISRRWSMPDRYYTKVFEEKGATIRIVWIDTTPLIDKYRNESDKYPDACKQDISKQLSWLESVLASAKEDWIIVAGHHPIYAYTPKEESERLDMQKRVDSILRKHNVDMYICGHIHNFQHIRVPGSDIDYVVNSAASLARKVEPIEGTKFCSPEPGFSVCSIDKKELNLRMIDKKGNVLYTVTRKK

SEQ ID NO: 11897 - protein, 336 aa, Arabidopsis thaliana
MATLKHKPVNLVFYVYNLIIIFSSHSSTAELRRLLQPSKTDGTVSFLVIGDWGRRGSYNQSQVALQMGEIGEKLDIDFVISTGDNFYDNGLTSLHDPLFQDSFTNIYTAPSLQKPWYSVLGNHDYRGDVRAQLSPMLRALDNRWVCMRSFIVNAEIVDLFFVDTTPFVDKYFIQPNKHVYDWSGVLPRQTYLNNLLKELDVALRESVAKWKIVIGHHTIKSAGHHGNTIELEKHLLPILQANEVDLYVNGHDHCLEHISSVDSNIQFMTSGGGSKAWKGGDVNYVEPEEMRFYYDGQGFMSVHVSEAELRVVFYDVFGHVLHHWKKTYKEALYFAS

SEQ ID NO: 11898 - protein, 366 aa, Arabidopsis thaliana
MTYIYRDTKITTKSTIPFLIFFLFCFSNLSMATLKHKPVNLVFYVYNLIIIFSSHSSTAELRRLLQPSKTDGTVSFLVIGDWGRRGSYNQSQVALQMGEIGEKLDIDFVISTGDNFYDNGLTSLHDPLFQDSFTNIYTAPSLQKPWYSVLGNHDYRGDVRAQLSPMLRALDNRWVCMRSFIVNAEIVDLFFVDTTPFVDKYFIQPNKHVYDWSGVLPRQTYLNNLLKELDVALRESVAKWKIVIGHHTIKSAGHHGNTIELEKHLLPILQANEVDLYVNGHDHCLEHISSVDSNIQFMTSGGGSKAWKGGDVNYVEPEEMRFYYDGQGFMSVHVSEAELRVVFYDVFGHVLHHWKKTYKEALYFAS

SEQ ID NO: 11899 - protein, 335 aa, Arabidopsis thaliana
MDSLRDVKPIKLIFSIFCLVIILSACNSTAELPRFVQPPEPDGSLSFLVVGDWGRRGSYNQSQVALQMGKIGKDLNIDFLISTGDNFYDDGIISPYDSQFQDSFTNIYTATSLQKPWYNVLGNHDYRGNVYAQLSPILRDLDCRWICLRSYVVNAEIVDIFFVDTTPFVDRYFDEPKDHVYDWRGVLPRNKYLNSLLTDVDVALQESMAKWKIVVGHHTIKSAGHHGNTIELEKQLLPILEANEVDLYINGHDHCLEHISSINSGIQFMTSGGGSKAWKGDVNDWNPQEMRFYYDGQGFMSVYTSEAELRVVFYDGLGHVLHRWSTLKNGVYSDI

SEQ ID NO: 11900 - protein, 364 aa, Arabidopsis thaliana
MTYIYRDTKITTKSTIPFLIFFLFCFSNLSMATLKHKPVNLVFYVYNLIIIFSSHSSTAELRRLLQPSKTDGTVSFLVIGDWGRRGSYNQSQVALQMGEIGEKLDIDFVISTGDNFYDNGLTSLHDPLFQDSFTNIYTAPSLQKPWYSGNHDYRGDVRAQLSPMLRALDNRWVCMRSFIVNAEIVDLFFVDTTPFVDKYFIQPNKHVYDWSGVLPRQTYLNNLLKELDVALRESVAKWKIVIGHHTIKSAGHHGNTIELEKHLLPILQANEVDLYVNGHDHCLEHISSVDSNIQFMTSGGGSKAWKGGDVNYVEPEEMRFYYDGQGFMSVHVSEAELRVVFYDVFGHVLHHWKKTYKEALYFAS

SEQ ID NO: 11901 - protein, 338 aa, Arabidopsis thaliana
MNSGRRSLMSATASLSLLLCIFTTFVVVSNGELQRFIEPAKSDGSVSFIVIGDWGRRGSFNQSLVAYQMGKIGEKIDLDFVVSTGDNFYDNGLFSEHDPNFEQSFSNIYTAPSLQKQWYSVLGNHDYRGDAEAQLSSVLREIDSRWICLRSFVVDAELVEMFFVDTTPFVKEYYTEADGHSYDWRAVPSRNSYVKALLRDLEVSLKSSKARWKIVVGHHAMRSIGHHGDTKELNEELLPILKENGVDLYMNGHDHCLQHMSDEDSPIQFLTSGAGSKAWRGDINPVTINPKLLKFYYDGQGFMSARFTHSDAEIVFYDVFGEILHKWVTSKQLLHSSV

SEQ ID NO: 11902 - protein, 339 aa, Arabidopsis thaliana
MSSKFDIGSLSIVMTLLICFLLLSLAPKLEAELATVQHAPNPDGSISFLVIGDWGRHGLYNQSQVALQMGRIGEEMDINFVVSTGDNIYDNGMKSIDDPAFQLSFSNIYTSPSLQKPWYLVLGNHDYRGDVEAQLSPILRSMDSRWICMRSFIVDAEIAELFFVDTTPFVDAYFLSPQDQTYDWSGVSPRKSYLQTILTELEMGLRESSAKWKIVVGHHAIKSASIHGNTKELESLLLPILEANKVDLYMNGHDHCLQHISTSQSPIQFLTSGGGSKAWRGYYNWTTPEDMKFFYDGQGFMSVKITRSELSVVFYDVSGNSLHKWDTSKMLDSDFYFPL

SEQ ID NO: 11903 - protein, 338 aa, Arabidopsis thaliana
MNSGRRSLISATASLSLLLCIFTTFVVVSNGELQRFIEPAKSDGSVSFIVIGDWGRRGSFNQSLVAYQMGKIGEKIDLDFVVSTGDNFYDNGLFSEHDPNFEQSFSNIYTAPSLRKQWYSVLGNHDYRGDAEAQLSSVLREIDSRWICLRSFVVDAELVEMFFVDTTPFVKEYYTEADGHSYDWRAVPSRNSYVKALLRDLEVSLKSSKARWKIVVGHHAMRSIGHHGDTKELNEELLPILKENSVDLYMNGHDHCLQHMSDEDSPIQFLTSGAGSKAWRGDINPVTINPKLLKFYYDGQGFMSARFTHSDAEIVFYDVFGEILHKWVTSKQLLHSSV

SEQ ID NO: 11904 - protein, 328 aa, Arabidopsis thaliana
MKMHVCFSVILMFLSIFFINGALSKLERLKHPVKKKSDGSLSFLVIGDWGRKGGFNQSLVAHQMGVVGEKLDIDFVISVGDNFYDDGLKGVNDPSFEASFSHIYTHPSLQKQWYSVLGNHDYRGNVEAQLSKVLTQKDWRWFCRRSFVLSSGMVDFFFADTNPFVEKYFTEPEDHTYDWRNVLPRNKYISNLLHDLDLEIKKSRATWKFVVGHHGIKTAGNHGVTQELVDQLLPILEENKVDLYINGHDHCLQHIGSHGKTQFLTSGGGSKAWRGHVQPWDPKELKLYYDGQGFMSLHITHSKAKFIYYDVSGNVLHRSSLSKRSAHL

SEQ ID NO: 11905 - protein, 328 aa, Arabidopsis thaliana
MKMHVCFSVILMFLSIFFINGALSKLERLKHPVKKKSDGSLSFLVIGDWGRKGGFNQSLVAHQMGVVGEKLDIDFVISVGDNFYDDGLKGVNDPSFEASFSHIYTHPSLQKQWYSVLGNHDYRGNVEAQLSKVLTQKDWRWFCRRSFVLSSGMVDFFFADTNPFVEKYFTEPEDHTYDWRNVLPRNKYISNLLHDLDLEIKKSRATWKFVVGHHGIKTAGNHGVTQELVDQLLPILEENKVDLYINGHDHCLQHIGSHGKTQFLTSGGGSKAWRGHVQPWDPKELKLYYDGQGFMSLHITHSKAKFIYYDVSGNVLLRSSLSKRSAHL

SEQ ID NO: 11906 - protein, 333 aa, Arabidopsis thaliana
MSSKFDIGSLSIVMTLLICFLLLSLAPKLEAELATVQHAPNPDGSISFLVIGDWGRHGLYNQSQVALQEMDINFVVSTGDNIYDNGMKSIDDPAFQLSFSNIYTSPSLQKPWYLVLGNHDYRGDVEAQLSPILRSMDSRWICMRSFIVDAEIAELFFVDTTPFVDAYFLSPQDQTYDWSGVSPRKSYLQTILTELEMGLRESSAKWKIVVGHHAIKSASIHGNTKELESLLLPILEANKVDLYMNGHDHCLQHISTSQSPIQFLTSGGGSKAWRGYYNWTTPEDMKFFYDGQGFMSVKITRSELSVVFYDVSGNSLHKWDTSKMLDSDFYFPL

SEQ ID NO: 11907 - protein, 351 aa, Arabidopsis thaliana
MDSLRDVKPIKLIFSIFCLVIILSACNSTAELPRFVQPPEPDGSLSFLVVGDWGRRGSYNQSQVALQMGKIGKDLNIDFLISTGDNFYDDGIISPYDSQFQDSFTNIYTATSLQKPWYNVLGNHDYRGNVYAQLSPILRDLDCRWICLRSYVVNAEIVDIFFVDTTPFDHVYDWRGVLPRNKYLNSLLTVTFFFLLYHKLVISSNSLKIRIIKLDVDVALQESMAKWKIVVGHHTIKSAGHHGNTIELEKQLLPILEANEVDLYINGHDHCLEHISSINSGIQFMTSGGGSKAWKGDVNDWNPQEMRFYYDGQGFMSVYTSEAELRVVFYDGLGHVLHRWSTLKNGVYSDI

SEQ ID NO: 11908 - protein, 314 aa, Arabidopsis thaliana
MDSLRDVKPIKLIFSIFCLVIILSACNSTAELPRFVQPPEPDGSLSFLVVGDWGRRGSYNQSQVALQMGKIGKDLNIDFLISTGDNFYDDGIISPYDSQFQDSFTNIYTATSLQKPWYNVLGNHDYRGNVYAQLSPILRDLDCRWICLRSYVVNAEIVDIFFVDTTPFVDRYFDEPKDHVYDWRGVLPRNKYLNSLLTDVDVALQESMAKWKIVVGHHTIKSAGHHGNTIELEKQLLPILEANEVDLYINGHDHCLEHISGINSGMQFMTSGGGFKAWKGDVNDWNLQEMRFTMMDKDSCRFTHSEAELPRRFL

SEQ ID NO: 11909 - protein, 304 aa, Arabidopsis thaliana
MKMHVCFSVILMFLSIFFINGALSKLERLKHPVKKKSDGSLSFLVIGDWGRKGGFNQSLVAHQMGVVGEKLDIDFVISVGDNFYDDGLKGVNDPSFEASFSHIYTHPSLQKQWYSVLGNHDYRGNVEAQLSKVLTQKDWRWFCRRSFVLSSVNMFCCGYRNGGFFLRGHKSFYLEIKKSRATWKFVVGHHGIKTAGNHGVTQELVDQLLPILEENKVDLYINGHDHCLQHIGSHGKTQFLTSGGGSKAWRGHVQPWDPKELKLYYDGQGFMSLHITHSKAKFIYYDVSGNVLHRSSLSKRSAHL

SEQ ID NO: 11910 - protein, 332 aa, Glycine max
MGTQRSKPSCTIVAIFLAFCCFVSSSKAKLESLQHAPKADGSLSFLVVGDWGRKGAYNQSLVAFQMGVIGEKLDVDFVISTGDNFYDNGLTGVFDPSFEESFTKIYTAPSLQKKWYNVLGNHDYRGNAKAQISHVLRYRDNRWVCFRSYTLNSENVDFFFVDTTPYVDKYFIEDKGHNYDWRGILPRKRYTSNLLKDVDLALRQSTATWKVVIGHHTIKNIGHHGDTQELLIHFLPLLKANNVDLYMNGHDHCLEHISSLDSSVQFLTSGGGSKAWRGDTKQSEGDEMKFYYDGQGFMSVHISQTQLRISFFDVFGNAIHKWNTCKFDSSDM

SEQ ID NO: 11911 - protein, 332 aa, Glycine max; identical to SEQ ID NO: 11910

SEQ ID NO: 11912 - protein, 352 aa, Glycine max
  unsure (1)..(352): unsure at all Xaa locations
EAFACFGVPVPLRAMTDISKSLLFTFTIIISFGLCILYASAELQRLSHSSKHDGALSFLVLGDWGRRGAYNQSQVSFQMEKFSCRXGKVGEKLDIDFVVSTGDNFYDNGLTSDHDNAFQESFTQIYTAKSLQKQWYSVLGNHDYRGDAEAQLSPVLREIDSRWLCLRSFIVDSELVEIFFVDTTPFVDEYFTEPPEHKYDWRGIGPQKPYITNLLKDLELALRGSTAKWRIVVGHHAIRSVGHHGDTQELINRLLPILQANNVHFYMNGHDHCLEHISDTESPIQFLTSGAGSKAWRGDIEGMNRRGVNFFYDGQGFMSVKLTQTDATIEFYDVFGNVLHRLTSSKQLHSSM

SEQ ID NO: 11913 - protein, 336 aa, Glycine max
  unsure (1)..(336): unsure at all Xaa locations
MASSLNQRMLFPLMFVIGMFCLMVTXXSIAELPIFKHPPKKQQSLNILVLGDWGRKGTYNQSLVANQMGIVGEKLDIDFVISTGDNFYEDGLKGVDDPAFYQSFVDMYTGPSLQKTWYTVLGNHDYRGDVGAQLSPILKQKDSRWLCMRSFILDGEIVEFFFVDTTPFVEEYFTDPGEHTYDWEGVLPRLAYLSELLKDVDLALAQSKAKWKMVVGHHTINSAGHHGSTEELKQLLVPILEANDVDAYINGHDHCLQHIIDNNSGIHFITSGGGSKAWSGDVKPWKLEELKLYYDGQGFMSMQITKSTAHIIFYDAFGKVLHTWSISKDRNVAAWI

SEQ ID NO: 11914 - protein, 352 aa, Glycine max
  unsure (1)..(352): unsure at all Xaa locations
NQNPQHKAFILFSDLVLRQHMGLQLVFIGTIALCLVVSSAVLERFEQALKQDGSLSFLIIGDWGRKGAYNQSKVAFQMGVIGQQLDIDFVISTGDNFYDSGLTGIDDPDFXXTASSLQKQWYSVLGNHDYRGNVEAQLSPVLTNLDKRWLCLRSFIVNAEIAEFFFVDTTPFVDKYFIEPKDHVYDWSGILPRKQYISNLLKDVDLALQQSNAKWKIVVGHHTIRSAGVHGNTDELVKQLLPILEANNIDLYINGHDHCLQHISSFDSAIQFLTCGGGSKAWRGVVNWWKPEEMKFYYDGQGVMSVKVPETEIDIVFYDVYGHVLHKWNTSKQLHASWXTSSRSNPRHLIMN

SEQ ID NO: 11915 - protein, 400 aa, Glycine max
  unsure (1)..(400): unsure at all Xaa locations
MAGLGIWMGFVSLCLLSVSVSGLLQRLEHPVKADGSLSLMVIGDWGRKGTYNQSQVATQMGRVAAKLNIDFVISTGDNFYDDGLTGIDDPAFEISFSKIYTAKSLQKQWYSVLGNHDYRGDVEAQLNPILQKIDPRWICQRSFIVDTEIAEFFFIDSTPFVDKYFLKPKDHKYDWRGVLPREKYLSKLLKDLEIALKDSTAKWKIXVVGHHPVRSIGHHGDTKELIRQLLPILEENXNVDMXYINGHDHCLEHISSRSSQIQFLTSGGGSKAWKGDMXIKIRKMGSSFTMMDKDLCPWSWKKPMPKLFISIFMGKFCMLXICPRGXVLLSLPYRRCFRVSVVAKGNDSYVFASINYSTKQNQRSVFNSFVLFHINEVRRWLLLYYICLQLIFNVRTESLS

SEQ ID NO: 11916 - protein, 165 aa, Glycine max
  unsure (1)..(165): unsure at all Xaa locations
TPLLTNRTAAVPVCLRPSTMARSSMAAVLAVLAVAALRCAXXAAAELPLVEHPAKNDGSLSLLVIGDWGRNGXYNQSRVADQMGKVGERLDIDFVVSTGDNFYEDGLTGVHDQQFEESFTNIYTAQSLQKPWYLVLGNYDYRGXALAQLEPXMRKLDERFVCMRX

SEQ ID NO: 11917 - protein, 194 aa, Glycine max
SSFSSGSIISIYIKLLPLAILINQNAHPKLSFFSIKFSDLNIWGCSLFSLVLALCLVVSSAVLERFEQALKQDGSLSFLVIGDWGRKGAYNQSKVAFQMGVIGQQLDIDFVISTGDNFYDSGLTGIDDPDFDDSFTKIYTASSLQKQWYSVLGNHDYRGNVEAQLSPVLTNLDKRWLCLRSFIGHAEEPEVFFL

SEQ ID NO: 11918 - protein, 140 aa, Glycine max
  unsure (1)..(140): unsure at all Xaa locations
QAFACFGVPVPVRAMXSXSMSFLXYLYHHHQLWLVHSSSAELQRLSHSSKHDGALSFLVLGDWGRRGAYNQSQVSFQMGKVGEKLDIDFVVSTGDNFYDNGLTSDHDNAFQXESFTQIYTGXQSLQKAWYSVLGNHDYRX

SEQ ID NO: 11919 - protein, 131 aa, Glycine max
  unsure (1)..(131): unsure at all Xaa locations
XTLKESYAVTSTAQRLYKQWDSMICNHDYWGDATAQLSPELREIDLPXVRLMLKIVDEELVDSFYGAPXXLWRPCWNESCGHRSEWRGIAPPYYYMSNLLIDVELRLRGSTANWTMDVNHHAIRCDEHHGX

SEQ ID NO: 11920 - protein, 71 aa, Glycine max
DLALQQSNAKWKIVVGHHTIRSAGLHGNTDELVKQLLPILEANNIDLYINGQDHCLQHIGSLGRKLHILTK

SEQ ID NO: 11921 - protein, 136 aa, Glycine max
  unsure (1)..(136): unsure at all Xaa locations
FQYXSSTSTLAKHEFTISQXFFNWDTELSISIFLNXILLSSFDLFVNXQNHLSLNHECWLXCSQIQFLTSGGGSKAWKGDMDKDKTDGIKFYYDGQGFMSAELEETNVKVVYYDILGKVLHVVNLPKGLGTSVSAI

SEQ ID NO: 11922 - protein, 80 aa, Glycine max
  unsure (1)..(80): unsure at all Xaa locations
XLKISTNNVSCILNLEPIRKSGHHGDTQELINRLLPILQANNVHFYMNGHDHCLEHISDTDEFMQIFTCNEAKIIYLSDX

SEQ ID NO: 11923 - protein, 331 aa, Phaseolus vulgaris
MAGLGVWLAFIGVCFLNVSALLQRLEHPVKADGSLSLVVIGDWGRKGTYNQSEVSAQMGRVGAKLNIDFVISTGDNFYDDGLSGVDDPAFELSFSKIYTAKSLQKQWYSVLGNHDYRGDVEAQLNTILQKIDPRWICQRSFIVDTEIAEFFFVDTTPFVDKYFLKPKDHTYDWTGVLPRDKYLSKLLKDLEIALKDSTAKWKIVVGHHPVRSIGHHGDTQELIRHLLPILEANDVDMYINGHDHCLEHISSTSSQIQFLTSGGGSKAWKGDHLIKMGKMGQRFTMMDKYLQVWRFKKSIPKLFIMIFLAKFCKLLICPRGYVMCMPYNSLI

SEQ ID NO: 11924 - protein, 312 aa, Ipomoea batatas
MAVYSGISMVLCLWVGVVFGVCLASAIVELPTFHHPTKGDGSLSFLVIGDWGRKGDYNQSQVAFQMGEIGDQLAIDFVVSTGDNFYDNGLTGEHDDAFTESFTDVYTAESLQKQWYSVLGNHDYRGDAEAQLSSHLRKLDSRWPCLRSFVVNTETVDLFFVDTTPFVEEYFNSPEHVYDWRGVFPQQTYTKNVLNGLEYALMKSTTKWRIVIGHHAIRSAGHHGDTKELVERLLPILRTYNVDLYMNGHDHSLEHISDDESPIQFMTSGAGSKAWRGDVTMDRKGVSFFYDGQGFMSVQLVETDIGIVFYGC

SEQ ID NO: 11925 - protein, 336 aa, Triticum aestivum
  unsure (1)..(336): unsure at all Xaa locations
MARSSMAAVLAVLAVAALRCAPAAAELPLVEHPAKNDGSLSLLVIGDWGRNGTYNQSRVAEQMGKVGERLDIDFVVSTGDNFYENGLTGVHDQQFEESFTNIYTAKSLQKPWYLVLGNHDYRGDALAQLDPVMRKLDERFVCMRSFVVNAEIVEFFFIDTTPFQLKYWTHPKDSHYDWRGVAPRENYIANLLKDLDEAMKKSTAKWKIAVGHHTMRSVSDHGDTEELLQLLLPVLKVNGIDFYINGHDHCLEHISSRDSPIQYFTSGGGSKAWRGVYQPNDDKLQFFYDGQGFMSLQLNQDQADFIFYDVSGKVLYKWSSRKTNYXXQPSIYVTAE

SEQ ID NO: 11926 - protein, 336 aa, Triticum aestivum
  unsure (1)..(336): unsure at all Xaa locations
MARSSMAAVLAVLAVAALRCAPAAAELPLVEHPAKNDGSLSLLVIGDWGRNGTYNQSRVADQMGKVGERLDIDFVVSTGDNFYEDGLTGVHDQQFEESFTNIYTAQSLQKPWYLVLGNHDYRGNALAQLDPVMRKLDERFVCMRSFIVNAEIVEFFFIDTTPFQLKYWTHPKDSHYDWRGVAPRENYIANLLKDLDEAMKKSTAKWKIAIGHHTIRSVSDHGDTKELLQLLLPVLKVNGIDFYINGHDHCLEHISSRDSPIQYFTSGGGSKAWRGVYQPNDDKLQFFYDGQGFMSLQLNQDQADFIFYDVSGKVLYKWSSRKTNYXXQPSIYVTAE

SEQ ID NO: 11927 - protein, 382 aa, Triticum aestivum
  unsure (1)..(382): unsure at all Xaa locations
NLRDCPHRARFFLAPRRRRRHQPTILPPLVSLHPVQIESARSKITQSLDSAAVXVLRGSMSMAFSCASXSPARPRRHRQVPGRSSXAERLFVPDWGRRRGYXQPTALQEKGAEVADVSGSXVGMGSSGLVAAVVEVGIVVEGGDGVGMATXSLHNPWYLVLGNHHYRRNALAQVDPFMRKLDERFMRMRSFIVNAXIGXLFLIXDTTPFQLKYWTYPKDSHYDWRGVAPLENYIANLLKDLDEAMKKSTAKWKIAIGHHTIRSVSDHGDTEELLQLLLPVLKVNGIDFYINGHDHCLEHISSRDSPIQYFTSGGGSKAWRGVYQPNDDKLQFFYDGQGFMSLQLNQDQADFIFYDVSGKVLYKWSSRKTNYXXQPSIYVTAE

SEQ ID NO: 11928 - protein, 346 aa, Zea mays
MAQGSRSAAVPAAASFFALLAVAPLLLCCAPAAAELARLEHPAKDGGSLSLLVVGDWGRKGTFNQSRVAHQMGRVGEQLSIDFVISTGDNFYENGLTGTDDEAFEQSFTDIYTAKSLQKPWYLVLGNHDYRGDALAQLSPVLRKIDSRFICIKSFVVNAEIVEFFFVDTTPFQLKYWTHPKDDHYDWRGVAPREKYINNLLKDLDGAMKRSTAAWKVAVGHHTMKSVSDHGDTKELLQLLLPVLQANGVDFYINGHDHCLEHISSRDSPIQYFTSGGGSKAWRGVQNPTEDDLKFFYDGQGFMSLQLDRSQAKFTFYDVDGKALYSWSSLMETGHHLQASGYVNEE

SEQ ID NO: 11929 - protein, 335 aa, Zea mays
  unsure (1)..(335): unsure at all Xaa locations
MANRSVAMGVALAFVAMTALCCAPGAAELPRLDHPARSDGSLKLLVVGDWGRKGTHNQSRVADQMGRVGEKLDIDFVISTGDNFYKDGLKGVRDQAFEESFVDIYTAQSLQKPWYSVLGNHDYRGNALAQLSPVLRKIDDRFICMRSFIVNAELVDFFFVDTTPFQLEYWTHPGKDRYDWRGVAPRGKYIANLLKDLDVAMKKSTARWKIVAGHHTMRSVSEHGDTKELLELLLPVLKDNGVDFYINGHDHCLEHISSRDSPLQYFTSGGGSKAWRGVFHPNKDKLRFFYDGQGFMSLQLNQDQAHFIFYDVFGNILYRWSXXRHPQPSTYLDEE

SEQ ID NO: 11930 - protein, 347 aa, Zea mays
MAQGSRSAAVPAAASFFALLAVAAPLLLCCAPAAAELARLEHPPKDGGSLSLLVVGDWGRKGTFNQSRVAHQMGRVGEQLSIDFVISTGDNFYENGLTGTDDEAFEQSFTDIYTAKSLQKPWYLVLGNHDYRGDALAQLSPVLRKIDSRFICIKSFVVNAEIVEFFFVDTTPFQLKYWTHPKDDHYDWRGVAPRENYINNLLKDLDGAMKTSTAAWKVAVGHHTMRSVSDHGDTKELLQLLLPVLQANGVDFYINGHDHCLEHISSRDSPIQYFTSGGGSKAWRGVQNPTEDDLKFFYDGQGFMSLQLDRSQAKFTFYDVDGKALYSWSSLMETGHHLQASGYINEE

SEQ ID NO: 11931 - protein, 346 aa, Zea mays
MAQGSRSAAVPAAASFFALLAVAPLLLCCAPAAAELARLEHPAKDGGSLSLLVVGDWGRKGAFNQSRVAHQMGRVGEQLSIDFVISTGDNFYENGLTGTDDEAFEQSFTDIYTAKSLQKPWYLVLGNHDYRGDALAQLSPVLRKIDSRFICMKSFVVNAEIVEFFFVDTTPFQLKYWTHPKDDHYDWRGVAPREKYINNLLKDLDGAIKRSTAAWKVAVGHHTMRSVSDHGDTKELLQLLLPVLQANGVDFYINGHDHCLEHISSKDSPIQYFTSGGGSKAWRGVQNPTEDDLKFFYDGQGFMSLQLDRSQAKFTFYDVDGKALYSWSSLMETGHHLQASGYVNEE

SEQ ID NO: 11932 - protein, 347 aa, Zea mays
  unsure (1)..(347): unsure at all Xaa locations
MAQGSRSATVPAAASFFALVAVAPAAPXCCAPAAAELARLEHPAKDGGSLSLLVVGDWGRKGTFNQSRVAHQMGRVGEQLSIDFVISTGDNFYENGLTGTDDEAFEQSFTDIYTAKSLQKPWYLVLGNHDYRGDALAQLSPVLRKIDSRFICIKSFVVNAEIVEFFFVDTTPFQLKYWTHPKDDHYDWRGVAPRENYINNLLKDLDGAMKTSTAAWKVAVGHHTMRSVSDHGDTKELLQLLLPVLQANGVDFYINGHDHCLEHISSRDSPIQYFTSGGGSKAWRGVQNPTEDDLKFFYDGQGFMSLQLDRSQAKFTFYDVDGKALYSWSSLMETGHHLQASGYINEE

SEQ ID NO: 11933 - protein, 348 aa, Zea mays
MAQGSRSAGVPVRQPSFFALVAVAAPLLLCCAPAAAELARLEHPAKDGGSLSLLVVGDWGRKGTFNQSRVAHQMGRVGEQLSIDFVISTGDNFYENGLTGTDDEAFEQSFTDIYTAKSLQKPWYLVLGNHDYRGDALAQLSPVLRKIDSRFICIKSFVVNAEIVEFFFVDTTPFQLKYWTHPKDDHYDWRGVAPRENYINNLLKDLDGAMKTSTAAWKVAVGHHTMRSVSDHGDTKELLQLLLPVLQANGVDFYINGHDHCLEHISSRDSPIQYFTSGGGSKAWRGVQNPTEDDLKFFYDGQGFMSLQLDRSQAKFTFYDVDGKALYSWSSLMETGHHLQASGYVNEE

SEQ ID NO: 11934 - protein, 335 aa, Zea mays
  unsure (1)..(335): unsure at all Xaa locations
MANRSVAMGVAVAFVAMTALCCAPGAAELPRLDHPARSDGSLKLLVVGDWGRKGTHNQSRVADQMGRVGEKLDIDFVISTGDNFYKNGLKGVRDQAFEESFMDIYTAQSLQKPWYSVLGNHDYRGNALAQLSPVLRKIDDRFICMRSFIVNAELVDFFFVDTTPFQLEYWTHPGKHRYDWRGVAPRGKYIANLLKDLDVAMKKSTARWKIVVGHHTMRSVSEHGDTEELLELLLPVLKDNGVDFYINGHDHCLEHISSRDSPLQYFTSGGGSKAWRGVFHPNKDKLRFFYDGQGFMSLQLHQDQAHFIFYDVFGNILYRWSXXRHPQSSMYLDEE

SEQ ID NO: 11935 - protein, 337 aa, Zea mays
  unsure (1)..(337): unsure at all Xaa locations
MANRSVAMGVAVAFVAMTALCCAPGAAELPRLDHPARSDGSLKLLVVGDWGRKGTHNQSRVADQMGRVGEKLDIDFVISTGDNFYKNGLKGVRDQAFEESFMDIYTAQSLQKPWYSVLGNHDYRGNALAQLSPVLRKIDDRFICMRSFIVNAELVDFFFVDTTPFXQLEYWTHPGKHRYDLXRGVAPRGKYIANLLKDLDVAMKKSTARWKIVVGHHTMRSVSEHGDTEELLELLLPVLKDNGVDFYINGHDHCLEHISSRDSPLQYFTSGGGSKAWRGVFHPNKDKLRFFYDGQGFMSLQLNQDQAHFIFYDVFGNILYRWSXXRHPQPSTYLDEE

SEQ ID NO: 11936 - protein, 308 aa, Zea mays
  unsure (1)..(308): unsure at all Xaa locations
MANRSVAMGVAVAFVAMTALCCAPGAAELPRLDHPARSDGSLKLLVVGDWGRKGTHNQSRVADQMGRVGEKLDIDFVISTGDNFYKNGLKGVRDQAFEESFMDIYTAQSLQKPWYSVLGNHDYRGNALAQLSPVLRKIDDRFICMRSFIVNAELVDFFFVDTTPFLEYWXSPGQASYEWXPRQXYIANLXXSVSEHGDTKELLELLLPVLKDNGVDFYINGHDHCLEHISSRDSPLQYFTSGGGSKAWRGVFHPNKDKLRFFYDGQGFMSLQLNQDQAHFIFYDVFGNILYRWSXXRHPQPSTYLDEE

SEQ ID NO: 11937 - protein, 258 aa, Zea mays
  unsure (1)..(258): unsure at all Xaa locations
MARGSMAAVLAVLAVAALRCAPAAAELPLVEHPAKNDGSLSLLVVGDWGRNGTYNQSRVAEQMGKVGERLDIDFVVSTGDNFYENGLTGVHDQQFEESFTNIYTAQSLQKPWYLVLGNHDYRGDALAQLDPVMRKLDERFVCMRSFVVNAEMVEFFFIDTTPFQLKYWTHPKDSHYDWXRGVAPRENYIANLLKDLDEAMKKSTAKWKIAVGHHTMRSVSDHGDTEELLQLLLPVLEVNGIDFYINGHDHCFEHITSX

SEQ ID NO: 11938 - protein, 285 aa, Zea mays
  unsure (1)..(285): unsure at all Xaa locations
MAQGSRSAAVPAAACFFALLAEAPLLLCCAPAAAELARLEHPAKDGGSLSLLVVGDWGRKGTFNQSRVAHQMGRVGEQLSIDFVISTGDNFYENGLTGTDDEAFEQSFTDIYTANSLQKPWYLVLGNHDYRGDALAQLSPVLRKIDSRIICIKSFVVNAGIVEFFFVDTTPVRLKYWTHPKDDHYDWRGVAPRENYINNLLKDLDGAMKTSTXAAWKVAVGHHXTMRSVSDHGDTKELLQLLLPVLQPTGVDFYINGHDHCLEXISSRDSPIRTVSVMAFWVAVI

SEQ ID NO: 11939 - protein, 419 aa, Caenorhabditis elegans
MLLVDEKLEKRSSSSSLDRFLPDLPQKVKSRRKMRKIMCFVGLFGISTIFFIAVSNISSSEDVPLYNGNIYDPERDSKSFRILLVGDTGGIPILETTWAQNEVKQTMASLADEHSVQMILNMGDNIYFTGPTDEFDPRFESRFENVYTNPSLQVPWLTIAGNHDHFGNVTAEIEYTKHSKKWYFPSLYYKKSVEFNGTSIDFLMIDTISLCGNTKDIQNAGFIEMLRNESHDPRGPVNITAAEEQWAWLENNLEASSAQYLIISGHYPVHSMSSHGPTDCLRQRLDPLLKRFNVNAYFSGHDHSLQHFTFPGYGEHIINYVVSGAASRADASTKHIKEFSRDTLKFNYPEKSWFSWSPVSQLGFRKGGLIYAEFGHYNARLDFFDKRGKQLYSTIIPTRVIPTDTSTRSTASPFVEIGM

SEQ ID NO: 11940 - protein, 305 aa, Nostoc punctiforme
MNLKRRQFLFLSSFSAIGTGFLAWMLADKNHQSADITDSTTAIAANPVKKDLLLRFVSVADTGTGARGQYAVAGAMNAYHKQNPYDLVVLAGDNIYNNGEIEKISAVFERPYQPLLKQGVKFQACLGNHDIRTDNGDPQVKYIGFNMKGRYYTFKRNQVQFFALDTNSNADWKNQLPWLEKELSISNAPWKVVFGHHPIYSSGQYGSNADFIKTFTPLFQKYGVQLYINGHEHNYERTRAIDGTTYLICGAGAGNRPVGRSEWTKYSTSDLSFASYEVYKDRIEISAIATDNRVFDKGIIQLKSA

SEQ ID NO: 11941 - protein, 325 aa, Homo sapiens
MDMWTALLILQALLLPSLADGATPALRFVAVGDWGGVPNAPFHTAREMANAKEIARTVQILGADFILSLGDNFYFTGVQDINDKRFQETFEDVFSDRSLRKVPWYVLAGNHDHLGNVSAQIAYSKISKRWNFPSPFYRLHFKIPQTNVSVAIFMLDTVTLCGNSDDFLSQQPERPRDVKLARTQLSWLKKQLAAAREDYVLVAGHYPVWSIAEHGPTHCLVKQLRPLLATYGVTAYLCGHDHNLQYLQDENGVGYVLSGAGNFMDPSKRHQRKVPNGYLRFHYGTEDSLGGFAYVEISSKEMTVTYIEASGKSLFKTRLPRRARP

SEQ ID NO: 11942 - protein, 323 aa, Homo sapiens
MDMWTALLILQALLLPSLADGATPALRFVAVGDWGGVPNAPFHTAREMANAKEIARTVQILGADFILSLGDNFYFTGVQDINDKRFQETFEDVFSDRSLRKVPWYVLAGNHDHLGNVSAQIAYSKISKRWNFPSPFYRLHFKIPQTNVSVAIFMLDTVTLCGNSDDFLSQQPERPRLTARTQLSWLKKQLAAAREDYVLVAGHYPVWSIAEHGPTHCLVKQLRPLLATYGVTAYLCGHDHNLQYLQDENGVGYVLSGAGNFMDPSKRHQRKVPNGYLRFHYGTEDSLGGFAYVEISSKEMTVTYIEASGKSLFKTRLPRRARP

SEQ ID NO: 11943 - protein, 323 aa, Homo sapiens [sequence omitted]

SEQ ID NO: 11944 - protein, 340 aa, Sus scrofa
MDTWTVLLILQASLVLPGAVGTRTNTRTAPTPILRFVAVGDWGGVPNAPFHTAREMANAKAIATTVKTLGADFILSLGDNFYFTGVHDAKDKRFQETFEDVFSDPSLRNVPWHVLAGNHDHLGNVSAQIAYSKISKRWNFPSPYYRLRFKIPRSNVSVAIFMLDTVTLCGNSDDFVSQQPERPRNLALARTQLAWIKKQLAAAKEDYVLVAGHYPVWSIAEHGPTHCLVKQLLPLLTTHKVTAYLCGHDHNLQYLQDENGLGFVLSGAGNFMDPSKKHLRKVPNGYLRFHFGAENSLGGFAYVEITPKEMSVTYIEASGKSLFKTKLPRRARSEHQHRRA

SEQ ID NO: 11945 - protein, 313 aa, Sus scrofa
TAPTPILRFVAVGDWGGVPNAPFHTAREMANAKAIATTVKTLGADFILSLGDNFYFTGVHDAKDKRFQETFEDVFSDPSLRNVPWHVLAGNHDHLGNVSAQIAYSKISKRWNFPSPYYRLRFKIPRSNVSVAIFMLDTVTLCGNSDDFVSQQPERPRNLALARTQLAWIKKQLAAAKEDYVLVAGHYPVWSIAEHGPTHCLVKQLLPLLTTHKVTAYLCGHDHNLQYLQDENGLGFVLSGAGNFMDPSKKHLRKVPNGYLRFHFGAENSLGGFAYVEITPKEMSVTYIEASGKSLFKTKLPRRARSEHQHRRA

SEQ ID NO: 11946 - protein, 338 aa, Sus scrofa
MDTWTVLLILQASLVLPGAVGTRTNTRTAPTPILRFVAVGDWGGVPNAPFHTAREMANAKAIATTVKTLGADFILSLGDNFYFTGVHDAKDKRFQETFEDVFSDPSLRNVPWHVLAGNHDHLGNVSAQIAYSKISKRWNFPSPYYRLRFKIPRSNVSVAIFMLDTVTLCGNSDDFVSQQPERNLALARTQLAWIKKQLAAAKEDYVLVAGHYPVWSIAEHGPTHCLVKQLLPLLTTHKVTAYLCGHDHNLQYLQDENGLGFVLSGAGNFMDPSKKHLRKVPNGYLRFHFGAENSLGGFAYVEITPKEMSVTYIEASGKSLFKTKLPRRARSEHQHRRA

SEQ ID NO: 11947 - protein, 325 aa, Oryctolagus cuniculus
MDTWTLLLVLHTSLLLPWAEGATPTLRFVAVGDWGGVPNAPFHTAREMANAKQIGKVVQMLGAHFILSLGDNFYFSGVQSVSDKRFQETFEDVFSDRSLQNVPWYVLAGNHDHIGNVSAQIAYSKVSKRWNFPSPFYRLRFRIPRTNVSVAIYMLDTVTLCGNSNDFLSQQPERPRNLELARTQLAWLKRHLADAKEDYVLVAGHYPVWSIAEHGPTHCLVKKLQPLLVKYGVTAYLCGHDHNLQYLQDENGVGYVLSGAGNFMDPSTQHQRSVPNGYLRFHYGAENSLGGFAYLEITPKEMTVTYMEASGKSLFKTRLPKRAKA

SEQ ID NO: 11948 - protein, 142 aa, Aphanizomenon baltica
GDNIYNNGEIEKINQVFELPYQPLLKNGVKFHACLGNHDIRTDNGVPQVKYPGFNMQGRYYTFTQNQVQFFALDTNNNADWQNQLIWLEKELSSSQNPWKIVFGHHPIYSSGQYGSNKNFIKIFTPLFKKYNVQLYINGHEH

SEQ ID NO: 11949 - protein, 286 aa, Triticum aestivum
  unsure (1)..(286): unsure at all Xaa locations
XVAEQMGVVGEKLAADFVISTGDNFYNDGLAGDNDTAFFTSFTDIYTASSLQKPWYIVLGNHDYTGDALAQQSPAIREVDSRWTSVNKSFIVEADIVDFFLVDTSPFVLKYWNESKFDWRNVAPRDTYIATLLQDLDDALAASNATWKVVVGHHPVSSGCEHGNTTELREHLLPLLKAHGVDMYLNGHDHCLQRISSIDSPVEFVTSGGGSKAWAGKFKATSDKMEFLYDGQGFLSMKLTATEAHLAFYDVSGAVLHSWGLTKSADARIISXADHRGRQDRCKPAV

SEQ ID NO: 11950 - protein, 142 aa, Nodularia spumigena
GDNIYNNGEIEKIGAVFERPYQELLTQGVKFHACLGNHDIRTENGDPQIKYPGFNMRGRYYTFRRDAVQFFALDTNHNADWKNQVVWLEQELSRSDAPWKVVFGHNPFYSSGHYGVNQTLIKRFTPLFKQYNVQLYINGHEH

SEQ ID NO: 11951 - protein, 142 aa, Aphanizomenon sp. TR183
GDNIYNNGEIEKINEVFERPYQPLLKNGVKFHACLGNHDIRTDNGVPQVKYPGFNMQGRYYTFSQNKVQFFALDTNGNADWKNQLIWLDKELSLSKAPWKVVFGHHPIYSSGHYGNNTSFIKTFTPLFKKYNVQLYINGHEH

SEQ ID NO: 11952 - protein, 174 aa, Prunus armeniaca
WPSNYSNPTMPSNCNGTKFDDRKVYPQLRSKLKRSWPDVESGNDTKFWESEWNKHGTCSEQTHNQMQYFERSHAMWYSHNITEILKNASIVPHPTQTWTYSDIVSAIKSKTQRTPLLRCKPQPKTKSQTKAQPKSQANSLLLHEVVLCYGYNALKLIDCNRTGGCQNQQAISFQ

SEQ ID NO: 11953 - protein, 256 aa, Oryza sativa (japonica cultivar-group); identical to SEQ ID NO: 565

SEQ ID NO: 11954 - protein, 240 aa, Hordeum vulgare
MKLVVLSALLLLSLVAVSSAEEFDFFYLVQQWPGSFCDTKKGCCFPDTGKPATDFGIHGLWPNYAECKTRGELDGALEMVTRRRKKCWPESCNSERLKLWEIRDLVTELDANWPTLACKGGKSFEFWTHEWEKHGTCSNLDQHGYLATALGFKARHNLTSILADAGIVPSDTETYFLSSIRDAIREGTGFTANLECNRGVDGETQLFQVYQCIDRDGENLIDCPLPMQGNCKDRVQLPAF

SEQ ID NO: 11955 - protein, 248 aa, Triticum aestivum
PRVRKLGEDELVVLSALLLLSLVAVSSAEEFDFFYLVQQWPGSFCDTKKGCCFPDTGKPATDFGIHGLWPNYAKCKTRGELDGALEMVTKRKKKCWPENCNSERLKLWEIKDLVTELDANWPTLACKGGKSIEFWTHEWEKHGTCSNLDQHGYFATALGFKARHNLTGILADAGIVPSDSETYFLSSIRDAIKEGTGFTANLECNRGVAGETQLFQVYQCIDSAGENLIDCPLPMQGNCKDRVQLPAF

SEQ ID NO: 11956 - protein, 245 aa, Triticum aestivum
  unsure (1)..(245): unsure at all Xaa locations
SPTRPLVVGLWVLLLLSLLAVSSGEEFDVFYLGQQWPGSFCDTKKGCCFPDTGXPATDFGIHGLWPNYAKCKTRGELDGALEMVTKRKKKCWPENCNSERLKLWEIKDLVTELDANWPTLACKGGKSIEFWTHEWEKHGTCSNLDQHGYFKTALGFKARHNLXTGILADAGIVPSDSETYFLSSIRDAIKEGTGFTANLECNRGVAGETQLFQVYQCIDRAGKNLIDCPLPMQGNCKDRVQLPAF

SEQ ID NO: 11957 - protein, 261 aa, Zea mays
MKLATAFVVLLSSLLPDSSTAEDFDFFYLVQQWPGSFCDTRQGCCFPDGAGKPAAAFGIHGLWPNYAKCRGRHHREGGGLARAVLGADDAFLAAVGRRGKCWPEYCGGGGDGDGGHQLSPWDVRDLVASLGRSWPTLSCKNRRSFEFWSYEWKKHGTCSNLDPHDYFARALQLRERHDLAAVLADAGIVPSDTDTYPVDRVRDAIAQGTGFVANLECNRDADGEAQLFQVYQCVDREAKDLIDCPLPMPTKCTDRVKLPVF

SEQ ID NO: 11958 - protein, 123 aa, Solanum carolinense
EQHAMLNDCGKKFNDIMDPRESKELDKRWPDLKNRESIATKTQSFWRYEYNKHGTCCSERYNQKEYFDLAMNLKDKFDLLQILKSQGITPGDSYPVDKIEQAIRAVTHEYPNLNCIDNRKKLM

SEQ ID NO: 11959 - protein, 88 aa, Prunus mume
FVQQWPPTTCRVRKRPCTKPRPLQIFTIHGLWPSNYSDPWKPSNCSGSQFKDGKVYPQLRSKLKKSWPDVESGNDTKFWEGEWNKHGR

SEQ ID NO: 11960 - protein, 88 aa, Prunus mume
FVQQWPPTTCKLSSRPSCKHRPLQIFTIHGLWPSNYSNPTRPSNCIGSKYNDSKLYPKLRSKLKRSWPNVETDNDTKFWEGEWNKHGR

SEQ ID NO: 11961 - protein, 85 aa, Prunus mume
FVQQWPPTTCRFRKKCFKPRPLQIFTIHGLWPSNYSSPTKPSSCTGSEFKELPPRLRPKLKISWPNVESSNDTKVWEHEWDKHGT

SEQ ID NO: 11962 - protein, 88 aa, Prunus mume
FVQQWPPATCIRSNKPCTKHRPLPIFTIHGLWPSNYSNPRMPSNCRGSLFETRKLSPELQSKLKRSWPNVETDNDTKLWEHEWNKHGR

SEQ ID NO: 11963 - protein, 285 aa, Rhodobacter sphaeroides
MPCTSSSCIPQKSAIWRNERVVLSISQTAVALDISGLFIGRSSANLDHAGKTAAAGPRLLVFGKFTLAYNAVPPRGEVKMRLLAFTLALAAAPALADHDRAGDFTHYILALSWEPTWCALEGEARGAEECSWGRGFVLHGLWPQREQGWPAFCLTTERDPSRRETAGMADLIAPGLAWHQWKKHGRCAGLPATDYFALMRRAVERVVVPEPLRHLPVDISLPPRVLEEAFTEANPGLAPEGITVACEAGHVQEVRICLTKDLDFRPCALEARPDCPLPLAKMDRP

SEQ ID NO: 11964 - protein, 146 aa, Crataegus monogyna
AVCNFNPTPCKDPPDKLFTAHGLWPSNSNGNDPEYCKAPPYHTIKILEPQLVIIWPNVLNRNDHEGFWRRQWDKHGSCASSPIQNQKHYFDTVIKMYTTQKQNVSEILSKANIKPGRKNRTLVDIENAIRNVINNMTPKFKCQKNT

SEQ ID NO: 11965 - protein, 146 aa, Crataegus monogyna
AVCNSNPTPCKDPPDKLFTVHGLWPSDSNRNDPKYCQAPPYQTMKILEPQLAIIWPNVLNRNDHEAFWRKQWDKHGSCASAPIQNQTHYFDTVIKMYTTRKQNVSEILSKANIKPGRKSRRLVDIENAIRNVINNMTPKFKCQKNT

SEQ ID NO: 11966 - protein, 252 aa, Agrobacterium tumefaciens str. C58 (U. Washington)
MKRYAGFIALGLLSLAALWFAQEKPVSKGPENDRQTPAQQQSAARPQQNTARQNADNAQPPRGTGFDFYVLSLSWSPAFCASSEGSGNRQQCGSDRRYGFVVHGLWPQNENGYPEFCQSSEPERVPDAIGRSMFDIMPSMGLIGHQWRKHGACSGLSQKDYFAATRAAFDAIRLPGKISSGAQTNTLSADAIETAFTDANPGLSKRAVSISCDGRRLEEVRICLNKDMAFRDCPELDRKGCRASATEIIPIR

SEQ ID NO: 11967 - protein, 262 aa, Agrobacterium tumefaciens str. C58 (Cereon)
MVQFPGNMHGMKRYAGFIALGLLSLAALWFAQEKPVSKGPENDRQTPAQQQSAARPQQNTARQNADNAQPPRGTGFDFYVLSLSWSPAFCASSEGSGNRQQCGSDRRYGFVVHGLWPQNENGYPEFCQSSEPERVPDAIGRSMFDIMPSMGLIGHQWRKHGACSGLSQKDYFAATRAAFDAIRLPGKISSGAQTNTLSADAIETAFTDANPGLSKRAVSISCDGRRLEEVRICLNKDMAFRDCPELDRKGCRASATEIIPIR

SEQ ID NO: 11968 - protein, 229 aa, Brucella suis 1330
MLRTLAAARAILLATGFSAAIGFSPAKADDRDGGRPGDFDFYVLSLSWSPSYCASQGPRANQQQCGVRRPFGFVVHGLWPQNERGYPANCQVDNMRSRGSYVPRRIISSLSDIIPSAGLIAHQWRKHGSCSGLPQNDYFATVRNAFEKVNIPPSLRNLATERRVDPLLVEKAFIAANPGMKPDGISIACKRNYLQEVRICMTRDLQYRSCDEVDANACRSRSVIMPAMQ

SEQ ID NO: 11969 - protein, 258 aa, Pseudomonas fluorescens PfO-1
MQVLPCVMRLQHGHDSISVWPSDGQTTETTDTRVPRNGNMKKLFTIMALIALTVGSIGLSSARQSSASKAESVAGVFDYYLLTLSWSPTFCLTHKDDPQCTGKGYGFVLHGLWPQYAKGGWPESCPPLTNLSAAETAKGLTLFPTKKLLDHEWSKHGTCSGLGAMGYLDEADKAVGAVKIPQELQPFSSSYYFEAQEIADLFRRSNPGIPSDGIAVICNGPELSEVRVCMGKDLQFGACGKGVKTQCRAGDIRVPPSR

SEQ ID NO: 11970 - protein, 384 aa, Shewanella oneidensis MR-1
MTALFSLPIRKRDSQPVTLCRHLQGVLGLLLIGLTPITTVAAPATGEFIANKRCELFQSKNKQTNPDDWQSNIGERYPVAELLGNSANPDWLRVRTNAITSPLRWIKGDCGQYHASVAAETYQPSSSGKPVQTTTASDINAINSESLKEHGTSEKRQGNLCQIEDNYDSHVLALSWQSTFCELYGSRKAECRALRQTTDAPQWQHFSLHGLWPNRQQCGTRYGFCSSVKQQPSDFCDYPEVPLNASVQKNLEEVMPSARYGTCLERHEWWKHGTCRDQDPNDYFLLATQLTQEVNASVWVKEFIHQRIGKKVTQKELNQSFDTSFGQGAHTKVTLDCAKGLLNEIRINLPQEIKLSDSIPSLLAKAPKAKKTNCPDPLLIDMPN

SEQ ID NO: 11971 - protein, 225 aa, Brucella melitensis 16M
MAAARAILLATGFSAAIGFSPAKADDRDGGRPGDFDFYVLSLSWSPSYCASQGPRANQQQCGVRRPFGFVVHGLWPQNERGYPANCQVDNMRSRGSYVPRRIISSLSDIIPSAGLIAHQWRKHSSCSGLPQNDYFATVRNAFEKVNIPPSLRNLATERRVDPLLVEKAFIAANPGMKPDGISIACKRNYLQEVRICMTRDLQYRSCDEVDANACRSRSVIMPAMQ

SEQ ID NO: 11972 - protein, 277 aa, Nicotiana glutinosa
MTFLPVHAIVNLRMLFLLIGACCILVGVNGGWDGEVGLLRRGRGGAGGGYQREFDYFKLSLQWPGTYCRRTRRCCSSNACCSRSNSPPVFTIHGLWTEYNDGTWPACCSGKAFDEREISTLLEPLRKYWPSLSCGSPRSCHHRKGPFWAHEWEKHGTCAYPVVHDEYEFFLTTLNIYFKYNVTEVLFEAGYVPSDSEKYPLGGIISSIENAFHATPELTCSGDALEELRICFYKNFEPRDCARDTSALSRGSCPQYVSLPAHGSWDEIRISNTTAAS

SEQ ID NO: 11973 - protein, 146 aa, Sorbus aucuparia
AACNSNPTPCKDPPDKLFTVHGLWPSDSNGNDPKYCKAPPYQTMKILEPQLVIIWPNVLNRNDHEVFWRKQWDKHGSCASSPIQNQTHYFDTVIKMYTTQKQNVSEILSKANIKPGRKSRRLVDIENAIRNVINNMTPKFKCQKNT

SEQ ID NO: 11974 - protein, 259 aa, Arabidopsis thaliana
MASRLCLLLLVACIAGAFAGDVIELNRSQREFDYFALSLQWPGTYCRGTRHCCSKNACCRGSDAPTQFTIHGLWPDYNDGSWPSCCYRSDFKEKEISTLMDGLEKYWPSLSCGSPSSCNGGKGSFWGHEWEKHGTCSSPVFHDEYNYFLTTLNLYLKHNVTDVLYQAGYVASNSEKYPLGGIVTAIQNAFHITPEVVCKRDAIDEIRICFYKDFKPRDCVGSQDLTSRKSCPKYVSLPEYTPLDGEAMVLKMPTEREAL

SEQ ID NO: 11975 - protein, 252 aa, Sinorhizobium meliloti
MLEYKKLKRISRIRSNATRFWLLPAIVVLGTLVGCGGEDGSQTAPNPSKDLARSASIAPAPVGTGFDFYVLSLSWSPTWCDANDPKGKSDQCETGSGHGLIVHGLWPQNENGYPEYCRTRHSDRVPESLGRQYFDLIPSMGLIGHQWRKHGTCSGLSQRDYFAVTRAAHERLTIPPELTTADGAESLSVQAIEAAFEKKNSGMTSESIAVTCEGRLLEEIRICFDKELKFRACPQVDRQACRRDTVSLPPAP

SEQ ID NO: 11976 - protein, 281 aa, Glycine max
  unsure (1)..(281): unsure at all Xaa locations
MPPLTLWLVLPFLVLLAAATTSPTRATTVASSFHGQREFDYFAFALQWPGTYCKRTRSCCPTNGCCRGSNFPTVFTIHGLWPDYNDGTWPSCCSGSSFDPKEILTLTNSLEQYWPSLSCSKPSLCHGGKGTFWAHEWEKHGTCSYPVFRNEYDYFVAVLNLYFKYNVTSVLNDAGYVPSNTEKYPLGGIISAIENAFHASPQIVCSKDSVEELRLCFYKDFQPRDCALGSDIKINMVTSKKSCPKYVSLPEPVSVSKTAMDFKVGAMMMXLFKVMVLYFYL

SEQ ID NO: 11977 - protein, 281 aa, Glycine max; identical to SEQ ID NO: 11976
  unsure (1)..(281): unsure at all Xaa locations

SEQ ID NO: 11978 - protein, 336 aa, Glycine max
  unsure (1)..(336): unsure at all Xaa locations
LPFFYLLPSQTQKSPSETNNASFDFVXXVLPFLVLLAAATTSPTRATTVASSFHGQREFDYFAFALQWPGTYCKRTRSCCPTNGCCRGSNFPTVFTIHGLWPDYNDGTWPSCCSGSSFDPKEILTLTNSLEQYWPSLXCSKPSLCHGGKGTXWAHEWEKHGTCSYPVFRNEYDYFVAVLNLYFKYNVTEXVLNDAGYVPSNTEKYPLGGIISAIENAFHASXQIVCSKDSIEELYLCFYKNFQPRDCALGSDIKIDMVTSKKSCPKYVSLPESVSVGYNGLQSRVSDDVALXGYGTVLLFVNICTLRTSKAARIKLLGCGTIYQLVINEYSEELDI

SEQ ID NO: 11979 - protein, 198 aa, Glycine max
  unsure (1)..(198): unsure at all Xaa locations
SYLLPLQTQNSGTVKNDASIDFLAGAAHSRVVGGSGNNPSSTCLTGRVVLRRGSSQREFDYFKLALQWPGTYCKRTRSCCPTNGCCRGSNSPAVFTIHGLWPDYNDGSWPSCCSGSSFDPKEISTLTNALEQYWPSLSCSKPSLCHGGKGTFWAHEWEKHGTCSYPVFSKXEYDYFLTVLNVYLKYNITSVLNDAGYX

SEQ ID NO: 11980 - protein, 266 aa, Oryza sativa (japonica cultivar-group)
MATARKAPRMVAIWAVVVVVVAADLFGAAVARSASARHAVGKKQREFDYFALALQWPGTICASTRHCCAINGCCRSEPLQTFTIHGLWPDYDDGTWPACCRHTSFDMDKILPLKPTLEKYWPSLYCSSSSTCFSGKGPFWAHEEMLASGGIHVSNGKQYALTDVIDAIKCAFGASPQIVCKKGSVEELRLCFDKDLKKTCTILLNSVVYFQPLDCLTTTATNENVSKKKYCPRYITLPTYDPIVHANSTREIITVESEVYGYLYTS

SEQ ID NO: 11981 - protein, 138 aa, Lycopersicon peruvianum
IHGVWPDNHSRQLNYCDRQATFVDVPLGKKLDDLDKRWPQLKHNKEYGEKHQPHWREEFMKHGTCCKNLYNEEQYFDLAINFIDRFDILRILRYHGIIPGKSYIVQKVQDAIRTVTHKLPKLQCLENSVGLELSEVGI

SEQ ID NO: 11982 - protein, 196 aa, Nicotiana alata
AFEYMQLVLQWPTAFCHTTPCKRIPNNFTIHGLWPDNVSTTLNYCAAKENFKNIEDDTKKDDLYKRWPDLTTAETYCKQHQNFWRHEYNKHGKCCSESYNREQYFDLAMALKDKFDLLSSLRNHGIIPGRGMKYTVQKINSTIKKITQGYPNLSCTKGIMELVEIGICFDSMVKNVINCPHPKTCKPTGSNEIKFP

SEQ ID NO: 11983 - protein, 214 aa, Nicotiana alata
MSKSQLTSVFFILLCALSPIYGAFEYMQLVLTWPITFCRIKHCERTPTNFTIHGLWPDNHTTMLNYCDRSKPYNMFTDGKKKNDLDERWPDLTKTKFDSLDKQAFWKDEYVKHGTCCSDKFDREQYFDLAMTLRDKFDLLSSLRNHGISRGFSYTVQNLNNTIKAITGGFPNLTCSRLRELKEIGICFDETVKNVIDCPNPKTCKPTNKGVMFP

SEQ ID NO: 11984 - protein, 218 aa, Nicotiana alata
MFNSPLTSVFFILLFALSPIYGTFEYMQLVLQWPTAFCHTTACTIIPTNFTIHGLWPDNVSTMLNYCEGRKNKYDSITDDKRKSDLYEHWPDLIIDKADCLDHQNFWEHEYNKHGTCCLPSYNQEQYFNLALALKDKFDLLTSLRSHGIIPGTQYTVQRINRTIKAVTQGYPNLSCTKGITMELLEIGICFDSRVKKVIDCPHPKTCKPFRNQAITFP

SEQ ID NO: 11985 - protein, 215 aa, Nicotiana alata
MFNLPLTSVFVIFLFALSPIYGAFEYMQLVLQWPTTFCHTTPCKNIPSNFTIHGLWPDNVSTTLNFCGKEDDYNIIMDGPEKNGLYVRWPDLIREKADCMKTQNFWRREYIKHGTCCSEIYNQVQYFRLAMALKDKFDLLTSLKNHGIIRGYKYTVQKINNTIKTVTKGYPNLSCTKGQELWEVGICFDSTAKNVIDCPNPKTCKTASNQGIMFP

SEQ ID NO: 11986 - protein, 215 aa, Nicotiana alata
MFNLPLTSVFVIFLFALSPIYGAFEYMQLVLQWPTAFCHTTPCKNIPSNFTIHGLWPDNVSTTLNFCGKEDDYNIIMDGPEKNGLYVRWPDLIREKADCMKTQNFWRREYIKHGTCCSEIYNQVQYFRLAMALKDKFDLLTSLKNHGIIRGYKYTVQKINNTIKTVTKGYPNLSCTKGQELWFVGICFDSTAKNVIDCPNPKTCKTASNQGIMFP

SEQ ID NO: 11987 - protein, 219 aa, Nicotiana alata
MFGSQLMFVLFILFLSLSPVYGTFDQLQLVLTWPPSFCHGKPCTRIPKNFTIHGLWPDEQHGMLNDCGETFTKLREPREKKELDDRWPDLKRSRSDAQDVQSFWEYEYNKHGTCCTELYDQAAYFDLAKNLKDKFDLLRNLKNEGIIPGSTYTVDEIAEAIRAVTQAYPNLNCVGDPQKILELSEIGICFDRGATKVITCRRRTTCNPINKKEISFPLN

SEQ ID NO: 11988 - protein, 196 aa, Nicotiana alata
DFEYLQLVLTWPASFCYANHCERIAPNNFTIHGLWPDNVKTRLHNCKPKPTYSYFTGKMLNDLDKHWMQLKFEQDYGRTEQPSWKYQYIKHGSCCQKRYNQNTYFGLALRLKDKFDLLRTLQTHRIIPGSSYTFQDIFDAIKTVSQENPDIKCAEVTKGTPELYEIGICFTPNADSMFRCPQSDTCDKTAKVLFRR

SEQ ID NO: 11989 - protein, 159 aa, Prunus avium
PSNYSNPRMPSKCTGSLFNFRKVYPQLRSDLKISWPDVESGNDTRFWESEWNKHGRCSEASLNQMQYFERSHAMWISYNITEILKNASIVPSATKNWTYSDIVSPIKRATKRTPLLRCKYDKSTQLLHEVVFCYEYDALKQIDCNGTAGCPNQKVISFQ

SEQ ID NO: 11990 - protein, 274 aa, Oryza sativa
MATARKAPRMVAIWAVVVVVVAADLFGAAVARSASARHAVGKKQREFDYFALALQWPGTICASTRHCCAINGCCRSEPLQTFTIHGLWPDYDDGTWPACCRHTSFDMDKLECSMPTLEKYWPSLYCSSSSTCFSGKGPFWAHEKHGTCSSPVVKDELEYFTTALDLYFKYNVTEMLASGGIHVSNGKQYALTDVIDAIKCAFGASPQIVCKKGSVEELRLCFDKDLKPLDCLTTTDVSKKKYCPRYITLPTYDPIGENAHFCTPAIAANTNQQL

SEQ ID NO: 11991 - protein, 258 aa, Oryza sativa
  unsure (1)..(258): unsure at all Xaa locations
WISQAPSSQVSLKLLFLLLAATPSELTVQPSRRQREFDYFALALQWPGTICASTRHCCAINGCCRXSXPPPPPRLHGLWPDYDDGTWPACCRHTSFDMDKILPLKPTLEKYWPSLYCSSSSTCFSGKGPFWAHESEKHGTCSSPVVKDELEYFTTALDLYFKYNVTEMLASGGIHVSNGKQYALTDVIDAIKCAFGASPQIVCKKGSVEELRLCFDKDLKPLDCLTTTDVSKKKYCPRYITLPTYDPIGNAGMXIIVX

SEQ ID NO: 11992 - protein, 197 aa, Oryza sativa
MATARKAPRMVAIWAVVVVVVAADLFGAAVARSASARHAVGKKQREFDYFALALQWPGTICASTRHCCAINGCCRSEPLQTFTIHGLWPDYDDGTWPACCRHTSFDMDKILPLKPTLEKYWPSLYCSSSSTCFSGKGPFWAHEEMLASGGIHVSNGKQYALTDVIDAIKCAFGASPQIVCKKGSVEELRLCFDKDLK

SEQ ID NO: 11993 - protein, 282 aa, Triticum aestivum
TLCTTLNSETTTHPAARGREGKGEKETPRRAEAMATATATTACLLAVWALVAAGLFGTGLARASVAPAAVGKEQREFDYFALALQWPGTICSSTRHCCAVNGCCRSEALHTFTIHGLWPDYDDGTWPSCCRHTSFDMDKLTPLKPTLDKYWPSLYCSTSSTCFSGRGPFWAHEEMLATGDILVSNGKEYALSDVIDTIKHAFGGSPQIICKKGSVEELRLCFTKDLKPRDCLTTSAMYKNLSKSKHCPRKISLPTYDPIVLTNSTLEIVPEASDNGLYFFTS

SEQ ID NO: 11994 - protein, 325 aa, Candida albicans
MLSQSFLIALAVIPVTLASPYYNPYFGKYFHGQRTSGDSSSSGNFYPVKDCSAFIDQNPETSWSCHNKSPVSSANSCCFEENGIILSTQFWDYNTTLLEIAVNGSTSDIVEAELKSKLDTVYNDLSRTFTIHGTWDDFCNGSYPQYCNKSLEVSDEKDNLTHILVDQFKEVELYNIMSKYWIDTIASNVDSSASTALWEHEYNKHGTCMTTLSPSCFTSQSYTRFENVVNFYKKTVEIWSQLDTFEFLAAAGIYPTVSRKYKLSQVQEALQKAHGAEVYVGCLNNSISEIWYFYNLQGSILTGTYKPIDTTTNTKCKDEVWYIPK

SEQ ID NO: 11995 - protein, 121 aa, Prunus salicina
PKRPSNCAGSRFNFTKVYPQLRNKLKISWPDVEGGNDTKFWEGEWNKHGTCSAERLNQMQYFERSHDMWMSYNITKILKNASIVPSATQTWSYADIVSAIKTATKRTPLLRCKPDPQPNKP

SEQ ID NO: 11996 - protein, 252 aa, Hordeum vulgare subsp. vulgare
MAFRRALLCLLGMLIASSAIAVSDSGIYYQIGLMWPGAYCVQTTGGCCMPKSPIVPAADFYVSGFTVLNATTDAPETSCSSTPFNSDEILGISGLRQYWSNIKCPSNNGQKSWKSAWKTSGVCSGLDDKAYFQAAIALRSKINPLSRLVSKGIKPDFGLYSLEKIKKAIQAGTGVAPLIQCSKGPFDKFQLYQIFICVAEDAKTLIECPKPQKFTCSDEILFHPFKKWMLKQAASSVSFAEAFEMAGAAMGY

SEQ ID NO: 11997 - protein, 197 aa, Glycine max
  unsure (1)..(197): unsure at all Xaa locations
PRVRASCRMALLLGLLLLVVASPAIADDDSGIYYQLALMWPGAYCEQTSAGCCKPTTGVSPARDFYITGFTVLNATTDAAVTGCSNKVPYDPNLITGIQGLNQYWSNIRCPSNNGQSSWKNAWKKAGACSGLSEKDYFETALSFRSRINPLVRLKAKGIEPDFGLYGLKAITKVFKSGINATPVIQCSXGPFDKYMX

SEQ ID NO: 11998 - protein, 245 aa, Hordeum vulgare
MAMRAISLCLILGLLAAAAPASATSFDFYYLILMWPGAYCADSDYGCCVPKYGYPAEDFFVEGFMTFDLSLNKAIVRCNSDKPFDVNKLEPIENNLNHYWSNIHCPRNDGTGTWKSEWRSYGVCSGLKLVDYFRAALNLRKKADVLGALAEQGINPDYRLYNTEHIKWAVNQKLGVMPGVQCRDGPFGKKQLYQIYLCVDKDGQIFIDCPKLPKLHCPEEVLFHPFHTWMLNATSPAKITLPTEA

SEQ ID NO: 11999 - protein, 268 aa, Oryza sativa
  unsure (1)..(268): unsure at all Xaa locations
MASGRIALLCLLGLLLAPAAIAAKDDKIFYQITFMWPGAYCAQTKAGCCMPKTDVAPASDFYVAGFTVYNATTNSSLSSCSNTPFDMNQIGDVTRLMQYWNNIRCPSKSGQKGWKNAWETSGVCSDLTESAYFDTALALRDKINPLSRLVSNGIKPDFGLYSVKKIKEVIEEGIGAPALIQCSKGPFNKFQLYQIYVCVAEDAKTFVECPSPRKPYTCGDDILFHPFKKWMLKXXNSTKSYAAADAIAAARSGHGNLSSIDRSIKKTN

SEQ ID NO: 12000 - protein, 252 aa, Oryza sativa
MEQRKFLLCLILGLLATSGPAKTVNADSPFDFYYLILMWPGAYCTDSEYGCCVPKYGYPSEDFFVKSFMTFDSSENTAVVRCNSDNPFDINKLDSIENNLNHYWSNIKCPRTDGVNSWKSEWNSYGVCSGLKELDYFKAGLQLRKNADVLSALAEQGIKPDYQLYNTAFIKWAVNQKLGVTPGVQCRDGPFGKKQLYEIYLCVDKDAKSFIDCPVLPNLSCPAEVLFHPFHTWMLNTTSAANIVMPTETVLA

SEQ ID NO: 12001 - protein, 252 aa, Oryza sativa; identical to SEQ ID NO: 12000

SEQ ID NO: 12002 - protein, 252 aa, Oryza sativa
MEQRKFLLCLILGLLAASGPAKTVNADSPFDFYYLILMWPGAYCTDSEYGCCVPKYGYPSEDFFVKSFMTFDSSENTAVVRCNSDNPFDINKLDSIENNLNHYWSNIKCPRTDGVNSWKSEWNSYGVCSGLKELDYFKAGLQLRKNADVLSALAEQGIKPDYQLYNTAFIKWAVNQKLGVTPGVQCRDGPFGKKQLYEIYLCVDKDAKSFIDCPVLPNLSCPAEVLFHPFHTWMLNTTSAANIVIPTETVLA

SEQ ID NO: 12003 - protein, 256 aa, Triticum aestivum
MAFGMAFRTALLCLLGMLIASPAIAVSDSGIYYQIGLMWPGAYCAQTTGGCCMPKSPVVPAADFYVSGFTVFNATTDAPETSCSGTPFNSGEILEISGLRQFWSNIKCPSNNGQSSWKSAWKTSGVCSGLDDKAYFQAAIALRSKINPLSRLVSKGIKPDFGLYSLEKIKKVIQAGTGVTPVIQCSKGPFDKFQLYQIFICVAGDAKTLIECPKPQKFTCSDEILFHPFKKWMLKQAASSVSYAEAFEMAGAVMGY

SEQ ID NO: 12004 - protein, 167 aa, Triticum aestivum
MASSRIPLLCLLGLLLVASPAIADDSSGIYYQLALLWPGAYCEQTNAGCCKPTTGVSPARDFYITGLTVYNATTNAALTECSNQAPYNPNLITGIGLEQYWINIKCPANNGQRSWKNAWKKAGACSGLDEKAYFEKALSFRSKINPLVRLKQNGIEDDFELYGLKAI

SEQ ID NO: 12005 - protein, 245 aa, Triticum aestivum
MAQRTISLCLILGLLAAAAPANATSFDFYYLVLMWPGAYCVDSEYGCCVPKYGYPAEDFFVQSFTTFDLSLNKAIVRCNSDKPFDINKLEPIENNLNHYWSNIHCPRTDGTSTWKSEWRSYGVCSGLKEVDYFRAALNLRKNADVLGALAEQGINPDYRLYSTEHIKWAVNQKLGVMPGVQCRDGPFGKKQLYQIYLCVDKNGEAFIDCPKLPKLQCPEEVLFHPFHTWMLNATSPAKIMLPTEA

SEQ ID NO: 12006 - protein, 245 aa, Triticum aestivum
MAQRTISLCLILGLLAAAAPANATSFDFYYLVLMWPGAYCVDSEYGCCVPKYGYPAEDFFVQSFTTFDLSLNKAIVRCNSDKPFDINKLEPIENNLNHYWSNIHCPRTDGTSTWKSEWRSYGVCSGLKEVDYFRAGLNLRKNADVLGALAEQGINPDYRLYSTEHIKWAVNQKLGVMPGVQCRDGPFGKKQLYQIYLCVDKNGETIIDCPKLPKLHCPEEVLFHPFHTWMLNATSPAKIMLPTEA

SEQ ID NO: 12007 - protein, 247 aa, Triticum aestivum
  unsure (1)..(247): unsure at all Xaa locations
MEQRKFLLCLILGLLAASGPAKTVNADSPFDFYYLILMWPGAYCTDSEYGCCVPKYGYPSEDFFVKSFMTFDSSENTAVVRCNSDNPFDINKLDSIENNLNHYWSNIKCPRTDGVNSWKSEWNSYGVCSGLKELDYFKAGLQLRKNADVLSALAEQGIKPDYQLYNTAFIKWAVNQKLGVTPGVQCRDGPFGKKQLYEIYLCVDKDAKSFIDCPVLPNLSCPAEVLFHPFHTWMLNTTSAANIVMPX

SEQ ID NO: 12008 - protein, 210 aa, Triticum aestivum
  unsure (1)..(210): unsure at all Xaa locations
XIVLSLILGLLAAANAVPFDFFYLILMWPGAYCGRGRNGCCVPKYGYPAEDFFVEFFQTFDVSINKPIVRCRNGSPFDAKKLDKIENYINHYWTRLKCPPTDGVNAWKSAWDNYGVCSGLKQLDYFKAALSLRKQADILGALADQGILPDYKLYNTARIKGXAVAAKLGVEPGLQCRDGPFGKKQLYQVYLCVDTDAKTFIKCPKLPATL

SEQ ID NO: 12009 - protein, 145 aa, Pseudanabaena sp. PCC 6903
VYRFNEHGDGTVIAETKQPHLESFLGLHYPDSDIPKQAKHLYTLNWLRLIPDVNYQPTALVSHKQSPEAKSSSEKVPLDMSYCALRSVSPIHIEYLQNMGVTASMSVSLIQNKKLWGLIACHHYTPKFIPYETRTICEFLGQLMS

SEQ ID NO: 12010 - protein, 139 aa, Leptolyngbya sp. PCC 7375
LYRFDDDGHGEVVAEEKCEEMEPYLGLHYPESDIPKTARQMFLSNWIRVIPDAAATAVDLYPMDNPVTQQPTDLTHSILRSAYSCHLEYLHNMGVGASLTISLMKDNKLWGLIACHHRTAKYVPYELRKACEFLGRVIF

SEQ ID NO: 12011 - protein, 765 aa, Nostoc sp. PCC 7120
MRIDVESQNINVTSLKEAPIHLSGQIQPHGVLLVLEEPGLKILQVSNNTWGILGINAENILQKKLEDLLDSFQIERIQSGLSSGNLEFINPTKIWIRKKGDDYAVFDAVFHRNTEGFLILELEPAITQENIPFLSFYHLAKASINQLQKTANLRDFCQIIVQEVRKVTDFDRVMLYKFDDDGHGSVIAEEKLDSLEPYLGLHYPESDIPKPARKLFISNSIRVIPNAQAQAIQMIPALNPVSDRPVDLTNSILRSAANCHLEYLHNMGVGASLTISLIKDNKLWGLIACHHLSAKYVSYELRKACEFLGRVIFAEISAREETEDYDYRMNLTHIQSLLVEYMSQEDNFVDGLIKHQPSLLDLTSAQGAAVCFGDHCTLIGETPKAEDLVFLVQWLKNNVEEEVFYTDSLPQVYPDAERYKNVASGLLAIPISQRNYVLWFRPEVIQTVNWGGDPNQPFEVNKLDGNVRLCPRKSFELWKETVRLTSLPWRYVEIRAALELRKAIVNIVLRQADELAQLAHDLERSNAELKKFAYVASHDLQEPLNQVANYVQLLEMRYQDQLDADANEFITFAVEGVSLMQTLIDDVLAYSKVDTQAIAFQLTEVEKALDKALGNLRQRIAETGANITHDPLPTVMAGSTQLMQLFQNLIANAIKFRSEEAPQIHIGAERLEDEWLFSVRDNGIGIDPQFSDRIFVIFQRLHTRDEYHGTGMGLAICKKIIECHRGRIWVESQLGEGATFYFTIPVGGRERERRNGRKTQNNLFS

SEQ ID NO: 12012 - protein, 751 aa, Nostoc sp. PCC 7120
MNINDITIPFQVDLSNCSKEPIHIPGLIQPHGVLLVLQEVDLTILQVSNNTFNILGRHPEQLLNQHLSCLLEAEQLSLLKDCLAQEDLQIINPLEFIIKSHNESISFDVIAHRSNNLLILELEANLSDKTHSFFRFYHLVKLAMLKLQGTATTTEISQILAQEVRKITGFDRVMVYRFDEQWNGKVIAEVKPEYLTSYLGLNYPASDIPQQARKLYSQNWLRLIPDAKYQPVPIVPINNPLNDQPLDLSRSVLRSVSPLHIEYMQNMGVTASMSISIMKNQKLWGLIACHHQSPKYIPYEIRSACEFLGQMTSVEMSAKEDSEDTEDKIQVKSVHSKLVQYMSAENDFINALIDHQPNILDLVKAQGAAVCFNGNSCTVGQVPPMPDIQVLVEWMSQNIHEEIFATDSLATVYPDAEKLRDVASGLIALSISRSQKNYILWFRPEVVRTVDWGGNPHKPVEVIANGEIRLSPRKSFDLWKETVLLKSQPWKSHEVNAALELRSAIIGIVLQKADELAQLNIELERSNQELDAFAYIASHDLKEPLRGIHNYSNFLMEDYGEIIDAPGKEKLLTLIRLTQRMEDLIDSLLHFSRLGRVDLSMQDTDLNEIVHRILDMLSGRIEETGVEIRILQLLPVVYCDRIQIGEVFSNLIANSIKYNDKANKWIEIGYIDNPPLPPTFYVRDNGIGIREKHFETIFRIFKRLHSPSKYGGGTGAGLTIAKKIVERHGGKIWVESTYGEGSTFYFTLQDV

SEQ ID NO: 12013 - protein, 139 aa, Nostoc sp. PCC 7120
LYKFDDDGHGSVIAEEKLDSLEPYLGLHYPESDIPKPARKLFISNSIRVIPNAQAQAIQMIPALNPVSDRPVDLTNSILRSAANCHLEYLHNMGVGASLTISLIKDNKLWGLIACHHLSAKYVSYELRKACEFLGRVIF

SEQ ID NO: 12014 - protein, 920 aa, Nostoc sp. PCC 7120
MSPTAKPNSQVSLNQESVLRRITARIRQSLELEDIITATTAEVRALLGTDRVMIYKFHPDGSGQVIAESIYENRLPSLLGLNFPADDIPPQARELLVKSKVRSIVDVATGMIGQSPVHDLETGELISEDICYRPVDSCHVEYLTAMGVKSSVVAPIFCQDELWGLLVSHHSENRTVSEDELEAMQMIVDQLAVAIAQSHLLTQARKKAQKEAIINRIITLLHSLPTIVLKPALEAAVGAFAGVGGRLCLRNQAVESQHVVLRSLAECLIPGSNCVQLYTCGQQPITPEQTIYPLIEQYRVWQEHYTSHHDIWAIADIYQDSTLRSLQAVFQPTKIRGILIIPLEYRQQLLGYLSIFRNEIDTETLWAGRIDQDQRQMFPRVSFNLWRDAKKSQAQEWTSEEIELAKEIGQHFASAIQQYELYQQVQAFNENLEKQVQKRTLELRHTSEQQQAVFGVISKIRESLDTNTIFQITTKEACQLIKADRVSVYRFDNEWGGEFVGDFEATSPHWSNESKISINTVWNDTYLQNTQGGRYRYNETFAVDDIYKVGFTQCHVENLEQFQIYAFVLAPIFVGQKLWGLLATYQHSGPRQWKPSEVNFLTQIAAQLGIALQQAELLNQTQQQAQKLTQALHHLQQTQTQLIQTEKMSSLGQLVAGVAHEINNPVNFIYGNLSHVSEYAQNLLTMLELYQQELPNPSVEILEQADEIDLEFLAKDLPKTLSSMQIGVERIRQIVMSLRTFSRLDEAEMKAVNIHEGIDSTLLILQHRLKAKPETAGIKLTKKYAEIPLVECYAGQMNQVFMNVLSNAIDALEDCKETKSPNHNGEIIISTSFGQIRDSIQSIVIRIMDNGPGIPEDLRLRICDPFFTTKPVGKGTGLGLSISYKIVVDRHGGVFKCDSQLGSGTEFWIEIPIQQVNGNW

SEQ ID NO: 12015 - protein, 1333 aa, Nostoc sp. PCC 7120
MTEILSRTTQMPVSEVQEGMAVEPNHVYVIPPNTRMTIAQGVLKLIPLEKIRGVSMTVDSFLISLAEDRGNRAIGVILSGGDSDGARGLETIKAAGGITFAQCEESAKVSSMPNTAVASGHVDFILTPQKIAEELANISSHPYVNHPTPSKQVDIMPEGTDSLSIIFSLLRAATGVDFTYYKQTTLKRRIQRRMMLYKLEKLEDYAQYLQNNQAEVLALYQDLLIKVTGFFRDPEAFEALKTNVFPIITKNRTPDSPIRIWVAGCSTGEEAYSMAICLLEFLADKVANTPINIFATDINEVAIEKARIGVYKPSEVADVSPERLQRFFVQVEGGYQISKPVRELCIFARQNLISDPPFSRLDLITCRNVLIYLGATVQKKLLPIFHYGLKSTGFLMLGTSETVGEFFDLFNLVDRKNKIYSRKIAPARLGIDFISQNYPLEAFNPQPKINEDVLNNQEMQKEADRIVLNQYAPVGVIVNDDLEILQFRGQTSSYLQPAPGRPSFNLLKMAKEELRLELRTAIHQAKKQEMSVRKEGIELREGEQVRQVRIDAIPFQLTAGGERYFLVLFEDMPPSVTAAPQAASKNPNVSSRQRQQMNDEQEINRLGQELATTKEYLQSIIEEQQATNQDLRAANEEILSSNEELQSTNEELETAKEEIQATNEELNTINEELQRRNVESNQVSNDLQNLLSSINIPILMLGGDMRIRRFTPTAGRIFNLIVTDIGRPLSDINHKLTIPDLEAQILEVVGTLNLKTQEVQDNDGHWYDLRIRPYRTIDHKIDGAVVVLVDIDALKRSTEELRASKDYAEAIVATIRESLVILDIDLQVITANQFFYEKFQVTPEETEHHLIYEIGDGQWNIPQLRSLLEDVLPQQTQFQNLEVEHNFERIGQKIMRLNARKMTLLDNRRMILLVIEDITQQKQLEAERTHLLAQEQSARNAAEAANHAKDEFLSILSHELRNPLNSMLGWANLLRTHQLEEVTVNQGLEAIERSAQAQNHLISDLLDVSRISSGRLRMDAQEVELIPVIEAAIAVVRLAAEAKNIQIETKLDPTHTPMLGDPIRLQQVIWNLLSNAIKFTPTKGRIDVTLEYTYFQAQIQVKDTGAGIKADFLPYVFERFRQADGTRTRSNQGLGLGLSIVRHLVELHGGTVEVESQGEGQGSTFTIKLPVQANRKENPVATVQEPVTLTNVPEIPTDNLPSLEGVRVLIVDDEPDIRLLFKLVLEEYGVKVTEVASAREALSKLRENPGCYDILLSDIGLPEEDGYLLMRQVRALSAEEGGQIPAAALTAYAGDSEYTQALAAGFQTHIAKPIEPYQLVSLVASLAGRVRGV

SEQ ID NO: 12016 - protein, 614 aa, Nostoc sp. PCC 7120
MERESPRSDSWNPPFSKRGRMSTYRQAFAGISSRFEAPYGHRVYEVHVLPVRNDDGEIFAGMTITQEITERKQSELALQNALQLLNLHIDTTPLAVVQWDCHLCVTRWSSAAEKIFGWLAEEVIGKYIQDLHIVYEEDMTAVAEVSDRLLSGQEAQIIQYNRNYTKDGRVIYCEWYNSSITNEEGSVTSVLSLVLDVTERIQAEKALRQSELMVTEERAQALERERAARIELERASRMKDEFLAIVSHELRSPLNGILGWSRLLRTRKLSPEKIEQALESIERNAQAQTQLIEDLLDISRIIRGNIRLLVRPTKLIPVIQAALDTVRPIANTKSIQIISRLNFDIGLVSADPERLQQVIWNLLSNAVKFTPEGGRVEICLEQVETNVQIQVIDTGTGISPEFLPYVFDRFRQADATTTRNQGGLGLGLAIVRNLVELHNGKVSVASPGEGQGATFTVQLPLLATYSTLTPEEPLIQRQTAWDTKVQIKGLKILAVDDEPDTREFLKTALEQYGAIVTTAASTREALKLLQLVKPDVLLSDIGMPNEDGYALIRQIRALSSEQGGNVPAAALTAYTRQSDRLQALTAGFQIHISKPIEPIQLLKIVATLAGNNSN

SEQ ID NO: 12017 - protein, 374 aa, Crossosoma bigelovii
ALSIAGAVQSQKLAVRAISHLQSLPSGDIKLLCDTVVENVRELTGYDRVMVYKFHEDEHGEVVAESKRPDLVPYIGLHYPATDIPQASRFLFRQNRVRMIVDCNATPVKVIQDESLMQPLCLVGSTLRAPHGCHAQYMANMGSNASLAMAVIINGNEEEGVGGRSPMKLWGLVVCHHTSARCIPFPLRYACELLMQALGPQLNMELQLASQSSEKRVLRTQTLLCDMLLRDSPTGIVTQSPSIMDLVKCDGAALYYQGKYYPLGVTPTEPQIKDIVEWLLAFHGDSTGLSTDSLADAGYQGAATLGDAVCGMAVAYITKRDFLFWFRSHTAKEIKWGGAKHHPADKDDGQRMHPRSSFKAFLEVVKSRSLPWEN

SEQ ID NO: 12018 - protein, 1016 aa, Rhodobacter sphaeroides
MRLPSLAARPTGPRRTGVPSRLRWTGSVRHIPTRGRMCWPAPPRPSRRSSNGSPLLWQPGGYDRPPPPCRSLPHVCQNFVVRGCLMTISGGTFDPSICEMEPIATPGAIQPHGALMTARADSGRVAHASVNLGEILGLPAASVLGAPIGEVIGRVNEILLREARRSGSETPETIGSFRRSDGQLLHLHAFQSGDYMCLDIEPVRDEDGRLPPGARQSVIETFSSAMTQVELCELAVHGLQLVLGYDRVMAYRFGADGHGEVIAERRRQDLEPYLGLHYPASDIPQIARALYLRQRVGAIADACYRPVPLLGHPELDDGKPLDLTHSSLRSVSPVHLDYMQNMNTAASLTIGLADGDRLWGMLVCHNTTPRIAGPEWRAAAGMIGQVVSLLLSRLGEVENAAETLARQSTLSTLVERLSTGDTLAAAFVAADQLILDLVGASAAVVRLAGQELHFGRTPPVDAMQKVLDSLGRPSPLEVLSLDDVTLRHPELPELLAAGSGILLLPLTSGDGDLIAWFRPEHVQTITWGGNPAEHGTWNPATQRMRPRASFDAWKETVTGRSLPWTSAERNCARELGEAIAAEMAQRTRAELARLRHYDPLTGLANRSYLQERLAQDGQSAAALLFIDLDRFKAVNDSMGHGVGDGLLIEVARSLVATVRPHDLVVRLGGDEFVVLCHRLDAAGIVSLAERLRQVLEQPFEVAGRKCHISASIGIAMADSIGDLDLVRAADIAMYAAKKNGGNRGELFRPSLYEETTQLVELDNDMRGAIESEQFHLVYQPIFALNPETERLVGFEALLRWDHPLHGALQPGIFIPLAERLGHIHAMGNWVLRRAILQLQAFRSAGPELDLKMNVNVSPLQLARPDFLARLADLLAQVPDLPRHALCLEITETSLSDEAVSEALISIRALGVRIAIDDFGTGFSSLACLRRLPVDVAKLDRAFLGGGHTAAQDHRFFAAVTGLVHAADLKVVQEGIETLDQLALVRAAGADFAQGFHLAAPLSIAAALGLIAASRKE

SEQ ID NO: 12019 - protein, 721 aa, Rhodobacter sphaeroides
MGAIADACYRPVPLLGHPELDDGKPLDLTHSSLRSVSPIHLDYMQNMHTAASLTIGLADGDRLWGMLVCHNTTPRIAGPEWRATAGMIGQVVSLLLSRLGEVENAAETLARQSTLSTLVERLSAGDTLAAAFVAADQLILDLVGASAAVVRLAGQELHFGRTPPVDAMQKALDILGRPSPLEVLSLDDVTLRHPELPELLAAGSGILLLPLTSGDGDLIAWFRPEHVQTITWGGNPAEHGTWNPATQRMRPRASFDAWKETVTGRSLPWTSAERSCARELGEAIAAEMAQRTRAELARLRHYDPLTGLANRSYLQERLAQDGQPAAALLFIDLDRFKAVNDSMGHSVGDGLLIEVARSLVATVRPHDLVVRLGGDEFVVLCHRLDAAGIVSLAERLRQALEQPFEVAGRKCHISASIGIAMADSIGDLDLVRAADIAMYAAKKNGGNRGELFRPSLYEETTQLVELDNDMRGAIESEQFHLVYQPIFALSPEAERLVGFEALLRWDHPHHGALQPGIFIPLAERLGHIHAMGDWVLRRAILQLQAFRSAGPELDLKMNVNVSPRQLAKPDFPARLADLLAQVPDLPRHALCLEITETSLSDEAVSEALISIRALGVRIAIDDFGTGFSSLACLRRLPVDVAKLDRAFLGGGHTAAQDHRFFAAVTGLVHAADLKVVQEGIETLDQLALVRAAGADFAQGFHLAAPLSIAAALDLIAASREE

SEQ ID NO: 12020 - protein, 775 aa, Rhodopseudomonas palustris
MSSRSDPGQPMASATDPSGRLALDLTECDREPIHIPGAIQPHGYLFVVSETDLRIASVSANVEDLLRQPPASLLNVPIAHYLTAASAARLTHALHGGDPAAINPIRLDVVTPDGERAFNGILHRHDSIVILELEPRDESRYTNEFFRSVRVAIRRLQTAADLPTACWIAASEVRRITGFDRIKVYQFAADWSGQVIAEDRDSGIPSLLDFHFPSSDIPAQSRALYTINPVRIIPDIGYRPSPLVPDINPRLGGPIDLSFSVLRSVSPTHLEYMVNMGMHAAMSISIVRDNRLWGMISCHNLTPRFVSYEVRQACELIAQVLTWQIGVLEEAEIVRHSVRMRAIQNRLLHELGDEQGLTAGLSRVSEEMLALMGASGFALCSFDGVAAFGRTPSDDEIQALASWLSHRESRGIFQTQQLSASFPEAEVYSDIASGLLAVPLGRASTTLMLWFRPEVAQTVTWGGDPHKPVQIGPRGRRLQTRASFEAWREEVRDRSRPWRSHEIVAAEEIRDLVVDVILGRAEELENANRELSRSNDELESFAYVAAHDLKEPLRHIEAFAGLLNDLLLPEARSRLSLMVNGIEASSRRLRALINDLAEYSRIGRQARPLQPVDLNQILTEVLSDLKPMLQDARAEVVSEPLPTVLCDGSQIRQLLQNLISNAVKYRDAERLPHVTIAATIDSPPPAAPAGANVRRARITIADNGIGFDEQYREQIFEPFQRLHGPDEYQGTGIGLAICRKIVHRHGGTISATSRVGEGSVFTFTLPLCDQDAAES

SEQ ID NO: 12021 - protein, 845 aa, Rhodopseudomonas palustris
MPRKVDLTSCDREPIHIPGSIQPCGCLLACDAQAVRITRISENAGAFFGRETPRVGELLADYFGETEAHALRNALAQSSDPKRPALIFGWRDGLTGRTFDISLHRHDGTSIVEFEPAAADQADNPLRLTRQIIARTKELKSLEEMAARVPRYLQAMLGYHRVMMYRFADDGSGKVIGEAKRSDLESFLGQHFPASDIPQQARLLYLKNAIRVISDSRGISSRIVPERDASGAALDLSFAHLRSVSPIHLEYLRNMGVSASMSLSIIIDGTLWGLIACHHYEPRAVPMAQRVAAEMFADFFSLHFTAAHHQRRFQSSLRTRRTLDSLTSEMSFDASVDDFLRGNLKRIADLIPSDGVGLWMNGVWTAHGSTPPADALPSILHLLTGRAGNEIVATHALTDRIAAATDYAGAAAGMLAIPLSQVAGDYLLFFRKEQVQTLNWAGDPNKTYDTGPLGDRLTPRKSFSIWKEQVDGQSVPWSPDDRDTAATIQVGLREVLLRQSEILSAERKKAEVRQRVLNEELNHRVKNILALIKSLVNQPAGEGKSLEEFASALRGRIMALSFAHDQVVRSDGGGALLDLIQAELSPYPASQITLEGPDVGVDARAYSVLALVLHELATNAAKYGALSRSSGRLKVAWTVGDDGRCDIEWTESCGPPVRPPTRQGFGTVLLSRSIPFDLGGWSEVDYLPGGVVARLGIPGQFVTETLQRLSSVQASGQSTDSSALNIADASILLVEDQLVIALDAEDMLGAIGAKLVTSVASAEEALQTIAQQPPTLAILDVNLGNGSSLPVADELERLGIPFIFATGYGDTAMIPERMRGLPIVRKPYSIDSLRGALSAMLDDRE

SEQ ID NO: 12022 - protein, 760 aa, Rhodopseudomonas palustris
MMDEADSGGIVTARNVDLSSCDRELVQYPEAIQPHGAMLTVDEQSDRVLHASANCAAFIGKPPEAVIGAPIAAVLGAGWHELLGSLHRMPLDSGPVNIARESFLGSDQGWHLFAHRCGGLIILEFEKAEPEAAGTTSNLYSEVRADLAALQATEGVQAFFDLAVERIRAFTGYDRVMAYRFAEDGSGQVIAEARRDDLEPYLGLHYPATDIPAPARRLFALSWVRHLPDVGYTPVPLLAAKSPLVTGPVDMSFASLRSVSVMYTGYLKNMGVQSTLVMPLVKEGRLWGLISAMHHAAPRHISHQMRMAAEFLAHTLSLLMSAKEDAEQFERSSARKAAAEALTRLLDSEADIGAALHAAGALDLLSALIDAGGVVVQTGDEVATRGEAPAAAPLHELTSWLRERARPVFATDRLPNLDPAAQAVASQASGVLALRPLPDQPMLIAWLRPEQIEDVQWAGDPRKPVEISDADGMQRLRPRNSFALWKESVQGRAVPWRDDEKDAATRLAAAIAEIAAARKGRIERINRALDASHSELSRYTDVASAELKEHLRGIHHLTTSLRRRQGEVLDEEGRQQVATILKLTQRMDALVDALLDRSRGGSEAASETVDLEAVVDDALAPFARRIAEDRIEVRRPMRLGTAQGHREWIGEVFTNLIGNAIRYNDKPERWIEIGVEAGSPPRYYVRDNGIGIADTDQQLVFQMFHRVDQSEQKAEGAGVGLAMTRRIVAHHGGRIWVQSRLGEGATFYFTLAPDEERHDA

SEQ ID NO: 12023 - protein, 758 aa, Rhodopseudomonas palustris
MTEGSVARQPDLSTCDDEPIHIPGAIQPHGLLLALAADMTIVAGSDNLPELTGLAIGALIGRSAADVFDSETHNRLTIALAEPGAAVGAPIAVGFTMRKDAGFVGSWHRHDQLVFLELEPPQRDVAEPQAFFRRTNSAIRRLQAAETLESACAAAAQEVREITGFDRVMIYRFASDFSGEVIAEDRCAEVESYLGLHFPASDIPAQARRLYTINPVRIIPDINYRPVPVTPDLNPVTGRPIDLSFAILRSVSPVHLEYMRNIGMHGTMSISILRGERLWGLIACHHRKPNYVDLDGRQACELVAQVLAWQIGVMEEQAITRQTLKGQAIQRSLINDIEQLHDHRAGLARNSEALLELMGASGLCLHSREGVITIGQTPPGPIIDQLAQLAGRSGGSELFQTDRLSTIIPEAGAFAEVASGVLAVPLSRTPPRRVMLWFRPEVAQTVYWAGNPDKSVTAESGRLRPRTSFAAWTEQTHGRAIAWQPHEVAAAVEIRDLIIDVILRNTEKLERINTQLARSNEELESFAHVASHDIKEPLRHIEAFAGLLADNIREMGDERLGVMVSGIEKSSRRLRNLINDLAEFSQLGRRSKPLSWVSLETVLNEVLADLQPRITEARAEIQADRLPFARCDHNQIRQVLQNLIANSLKYRDPARPCRIRIFAQPDDNGGRAEIGSAPAIRICVTDNGIGFDKKYIDQVFEPFQRLHGPDDYEGSGIGLAICRKIVQRHGGRVGVDTVPGQGSTFWFTLPVSDDHGQG

SEQ ID NO: 12024 - protein, 566 aa, Rhodopseudomonas palustris
MMVYRFDEQGHGEVFSERHVPGLESYFGNRYPSSDIPQMARRLYERQRVRVLVDVSYQPVPLEPRLSPLTGRDLDMSGCFLRSMSPIHLQYLKNMGVRATLVVSLVVGGKLWGLVACHHYLPRFIHFELRAICELLAEAIATRITALESFAQSQSELFVQRLEQRMIEAITREGDWRAAIFDTSQSILQPLHADGCALVYEDQIRTIGDVPSTQDVREIAGWLDRQPRAAVTSTASLGLDVPELAHLTRMASGVVAAPISDHRGEFLMWFRPERVHTVTWGGDPKKPFTMGDTPADLSPRRSFAKWHQVVEGTSDPWTAADLAAARTIGQTVADIVLQFRAVRTLIAREQYEQFSSQVHASMQPVLITDAEGRILLMNDSFRDMLPAGSPSAVHLDDLAGFFVESNDFLRNVAELIDHGRGWRGEVLLRGAGNRPLPLAVRADPVTRTEDQSLGFVLIFSDATDRRTADAARTRFQEGILASARPGVRLDSKSDLLHEKLLSALVENAQLAALEITYGVETGRIAELLEGVRQSMLRTAEVLGHLVQHAARTAGSDSSSNGSQNKK

SEQ ID NO: 12025 - protein, 771 aa, Rhodopseudomonas palustris
MMHSGLDNSAELRVSDFDPITLAGGTRTEVLPGAIQPHAALLALAPADLTIVHAAGATASLLGAAAELLPGTAASTAFSSDQIARLQALATAERWIERPQHAFTLNAPDATPIDVIVHHASGLLVVELDPRREPAPENSLALVQSMIRRARPAPNLQGFCDAMAAELRSVTGFDRVMVYRFARDGSADVIAEARGPETSPFLGLRDPQPDISNQPGSISRIRVQPDVHAPAAPLWPAHSPRNGLALDLSFSATRSASPEHRLYLAQLGVAASLSLSLVVEGELWGLIVCHHATPRFLPYRMREACALFAEMASLQLETRLAADQLAARLRSTRIHEELVTRMSQESDLAEGLIRFYPNLLDFIPAAGVGLWIDGQFTGIGATPGPAQVAAMMGWLHGVPHDGVYHTDCLALAYPPAKAFAGCASGLLALSLSNTPHNYVLWFRPEVVRVVTWAGMPNKPVGVDAGAPRTPKGCASSWQESVRLHGEPWLDTDVDAAHRLRESLLDVVLRRIDGIARERRSAQLLQEQLMRQVELGLSRSKDVAKTLQEEKRRRVLVEADLSKVLRRTVEDQEAERLRIARELHDTLGQSLTLLQLGFDKLGQAAGDNPELQQRIAEMKSLTADVGRQANRLAWEIRPTALDDLGIQTAIQNLLDSWSEKSSIEFDLHMTLGSRRLPSPVETTLYRVLQEALTNVVRHASARHVSVILQLGDDQVTMIVEDDGCGFVTAGRKPPSGRLGLLGIRERLSLVGGSLEIESAPGKGTALYARIPL

SEQ ID NO: 12026 - protein, 903 aa, Rhodopseudomonas palustris
MNDFKDAKRKFEGAPVPAPRRPVRRGGRALIRLFGVAVIVSLSVMAGRIASQHTRAWEPPGVGHGLDVPWWIFVISLAVGLSIAGLIELQLSRYERRNAHKLRQAHLAAIVEGSSYAIVGQSIDGTVLSWNKTAERLFGYTAEQAIGQNATELMVPDDLRDEEQQMLSGISDGTAFAYLWTKRKRANGTLVDVAVSISPIRADDGRLIGMAASMRDITDLVQAEREVHDLNAALERQVAERTCQLEKTLTLQTAILERAAYAVIATDVTGTITLFNPAAERMLGYKAEDLIGRASAMLFHDSDELAARAEAMRKEGISVSSNLGVLQARLARNDPDTAMWTYIDAMGNRIPTRLTLSRLRTKTGVNLGVLGIAVDLTEQLKYEDELKAARASAEQASAAKADFLANMSHEIRTPLNGIIGYADLVLEDETLAPDTRRQVMRIFEASDSLRVIIDDILDFSKIEACGLTLESKPLYINELIANCASIIEPKADEKGLKLIATAQATPPVLIGDAGRLRQVLLNLMNNAVKFTTAGSVELIVSCIGRVDHLVRLRISVADTGIGISPEAQKGLFKRFSQADETISRKFGGTGLGLAISQRIVQAMHGELKIDSQPGVGSTFYFEVELPVAERLDIERLDAQVHCSRSVKILVVDDVEMNRDLCKTMLTRAGHDVDLADSGATAIAMVASRTYDLVFMDVQMGEMDGLEATRRIRALGHAYRDVPIIALTANVLPEQVERYKAAGVDGHLGKPINRAELLACVARWIDGDIAHVPSEPLAPVELGSEPEHPVRDQAALEDLRMFASEHDIAGFAEQLRDTITRIRAQWPHHIDAMKLDHEARTALGAAAHKTVSLAGQLGFKQLAAACRRMEAACAPHRDIHDAFAALHAALDNAEPVLDAPHELT

SEQ ID NO: 12027 - protein, 897 aa, Rhodospirillum rubrum
MGFPVNHGNRGTNREAGTNPVRSAWRFQAGTGMCPCGLGAAMDTVHSTCDQEPIHVPGLVQPHGFLVVLDSKSGRIAQVTPGIEAVAGVVAQRLIGEPLERVLDPRSAQRCRHRIARPEYPHLIDPFPVRAPGGQSFSAVAHATDQADLVELWSDDQETTVEGVFGRLPFAIGHASRAASIEDLCGRAAATVADLTGYERVMVYRFAENWEGEVIAETLNGPVESYKGQRFPASDIPAQARALYSRNLLRSIPDVHYRPLPLVGRSPDGRELDMTFCNLRSVSPVHLEYLRNMGVAASFSVSLVVDGRLWGLVACHDRVPRRLSLATMGACQVYAETIAQQVLRLDNTRRSRHRSRTGDLIDDISVLLGSGRSLAEALDYTLDDTLALFGASRAVISLDGRQWTAEGPLEGAPIQVPPHQRLLLSERLGGRLRLPAELAGSFVGGVLLPLSDQPDRDFLLLGRPETLRSIEWAGRPEKQPEITPEGGLKIHPRTSFSLWREEVRGRSVAFDPLDRETAETLSLFLAERLAKQRRQQAVVALEETRQRLRDLAECSSDWLWETTGDGTLALVSDRINGLGDLRPEELVGRKLVDLVGGGDSGGAPGVDADEIASAFDEGRAFHGLTVSLALLGRGQWWVRLSGVPQYDGRGQLLGFRGTGTDVTPFKRLQEERVRTQRLEALGRLAGGIAHEIGNVLQPVLTMAHYASKRLDDRDFLEAALADICEGGARAKDIVRSVLTFARQTPAERRPLVLAPALARSVAFAAKGHPGLEIITDIPDTAGEIAANSTELSQIVLNLVGNAADAMGGRGRVFVSLAEAPDLGRMVITIRDEGPGMTLQTQARVFEPFFTTKPEGSGTGMGLAVVHGLVEAWGGTIGLESAPGSGTKFVISFPINNP

SEQ ID NO: 12028 - protein, 392 aa, Annona sp. SM-1999
PYEVPMTAAGALQSYKLAAKAIARLQALPSGNLQKLIDTVVEEVFELTGYDRAMAYKFHDDDHGEVISEITKPGLEPYLGLHYPATDIPQAARFLFMKNKVRMICDCNAKPVKVYQDEKLKLELTLCGSTLRAPHSCHLKYMENMGSIASLVMAVVINESDNEDDNSMVEQQQQQQPKRKRLWGLVVCHNTTPKFVPFPLRYACEVLMQVFAIHVNKELELENQIREKHLRTQTLLCDMLMRDAPLGIVTQSPNIMDLVKCDGAALLYNNKFWRLGLTPSEAHMRHIVSWLNEYHMDSTGLSTDSLHDAGYPGALALGDAVCGMAAVRITSKDILFWFRTHTAAEIRWGGAKHDPSDKDDGRRMHPRSSFKAFLEVVKSSSFPWKDYEMDAI

SEQ ID NO: 12029 - protein, 341 aa, Annona sp. SM-1999
EPVNPADVPVTAGGALKSYKLAAKAISRLQSLPSGNIPLLCDVLVREVSELTGYDRVKAYKFHEDEHGEVIAECRRSDLEPYLGLHYPATDIPQASRFLFMKNKVRMISDCLSPPVKVIQGKGLAQPLSLCGSTLRAPHGCHAQYMANMGSISSLVMSVTIDEDNDDTCSEQQQKGRRLWGLVVCHHTSPRFVPFPLRYACEFLMQVFGIQLNKEVELAAQSREKHILQMQTMLCDMLLRDAPVGILSQSPNVMDLVNCNGAALYYQNQFWLLGTTPTEAQIRDIVGWLLEYHNSTTGLSTDSLVEAGYPGAAELGDDVCGMAAVRITSKDFLFWFRSHTA

SEQ ID NO: 12030 - protein, 398 aa, Hernandia lychnifera
DFEPVKPYEVPMTAAGALQSYKLAAKAIARLQSLSSGSMQKLVDTVVEEVYELTGYDRVMAYKFHDDDHGEVISEIKKPDLEPYLGLHYPATDIPQASRFLFMKNKVRMICDCNMKPVKVYLDEKLTYDLTLCGSTLRAPHSCHLQYMANMGSIASLVMAVVINEGEEERIAQKLHNHHHSQKRKRLWGLVVCHHTTPRFVPFPLRYACEFLMQVVAIHVNKEFELENQIQEKNILRTQTLLCDMLLRDAPLGIVTQSPNIMDLVKCDGAALLYGNKIWKLGTTPTELQIRDISLWLSEYHMDSTGLSTDSLYDAGYPGALSLGDAICGMAAVTITPKDFLFWFRSHTAAKVRWGGAKHDPTDKDDGRTMHPRSSFKAFLEVVKTRSLPWKDYEMDAI

SEQ ID NO: 12031 - protein, 345 aa, Hernandia lychnifera
DLEPVNPAEVPVTAAGALKSYKLAAKAISLLLSLPSGNISVLCDVLVCEVSDLTGYDRVMAYKFHEDEHGEVIAECCRPDLEPYLGLHYPATDIPQASRFLFMKNKVRMICDCSAFPVKVVQDKRLAQPLSLCGSTLRAAHGCHAQYMANMDSVASLMMSVTIIEDDDEVGSDPQQQQKGRKLWGLVVCHHTSPRFVPLPLRYACELLIQVFGMQLNKEVELANQMREKHILRMQAVPCDMLLRDTPVGIMTRSPNIMDLVKCDGAALYYHNQFWLLGINPTEAQIRDIARWLLERHNGSTGLSTDSLMEAGYPGASFLGNAVCGMAAVRISSNDFLSWFRSHTA

SEQ ID NO: 12032 - protein, 394 aa, Sagittaria sp. Mathews 383
PYEVPMTAAGALQSYKLAAKAISRLQSLPGGSMQKLCDTVVQEVFELTGYDRVMAYKFHEDDHGEVVSEVTKPGLDPYLGLHYPATDIPQAARFLFMKNKVRMICDCRAKPVKVYQDEKLAFDLTFCGSTLRAPHSCHLQYMENMDSIASLVMAVIVNEGDEEDEVLGSRAQQQQQQQQRRKRLWGLVVCHNRTPRFIPFPLRYACEFLMQVFAIHVNKEFELENQMREKNILRTQTLLCDMLFRDALLGIISQNPNIMDLVRCDGAALVYQSKIWRLGMAPTESQICDIAAWLSEYHMDSTGLSTDSLHDAGYPGVLALGDSVCGMAAARITSKDILFWFRSHTAAEIRWGGAKHDPADEDDGRRMHPRSSFKAFLEVVKTRSMPWKDYEMDA

SEQ ID NO: 12033 - protein, 397 aa, Sagittaria sp. Mathews 383
DLEPVNLSDVPVTAAGALKSYKLAAKAISRLQSLSSGNISLLCDVLVREVRDLTGYGRVMAYKFHEDEHGEVISESRRSDLEPYLGLHYPATDIPQASRFIFMKNKLRMICDCTAQPVKVIQDKKFTQPLSLCGSTLRAPHGCHAQYMANMGSIASLVMSATISDEDEDDASSGQQRKRRKLWGLVVCHLTSPRFVPFPIRYACEFFMQVFAIQLNKEVELAAQTMEKYIFRTQTFLCDMLLRDAPVGIFTQSPNAMDIVKCDDAALYYKNQFWLLGITPAEGQIRGIAGWLRDCHNTTTGLSTDSLTAFSEAGYRGASTLGDAVCGMTAIKFTSRDFIFWFRSHTAKEIKWRGAKHDPVDKDDDGRKMHPRSSLKAFLDVVKRRSLPWEDVEMDAI

SEQ ID NO: 12034 - protein, 139 aa, Geitlerinema sp. PCC 9228
VYKFNHEEHGVVVGEDCGQDIPSYLGLHYPSTDIPPQARALYLKNWLRIIPDANYAAVSVVPERHAHTGQPLDLSYSVLRSVSPRHVRYLQNMGVSASMSISIIKDGQLWGLVACHHYQRKYIPYEIRTACEFLAQVLS

SEQ ID NO: 12035 - protein, 142 aa, Oscillatoria sp. PCC 7821
IYRFNEGGDGNIIAEIKQPEQKAFLGLRYPDSDIPKQAKHLYTLNWLRLIPDMDYQPCQLVTSPTANPEVEIQPLDMSYCGLRSISPLHIEYLKNMEVAASLTISLIQQQKLWGLIACHHNSPKFIPYEVRTVCEFLGQLMS

SEQ ID NO: 12036 - protein, 139 aa, Stanieria cyanosphaera str. PCC 7437
LYKFDEDDHGSVIAEEKRSDLVSYLGLHYPESDIPRPARKLFSYNWIRLIPDAQTQPVEMIPAINPISDRPLDLTHSILRSAFPCHLEYLHNMGVGASLTISLIKDQKLWGLIACHHQTPKHVPYELRKACEFLGRVVF

SEQ ID NO: 12037 - protein, 136 aa, Leptolyngbya sp. PCC 7376
VYRFDRDGVGIIEAESKAEHMTSYLGLHFPNVDIPVSARELFQMNALRLISDVEDEPIPLLALNDSELLDLSYAILRPPSPCHVQYLQNMDVAASMVMPLIKDGQLWGLINCHHSSPKHIPCDIRTACVFLGKLMC

SEQ ID NO: 12038 - protein, 390 aa, Aquilegia sp. SM-1999
PYEVPMTAAGALQSYKLAAKAIARLQSLPSGSIDRLCDTVVEEVFQLTGYDRVMAYKFHDDDHGEVVSETTKEGLPPYLGLHYPATDIPQAARFLFMKNKIRMICDCRAKHVRVLQDEKLPFELTLCGSTLRAPHSCHLQYMENMDSIASLVMAVVINDGDEEEGTVEGASQSRKRKRLWGLVVCHNTTPRFVPFPLRYACEFLIQVFAIHVNKEFELENQILEKNILRTQTLLCDMLMRNAPIGIVSQSPNIMDLVKCDGAALLYQNKIWRLGLSPSESHIRDIASWLSEYHMDSTGLSTDSLYDAGFPGALSIGDTVCGMAAVRINSKDMLFWFRSHTAGEIRWGGAKHDPGEKDDGRKMHPRSSFKAFLEVVKTRSFPWKDYEMDAI

SEQ ID NO: 12039 - protein, 392 aa, Aquilegia sp. SM-1999
DLEPVNPADVPVTAAGAMKSYKLAAKAISKLQSLPSGNIPFLCEVLVQEISDLTGYDRVMVYKFHEDDHGEVIAEWKISDLEPYLGLHYPATDIPQASRFLFMKNKVRMIWDCTAAPVKVIQDTNLPQPLSLGGSTLRAPHGCHAQYMANMGSVASLVMSVTINDDDDDEVVNGQQKGRKLWGLVVCHHTCPRFVPFPLRYACEFLIQVFSMQINKEVELARQLREKHILQTKTVLCDMLLRDAPIGIFTQSPNVMDLVKCNGAALYYHQKFWLLGVTPTEAQIRDIVEWLVEYHNASTGLSTDSLVEAGYPGASILGNAVCGMAAAKITSKDFLFWFRSHTANEIKWGGAKHDPTEKDDGWKMHPRSSFKAFLDVVKHRSVPWEDIEMDAI

SEQ ID NO: 12040 - protein, 352 aa, Cabomba sp. SM-1999
DLEPVNPADMPSTAAGALKSYKLAAKAISRLQVLPSGNIGLLCDVLVREVSELTGYDRVMAYKFHEDEHGEVIAECKRPDLESYLGLHYPATDIPQASRFLFIKNKVRMICDCTAAPVKVIQNENLEPPLSLCGSTLRFPHGCHVQYMTNMGSIASLVMSVVINESDEATANDQPEAAATSEQPQKGRKLWGLVVCHHRKPRFIPYPLRYACEFLIQVFSVRLNKEVELAIQVREKHILRTQTVLCDMLLRDAPVGIVTQSPNIMDLVKCNGAALYYGKQFWLLGTTPTEAQIRDIIAWLHESHGSSTGLSTDSLMEAGYPRALVLGNAVCGMAAVKITSRDFLFWFRSHTA

SEQ ID NO: 12041 - protein, 374 aa, Siphonodon celastrineus
ALSIAGAVQSQKLAVRAISQLQSLAGGDIKLLCDTVVESVRDLTGHDRVMVYKFHEDEHGEVLAESKRPDMEPYIGLHYPATDIPQASRFLFKQNRVRMIVDCHASPVRVIQDDGLMRPLCLVGSTLRAPHGCHAQYMENMGSTTSLVMAAYINGNDEKATGGRNATKLWGLAVCHHTSARCIPFPLRYACEFLMQAFGLQLNMELQLAAQLSEKHVLKTQTLLCDMLLRDSPTGIVTQSPSIMDLVRCDGAALYYQGNYYPLGVTPTEAQIKDIVEWLLAVHGDSMGLSTDCLADAGYPGSALLGDAVCGMAVAHITNRDFLLWFRSHTAEEIKWGGAKHRPKDKDDGQRMHPRSSFKAFLEVVKSRSLPWEN

SEQ ID NO: 12042 - protein, 374 aa, Siphonodon celastrineus
ALSIAGAVQSQKLAVRAISQLQSLAGGDIKLLCDTVVESVRDLTGHDRVMVYKFHEDEHGEVLAESKRPDMEPYIGLHYPATDIPQASRFLFKQNRVRMIVDCHASPVRVIQDDGLMRPLCLVGSTLRAPHGCHAQYMENMGSTASLVMAAYINGNDKKATGGRNATKLWGLAVCHHTSARCIPFPFRYACEFLMQAFGLQLNMELQLAAQLSEKHVLKTQTLLCDMLLRDSPTGIVTQSPSIMDLVRCDGAALYYQGNYYPLGVTPTEAQIKDIVEWLLAVHGDSMGLSTDCLADAGYPGSALLGDAVCGMAVAHITNRDFLLWFRSHTAEEIKWGGAKHRPKDKDDGQRMHPRSSFKAFLEVVKSRSLPWEN

SEQ ID NO: 12043 - protein, 391 aa, Androstachys johnsonii
DLEPVNPADVPVTAAGALKSYKLAAKAISRLQSLPSGNISLLCDVLVKEVSDLTGYDRVMVYKFHEDEHGEVVAECRRPDLEPYLGLHYPATDIPQASRFLFMKNKVRMICDCLAPPVEVVQDGKLSQPLGLCGSTLRSPHGCHSQYMRNMGTIASLVMSVTINENDDEMEGDQQKGRKLWGLVVCHHTSPRFVPFPLRYACEFLIQVFGVQINKEVELAAQMREKHILRTQTLLCDMLLRNAPVAIITQSPNVMDLVKCDGAALYYRKKFWLLGITPTEAQIRDIAEWLLEYHSGTTGLSTDSLMEAGYPGASILGDAVCGMAAVRITSKDFLFWFRSHTAKEIKWGGAKHDPNDKEDGRKMHPRSSFKAFLEVVKRRSLPWEDMEMDAI

SEQ ID NO: 12044 - protein, 392 aa, Galphimia gracilis
DLEPVNPADVPVTAAGALKSYKLAARAISRLQSLPSGNISLLCDVLVKEVRDLTGYDRVMVYRFHDDEHGEVVSECCGPDLEAYLGLHYPATDIPQASRFLFMKNKVRMICDCLAPPVKVLQDERLPQPLSLCGSTLRSPHGCHAQYMANMGTMASLVMSVTINEDDNMLDGDQQHMARKLWGLVVCHHTSPRFVPFPLRYACEFLIQVFGVQINKEVELAAQMTEEHILRTQTLLCDMLLRDAPVAIITQSPNVMDLVKCDGAALYYRKKFWLLGVTPTEAQIRGIAEWLLEYHGGNTGLSTDSLMEAGYPGASVLGDAVCGMAAVKITSRDFLFWFRSNTAKEIKWSGAKHDPGDKDDIKKMHPRSSFKAFLEVVKWRSLPWEDVEMDAI

SEQ ID NO: 12045 - protein, 192 aa, Dacrydium franklinii
DDHGEVISEIRKSDLEPYLGLHYPATDIPQASRFLFMKNRVRMICDCQAPPIRVVEGKRLPRELNLCGSTLRAPHGCHAQYMSNMGSIASLVIAVIVNEKDEEEGDSEGQHQQKGKRLWGLVVCHHTSPRFVPLPLRYACEFLMQVFGIQLNKEVELAAQTREKHILRTQTLLCDMLLRDAPTGIVTRKPNI

SEQ ID NO: 12046 - protein, 189 aa, Dacrydium franklinii
DDHGEVIAEMRRSDLEPYLGLHYPATDIPQAARFLFMKNKVRMICDCRGMPVKMIQSKKLEQPLSLSGSTLRAPHGCHAQYMANMGSVASLVMSVTINDNNGNDEDRENGGSRRLWGLVVCHHTSPRFVPFPVRYACEFLMQVFGIQLNKELELAAQLREKHILRTQTVLCDMLLRDAPVGIVTQNPNI

SEQ ID NO: 12047 - protein, 189 aa, Dacrydium franklinii
DEHGEVVAEIRRSDLEPYLGLHYPATDIPQASRFLFMQNRVRMICDCSATPVQVIQSEELRQPLCLVGSTLRAPHGCHAQYMANMGSIASLVMAVVINGNDEEGAGTSGRSSMKLWGLVVCHHTSPRAVPFPLRYACEFLMQAFGLQLNMELQLAAQLTEKHILRTQTLLCDMLLRDAPIGIVTQSPSI

SEQ ID NO: 12048 - protein, 192 aa, Macrozamia communis
DDHGEVVAEIRRSDLEPYLGLHYPATDIPQACKFLFMKNRVRMICDCCPAPVRVVQDKKLARDLTLCGSTLRAPHGCHSQYMSNMGSIASLVMAVIINEKEEEEGDNGDQQQLKGRRLWGLVVCHHASPRFVPFPLGYACEFLMQVFGIQLNKEVELAAQLREKHILRTQTLLCDMLLRDAPIGIVTQSPSI

SEQ ID NO: 12049 - protein, 189 aa, Macrozamia communis
DDHGEVVAEIRRSDLEPYLGLHYPATDIPQASRFLFMRNRVRMICDCSSPPVKVVQDKRCPKPLSLCGSTLRAPHGCHAQYMANMASIASLVMAVTINDDDDDIGSSGQQKGRRLWGLMVCHHTSPRFVPFPLRYACQFLMQVFGIQLNREVELAAQLREKHILRTQTVLCDMLLRDAPDGIVAQTPNI

SEQ ID NO: 12050 - protein, 187 aa, Macrozamia communis
DEHGEVVAEIRRSDLEPYLGLHYPATDIPQASRFLFMQNRVRMICDCRATPVRVIQAAELRQPLCLVGSTLRAPHGCHAQYMANMGSIASLVMAVVINGNDEAGGSGRSSMKLWGLVVCHHTSPRAVPFPLRYACEFLMQAFGLQLNMELQLAAQLTEKHILKTQTLLCDMLLRDAPIGIVTQSPSI

SEQ ID NO: 12051 - protein, 190 aa, Blechnum spicant
DEHGEVVAEIRKSDLEPYLGLHYPATDIPQASRFLFMKNRVRMISDCLAIPVKVIQDRELRQPLSLAGSTLRAPHGCHSQYMANMGSAASLVMAVTVNDNEEASSSRNHQPKQRKLWGLVVCHHTTPRAVSFPLRSACEFLMQVFGLQLNMEVELAAQMREKHILRTQTLLCDMLLRDAPIGIVSESPNI

SEQ ID NO: 12052 - protein, 188 aa, Blechnum spicant
DEHGEVVAEIRRADLEPYMGLHYPATDYPQAARFVFMKNRVRMICDCTLPPVKISQDKNLAQPLSLTGSTLRAPHGCHAQYMSNMGSIASLVMAVIVNDSDVDSAGHTSQGIKLWGLVVCHHTSPRYVPFPVRSACEFLMQVFSLQLNMEVGMAAQVREKHILRTQTLLCDMLLRDAPIGIVSQSPSI

SEQ ID NO: 12053 - protein, 190 aa, Marattia laevis
DEHGEVVAEIRRSDLEPYLGLHYPATDIPQASRFLFMKNKVRMICDCTIPPVGVIQHKGLRQPLSLAGSTLRAPHGCHTQYMENMGSIASLVMAVLVNDNDEESSKSSYHTKYRKLWGLIVCHHTKPRAVPFPLRSACEFLMQVFGLQLNMEVELAAQMREKHVLRTQTLLCDMLLRDAPIGIVSRSPNI

SEQ ID NO: 12054 - protein, 190 aa, Marattia laevis
DDHGEVVAEIRRSNLEPYLGLHYPATDIPQASRFLFMKNRVRMICDCSAPPVKVIQDKKLGQPLSLTSSTLRAPHGCHSLYMGNMGSIASLVMAVVINDNEDDIIKNGHAYQGRRLWGMVVCHHTSPRFVPFPVRSACEFLMQVFGLQLNMEVGMAAQLREKHILKTQTVLCDMLLRDAPIGIVSKSPNI

SEQ ID NO: 12055 - protein, 724 aa, Bradyrhizobium sp. ORS278
MPVPLTTPAFGHATLANCEREQIHLAGSIQPHGILLAVKEPDNVVIQASINAAEFLNTNSVVGRPLRDLGGDLALQILPHLNGPLHLAPMTLRCTVGSPPRRVDCTVHRPSNGGLIVELEPATKTTNVAPALDGAFHRITSSSSLIGLCDETATIFREITGYDRVMVYRFDEEGHGEVLSERRRPDLEAFLGNRYPASDIPQIARRLYERNRVRLLVDVNYTPVPLQPRISPLNGRDLDMSLSCLRSMSPIHQKYLQNMGVGATLVCSLMVSGRLWGLIACHHYEPRFVPFDIRAAGEALAETCAIRIAALESFAQSQSELVVRRLEQRLVEAVSRDGEWQAALFDGSQSLLQPLGASGAALLFEGQVMTAGDVPSTQRIRDLATWLDRRRKAPDAPPQGLTVTASLTLDDPSFADIRSIASGLIAAPLSASEGEYLLWFRPEQVRTVTWGGDPLKAVIIGDDPSDLSPRRSFAQWHQLVEGKSEPWSPAELASARLVSETVADVALQLRSVRMVIAQDQLATISAQVLRSEQPVIIADVEGRILLLNEAFEQQLRASHPHIPHLRDLGAYCTAPAEFRANLDDLMRNKRSWRGELTLTGGATPQRPLMVRADPVIAPHDRVLGFVLIFSDLTERKTAEAARARFQEEIDGARRPSLRLDQSASLIYKELAASTVENAQLAALEVTHGAEAGSMPEMLESIRNSTARTLGILEHLVWYRSQSEE

SEQ ID NO: 12056 - protein, 748 aa, Synechocystis sp. PCC 6803
MATTVQLSDQSLRQLETLAIHTAHLIQPHGLVVVLQEPDLTISQISANCTGILGRSPEDLLGRTLGEVFDSFQIDPIQSRLTAGQISSLNPSKLWARVMGDDFVIFDGVFHRNSDGLLVCELEPAYTSDNLPFLGFYHMANAALNRLRQQANLRDFYDVIVEEVRRMTGFDRVMLYRFDENNHGDVIAEDKRDDMEPYLGLHYPESDIPQPARRLFIHNPIRVIPDVYGVAVPLTPAVNPSTNRAVDLTESILRSAYHCHLTYLKNMGVGASLTISLIKDGHLWGLIACHHQTPKVIPFELRKACEFFGRVVFSNISAQEDTETFDYRVQLAEHEAVLLDKMTTAADFVEGLTNHPDRLLGLTGSQGAAICFGEKLILVGETPDEKAVQYLLQWLENREVQDVFFTSSLSQIYPDAVNFKSVASGLLAIPIARHNFLLWFRPEVLQTVNWGGDPNHAYEATQEDGKIELHPRQSFDLWKEIVRLQSLPWQSVEIQSALALKKAIVNLILRQAEELAQLARNLERSNADLKKFAYIASHDLQEPLNQVSNYVQLLEMRYSEALDEDAKDFIDFAVTGVSLMQTLIDDILTYAKVDTQYAQLTFTDVQEVVDKALANLKQRIEESGAEIEVGSMPAVMADQIQLMQVFQNLIANGIKFAGDKSPKIKIWGDRQEDAWVFAVQDNGIGIDPQFFERIFVIFQRLHTRDEYKGTGMGLAICKKIIEGHQGQIWLESNPGEGSTFYFSIPIGN

SEQ ID NO: 12057 - protein, 1276 aa, Synechocystis sp. PCC 6803
MNPNRSLEDFLRNVINKFHRALTLRETLQVIVEEARIFLGVDRVKIYKFASDGSGEVLAEAVNRAALPSLLGLHFPVEDIPPQAREELGNQRKMIAVDVAHRRKKSHELSGRISPTEHSNGHYTTVDSCHIQYLLAMGVLSSLTVPVMQDQQLWGIMAVHHSKPRRFTEQEWETMALLSKEVSLAITQSQLSRQVHQQQVQEALVQRLETTVAQYGDRPETWQYALETVGQAVEADGAVLYIAPDLTGSVAQHYQWNLRFDWGNWLETSLWQELMRGQPSAAMEPMAAVQSTWEKPRPFTSVAPLPPTNCVPHGYTLGELEQRSDWIAPPESLSAENFQSFLIVPLAADQQWVGSLILLRKEKSLVKHWAGKRGIDRRNILPRLSFEAWEETQKLVPTWNRSERKLAQVASTQLYMAITQQFVTRLITQQTAYDPLTQLPNWIIFNRQLTLALLDALYEGKMVGVLVIAMDRFKRINESFGHKTGDGLLQEVADRLNQKLSPLAAYSPLLSRWHGDGFTILLTQISDNQEMIPLCERLLSTFQEPFFLQGQPIYLTASMGISTAPYDGETAESLLKFAEIALTRAKCQGKNTYQFYRPQDSAPMLDRLTLESDLRQALTNQEFVLYFQPQVALDTGKLLGVEALVRWQHPRLGQVAPDVFIPLAEELGLINHLGQWVLETACATHQHFFRETGRRLRMAVNISARQFQDEKWLNSVLECLKRTGMPPEDLELEITESLMMEDIKGTVVLLHRLREEGVQVAIDDFGTGYSSLSILKQLPIHRLKIDKSFVNDLLNEGADTAIIQYVIDLANGLNLETVAEGIESEAQLQRLQKMGCHLGQGYFLTRPLPAEAMMTYLYYPQILDFGPTPPLPKVALPETETEAGQGNVGDRPLPNSLNRENPWTEKLHDYVLLKERLQQRNVKEKLVLKIANKIRASLNINDILYSTVTEVRQFLNTDRVVLFKFNSQWSGQVVTESHNDFCRSIINDEIDDPCFKGHYLRLYREGRVRAVSDIEKADLADCHKELLRHYQVKANLVVPVVFNENLWGLLIAHECKTPRYWQEEDLQLLMELATQVAIAIHQGELYEQLETANIRLQQISSLDALTQVGNRYLFDSTLEREWQRLQRIREPLALLLCDVDFFKGFNDNYGHPAGDRCLKKIADAMAKVAKRPTDLVARYGGEEFAIILSETSLEGAINVTEALQVEVANLAIPHTVSGTGHVTLSIGIAVYTPERHINPNALVKAADLALYEAKAKGRNQWLAYEGSQLPHVDGEV

SEQ ID NO: 12058 - protein, 765 aa, Tolypothrix sp. PCC 7601
MLQLIYNNFIVSLSPENSPENAAIAPFEVDLTNCDREPIHIPGSIQPHGMLLALTEPELTIVQVSRNTDEILGVAATEFINQPLSRLLDAQQIDFFRNCLAQEDLTLVNPIELTIAVGENARAFDGIIHRSDRLLILELEPVLHQKNYTFFNFYHLVKAALSKVQNASTLDELCQIIVKHVRQMNGFDRVMIYRFDENWHGTVIAEDKSAHLSPYLSLRYPASDIPKQARQLYRDNWLRLIPDVDYQPVALLPHHNPVTNQPTDLSHSVLRSVSPLHIEYLHNMGVKASMSISLLKNQKLWGLIACHHESPKYVPYEIRSACEFLGQMTSLELAAKEDSENTEYKMQLKAVQSKLVEYMAAANNFVDGLIGQEPNLLDLVNATGAAVCINGEYQTLGRTPQHREIEQLINWLSQHTQEEVFHTNCLSELLPEASEWKDVASGLMALSISKSQKSYLLWFRPEALQTVDWAGNPHKPVELADDGSLRLSPRKSFDLWKEIVQRQSLPWESYEIEAVWNFRSAIVGVVLRKADELAKMNVELQRSNDELDAFAYIASHDLKEPLRGIHHYSSFLIEDYGNRLDDEGIGRLRTLIRLTQRMENLIDSLLHFSRLGRVELGIQPTDLNDLVQRVIDVLSARIQETGATIRIPRPLPTIMCDRVQVSAIFTNLIANGIKYNDKPEIWVEIGYLEPITLYVRDNGIGIRDRHFESIFRIFKRLHGPTQYGGGTGAGLTIAKKVVERHGGKIWVESTYGEGSTFYFTLQEVK

SEQ ID NO: 12059 - protein, 767 aa, Tolypothrix sp. PCC 7601
MVSEFQAQSINVNSLKEAAIHVCSQIQPHGVLLVLGEPELNILQISSNTWSVFGILPEDVLQKKLEDLLDPFQIERIKAGILEGNLDYINPTKIWVRKKGDEYVVFDAVFHRNPEGLLILELEPAISQENIPFLSFYHLARASINQLEKTTNLRDFCQIIVQEVRKVTGFDRVMLYKFDDDGHGSVIAEEKLDSMEPYLGLHYPESDIPKPARKLFASNFIRLIPDAHAEPVQILPINHPQSQQPIDLTNSILRTAANCHLEYLHNMGVGASLTISLIKDGKLWGLIACHHQTPKYVSYEFRKACEFLGRVIFTEISTREETEDYDYRMNLAYIQTVLVEYMSQEENFIDGLVKHQPNLLNLTSAQGAAVCFGDRCTVIGQTPKEEDLNFLLQWLKNNVREEVFYTDSLPRIYPDAEKFKNVASGLLAIPISKRNYVLWFRPEVIQTVNWGGNPNEAFEVSQTEGNLRLVPRKSFELWKENVQLTSLRWKAVEIKAALELRKAIINIVLRQADELAQLAHDLERSNAELKKFAYVASHDLQEPLNQVANYVQLLEMRYENELDEDAKEFINFAVEGVSLMQTLIDDVLAYSKVDMQASAFQLTEVETPLNRSLSNLRGRIHETGAMITHDPLPTVMADSTQLMQLFQNLIANAIKFRSEQPPKIHIGAERLEDEWLFSVQDNGIGLEPRFSDRIFVIFQRLHTREEYPGTGMGLAICKKIIECHRGRIWVESQLGEGATFYFTIPVGGRERERRNGRQTQKDLFGRG

SEQ ID NO: 12060 - protein, 139 aa, Tolypothrix sp. PCC 7601
LYKFDDDGHGSVIAEEKLDSMEPYLGLHYPESDIPKPARKLFASNFIRLIPDAHAEPVQILPINHPQSQQPIDLTNSILRTAANCHLEYLHNMGVGASLTISLIKDGKLWGLIACHHQTPKYVSYEFRKACEFLGRVIF

SEQ ID NO: 12061 - protein, 139 aa, Tolypothrix sp. PCC 7601
IYRFDENWHGTVIAEDKSAHLSPYLSLRYPASDIPKQARQLYRDNWLRLIPDVDYQPVALLPHHNPVTNQPTDLSHSVLRSVSPLHIEYLHNMGVKASMSISLLKNQKLWGLIACHHESPKYVPYEIRSACEFLGQMTS

SEQ ID NO: 12062 - protein, 681 aa, Ralstonia metallidurans
MRIQHAFRLITLAMVATIVGFGSYLWTEEWRAYAVAQHSEAMLQAFRATLVAAEKVSAERGPSNAALGAAPGVAAGALLRAREQSDASLTAAIAMLHGANCPECGAAKGSLEHARAQLAAARSQIDRLIARPLSERHDVQRAVSGMFTIVDEILRVADGPLSRLQRSAPVAAQHAVSARFAAELREYAGRAGSEFTSALVSNRPMHSEERERLAGDLGRVQTLGDQIQQRVSFQLASKPGLRDADTALHKRFFGDGLAYLQKVEAIGPAEPRPTTAELASTYVPLMAPIVAMRDAVLDVAQAEVQADTTRAKRRLGGLLAILAIITSFVAATFWLFAKRVLRPLTLATEATVELAEGRYDGPTHVWPKTDEIGAIFVALEQLRAGLLRKVALEHERTTLIARLQAAVTHERAQMMALAQARDAAEASARTKSSFLAMMSHEIRTPLQGILGLLELVEYSPLSAEQRRQVRLASEAGQALRQILDDVLDYAKMDAGRLRLALAPLDLRGLFANVLSLLAPRAQAKGLQLQQWVQPDVPVQLVADGARLRQILLNLVGNAIKFTECGSVDLLASVEPTSAGEDVLVVSVADTGIGIAPEDIARLFTPFVQGESGPARRFDGTGLGLAISRQLAQLMGGELMLDSTLGVGTQVMLRVPMPGCPDAGSPLSNSERREHRAEFRLA

SEQ ID NO: 12063 - protein, 364 aa, Dicarpellum baillonianum
VQSQKLAVRAISQLQSLPGGDIKLLCDTVVECVGDLTGYDRVMVYRFHEDEHGEVVAESKRPDLEPYLGLHYPATDIPQASRSLFKQNRVRMIVDCHASPVRVIQDDGLMQALCLVGSTLRAPHGCHAQYMENMGSIASLAMAVIINVNDEEATAGRNPTRLWGLVVCHHTSARCIPFPLRYACEFIMQAFGLQLNMELQLAAQLLEKHVLKTQTLLCDMLLRDSPTGIVTQSPSIMNLVKCDGAALYYQGNYYPLGVTPAEAQIKDIVEWLLAFHGDSTGLSTDSLADAGYPGAALLGDAVCGMAVAYITNRDFLFWFRSHTAKETKWGGAKHHPEDKDDGQRMHPRSSFKAFLEVVKSRSLP

SEQ ID NO: 12064 - protein, 362 aa, Dicarpellum baillonianum
QSQKLAVRAISQLQSLPGGDIKLLCDTVVECVGDLTGYDRVMVYRFHEDEHGEVVAESKRPDLEPYLGLHYPATDIPQASRSLFKQNRVRMIVDCHASPVRVIQDDGLMQALCLVGSTLRAPHGCHAQYMENMGSIASLAMAVIINVNDEEATAGRNPTRLWGLVVCHHTSARCIPFPLRYACEFIMQAFGLQLNMELQLAAQLLEKHVLKTQTLLCDMLLRDSPTGIVTQSPSIMNLVKCDGAALYYQGNYYPLGVTPAEAQIKDIVEWLLAFHGDSTGLSTDSLADAGYPGAALLGDAVCGMAVAYITNRDFLFWFRSHTAKETKWGGAKHHPEDKDDGQRMHPRSSFKAFLEVVKSRSL

SEQ ID NO: 12065 - protein, 364 aa, Dicarpellum pancheri
VQSQKLAVRAISQLQSLPGGDIKLLCDTVVECVGDLTGYDRVMVYRFHEDEHGEVVAESKRPDLEPYLGLHYPATDIPQASRFLFKQNRVRMIVDCHASPVRVIQDDGLMQALCLVGSTLRAPHGCHAQYMENMGSIASLAMAVIINGNDEEATAGRNPTRLWGLVGCHHTSARCIPFPLRYACEFIMQAFGLQLNMELQLAAQLLEKHVLKTQTLLCDMLLRDSPTGIVTQSPSIMNLVKCDGAALYYQGNYYPLGVTPAEAQIKDIVEWLLAFHGDSTGLSTDSLADAGYPGAALLGDAVCGMAVAYITNRDFLFWFRSHTAKETKWGGAKHHPEDKDDGQRMHPRSSFKAFLEVVKSRSLP

SEQ ID NO: 12066 - protein, 365 aa, Dicarpellum pancheri
QSQKLAVRAISQLQSLPGGDIKLLCDTVVECVGDLTGYDRVMVYRFHEDEHGEVVAESKRPDLEPYLGLHYPATDIPQASRFLFKQNRVRMIVDCHASPVRVIQDDGLMQALCLVGSTLRAPHGCHAQYMENMGSIASLAMAVIINGNDEEATAGRNPTRLWGLVGCHHTSARCIPFPLRYACEFIMQAFGLQLNMELQLAAQLLEKHVLKTQTLLCDMLLRDSPTGIVTQSPSIMNLVKCDGAALYYQGNYYPLGVTPAEAQIKDIVEWLLAFHGDSTGLSTDSLADAGYPGAALLGDAVCGMAVAYITNRDFLFWFRSHTAKETKWGGAKHHPEDKDDGQRMHPRSSFKAFLEVVKSRSLPGR

SEQ ID NO: 12067 - protein, 374 aa, Acanthothamnus aphyllus
ALSIAGAVQSQKLAVRAISHLQSLPGGDIKLLCATVVDSVRDLTGYDRVMVYKFHEDEHGEVVAESKRPDLEPYIGLHYPATDIPQASRFLFKQNRVRMIVDCRASPVGVRQDDGLMQPLCLVGSTLRAPHGCHAQYMENMGSKASLAMAVIINGNDEESIGGRNATRLWGLVVCHHTSARCIPFPLRYACEFLMQAFGLQLNMELQLAAQLSEKHVLKTQTLLCDMLLRDSPTSIVTQSPSIMDLVKCDGAALYYQGKYCPLGVTPAEAQIKDIVEWLLAFHGDSTGLSTDSLGDAGYPGAALLGNAVCGMAVAYITNRDFLLWFRSHTTKEIKRGGAKHHPEDKDDGQRMHPRSSFKAFLEVVKSRSLPWEN

SEQ ID NO: 12068 - protein, 360 aa, Acanthothamnus aphyllus
AVQSQKLAVRAISHLQSLPGGDIKLLCATVVDSVRDLTGYDRVMVYKFHEDEHGEVVAESKRPDLEPYIGLHYPATDIPQASRFLFKQNRVRMIVDCRASPVGVRQDDGLMQPLCLVGSTLRAPHGCHAQYMENMGSKASLAMAVIINGNDEESIGGRNATRLWGLVVCHHTSARCIPFPLRYACEFLMQAFGLQLNMELQLAAQLSEKHVLKTQTLLCDMLLRDSPTSIVTQSPSIMDLVKCDGAALYYQGKYYPLGVTPAEAQIKDIVEWLLAFHGDSTGLSTDSLGDAGYPGAALLGNAVCGMAVAYITNRDFLLWFRSHTTKEIKWGGAKHHPEDKDDGQRMHPRSSFKAFLEVVK

SEQ ID NO: 12069 - protein, 363 aa, Campylostemon angolense
QSQKLAVRAISQLQSLPGGDIKLLCDTAVESVRNLTGYDRVMVYKFHEDEHGEVVAESRRPDLEPYIGLHYPATDIPQASRFLFKQNRVRIIVDCHASPVSVIQDDGLMQPLCLVGSTLRAPHGCHAQYMENMGSIASLAMAVIINGNDEDGIGGRNPTRLWGLVVCHHTSVRCIPFPLRYACEFLMQAFGLQLNMELQLAAQLLEKHVLKTQTLLCDMLLRESPTGIVTQSPSIMDLVKCDGAALYYQGNYYPSGVTPTEAQIKDIVNWLLAFHGDSTGLSTDSLADAGYPGATLLGDAVCGMAVAYITNRDFLFWFRSHTAKEIKWGGAKHHPEDKDDGQRMHPRSSFKAFLEVVKSRSLP

SEQ ID NO: 12070 - protein, 361 aa, Campylostemon angolense
QKLAVRAISQLQSLPGGDIKLLCDAAVESVRNLTGYDRVMVYKFHEDEHGEVVAESRRPDLEPYIGLHYPATDIPQASRFLFKQNRVRIIVDCHASPVSVIQDDGLMQPLCLVGSTLRAPHGCHAQYMENMGSIASLAMAVIINGNDEDGIGGRNPTRLWGLVVCHHTSVRCIPFPLRYACEFLMQAFGLQLNMELQLAAQLLEKHVLKTQTLLCDMLLRESPTGIVTQSPSIMDLVKCDGAALYYQGNYYPSGVTPTEAQIKDIVNWLLAFHGDSTGLSTDSLADAGYPGATLLGDAVCGMAVAYITNRDFLFWFRSHTAKEIKWGGAKHHPEDKDDGQRMHPRSSFKAFLEVVKSRSLP

SEQ ID NO: 12071 - protein, 374 aa, Catha edulis
ASSIAGAVQSQKLAVRAISQLQSLPGGDIKLLCDTVVESVRDLTGYDRVMVYKFHEDEHGEVVAESKRPDLEPYIGLHYPASDIPQASRFLFKQNRVRMIVDCRASPVRVIQDDGLMRPLCLVGSTLRAPHGCHAQYMENMGSLASLAMAVIINGNDEEVTGGRNPTRLWGLVVCHHTSARCIPFPLRYACEFLMQAFGLQLNMELQLAAQSLEKHVLKTQTLLCDRFLRDPPTGIVTQSPSIMDLVKCDGAALYYQGNYYPLGVTPTEVQIKDIVEWLLAFHGDSTGLSTDSLADAGYPGAALLGDAVCGMAVAYITNKDFLFWFRSHTAKEIKWGGAKHHPEDKDDGQRMHPRSSFKAFLEVVKSRSLPWEN

SEQ ID NO: 12072 - protein, 373 aa, Celastrus scandens
ALSIAGAVQSQKLAVRAISRLQSLPGGDIKLLCDTVVESVRDLTSYDRVMVYKFHEDEHGEVVAESKRPDLEPYFGLHYPSTDIPQASRFLFKQNRVRMIADCRASPVGVIQDDGLMQPLCLVGSTLRAPHGCHAQYMENMGSKSSLAMAVIINGTDEEVIGGRNATRLWGLVVCHHTSARCIPFPLRYACEFLMQAFGLQLNMELQLAAQLSEKHVLKTQTLLCDMLLRDSPTGIVTQSPSIMDLVKCDGAALYYQGKYYPIGVTPVEAQIKDIVEWLLTFHGDSTGLSTDSLADAGYPGAALLGDAVCGMAVAYITKKDFLFWFRSHTTKEIKWGGAKHHPEDKDDGQRMHPRSSFKAFLEVVKSRSLPCE

SEQ ID NO: 12073 - protein, 370 aa, Celastrus scandens
ALSIAGAVQSQKLAVRAISRLQSLPGGDIKLLCDTVVESVRDLTSYDRVMVYKFHEDEHGEVVAESKRPDLEPYFGLHYPSTDIPQASRFLFKQNRVRMIADCRASPVGVIQDDGLMQPLCLVGSTLRAPHGCHAQYMENMGSKSSLAMAVIINGTDEEVIGGRNATRLWGLVVCHHTSARCIPFPLRYACEFLMQAFGLQLNMELQLAAQLSEKHVLKTQTLLCDMLLRDSPTGIVTQSPSIMDLVKCDGAALYYQGKYYPIGVTPVEAQIKDIVEWLLTFHGDSTGLSTDSLADAGYPGAALLGDAVCGMAVAYITKKDFLFWFRSHTTKEIKWGGAKHHPEDKDDGQRMHPRSSFKAFLEVVKSRSL

SEQ ID NO: 12074 - protein, 364 aa, Celastrus scandens
VQSQKLAVRAISRLQSLPGGDIKLLCDTVVESVRDLTSYDRVMVYKFHEDEHGEVVAESKRPDLEPYFGLHYPSTDIPQASRFLFKQNRVRMIADCRASPVGVIQDDGLMQPLCLVGSTLRAPHGCHAQYMENMGSKSSLAMAVIINGTDEEVIGGRNATRLWGLVVCHHTSARCIPFPLRYACEFLMQAFGLQLNMELQLAAQLSEKHVLKTQTLLCDMLLRDSPTGIVTQSPSIMDLVKCDGAALYYQGKYYPIGVTPVEAQIKDIVEWLLTFHGDSTGLSTDSLADAGYPGAALLGDAVCGMAVAYITKKDFLFWFRSHTTKEIKWGGAKHHPEDKDDGQRMHPRSSFKAFLEVVKSRSLP

SEQ ID NO: 12075 - protein, 374 aa, Cuervea integrifolia
ALSIAGAVQSQKLAVRAISQLQSLPGGDIKLLCDTAVESVRNLTGYDRVMVYKFHEDEHGEVVAESRRPDLEPYIGLHYPATDIPQASRFLFKQNRVRIIVDCHASPVSVIQDDGLMQPLCLVGSTLRAPHGCHAQYMENMGSIASLAMAVIINGNDEDGIGGRNPTRLWGLVVCHHTSARCIPFPLRYACEFLMQAFGLQLNMELQLAAQLLEKHVLKTQTLLCDMLLRESPTGIVTQSPSIMDLVKCDGAALYYQANYYPLGVTPTEAQIRDIVEWLLAFHGDSTGLSTDSLADAGYPGATLLGDAVCGMAVAYITNRDFLFWFRSHTAKEIKWGGAKHHPEDKDDGQRMHPRSSFKAFLEVVKSRSLPWEN

SEQ ID NO: 12076 - protein, 363 aa, Cuervea kappleriana
SQKLAVRAISQLQSLPGGDIKLLCDTAVESVRNLTGYDRVMVYKFHEDEHGEVVAESRRPDLEPYIGLHYPATDIPQASRFLFKQNRVRIIVDCHASPVSVIQDDGLMQPLCLVGSTLRAPHGCHAQYMENMGSIASLAMAVIINGNDEDGIGGRNATRLWGLVVCHHTSARCIPFPLRYACEFLMQAFGLQLNMELQLAAQLLEKHVLKTQTLLCDMLLRESPTGIVTQSPSIMDLVKCDGAALYYQANYYPLGVTPTEAQIRDIVEWLLAFHGDSTGLSTDSLADAGYPGATLLGDAVCGMAVAYITNRDFLFWFRSHTAKEIKWGGAKHHPEDKDDGQRMHPRSSFKAFLEVVKSRSLPG

SEQ ID NO: 12077 - protein, 361 aa, Elaeodendron orientale
QKLAVRAISQLQSLPGGDIKLLCDTVVECVRDLTGYDRVMVYKFHEDEHGEVVAESKRPDLEPYIGLHYPSTDIPQASRFLFKQNRVRIIVDCHASPVCVIQDDGLMQPLCLVGSTLRAPHGCHAQYMENMGSIASLAMAVVINGNDEEVIRGKNLTRLWGLVVCHHTSARCIPFPLRYACEFLMQAVGLQLNMELQLAAQLLEKHVLKTQTLLCDMLLRDSPIGIVTQSPSIMDLVKCDGAALYYQGNYYPLGVTPSEVQIKDIVEWLLAFHGDSTGLSTDSLADAGYPRAALLGDAVCGMAVAYITNRDFLFWFRSHTAKEIKWGGAKHHPEEKDDGQRMHPRSSFKAFLEVVKSRSLP

SEQ ID NO: 12078 - protein, 362 aa, Elaeodendron orientale
QSQKLAVRAISQLQSLPGGDIKLLCDTVVECVRDLTGYDRVMVYKFHEDEHGEVVAESKRPDLEPYIGLHYPSTDIPQASRFLFKQNRVRIIVDCHASPVCVIQDDGLMQPLCLVGSTLRAPHGCHAQYMENMGSIASLAMAVVINGNDEEVIRGKNLTRLWGLVVCHHTSARCIPFPLRYACEFLMQAVGLQLNMELQLAAQLLEKHVLKTQTLLCDMLLRDSPIGIVTQSPSIMDLVKCDGAALYYQGNYYPLGVTPSEVQIKDIVEWLLAFHGDSTGLSTDSLADAGYPRAALLGDAVCGMAVAYITNRDFLFWFRSHTAKEIKWGGAKHHPEEKDDGQRMHPRSSFKAFLEVVKSRSC

SEQ ID NO: 12079 - protein, 374 aa, Elaeodendron xylocarpum
ALSIAGAVQSQKLAVRAISQLQSLPGGDIKLLCDTVVESVRDLTSYDRVMVYKFHEDEHGEVVAESKRPDLEPYIGLHYPSTDIPQASRFLFKQNRVRIIVDCHASPVRVIQDGGLTQPLCLVGSTLRAPHGCHAQYMENMGSIASLAMAVVINGNDEEVIGGRNPTRLWGLVVCHHTSARCIPFPLRYACEFLMQAFGLQLNMELQLAAQLLEKHVLKTQTLLCDMLLRDSPIGIVTQSPSIMDLVKCDGAALYYQGNYYPLGVTPSEAQIKDIVEWLLAFHGDSTGLSTDSLADAGYPGAALLGDAVCGMAVAYITNRDFLFWFRSHTAKEIKWGGAKHHPEDKDDGERMHPRSSFKAFLEVVKSRSLPWEN

SEQ ID NO: 12080 - protein, 374 aa, Elaeodendron xylocarpum
ALSIAGAVQSQKLAVCAISQLQSLPGGDIKLLCDTVVESVGDLTGYDRVMVYKFHEDEHGEVVAESKRPDLEPYIGLHYPSTDIPQASRFLFKQNRVRIIVDCHASPVRVIQDGGLTQPLCLVGSTLRAPHGCHAQYMENMGSIASLAMAVVINGNDEEVIGGRNPTRLWGLVVCHHTSARCIPFPLRYACEFLMQAFGLQLNMELQLAAQLLEKHVLKTQTLLCDMLLRDSPIGIVTQSPSIMDLVKCDGAALYYQGNYYPLGVTPSEAQIKDIVEWLLAFHGDSTGLSTDSLADAGYPGAALLGDAVCGMAVAYITNRDFLFWFRSHTAKEIKWGGAKHHPEDEDDGERMHPRSSFKAFLEVVKSRSLPWEN

SEQ ID NO: 12081 - protein, 374 aa, Euonymus europaeus
ALSIAGAVQSQKLAVRAISRLQSLPGGDIKLLCDTVVESVRDLTGYDRVMVYKFHDDEHGEVVAESKRHDLEPYFGLHYPATDIPQASGFLFKQNRVRMIVDCHASPVRVIQDDRLIQPLCLVGSTLRAPHGCHAQYMENMGSKASLAMAVIINGNDEEVIGGRNATRLWGLVVCHHTSARCTPFPLRYACEFLLQAFGLQLNMELQLAAQLSEKHVLKTQTLLCDMLLRDSPTGIVTKSPSIMDLVKCDGAALYYQGKYYPLGVTPAEAQIKDIVEWLLAFHGDSTGLSTDSLADAGYPGAASLGDSVCGMAVAYITNRDFLFWFRSHTTEEIKWGGAKHHPEDKDDGQRMHPRSSFQAFLEVVKSRSFPWEN

SEQ ID NO: 12082 - protein, 374 aa, Euonymus europaeus
ALSIAGAVQSQKLAVRAISQLQSLPGGDIKLLCDTVVESVRDLTGYDRVMVYKFHDDEHGEVVAESKRPDLEPYFGLHYPATDIPQASRFLFKQNRVRMIVDCHASPVCVIQDYRLIQPLCLVGSTLRAPQGGHAQYMENMGSKASLAMPVIINGNDEEVIGGRNATRLWGLVVCHHTSARCTPFPLRYACEFLLQAFGLQLNMELQLAAQLSEKHVLKTQTLLCDMLLRDSPTGIVTKSPSIMDLVKCDGAALYYQGKYYPLGVTPAQAQMKDIVEWLLAFHGDSTGLSTDSLADAGYPGAALLGDAVCGMAVAYITKRDFLFWFRSHTAKEIKWGGAKHHPEDKDDGQRMHPRSSFKAFLEVVKSKSLPWEN

SEQ ID NO: 12083 - protein, 374 aa, Gyminda tonduzii
ALSIAGAVQSQKLAIRAISQLQSLPGGDIKLLCDTVVESVRELTGYDRVMVYKFHEDEHGEVAAESKRTDLEPYFGLHYPATDIPQASRFLFRQNRVRMIVDCHASPVRVIQDDGLMQPLCLVGSTLRAPHGCHAQYMENMGSKASLAMAVIINGNDEEVIGGRNATRLWGLVVCHHTSARCIPFPLRYACEFPMQAFGLQLNMELQLAAQLSEKHVLKTQALLCDMLLRDSPTGIVTQSPSIMDLVKCDGAALYYQGKYFPIGVTPTEAQIKDIVEWLLVFHGDSTGLSTDSLADAGYPGAALLGDAVCGMAVAYITKKDFLFWFRSHTTKEIKWGGAKHHPEDKDDGQRMHPRSSFKAFLEVVKSRSLPWES

SEQ ID NO: 12084 - protein, 245 aa, Gymnosporia polyacantha
ALSIAGAVQSQKLAVRAISQLQSLPGGDIKLLCDTVVESVRNLTGYDRVMVYKFHEDEHGEVVAESKRSDLEPYMGLHYPASDIPQASRFLFKQNRVRMIVDCHASPVRVIQDDGLMQPLCLVGSTLRAPHGCHAQYMENMGSLASLAMAVIINGNEEEAIGGRSPTRLWGLVVCHHTSARCIPFPLRYACEFLMQAFGLQLNMELQLAAQLLEKHVLKTQTLLCDMLLRDSPTGIVTQSPSIMD

SEQ ID NO: 12085 - protein, 245 aa, Gymnosporia polyacantha
ALSIAGAVQSQKLAVRAISQLQSLPGGDIKLPCDTVVESVRNLTGYDRVMVYKFHEDEHGEVVAESKRSDLEPYIGLHYPASDIPQASRFLFKQNRVRMIVDCHASPVRVIQDDGLMQPLCLVGSTLRAPHGCHAQYMENMGSLASLAMAVIINGNEEEAIGGRSPTRLWGLVVCHHTSARCIPFPLRYACEFLMQAFGLQLNMELQLAAQLLEKHVLKTQTLLCDMLLRDSPTGIVTQSPSIMD

SEQ ID NO: 12086 - protein, 374 aa, Hippocratea volubilis
ALSIAGAVQSQKLAVRAISQLQSLPGGDIKLLCDTAVESVRDLTGYDRVMVYKFHEDEHGEVVAESKRPDLEPYIGLHYPATDIPQASRFLFKQNRVRIIVDCHASPVNVIQDDGLMQPLCLVGSTLRAPHGCHAQYMENMGSIASLAMAVVINGNDEDGIGGRNPTRLWGLVVCHHTSARCIPFPLRYACEFLMQAFGLQLNMELQLAAQLLEKHVLKTQTLLCDMLLRESPTGIVTQSPSTMDLVKCDGAALYYQANYYPLGVTPTEAQIKDIVEWLLVFHGDSTGLSTDSLADAGYPGATLLGDAVCGMAVAYITNRDFLFWFRSHTAEEIKWGGAKHHPEDKDDGLRMHPRSSFKAFLEVVKSRSLPWEN

SEQ ID NO: 12087 - protein, 374 aa, Hippocratea volubilis
ALSIAGAVQSQKLAVRAISQLQSLPGGDIKLLCDTAVESVRDLTGCDRVMVYKFHEDEHGEVVAESKRPDLEPYIGLHYPATDIPQASRFLFKQNRVRIIVDCHASPVNVIQDDGLMQPLCLVGSTLRAPHGCHAQYMENMGSIASLAMAVVINGNDEDGIGGRNPTRLWGLVVCHHTSARCIPFPLRYACEFLMQAFGLQLNMELQLAAQLLEKHVLKTQTLLCDMLLRESPTGIVTQSPSTMDLVKCDGAALYYQANYYPLGVTPTEAQIKDIVEWLLVFHGDSTGLSTDSLADAGYPGATLLGNAVCGMAVAYITNRDFLFWFRSHTAKEIKWGGAKHHPEDKDDGLRMHPRSSFKAFLEVVKSRSLPWEN

SEQ ID NO: 12088 - protein, 358 aa, Hippocratea volubilis
QSQKLAVRAISQLQSLPGGDIKLLCDTAVESVRDLTGYDRVMVYKFHEDEHGEVVAESKRPDLEPYIGLHYPATDIPQTSRFLFKQNRVRIIVDCHASPVNVIQDDGLMQPLCLVGSTLRAPHGCHAQYMENMGSIASLAMAVVINGNDEDGIGGRNPTRLWGLVVCHHTSARCIPFPLRYACEFLMQAFGLQLNMELQLAAQLLEKHVLKTQTLLCDMLLRESPTGIVTQSPSTMDLVKCDGAALYYQANYYPLGVTPTEAQIKDIVEWLLVFHGDSTGLSTDSLADAGYPGATLLGDAVCGMAVAYITNRDFLFWFRSHTAKEIKWGGAKRHPEDKDDGLRMHPRSSFKAFLEVVK

SEQ ID NO: 12089 - protein, 363 aa, Maytenus fournieri
QSQKLAVRAISQLQSLPGGDVKLLCETVVESVKDLTGYDRVMVYKFHDDEHGEVVAERKRPDLEPYIGLHYPATDIPQASRFLFKQNRVRMIVDCHALPVRVIQDDGLMQPLCLVGSTLRAPHGCHAQYMENMGSIASLAMAVIINGNDEEVIGGRNPTRLWGLVVCHHTSARCIPFPLRYACEFLMQAFGLQLNMELQLAAQLLEKHVLKTQTLLCDMLLRDSPTGIVTQSPSIMDLVKCDGAALYYQGSYYPLGVTPTEAQIKDIVEWLLAFHGDSTGLSTDSLADAGYPGAALLGDAVCGMAVAYITNRDFLFWFRSHTAKEIKWGGAKHHPEDKDDGQRMHPRSSFKAFLEVVKSRSMP

SEQ ID NO: 12090 - protein, 364 aa, Maytenus fournieri
VQSQKLAVRAISQLQSLPGGDVKLLCETVVESVKDLTGYDRVMVYKFHDDEHGEVVAERKRPDLEPYIGLHYPATDIPQASRFLFKQNRVRMIVDCHALPVRVIQDDGLMQPLCLVGSTLRAPHGCHAQYMENMGSIASLAMAVIINGNDEEVIGGRNPTRLWGLVVCHHTSARCIPFALRYACEFLMPAFGLQLNMELQLAAQLLEKHVLKTQTLLCDMLLRDSPTGIVTQSPSIMDLVKCDGAALYYQGSYYPLGVTPTEAQIKDIVEWLLAFHGDSTGLSTDSLADAGYPGAALLGDAVCGMAVAYITNRDFLFWFRSHTAKEIKWGGAKHHPEDKDDGQRMHPRSSFKAFLEVVKSRSMP

SEQ ID NO: 12091 - protein, 358 aa, Maytenus undata
SQKLAVRAISQLQSLPGGDIKLLCDTVVESVRDLTGYDRVMVYKFHEDEHGEVMAESKRPDLEPYIGLHYPASDIPQASRFLFKQNRVRMIVDCHASPVLVIQDDRLMQPLCLVGSTLRAPHGCHAQYMENMGSIASLAMAVIINVNDGEGIGGRNPTRLWGLVVCHHTSARCIPFPLRYACEFLMQAFGLQLNMELQLAAQLLEKHVLKTQTLLCDMLLRDSPTGIVTQSPSIMDLVKCDGAALYYQGNYYPLGVTPTEAQIKDIVEWLLAFHGDSTGLSTDSLADAGYPGAALLGDAVCGMAVAYITNRDFLFWFRSHTAKEIKWGGAKHHPEDKDDGQRMHPRSSFKAFLEVVKS

SEQ ID NO: 12092 - protein, 245 aa, Maytenus undata
ALSIAGAVQSQKLAVRAISQLQSLPGGDIKLLCDTVVESVRDLTGYDRVMVYKFHEDEHGEVMAESKRPDLEPYIGLHYPASDIPQASRFLFKQNRVRMIVYCHASPVLVIQDDRLMQPLCLVGSTLRAPHGCHAQYMENMGSIASLAMAVIINVNDGEGIGGRNPTRLWGLVVCHHTSARCIPFPLRYACEFLMQAFGLQLNMELQLAAQLLEKHVLKTQTLLCDMLLRDSPTGIVTQSPSIMD

SEQ ID NO: 12093 - protein, 245 aa, Mortonia greggii
ALSIAGAVQSQKLAVRAISQLQSLPGGDIKLLCDAVVENVRNLTGYDRVMVYKFHEDEHGEVVAESKRPDLEPYIGLHYPATDIPQASRFLFKQNRVRMIVDCHSTPVSVIQDDGLMQPLCLVGSTLRAPHGCHAQYMANMGSIASLAMAVIINGNDEDGIGGRNTTRLWGLVVCHHTSARCIPFPLRYACEFLMQAFGLQLNMELQLASQLLEKHVLKTQTLLCDMLLRDSPTGIVTQSPSIMD

SEQ ID NO: 12094 - protein, 245 aa, Mortonia greggii
ALSIAGAVQSQKLAVRAISQLQSLPGGDIKLLCDAVVENVRNLTGYDRVMVYKFHEDEHGEVVAESKRPDLEPYIGLHYPATDIPQASRFLFKQNRMRMIVDCHSTPVSVIQDDGLMQPLCLVGSTLRAPHGCHAQYMANMGSIASLAMAVIINGNDEDGIGGRNTTRLWGLVVCHHTSARCIPFPLRYACEFLMQAFGLQLNMELQLASQLLEKHVLKTQTLLCDMLLRDSPTGIVTQSPSIMD

SEQ ID NO: 12095 - protein, 245 aa, Paxistima canbyi
ALSIAGAVQSQKLAVRAISQLQSLPGGDIKLLCDTVVESVRDLTGYDRVMVYKFHEDEHGEVVAESKRPDLEPYIGLHYPATDIPQASRFLFKQNRVRTIVDCHASPVRVIQDDGLMQPLCLVGSTLRAPHGCHAQYMENMGSIASLAMAVIINGNDEEVIGGRNATRLWGLVVCHHTSARCIPFPLRYACEFLMQAFGLQLNMELQLAAQLSEKHVWKTRTLLCDMLLRDSPPAIVTQSPSIMD

SEQ ID NO: 12096 - protein, 245 aa, Paxistima canbyi
ALSIAGAVQSQKLAVRAISQLQSLPGGDIKLLCDTVVESVRDLTGYDRVMVYKFHEDEHGEVVAESKRPDLEPYIGLHYPATDIPQASRFLFKQNRVRTIVDCHASPVRVIQDDGLMQPLCLVGSTLRAPHGCHAQYMENMGSIASLAMAVIINGNDEEVIGGRYATRLWGLVVCHHTSARCIPFPLRYACEFLMQAFGLQLNMELQLAAQLSEKHVWKTRTLLCDMLLRDSPPAIVTQSPSIMD

SEQ ID NO: 12097 - protein, 245 aa, Paxistima myrsinites
ALSIAGAVQSQKLAVRAISQLQSLPGGDIKLLCDTVVESVRDLTGYDRVMVYKFHEDEHGEVVAESKRPDLEPYIGLHYPATDIPQASRFLFKQNRVRTIVDCHASPVRVIQDDGLMQPLCLVGSTLRAPHGCHAQYMENMGSIASLAMAVIINGNDEEIIGGRNATRLWGLVVCHNTSARCIPFPLRYACEYLLQLFGLQLNMELQLAAPLSKKHVLKTQTILYDMLLHDSPTGIVTQSPSIMD

SEQ ID NO: 12098 - protein, 361 aa, Peripterygia marginata
QKLAVRAISHLQSLPGGDIKLLCDTVVESVRDLTGYDRVMVYKFHEDEHGEVVAESKRPDLEPYIGLHYPATDIPQASRFLFKQNRVRMIVDCHASPVRVIQDDGLMQPLCLVGSTLRAPHGCHAQYMENMGSIASLAMAVIINGNDEEVIGGRNATRLWGLVVCHHTSARCIPFPLRYACEFLMQAFGLQLNMELQLAAQLSEKHVLKTQTLLCDMLLRDSPTGIVTQSPSIMDLVKCDGAALYYQGNYYPLGVTPTEPQIKDIVEWLLAFHGDSTGLSTDSLADAGYAGAALLGDAVCGMAVAYITNRDFLFWFRSHTAKEIKWGGAKHHPEDKDDGQRMHPRSSFKAFLEVVKSRSLP

SEQ ID NO: 12099 - protein, 374 aa, Perrottetia ovata
ALSIAGAVQSQKLAVRAISQLQSLPGGDIKLLCDAVVENVRNLTGYDRVMVYKFHEDEHGEVVAESKRPDLEPYIGLHYPATDIPQASRFLFKQNRVRMIVDCHSTPVSVIQDDGLMQPLCLVGSTLRAPHGCHAQYMANMGSIASLAMAVIINGNDEDGIGGRNTTRLWGLVVCHHTSARCIPFPLRYACEFLMQAFGLQLNMELQLASQLLEKHVLKTQTLLCDMLLRDSPTGIVTQSPSIMDLVKCDGAALYHQGKYYPLGVTPTEAQIKDIVEWLLAFHGESTGLSTDSLADAGYPGAALLGDAVCGMAVAYITDRDFLFWFRSNTAKEIKWGGAKHHPEDKDDGQRMHPRSSFKAFLEVVKSRSLPWEN

SEQ ID NO: 12100 - protein, 374 aa, Perrottetia ovata
ALSIAGAVQSQKLAVRAISQLQSLPGGDIKLLCDAVVENVRNLTGYDRVMVYKFHEDGHGEAVAESKRPDLEPYIGLHYPATDIPQASRFLFKQNRVRMIVDCHSTPVSVIQDDGLMQPLCLVGSTLRAPHGCHAQYMANMGSIASLAMAVIINGNDEDGIGGRNTTRLWGLVVCHHTSARSIPFPLRYACEFLMQAFGLPLNMELQLASQLLEKHVLKTQTLLCDMLLRDSPTGIVTQSPSIMDLVKCDGAALYHQGKYYPLGVTPTEAQIKDIVEWLLAFHGESTGLSTDSLADAGYPGAALLGDAVCGMAVAYITDRDFLFWFRSNTAKEIKWGGAKHHPEDKDDGQRMHPRSSFKAFLEVVKSRSLPWEN

SEQ ID NO: 12101 - protein, 365 aa, Pleurostylia opposita
VQSQKLAVRAISQLQSLPGGDIKLLCDTVVESVRDLTGYDRVMVYKFHEDEHGEVVAESKRPDLEPYIGLHYPATDIPQASRFLFKQNRVRIIVDCHASPVRVLQDDGLMQPLCLVGSTLRAPHGCHAQYMENMGSIASLAMAVIINGNDEEAIDGKNPTRLWGLVVCHHTSARCIPFPLRYACEFLMQAFGLQLNMELQLAAQVLEKHVLKTQTLLCDMLLRDSPIGIVTQSPSIMDLVKCDGAALYYRGNYYPLGVTPTEAQIKDIEEWLLAFHGDSSGLSTDSLADAGYPGAALLGDAVCGMAVAYITNRDFLFWFRSHTAKEIKWGGAKHHPEDKDDGQRMHPRSSFKAFLEVVKSRSLPW

SEQ ID NO: 12102 - protein, 374 aa, Pristimera andina
ALSIAGAVQSQKLAVRAISQLQSLPGGDIKLLCDTAVESVRDLTGYDRVMVYKFHEDEHGEVVAESKRPDLEPYIGLHYPATDIPQASRFLFKQNRVRIIVDCHASPVNVIQDGGLMQPLCLVGSTLRAPHGCHAQYMENMGSIASLAMAVVINGNDEDGIGGRNPTRLWGLVVCHHTSARCIPFPLRYACEFLMQAFGLQLNMELQLAAQLLEKHVLKTQTLLCDMLLRESPTGIVTQSPSIMDLVKCDGAALYYQANYYPLGVTPTEAQIKDIVEWLLVFHGDSTGLSTDSLADAGYPGATLLGDAVCGMAVAYITNRDFLFWFRSHTAKEIKWGGAKHHPEDKDDGLRMHPRSSFKAFLEVVKSRSLPWEN

SEQ ID NO: 12103 - protein, 374 aa, Pristimera andina
ALSIAGAVQSQKLAVRAISRLQSLPGGDIKLLCDTAVESVRDLTGYDRVMVYKFHEDEHGEVVAGSKRPDLEPYIGLHYPATDIPQASRFLFKQNRVRIIVDCHASPVNVIQDDGLMQPLCLVGSTLRAPHGCHAQYMENMGSIASLAMAVVINGNDEDGIGGRNPTRLWGLVVCHHTSARCIPFPLRYACEFLMQAFGLQLNMELQLAAQLLEKHVLKTQTLLCDMLLRESPTGIVTQSPSIMDLVKCDGAALYYQANYYPLGVTPTEAQIKDIVEWLLVFHGDSTGLSTDSLADAGYPGATLLGDAVCGMAVAYITNRDFLFWFRSHTAKEIKWGGAKHHPEDKDDGLRMHPRSSFKAFLEVVKSRSLPWEN

SEQ ID NO: 12104 - protein, 374 aa, Psammomoya choretroides
ALSIAGAVQSQKLAVRAISQLQSLPGGDIKLLCDTVVESVADLTGYDRVMVYRFHEDEHGEVVAESKRPDLEPYIGLHYPATDIPQASRFLFKQNRVRMIVDCHASPVHVIQDDGLMQPLCLVGSTLRAPHGCHAQYMENMGSIASLAMAVIINGNDEEVIGGRNPTRLWGLVVCHHTSARCVPFPLRYACEFLMQAFGLQLNMELQLAAQLLEKHVLKTQTLLCDMLLRDSPTGIVTQSPSIMDLVKCDGAALYYRGNYYPLGVTPTEAQIKDIVEWLLAFHGDSTGLSTDSLADAGYPGAALLGDAVCGMAVAYITNRDFLFWFRSHTAKETKWGGAKHHPEDKDDGQRMHPRSSFKAFLEVVKSRSLPWEN

SEQ ID NO: 12105 - protein, 374 aa, Psammomoya choretroides
ALSIAGAVQSQKLAVRAISQLQSLPGGDIKLLCDTVVESVADLTGYDRVMVYRFHEDEHGEVVAESKRPDLEPYIGLHYPATDIPQASRFLFKQNRVRMIVDCHASPVHVIQDDGLMQPLCLVGSTLRAPHGCHAQYMENMGSIASLAMAVIINGNDEEVIGGRNPTRLWGLVVCPHTSARCIPFPLRYACEFLMQAFGLQLNMELQLAAQLLEKHVLKTQTLLCDMLLRDSPTGIVTQSPSIMDLVKCDGAALYYRGNYYPLGVTPTEAQIKDIVEWLLAFHGDSTGLSTDSLADAGYPGAALLGDAVCGMAVAYITNRDFLFWFRSHTAKETKWGGAKHHPEDKDDGQRMHPRSSFKAFLEVVKSRSLPWEN

SEQ ID NO: 12106 - protein, 374 aa, Pterocelastrus tricuspidatus
ALSIAGAVQSQKLAVRAISQLQSLPGGDIKLLCDTVVESVRDLTGYDRVMVYKFHEDEHGEVMAESRRPDLEPYIGLHYPASDIPQASRFLFKQNRVRMIVDCHASPVLVIQDDGLMQPLCLVGSTLRAPHGCHAQYMENMSSIASLAMAVIINGSDEEGVGGRNPTRLWGLVVCHHTSARCIPFPLRYACEFLMQAFGLQLNMELQLAAQLLEKHVLKTQTLLCDMLLRDSPTGIVTQSPSIMDLVKCDGAALYYQGNYYPLGVTPTEAQIKDIVEWLLAFHGDSTGLSTDSLADAGYPGAALLGDAVCGMSVAYITNRDFLFWFRSHTAKEIKWGGAKHHPEDKDDGQRMHPRSSFKAFLEVVKSRSLPWEN

SEQ ID NO: 12107 - protein, 245 aa, Putterlickia verrucosa
ALSIAGAVQSQKLAVRAISQLQSLPGGDIELLCDTVVESVRDLTGYDRVMVYKFHEDEHGEVVAESKRSDLEPYIGLHYPASDIPQASRFLFKQNRVRMIVDCHASPVRVIQDDGLMQPLCLVGSTLRAPHGCHAQYMENMGSLASLAMAVIINGNEEEAIGGRSPTRLWGLVVCHHTSARCIPFPLRYACEFLMQAFGLQLNMELQLAAQLLEKHVLKTQTLLCDMLLRDSPTGIVTQSPSIMD

SEQ ID NO: 12108 - protein, 374 aa, Quetzalia occidentalis
ALSIAGAVQSQKLAVRAISQLQSLPGGDIKLLCDTVVESVRDPTGYDRVMVYKFHEDEHGEVVAESKRPDLEPYIGLHYPAADIPQASRFLFKQNRVRMIVDCHATPVSVIQDDGLMQPLCLVGSTLRAPHGCHAQYMANMGSMASLAMAVVINGNDEEGIGGRNTTRLWGLVVCHHPSARGIPFPLRYACEFLLQALGLQLNMELQLAAQLSEKHVLRTQTLLCDMLLRDSPTGIVTQNPSIMDLVKCDGAALYYQGKYYPLRVTPTEAQIKGIVEWMLAFHGDSTGLSTDSLADAGYPGAASLGDAVCGMAVAYITNRDFLFWFRSNTAKEIKWGGAKHHPKDKDDGQRMHPRSSFKAFLEVVKSRSLPWEN

SEQ ID NO: 12109 - protein, 374 aa, Quetzalia occidentalis
ALSIAGAVQSQKLAVCSISQLQSLPGGDIKLLCDTVVESVRDLTGYDRVMVYKFHEDEHGEVVAESKRPDLEPYIGLHYPATDIPQASRFLFKQNRVRMIVDCHATPVRVIQDDGLLQPLCLVGSTLRAPHGCHAHYMANMGSMASLAMAVIINVNDEEGIGGRNATRLWGLVVCHHTSTRCIPFPLRYACEFLMQAFGLQLNMELQLALQLSEKHVLRTQTLLCDMLLRDSPTGIVTQSPSTMDLVKCDGAALYHQGKYYPLGVTPTEAQIKDIVEWLLAFHGDSTGLSTDSLADAGYPGAVSLGDAVCGMAVAYITNRDFLFWFRSHTGKEMKWGGAKHHPEDKDDGQRMQPRSSFKAFLEVVKSRSLPWEN

SEQ ID NO: 12110 - protein, 374 aa, Reissantia indica
ALSIAGAVQSQKLAVRAISQLQSLPGGDIKLLCDTAVESVRNLTGYDRVMVYKFHEDEHGEVVAESRRPDLEPYIGLHYPATDIPQASRFLFKQNRVRIIVDCHASPVSVIQDDGLMQPLCLVGSTLRAPHGCHAQYMENMGSIASLAMAVIINGNDEDRMGGRNPTRLWGLAVCHHTSARCIPFPLRYACEFLMQAFGLQLNMELQLAAQLLEKHVLKTQTLLCDMLLRESPTGIVTQSPSIMDLVKCDGAALYYQANYYPLGVTPTEAQIKDIVEWLLAFHGDSTGLSTDSLADAGYPGATSLGDAVCAMAVAYITNRDFLFWFRSHTAKEIKWGGAKHHPEDKDDGQRMHPRSSFKAFLEVVKSRSLPWEN

SEQ ID NO: 12111 - protein, 374 aa, Reissantia sp. Chase 2095
ALSIAGAVQSQKLAVRAISQLQSLPGGDIKLLCDTAVESVRNLTGYDRVMVYKFHEDEHGEVVAESRRPDLEPYIGLHYPATDIPQASRFLFKQNRVRIIVDCHASPVSVIQDDGLMQPLCLVGSTLRAPHGCHAQYMENMGSIASLAMAVIINGNDEDGMGGRNPTRLWGLVVCHHTSARCIPFPLRYACEFLMQAFGLQLNMELQLAAQLLEKHVLKTQTLLCDMLLRESPTGIVTQSPSIMDLVKCDGAALYYQANYYPVGVTPTEAQIKDIVEWLLAFHGDSTGLSTDSLADAGYPGATSLGDAACGMAVAYITNRDFLFWFRSHTAKEIKWGGAKHHPEDKDDGQRMHPRSSFKAFLEVVKSRSLPWEN

SEQ ID NO: 12112 - protein, 245 aa, Rzedowskia tolantonguensis
ALSIAGAVQSQKLAIRAISQLQSLPGGDIKLLCDTVVESVRELTCYDRVMVYKFHEDEHGEVVAESKRPDLEPYIGLHYPATDIPQASRFLFKQNRVRMIVDCHASPVRVIQDDGLMQPLCLVGSTLRAPHGCHAQYMENMGSKASLAMAVIINGNDEEVIGGRNATRLWGLVVCHHTSARCIPFPLRYACEFLMQAFGLQLNMELQLAAQLSEKHVLKTQTLLCDMLLRDSPTGIVTQSPSIMD

SEQ ID NO: 12113 - protein, 245 aa, Salacia impressifolia
ALSIAGAVQSQKLAVRAISQIQSLPGGDIKLLCDTVVESVRDLTGYDRVMVYKFHEDEHGEVVAESKRPDLEPYIGLHYPATDIPQASRFLFKQNRVRMIVDCNASPVRVIQDDGLMQPLCLVGSTLRAPHGCHAQYMENMGSIASLAMAVIINGNDEEVIGGRNPTRLWGLVVCHHTSARCIPFPLRYACEFLMQAFGLQLKMELQLAAQLLEKHVLKTQTLLCDMLLRDSPTGIVTQSPSIMD

SEQ ID NO: 12114 - protein, 245 aa, Salacia impressifolia
ALSIAGAVQSQKLAVRAISQIQSLPGGDIKLLCDTVVESVRDLTGYDRVMVYKFHEDEHGEVVAESKRPDLEPYIGLHYPATDIPQASRFLFKQNRVRMVVDCNASPVRVIQNDGLMQPLCLVGSTLRAPHGCHAQYMENMGSIASLAMAVIINGNDEEVIGGRNPTRLWGLVVCHHTSARCIPFPLRYACEFLMQAFGLQLKMELQLAAQLLEKHVLKTQTLLCDMLLRDSPTGIVTQSPSIMD

SEQ ID NO: 12115 - protein, 364 aa, Salacia nitida
VQSQKLAVRAISQIQSLPGGDIKLLCDTVVESVRDLTGYDRVMVYKFHEDEHGEVVAECKRPDLEPYIGLHYPATDIPQASRFLFKQNRVRMIVDCHASPVRVIQDDGLMRPLRLVGSTLRAPHGCHAQYMENMGSIASLAMAVIINGNDEEVIGGRNPTRLWGLVVCHHTSARCIPFPLRYACEFLMQAFGLQLKMELQLAAQLLEKHVLKTQTLLCDMLLRDSPTGIVTQSPSIMDLVKCDGAALYFQGNYYPLGVTPTEAQIKDIVEWLLAFHGDSTGLSTDSSADAGYPGAALLGDAVCGMAVAYITNRDFLFWFRSHTAKEIKWGGAKHHPEDKDDGQRMHPRSSFKAFLEVVKRRSLP

SEQ ID NO: 12116 - protein, 361 aa, Salacia nitida
QSQKLAVRAISQIQSLPGGDIKLLCDTVVESVRDLTGYDRVMVYKFHEDEHGEVVAECKRPDLEPYIGLHYPATDIPQASRFLFKQNRVRMIVDCHASPVRVIQDDGLMRPLRLVGSTLRAPHGCHAQYMENMGSIASLAMAVIINGNDEEVIGGRNPTRLWGLVVCHHTSARCIPFPLRYACEFLMQAFGLQLKMELQLAAQLLEKHVLKTQTLLCDMLLRDSPTGIVTQSPSIMDLVKCDGAALYFQGNYYPLGVTPTEAQIKDIVEWLLAFHGDSTGLSTDSSADAGYPGAALLGDAVCGMAVAYITNRDFLFWFRSHTAKEIKWGGAKHHPEDKDDGQRMHPRSSFKAFLEVVKRRS

SEQ ID NO: 12117 - protein, 374 aa, Salaciopsis glomerata
ALSIAGAVQSQKLAVRAISQLQSLPGGDIKLLCDAVVESVRDLTGYDRVMVYKFHEDEHGEVVAESKRSDLEPYIGLHYPATDIPQASRFLFKQNRVRMIADCHASPVRVIQDDGLMQPLCLVGSTLRAPHGCHAQYMENMGSVASLAMAVIVNGNDEEVIGGRNATRLWGLVVCHHASVRCIPFPLRYACEFLMQAFGLQLNMELQLAAQLSEKPVLKTQSLLCDMLLRDSPTGIVTQSPSIMDLVKCDGAALYYQGNYYPLGVTPAEPQIKDIVGWLLAFHGDSKGLSTDSLADAGYPGAALLGDAVCGMAVAYITNRDFLFWFRSHTAKEIKWGGAKHHPEEKDDGQRMHPRSSFKAFLEVVKSRSFPWEN

SEQ ID NO: 12118 - protein, 369 aa, Schaefferia frutescens
ALSIAGAVQSQKLAIRSISQLQSLPGGDIKLLCDTVVESVRELTGYDRVMVYKFHEDEHGEVVAESKRPDLEPYIGLHYPATDIPQASRFLFKQNRVRMIVDCHASPVLVIQDDGLMQPLCLVGSTLRAPHGCHAQYMENMGSKASLAMAVIINGNDEEVTGGRNATRLWGLVVCHHTSARCIPFPLRYACEFLMQAFGLQLNMELQLAAQLSEKHVLKTQTLLCDMLLRDSPTGIVTQSPSIMDLVKCDGAALYYQGKYYPIGVTPAEAQIKDIVEWLLAFHGDSTGLSTDSLADAGYPGATLLGDAVCGMAVAYITNRDFLFWFRSHTTKEIKWGGAKHHPEDKDDGPRMHPRSSFKAFLEVVKSRS

SEQ ID NO: 12119 - protein, 309 aa, Schaefferia frutescens
ALSIAGAVQSQKLAIRSISQLQSLPGGDIKLLCDTVVESVRELTGYDRVMVYKFHEDEHGEVVAESKRPDLEPYIGLHYPATDIPQASRFLFKQNRVRMIVDCHASPVLVIQDDGLMQPLCLVGSTLRAPHGCHAQYMENMGSKASLAMAVIINGNDEEVTGGRNCTRLWGLVVCHHTFARCIPFPLRYAWEFLMQAFGLQLNMELQLAAQLSEKHVLKTQTLLCDMLLRDSPTGIVTQSPSIMDLVKCDGAALYYQGKYYPIGVTPAEAQIKDIVEWLLAFHGDSTGLSTDSLADAGYPGATLLGDAV

SEQ ID NO: 12120 - protein, 363 aa, Simicratea welwitschii
QSQKLAVRAISQLQSLPGGDIKLLCDTAVESVRDLTGYDRVMVYRFHEDEHGEVVAESKRPDLEPYIGLHYPATDIPQASRFLFKQNRVRIIVDCHASPVSVIQDDGLMQPLCLVGSTLRAPHGCHAQYMENMGSIASLAMAVIINGNDEEGMGGRNPTRLWGLVVCHHTSSRCIPFPLRYACEFLMQAFGLQLNMELQLAAQLLEKHVLKTQTLLCDMLLRESPTGIVTQSPSIMDLVKCDGAALYYQANYYPLGVTPTEAQIRDIVEWLLACHGDSTGLSTDSLADAGYPGATLLGDAVCGMAVAYITNRDFLFWFRSHTAKEIKWGGAKHHPEDKDDGQRMHPRSSFKAFLEVVKSRSLP

SEQ ID NO: 12121 - protein, 363 aa, Simicratea welwitschii
QSQKLAVRAISQLQSLPGGDIKLLCDTAVESVRDLTGYDRVMVYRFHEDEHGEVVAESKRPDLEPYIGLHYPATDIPQASRFLFKQNRVRIIVDCHASPVSVIQDDGLMQPLCLVGSTLRAPHGCHAQYMENMGSIASLAMAVIINGNDEEGMGGRNPTRLWGLVVCHHTSSRCIPFPLRYACEFLMQAFGLQLNMELQLAAQLLEKHVLKTQTLLCDMLLRESPTGIVTQRPSIMDLVKCDGAALYYQANYYPLGVTPTEAQIRDIVEWVLACHGDSTGLSTDSLADAGYPGATLLGDAVCGMAVAYITNRDFLFWFRSHTAKEIKWGGAKHHPEDKDDGQRMHPRSSFKAFLEVVKSRSLP

SEQ ID NO: 12122 - protein, 245 aa, Tontelea attenuata
ALSIAGAVQSQKLAVRAISQIQSLPGGDIKLLCDTVVESVRDLTGYDRVMVYKFHEDEHGEVVAESKRPDLEPYIGLHYPATDIPQASRFLFKQNRVRMIVDCHASPVRVIQDDGLMQPLCLVGSTLRAPHGCHAQYMENMGSIASLAMAVIINGNDEEVIGGRNPTRLWGLVVCHHTSARCIPFPLRYACEFLTQAFGLQLKMELQLAAQLLEKHVLKTQTLLCDMLLRDSPTGIVTQSPSIMD

SEQ ID NO: 12123 - protein, 245 aa, Tontelea attenuata
ALSIAGAVQSQKLAVRAISQIQTLPGGDIKLLCDTVVESVRDLTGYDRVMVYKFHEDEHGEVVAESKRPDLEPYIGLHYPATDIPQASRFLFKQNRMRMIVDCHASPVRVIQDDGLMQPLCLVGSTLRAPHGCHAQYMENMGSIASLAMAVIINGNDEEVIGGRNPTRLWGLVVCHHTSARCIPFPLRYACEFLMQAFGLQLKMELQLAAQLLEKHVLKTQTLLCDMLLRDSPTGIVTQSPSIMD

SEQ ID NO: 12124 - protein, 374 aa, Tripterygium regelii
ALSIAGAVQSQKLAVLAISQLQSLQGGDIKLLCDTVVESVRDLTGYDRVMVYKFHEDEHGEVVAESKRPDLEPYIELHYPATDIPQASRFLFKQNRVRTIVDCHALPVRVIQDDGLMQPLCLVGSTLRAPHGCHAQYMENMGSMASLAMAVVINGNDEEVIGGRNTTRLWGLVVCHHTSARCIPFPLRYACEFLMQAFGLQLNMELQLAAQLMEKHVLKTRTLLCDMLLRDSPTGIVTQSPSIMDLVKCDGAALHYQGNYYPLGVTPTEAQIKDIVGWLLDFHGDSTGLSTDSLADAGYPEAALLGDAVCGMAVAYITNRDFLFWFRSHTAKEIKWGGAKHHPGDKDDGQRMHPRSSFKAFLEVVKSRSLPWEN

SEQ ID NO: 12125 - protein, 371 aa, Tripterygium regelii
ALSIAGAVQSQKLAVLAISQLQSLQGGDIKLLCDTVVESVRDLTGYDRVMVYKFHEDEHGEVVAESKRPDLEPYIGLHYPATDIPQASRFLFKQNRVRTIVDCHALPVRVIQDDGLMQPLCLVGSTLRAPHGCHAQYMENMGSMASLAMAVVINGNDEEVIGGRNTTRLWGLVVCHHTSARCIPFPLRYACEFLMQAFGLQLNMELQLAAQLMEKHVLKTRTLLCDMLLRDSPTGIVTQSPSIMDLVKCDGAALHYQGNYYPLGVTPTEAQIKDIVGWLLDFHGDSTGLSTDSLADAGYPEAALLGDAVCGMAVAYITNRDFLFWFRSHTAKEIKWGGAKHHPEDKDDGQRMHPRSSFKAFLEVVKSRSLP

SEQ ID NO: 12126 - protein, 371 aa, Tripterygium regelii
ALSIAGAVQSQKLAVLAISQLQSLQGGDIKLLCDTVVESVRDLTGYDRVMVYKFHEDEHGEVVAESKRPDLEPYIGLHYPATDIPQASRFLFKQNRVRTIVDCHALPVRVIQDDGLMQPLCLVGSTLRAPHGCHAQYMENMGSMASLAMAVVINGNDEKVIGGRNTTRLWGLVVCHHTSARCIPFPLRYACEFLMQAFGLQLNMELQLAAQLMEKHVLKTRTLLCDMLLRDSPTGIVTQSPSIMDLVKCDGAALHYQGNYYPLGVTPTEAQIKDIVGWLLDFHGDSTGLSTDSLADAGYPEAALLGDAVCGMAVAYITNRDFLFWFRSHTAKEIKWGGAKHHPEDKDDGQRMHPRSSFKAFLEVVKSRSLP

SEQ ID NO: 12127 - protein, 374 aa, Tripterygium regelii
ALSIAGAVQSQKLAVLAISQLQSLQGGDIKLLCDTVVESVRDLTGYDRVMVYKFHEDEHGEVVAESKRPDLEPYIGLHYPATDIPQASRFLFKQNRVRTIVDCHALPVRVIQDDGLMQPLCLVGSTLRAPHGCHAQYMKNMGSMASLAMAVVINGNDEEVIGERNTTRLWALVVCHHTSARCIPFPFRYACEFLMQAFGLQLNMELQLAAQLMEKHVLKTRTLLCDMLLRDPPTGIVTQSPSIMDLVKCDGAALHYQGNYYPLGVTPTEAQIKDIVGWLLDFHGDSTGLSTDSLADAGYPEAALLGDAVCGMAVAYITNRDFLFWFRSHTAKEIKWGGAKHHPEDKDDGQRMHPRSSFKAFLEVVKSRSLPWEN

SEQ ID NO: 12128 - protein, 374 aa, Wimmeria concolor
ALSIAGAVQSQKLAVRAISQLQSLPGGDIKLLCDTVVESVRHLTGYDRVMVYKFHEDEHGEVVAERKRPDLEPYIGLHYPATDIPQASRFLFKQNRVRTIVDCHASPVRVIQDDGLMQPLCLVGSTLRAPHGCHAQYMENMGSIASLAMAVIINGNDEEVIGVRNATRLWGLVVCHHTSARCIPFPLRYAWEFLMQAFGLQLNMELQLAAQLSEKHVWKTRTLLCDMLLRDSPTGIVTQSPSIMDLVKCDGAALYYQGNYYPLGVTPTEAQITDIVGWLLDFHGDSTGLSTDSLADAGYPGAALLGDAVCGMAVAYITNRDFLFWFRSHTAKEIKWGGAKHHPEDRDDGQRMHPRSSFQAFLEVVKSRSLPWEN

SEQ ID NO: 12129 - protein, 374 aa, Zinowiewia concinna
ALSIAGAVQSQKLAVRAISQLQSLPGGDIKLLCDTVVETVRVLTGYDRVMVYKFHEDEHGEVVAESKRPDLEPYIGLHYPATDIPQASRFLFKQNRVRMIVDCHATPVSVIQDAGLMQPLCLVGSTLRAPHGCHAQYMENMGSIASLAMAVIINGNDEEGIGGRNTTRLWGLVVCHHTTARCIPFPLRYACEFLLQALGLQLNMELQLAAQLSEKHVLRTQTLLCDMLLRDSHTGIVTQSPSIMDLVKCDGAALYYQGKYYPLEVTPTEAQIKDIVEWLLAFHGDSTGLSTDSLADAGYPGAASLGDAVCGMAVAYITDRDFLFWFRSNTAKEIKWGGAKHHPEDKDDGQRMHPRSSFKAFLEVVKSRSLPWEN

SEQ ID NO: 12130 - protein, 374 aa, Zinowiewia concinna
ALSIAGAVQSQKLAVRAISQLQSLPGGDIKLLCDTVVETVRVLTGYDRVMVYKFHEDEHGEVVAESKRPDLEPYIGLHYPATDIPQASRFLFKQNRVRMIVDCHATPVSVIQDAGLMQPLCLVGSTLRAPHGCHAQYMENMGSIASLAMAVIINGNDEEGIGGRNTTRLWGLVVCHHTTARCIPFPLRYACEFLLQALGLQLNMELQLAAQLSEKHVLRTQTLLCDMLLRDSHTGIVTQSPSIMDLVKCDGAALYYQGKYYPLEVTPTEAQIKDIVEWVLAFHGDSTGLSTDSLADAGYPGAASLGDAVCGMAVAYITDRDFLFWFRSNTAKEIKWGGAKHHPEDKDDGQRMHPRSSFKAFLEVVKSRSLPWEN

SEQ ID NO: 12131 - protein, 374 aa, Crossopetalum rhacoma
ALSIAGAVQSQKLAVRAISQLQSLPGGDIKLLCDTVVESVRHLTGYDRVMVYKFHEDEHGEVVAERKRPDLEPYIGPHYPATDIPQASRFLFKQNRVRTIVDCHASPVRVIQDDGLMQPLCLVGSTLRAPHGCHAQYMENMGSIASLAMAVIINGNDEEVIGGRNTTRLWGLVVCHHTSARCIPFPLRYACEFLMQAFGLQLNMELQLAAQLSEKHVWKTRTLLCDMLLRDSPTGIVTQSPSIMDLVKCDGAALYYQGNYYPLGVTPTEAQITDIVGWLLDFHGDSTGLSTDSLADAGYPGAALLGDAVCGMAVAYITNRDFLFWFRSHTAKEIKWGGAKHHPEDRDDGQRMHPRSSFQAFLEVVKSRSLPWEN

SEQ ID NO: 12132 - protein, 374 aa, Crossopetalum rhacoma
ALSIAGAVQSQKLAVRAISQLQSLPGGDIKLLCDTVVESVRHLTGYDRVMVYKFHEDEHGEVVAERKRPDLEPYIGPHYPATDIPQASRFLFKQNRVRTIVDCHASPVRVIQDDGLMQPLCLVGSTLRAPHGCHAQYMENMGSIASLAMAVIINGNDEEVIGGRNTTRLWGLVVCHHTSARCIPFPLRYACEFLMQAFGLQLDMELQWRAQLSKKHVWKTRTLLCDMVLRDSPTGIVTQSPSIMDLVKCDGAALYYQGNYYPLGVTPTEAQITDIVGWLLDFHGDSTGLSTDSLADAGYPGAALLGDAVCGMAVAYITNRDFLFWFRSHTAKEIKWGGAKHHPEDRDDGQRMHPRSSFQAFLEVVKSRSLPWEN

SEQ ID NO: 12133 - protein, 245 aa, Eucryphia billardieri
ALSIAGAVQSQKLAVRAISQLQSLPGGHIKLLCDTVVESVRELTGYDRVMVYKFHEDEHGEVVAESKRPDLEPYIGLHYPATDIPQASRFLFKQNRVRMIVDCHATPVRVIQDEGLIQPLCLVGSTLRAPHGCHAQYMANMGSTASLAMAVIINGNDEEAIGGRNSMRLWGLVVCHHTSARSIPFPLRYACEFLMRAFGLQLNMELQLALQLSEKHILRTQTLLCDMLLRDSPTGIVTQSPSIMD

SEQ ID NO: 12134 - protein, 245 aa, Eucryphia billardieri
ALSIAGAVQSQKLAVRAISQLQSLPGGHIKLLCDTVVESVRELTGYDRVMVYKFHEDEHGEVVAESKRPDLEPYIGLHYPATDIPQASRFLFKQNRVRMIVDCHATPVRVIQDEGLIQPLCLVGSTLRAPHGCHAQYMANMGSTASLAMAVIINGNDEEAIGGRNSMRLWGPVVCHHTSARSIPFPLRHACEFLMQAFGLQLNMELQLALQLSEKHILRTQTLLCDMLLRDSPTGIVTQSPSIMD

SEQ ID NO: 12135 - protein, 245 aa, Aleurites moluccana
ALSIAGAVQSQKLAVRAISRLQSLPGGDIKLLCDTVVECVKELTGYDRVMVYKFHEDEHGEVVAESKRPDLEPYIGLHYPSTDIPQASRFLFKQSRVRMIVDCHATAVSVIQDEALMQPLCLVGSTLRAPHGCHAQYMANMGSIASLAMAVIINGNDEEAIGGRNSMRLWGLVVCHHTSARSIPFPLRYACEFLMQAFGLQLNMDLQLASQFSEKHVLRTQTLLCDMLLRDSPTGIVTQSPSIMD

SEQ ID NO: 12136 - protein, 245 aa, Aleurites moluccana
ALSIAGAVQSQKLAVRAISRLQSLPGGDIKLLCDTVVECVKELTGYDRVMVYKFHEDEHGEVVAESKRPDLEPYIGLHYPSADIPQASRFLFKQSRVRMIVDCHATAVSVIQDEALMQPLCLVGSTLRAPHGCHAQYMANMGSIASLAMAVIINGNDEEAIGGRNSMRLWGLVVCHHTSARSIPFPLRYACEFLMQAFGLQLNMDLQLASQFSEKHVLRTQALLCDMLLRDSPTGIVTQSPSIMD

SEQ ID NO: 12137 - protein, 245 aa, Reinwardtia trigyna
ALSIAGAVQSQKLAIRAISQLQSLPGGDIKLLCNTVVDCVRELTGYDRVMVFKFHEDEHGEVVAENKRADLEPYLGLHYPATDVPQASRFLFKQNRVRMIVDCHASAVRVVQDEGLVQPLCLVGSTLRAPHGCHAQYMANMGSIASLAMAVVITGNDEEGTGGRNSTRLWGLVVCHHTSARCIPFPLRYACEFLMQAFGLQMNVELQLASQLLEKHVMRTQTLLCDMLLRDSPTGIVTQSPSIMD

SEQ ID NO: 12138 - protein, 392 aa, Barnebya dispar
DLEPVNPADVPVTAAGALKSYKFAAKAISRLQSLPSGNIFLLCDVLVKEVRDLTGYDRVMVYKFHEDEHGEVVSECRRSDLESYLGLHYPATDIPQASRFLFMKNKLRMICDCLAPPVKVIQDENLPQPLSLCGSTLRSPHGCHAQYMTNMGTIASLVMSVTINEDDDMKDCEQPQMPRKLWGLVVCHHTSPRFIPFPLRYACEFLIQVFGVQINKEVELAAQVREKHILRIQTLLCDMLLRDAPVAIITQSPNVMDLVRCDGAALYYKNKFWLLGVTPTEAQIRDIAEWLLECHSGNTGLSTDSLMEAGYPGASVLGDAVCGMAAISITSRDFLFWFRSHTAKEIKWGGAKHDPDDKDDGRKMHPRSSFKAFLEVVKWRSLPWEDVEMDAI

SEQ ID NO: 12139 - protein, 392 aa, Barnebya dispar
DLEPVNPADVPVTAAGALKSYKFAAKAISRLQSLPSGNIFLLCDVLVKEVRDLTGYDRVMVYKFHEDEHGEVVSECRRSDLESYLGLHYPATDIPQVSRFLFMKNKLRMICDCLAPPVKVIQDENLPQPLSLCGSTLRSPHGCHAQYMTNMGTIASLVMSVTINEDDDMKDCEQPQMPRKLWGLVVCHHTSPRFIPFPLRYACEFLIQVFGVQINKEVELAAQVREKHILRIQTLLCDMLLRDAPVAIITQSPNVMDLVRCDGAALYYKNEFWLLGVTPTEAQIRDIAEWLLECHSGNTGLSTDSLMEAGYPGASVLGDAVCGMAAISITSRDFLFWFRSHTAKEIKWGGAKHDPDDKDDGRKMHPRSSFKAFLEVVKWRSLPWEDIEMDAI

SEQ ID NO: 12140 - protein, 206 aa, Anemia phyllitidis
VMVYKFHEDEHGEVVAEIRRSDLEPYLGLHYPATDIPQASRFLFMKNRVRMICNCAATPVRVIQDKGLRQPLSLAGSTLRAPHGCHSQYMANMGTIASLVMAVIVNDNDEEVEQQNTSPKQEKLWGLVVCHHTTPRAVPFPLRSACEFLMQVFGLQLNMEMELAAQMREKHILRTQTLLCDMLLRDAPIGIVSESPNIMDLVKGSI

SEQ ID NO: 12141 - protein, 204 aa, Anemia phyllitidis
VMAYKFHDDEHGEVVAEIRRSDLEPYMGLHYPATDIPQAARFLFMKNRVRLIYDCRLPPVKVIQDKNLVQPLSLAGSTLRAPHRCHAEYMGNMGSIASLGMAVIVNDDDSSDAGNMQQRTRLWGLVVCHHTSTRYVPFPLRSACEFLMQVFSLELNMEVELAAQRREKHILQTQTLLCDMLLRDAPIGIVSQSPNIMDLVKGSI

SEQ ID NO: 12142 - protein, 755 aa, Deinococcus radiodurans
MSRDPLPFFPPLYLGGPEITTENCEREPIHIPGSIQPHGALLTADGHSGEVLQMSLNAATFLGQEPTVLRGQTLAALLPEQWPALQAALPPGCPDALQYRATLDWPAAGHLSLTVHRVGELLILEFEPTEAWDSTGPHALRNAMFALESAPNLRALAEVATQTVRELTGFDRVMLYKFAPDATGEVIAEARREGLHAFLGHRFPASDIPAQARALYTRHLLRLTADTRAAAVPLDPVLNPQTNAPTPLGGAVLRATSPMHMQYLRNMGVGSSLSVSVVVGGQLWGLIACHHQTPYVLPPDLRTTLEYLGRLLSLQVQVKEAADVAAFRQSLREHHARVALAAAHSLSPHDTLSDPALDLLGLMRAGGLILRFEGRWQTLGEVPPAPAVDALLAWLETQPGALVQTDALGQLWPAGADLAPSAAGLLAISVGEGWSECLVWLRPELRLEVAWGGATPDQAKDDLGPRHSFDTYLEEKRGYAEPWHPGEIEEAQDLRDTLTGALGERLSVIRDLNRALTQSNAEWRQYGFVISHHMQEPVRLISQFAELLTRQPRAQDGSPDSPQTERITGFLLRETSRLRSLTQDLHTYTALLSAPPPVRRPTPLGRVVDDVLQDLEPRIADTGASIEVAPELPVIAADAGLLRDLLLHLIGNALTFGGPEPRIAVRTERQGAGWSIAVSDQGAGIAPEYQERIFLLFQRLGSLDEALGNGLGLPLCRKIAELHGGTLTVESAPGEGSTFRCWLPDAGPLPGAADA

SEQ ID NO: 12143 - protein, 391 aa, Chloranthus spicatus
PYEVPMTAAGALQSYKLAAKAIARLQSLPGGSMEKLCDTVVQEVFELTGYDRAMAYKFHEDDHGEVISETTKPGLEPYLGLHYPATDIPQAARFLFMKNKVRMICDCHAKPVKVFKMKKLAFDLTLCGSTLRAPHSCHSQYMVNMNSIASLVMAVVVNEGEEGDSSEPGQQQLQQKKKRLWGLVICHNTTPRFVPFPLRYACEFLMQVFAIHVNKELELENQIQEKNIFRTQTLLCDMLMRDAPLGIVSQNPNIMDLVKCDGAALLYNKKIWRLGLTPSESQIHDISFWLSENHMDSTGFSTDSLNDAGYPGAVAIGNAVCGMAAVWITSKDMLFWFRSHTAAEVRWGGAKHDPEDKDDNRRMHPRSSFMAFLEVVKTRSLPWKDAEMDAI

SEQ ID NO: 12144 - protein, 397 aa, Chloranthus spicatus
DLEPVNPADVPVTAAGALKSYKLAAKAISRLQSLPSGNISLLCDVLVREVSELMGYDRVMAYKFHEDEHGEVIAECRRVDLEPYLGLHYPATDIPQASRFLFMKNKVRMICDCSAAPVKVIQDKRLGQPLSLCGSTLRAPHGCHALYMANMGSIASLVMSVTINEDDDETKSDPQQQQQENRRKLWGLVVCHHTSTRFAPFPLRYACEFLLQVFSLQLNKEVELAAQLREKNMLRMQTLLCDMLLRDTPTGILTQSPNVMDLVKCDGAALYYRNQFWLFGTTPTDVQIRDMAEWLLECHDGSTGLSTDSLMEAGYPCASILGNAVCGMAAVKITSKDFLFWFRSHTAKEVKWGGAKHDPIDKDGDGRKMHPRSSFKAFLEVMKQRSLPWEDMEMDAI

SEQ ID NO: 12145 - protein, 1124 aa, Mougeotia scalaris
MSSSKRSQSSGRSSTQTRIQNRVTQASADAKLSTAFEVSSSSGGDSFDYTKSVTASLNPTEPLAAKSVTAYLQRMQRGSIIQSFGCMMAVEPGTFRIIAYSENVSEMLGVTPQSVPTGDHQNAIGIGTDVRSLLSPSSVSVVEKAVAANDVSMMNPIAVYSLATQKLFFAILHMNDVGLVIDLEPISSSSDSAMFSAGAVQSHKLAAKAISRLQSLPGGDICGLCDVVVEEVRELTGYDRVMAYKFHDDEHGEVVAEIRRSDLEPYLGLHYPATDIPQASRFLFIKNRIRMICDCTSPQVKVVQDSRIPQEMSLAGSTMRGVHGCHTQYMMNMGSTASLVMSVTINDTNEIAGGPGMKGRKLWGLIVCHHSTPRHIPFPIRSACEFLMQVFGLQLNMEVELAAQHREKHILRTQTLLCDMLLRDAPMGIVSQSPNVMDLVKCDGAALLFGGRCWLLGISPTQEQVKDIATWLISSHTDTTGLSTDSLVDAGYPKARELGVDVCGMAAARITENDFLFWFRGHAQKEVKWAGAKDGGSEEDGSRMHPRSSFKAFLEVVKQRSLPWEDVEMDAIHSLQLILRGSFQDIEDKEDRKIVHARLKEMHLQGMEELSSVASEMVRLIETATAPILAVDTAGCVNGWNFKISELTGLSIPEVMGKSLVKDLTHPSSKDTVEKLLYMALNGEEEQNVEIRLKTWGMQQGKGPVILMVNACASRDVSEKVVGVCFVAQDVTGEKIVQDKFTRIQGDYTTIVRSHNSLIPPIFGSDESGFCVEWNPAMERLSGVKREEAIGKMLTRELFGGILRLKNVDGLTKFMIVLNAAMSSHDTDKFPFTFYDRSGKIVEVLLTTSKRCNSEGVVTGVFCFLHTASSELQQALTVQKAAERVAEVKAKELAYIRQEIQNPLDGIHFARSFMEHTVLSEDQKQLIETSATCEKQLRRILADMDLASIEKGYLELETGEFSMATVMNSVVSQGMIQSTQKNLQLYCDTPPDFKSLSVFGDQVRLQQVLADFLLNAVQFTPPSGWVEIKVEPVVKKLPGGVSVANVDFRVSHPGEGLPEDLIDQMFDRADARVKSQEGLGLSICRKLVRLMNGEVQYRREGERNFFLLQLELPLAQRDDQASMK

SEQ ID NO: 12146 - protein, 188 aa, Mougeotia scalaris
DDEHGEVVAEIRRSDLEPYLGLHYPATDIPQASRFLFIKNRIRMICDCTSPQVKVVQDSRIPQEMSLAGSTMRGVHGCHTQYMMNMGSTASLVMCVTINDTNEIAGGPGMKGRKLWGLIVCHHSTPRHIPFPIHSACEFLMQVFGLQLNMEAELAAQHREKHILRTQTLLCDMLLRDAPMGIVSQSPN

SEQ ID NO: 12147 - protein, 448 aa, Piper nigrum
SGKPFYAIVHRVTGSLIVDFEPVKPLEVPMTAAGALQSYKLAAKAISRLQSLPSGGMERLVDTVVQEVFELTGYGRVMAYKFHEDDHGEVISEVTAPDLDPYLGLHYPATDIPQAARFLFMKNKVRMICDCHAKPVKVYQDEKLPFDLTLCGSTLRAPHSCHLHYMANMGSIASLVMAVVINEGACSSATDHAVEQHSSSSSSSASYAAATATAAAAGGGGGSNIDTTSATSRRKMLWGLVVCHNTKPRFVPFPLRYACEFLMQVFAIHVNKELELERQIREKNILRTQTLLCDMLLRDAPMGIVNQSPNIMDLIKCDGAALLYKQQVFPLGVAPSDAELRQLARWLSSSHRDSTGLSTDSLHDAGYPNASCLGNVVCGMAAVKITPSDLLFWFRRHTAAEVRWGGAKHHPTDRDDGKRMHPRSSFKAFLEVVKTRSLPWQNYEMDAI

SEQ ID NO: 12148 - protein, 341 aa, Piper nigrum
DLEPVNPADVPVTAAGALKSYKLAAKAISRLQSMPNGDIALLCDVLAREVSDLTGYDRVMAYKFHEDEHGEVIAECKRSDLEPYLGLHYPATDIPQASRFLFMKNKVRMICDCLAPPVKVVQDKRLGQPLSLAGSTLRAPHGCHSQYMSNMGSIASLVMSVMVCEGDEDSNGEKTARKLWGLVVCHHTSPRFIPFPLRYACEFLIQVFAIQLSKEVELAAQVKEKHVLRMQTVLCDMLLRDAPMGIMTQSPNVMDLVMCDGAALYYHSQCWLLGATPTENMVRDIAEWLQQYHGTSTGLSTDSLVEAGYPGAHELSDAVCGMAAITITNRDFSFWFRSHTA

SEQ ID NO: 12149 - protein, 392 aa, Saruma henryi
PYEVPMTAAGALQSYKLAAKAISRLQSVPSGCLDRLIDTVVQEVYELTGYDRVMAYKFHEDDHGEVISEVTKPDLEPYLGLHYPATDIPQAARFLFMKNKVRMICDCRAKSVKVYQDEHLSFDLTLCGSTLRAPHSCHLQYMGNMSSIASLVMAVVINEGEEDDDGPDSTQQQAQPKRKRLWGLVVCHNTTPRFVPFPLRYACEFLMQVFAIHVNKELELENQIREKNILRTQTLLCDMLLRDAPLGIVTQSPNIMDLIKCDGAALLYENKVYRLGVTPTESQLHEIVQWLSEHHMDSTGLSTDSLHEAGYPKALSLGDIVCGMAAVRITTHDMLFWFRSHTAAEVKWGGAKHDPSDKDDGRRMHPRSSFKAFLEVVKTRSLPWKDYEMDAI

SEQ ID NO: 12150 - protein, 391 aa, Saruma henryi
DLEPVNPDDVPVTAAGALKSYKLAAKAISRLQSLPSGNISLLCDVVVREVSDLTGYDRVMAYKFHEDEHGEVIAECKRSDLEPYHGLHFPASDIPQASRFLFMKNKVRMICDCSAPPVKVIQDKRLAQPISLGGSTLRAPHGCHAQYMANMGSIASLVLSVTISEDDDETCSKQKGRKLWGLVVCHHTSPRFIPFPLRYACEFLIQVFGIQLNKEVELAAQMRETHILRTQTMLCDMLLRDAPMTIVTQSPNVMDLVKCDGAALYYRKESWLLGVTPTKAQIQDLAEWLLKDHNGTTGLSTDSLVEAGYPRAHNLGDMVCGMAAVRITNQDFLFWFRSHTAKEVKWGGAKHDPADKDDDRGKMHPRSSFKAFLEVVKRRSLPWEDVEMDAI

SEQ ID NO: 12151 - protein, 414 aa, Saururus cernuus
SGKPFYAIVHRVTGSLIIDFEPVKPFEVPMTAAGALQSYKLAAKAISRLQSLPSGSMERLVDTVVQEVFELTGYDRVMAYKFHEDDHGEVISEVTIPHLEPYIGLHYSATDIPQAARFLFMKNKVRMICDCHAKPVKVYQDDKLSFDLTLCGSTLRAPHSCHLQYMENMGSIASLVMAVVVNEGGDEDKGPDSSQQLGDNRRKRLWGLVVCHNTRPRFVPFPLRYACEFLTQVFAIHVSKELELERQIREKNILRTQTLLCDMLLRDAPMGIVNQSPNIMDLIKCDGAALFYKDKVFRLGNAPSETDIRDIAQWLFAHHMDSTGLSTDSLHDAGYPKAAFLGNLVCGMAAVKITCSDMLFWFRTHTAAEIRWGGAKHDHSERDDGKRMHPRSSFKAFLEVVKTRSLPWKDYEMD

SEQ ID NO: 12152 - protein, 391 aa, Saururus cernuus
DLEPVNPSDVPVTAAGALKSYKLAAKAISRLQSLPSGNISLLCDVLVREVSDLTGYDRVMAYKFHEDEHGEVVSECKRADLEPYLGLHYPATDIPQASRFLFMKNKVRMICDCLAQPVKVIQDKRLAQPLSLAGSTLRAPHGCHAQYMANMGSIASLVMSVMVSEGDDDSNEEKTGRKLWGLVVCHHTSPRFIPFPLRYACEFLIQVFAIQLSKEVELAAQMREKHILRMQTVLCDMLLRDAPMGIMTQSPNVMDLVKCDGAALYYRYQCCLLGTTPTENQIRDITEWLLQYHNSSTGLSTDSLVEAGYPGAHELSDAVCGMAAIRITSKDFLFWFRSHTAKEIKWGGEKHDPLDKDAFESKMNPRTSFKTFLEVVKRRSLPWEDVEMDAI

SEQ ID NO: 12153 - protein, 467 aa, Pseudowintera axillaris
SGKPFYAIIHRVTGSLIVDFEPVKPYESPMAAAGALQSYKLTAKAISRLQSLPGGSLKRLIDTVVQGVFELTGYDRVMAYKFHEDDHGEVISEVTKPDLEPYLGLHYPATDIPQAARFLFMKNKVRMICDCNAKPMKVYQDEKLTFDLTLCGSTLRAPHSCHLQYMENMGSIASLVMAVVINEREEKDENSGSEQQQEQPKRKRLWGLVVCHNTTPRFVPFPLRYACEFLAQVFAIHVNKELELENQIQEKNILRTQTLLCDMLMRAAPLGIVTQSPSILDLVKCDGAVLLYQNKIWRLGIAPTESQILDIALWLSEYHMDSTGLSTDSLHDAGYPGALSLGDVVCGMAAVRINSKDTLFWFRSHTAAEIRWGGAKHDPNQKDDGRKMHPRSSFKAFLDVVKTRSSPWADYEMDATHSLQLILRGSLKEAEKVDTGTMIHSRLNDLKLEGVVELQAVTNQMVRLMET

SEQ ID NO: 12154 - protein, 395 aa, Pseudowintera axillaris
  unsure (1)..(395): unsure at all Xaa locations
DLEPVNPADVPVTAAGALKSYKLAAKAISKLQSLPSGNISLLCDVLVREVSELTGYDRVMTYKFHEDEHGEVIAECRRNDMEPYLGLHYPATDIPQASRFLFMKNKVRMICDCTARPVEVIQDKKLAQPLSLCGSTLTAPHGCHAQYMANMGSXASLVMSVTISEDDDEASSEEHRQKGRKLWGLVVCHHMTPRFVPFPLRYACEFLIQVFGIQLNKEVELAAQLREKNMLRTQTMLCDMLLRDAPVGIVTQSPNVMDLVKCDGAALYYRNQFWLLGTTPTEVQIRDIAEWLLEYHNNTTGLSTDSLMEAAYPGASILGDAVCGMAAVKITNKDFLFWFRSHTAKEIKWGGAKHDPSDKDGDGRKMHPRSSFMAFLDVVKRRSLPWEDVEMDAIQ

SEQ ID NO: 12155 - protein, 465 aa, Akebia quinata
SGKPFYAIVHRVTGSLIIDFEPVKPYEVPMNAAGALQSYKLAAKAIARLQSLPNASMDRLCDTVVQEVFELTGYDRVMAYKFHDDDHGEVVSEITKPGLEPYLGLHYPATDIPQAARFLFMKNKIRMICDCNATHVKVFQDEKLPLDLTLCGSTLRAPHSCHSQYMENMGSIASLGMAVVINEGDEEDNGSGSAQPQRRKRLWGLVVCHNTTPRFVPFPLRYACEFLIQVFAIHINKELELGNQVLEKSVLRTQTLLCDMLMRNAPLGIVSQSPNIMDLVKCDGATLLYKNKIWRLGLSPSEFHIRDIASWLYEYHMDSTGLSTDSLHDAGFPGALSLGDGICGMAAVRITSKDMIFWFRSHTAAEVRWGGAKHDPCEEDDGRKMHPRSSFKAFLEVAKTRSLAWKDYEMDAIHSLQLILRNAFKDGDTADLNPSVIHSRLDNLKIEGMEELEAVTNEMVRLMET

SEQ ID NO: 12156 - protein, 392 aa, Akebia quinata
DLEPVNPAEDPVTAAGALKSYKLAAKAISRLQSLPSGDISLLCDVLVHEVSDMTGYDRVMVYKFHEDEHGEAVAECLRSDLEPYLGLHYPATDIPQASRFLFLKNKVRMICDCSARSVEIVQDKRLTQPLSLGGSTLRAPHGCHAQYMENMGSVASLVMSVTINEDDDEMETNQQKGRKLWGLVVCHHSSPRFVPFPLRYACEFLIQVFGIQLNKEVELAAQLREKHILRIQTVLCDMLLRDAPVGIFTQSPNVMDLVKCDGAALYYKNKLWLLGVTPTEAQIREIAAWILEYHDRSTGLSTDSLMEAGYPGASVLGDAVCGMAAINITSKDFIFWFRSHTAKEIKWGGAKHDTVDKDDGRKMHPRSSFKAFLEVVQWRSLPWEDMEMVAIQ

SEQ ID NO: 12157 - protein, 385 aa, Amborella trichopoda
PYEVPMTAAGALQSYKLAAKAISRLQSLPSGNIDRLCHTVVQEVHELTGYDRTMAYKFHEDDHGEVISEITKGGLEPYLGLHYPATDIPQAARFLFMKNGVRMICDCRARHVRVFQDEKLASDLTLCGSTLRAPHSCHLQYMENMDSIASLVMAVVVNEDEEENIADGPKRKRLWGLVVCHNTSPRFVPFPLRYACEFLMQVFAIHVNKEVELEALVREKNILRTQTMLCDMLLRDALLGIVTKNPNVMDLVKCDGATLLYENKLWRLGVTPSEVHIRDLARWLSEYHTDSTGLSTDSLVEAGYPDGVSLGDLVCGMAAVKITETDMLFWSRSHTASEIRWGGAKHDPNDKDDKRRMHPRSSFKAFLEVVKTRSFPWKDYEMDAI

SEQ ID NO: 12158 - protein, 394 aa, Amborella trichopoda
DLEPVNPADVPVTAAGALKSYKLAAKAISKLQSLPSGNIELLCDVLVREVRELTGYDRVMAYKFHEDEHGEVVAEYRRADLDPYLGLHYPATDIPQASRFLFLKNKVRMICDCTASPVKVIQDKKLDKPLSLCGSTLRAPHGCHAQYMANMGSIASLVMSVTINENDEDSSPNEPSFHKGRKLWGLVVCHHTTPRFVPFPLRYACEFLLQVFGIQLNKEVELAAQLREKHILRTQTVLCDMLLRDAPVGIVTQSPNIMDLVKCDGAALYYQKQVWLLGTTPLEAQIRDISGWLLEYHCGSTGLSTDSLMEAGYPGALALGDAVCGMAAVKITSKDFLFWFRSHTAKVIKWGGAKHDPVDRDDGRKMHPRSSFKAFLEVVKQRSLPWEDVEMDAI

SEQ ID NO: 12159 - protein, 345 aa, Austrobaileya scandens
TGYDRVMAYRFHEDDHGEVVSEIRKSELEPYLGLHYPATDIPQAARFLFMKNKVRMICDCHAKSVTVHQDEKLQFDLTLCGSTLRAPHSCHLQYMANMGSIASLVMAVVVNEGEQDEEETAEPNQQPQLKRKRLWGLVVCHNTTPRFVPFPLRYACEFLIQVFAIHVNKEMELQNQLQEKNILRMQTLLCDMLLRDAPLGIVTQSPNIMDLVKCDGAAVLYGNKVWLLGVTPTESQIQDIASWLSESHMDSTGLSTDSLFEAGYPGALALGAKVCGMAAVKITLKDMLFWFRSHTAAEVRWGGAKHDPVDRDDGRRMHPRSSFKAFLEVVKSRSLPWKEYEMDGI

SEQ ID NO: 12160 - protein, 360 aa, Austrobaileya scandens
PFYAILHRIDAGLIIDLEPVNPADVPITAAGALKSYKLAAKAISRLQSLPSGNIGLLCDVLVQEVSELTGYDRVMAYKFHEDEHGEVIAEYRRSNLEPYIGLHYPATDIPQASRFLFMKNKVRMICDCFAPPIKVIQDKKLAQPLSLCGSTLRAPHGCHAQYMANMGSVASLVMSITVNDDDDETIGEQQNQQKGRKLWGLVVCHHTSSRFVPFPLRYACEFLIQVFGIQLNKEVELAAWMREKHILQMQTLLCDMLLRDAPVGIMTQSPNVMDLIKCDGAALYYGKQLWLLGTTPTEAQIRDIAGWLLEYHGGTTGLSTDSLMEAGYPAAAALGDGVCGMAAAKLTSKDFLFWFRSHTA

SEQ ID NO: 12161 - protein, 744 aa, Burkholderia fungorum
MKITVTQPFDTAHTGKALLVVFARVAVADRPASLAPTGVDSDLWHLESELRTTQVELGSTIEELEESNSELRVSNEEILSMNEELRSANEELETSKEELQALNEQLNVVNSQLGQKVHELEMLSEDVTNLLASTEIATLLLDGHAVIKRFTPRAARIFGLALADIDRPITNVLGNPLGDALLEDVQRVLSAQTGQAEKEIETVTGEWYVRRITPYIAVKGASPAGVVVTWNDITHVKASDERSRRLAAVVQDSNDAMTVFDLNGRLMAWNRAATAMYGYTEAEALGMTVSDMLPPGARQDHLDFIRYAAHNEALHSYETQRVTKGGRVVDIWITLSILSDDQGHAVAIATTERELTDRSLSNAQLRERAERLAQADRRKNEFLAMLGHELRNPLAALCSSGDLLASETIDPRQKSWAVGVIQRQGRSMTQLVNEMLDLTRITSGSIELRRQAVTLKAVIQSAVEVCQPIIDERHHTLSVSLPDEPVLMYVDPTRLSQVVENIVINAARYTEPGGHISLTATRTGRRLSLRVKDNGRGIPASMLSTLFDMFVQGPVPYGQLHNGLGVGLSVVRRLVELHGGSVRAISDGRTGSEFIVDLPLGMIPPGVEQAGTPQEPVNAGPRKILIIDDNADASEALAMLLAAEGHVVETRLDGPGGLEAASTFRPDVVLLDIGLPGMDGYEVAKQLRDSVATYDTMLIAVTGYGQPGDQLRSAEAGLDYHLVKPVDINALTRLLAVQVKPRGR

SEQ ID NO: 12162 - protein, 1490 aa, Burkholderia fungorum
MSSVNFPPDVAMRRALERVRLCLLAWCLIAAAQTATAAQLFDNRSNSQVVAAFPAKLTVGVLAGGWLPLDALQDGRLTGMSVDYLRALVGPNVVIEAKAFPDVSQLLAAACAGNVDLLTSVARTPERERCLSFTAPYFRSSSSAVVRRDGDSYASPALIAGARIAVEKGFALERVARERFPHAQISAFATTHAALSAVVRGDADVYLGFTPAVQYALATEEFRGLHVAFEESSRTANLRFAVPRSHAALRDQLDEALASMNPADEAAIRVRWLSGNFDAKPVPTAPRLVLTPQEQAWLRSLPPLQIGFDNGWSPFSYVDSSGRPAGIAADYLAYLSRTLGVVFNRARTADWPTAIESFQRGELAILATASIHDPRLKGARHTVAYESYPLVIVGREDEPAARSLSDFASRRVVVSSHVAGSIPLAFERIPADHVVIAPSLDDALDMVAAGEADVLVGNVAAIDILLKQRYDSVLKILGTVGESDALDFAVRTDLSPLAGLIDRALLAMPPAEKQRIRQKWVTGNSPESGLWSVTAVRLLPLLIGIGVALLITLRAYLLLQREVRLRKKTELELELQLNFQETMMKMVPYPLVAIDLDGRYIAVNEAYEQACGMSREAVIGRNTVDVQTWGEANSRILTDMTREMLNGRETAQLELQFERGAGNVRHGLFWASVCRDGDGQPACVLGTVVDITDIRRAEMRARETERRLFDVTRSLPAVVFQLRRTSDGAYSFPYIGGDTRHLLGGKDGSLNRSDHVDFQRVCEEDRAFVLAELERSALCETPVNMEFRFEGDEEIKWARAELVPRREADDSVVWSGYWVDASVEHARSDELARARDLAEAAARAKDDFFAMMSHEIRTPMNGVLGLVEVLERTPLNTDQGEMLGMIHESAGALLQILDDLLDYSKIEAGRLTIEAESIDIRELVDNAVGLLAGRAHEKGLKVRVDIAPDVAATLRGDSVRLRQILFNLLGNAIKFTPQGEVDVRVSVFAQADGVQTLEMTVEDTGIGIAPEVQNRLFEPFVQAESSTTRRFGGTGLGLTICRKLIDLMGGSLALHSEPGSGTRMTVRLDMAVETQRYSVNGLRGKRGLVATGDARVAQALMHFGEALGLTLRRVPPDAPELRDRVALANLDLLFVNEDVTLPADVRPRTRVICLTEKPKPTGYRILDDNVRLSINPISWRGLGAACAAAMTGLPSVPRSAGTPRAPEGGPPPPDRERAIASGRLILVAEDHPVNQELIRHQLALLGFACDVTNDGAEALAALQRTSYGCLITDCHMPNVSGYELTRRIREGEEGGAHRLPILGITANTAPEDLNLCRDAGMDDSLVKPTRLATLRDYLSRWFGSDSAAHAAPSESVGAPAIAATDVQGGADPFVPVDLGHMTQLWGSESTVKALLDSFVSSVREDVQSLSPLLERVGSERTELERVREWLHRVAGAASVLQYPPLLMALEDYRREINVKPPERVRNDGMVLIDKCNAMLDGIEQQAALLV

SEQ ID NO: 12163 - protein, 1344 aa, Burkholderia fungorum
MNDANNISPTLGAATVPRIVAIGASAGALHALSLFFRAASTMPHDIAFAIVVHLAPGAESHLPELLAKDTSLAVSAIEDGATLCAGHVYVIPPKVSVVIEQGVFRLRPAVERPTIPMPIDEFFTSLAADQHDRAIGIVLTGANADGSAGLRAIKAAGGMVMAQSPATAEHDSMPAHAVATGLVDYVLPIEKMPAVLFDYIARSGEAMLPVSGKSGAMVDLEPVLRALAAAGSDFRGYKRGTLERRIARRMTVNQVDSLDAYCAVLRTSVEEAQALSLDMMIGVTEFFRDPEAWRALAERVLGPLLDEPGGDQPLRVWVPGCATGEEAYSMAMLLTEEIGKRKLTRSFMILASDVNRVALTRARQGIYSPGVALPVGEERLERFFRPHGNDYQIDQALRETILFTPQNLIADPPFSRVDLISCRNLLIYLEPEAQQRVFEVFHFALNPKRYLFLGRSESTDPDSGPFQEVSRAWRIYQRSPVTAAVVSGYRFSAPGGRRDEFPSASRGSNRSKGYAELVNSTLLEEHHAASVLINAAHQVLYTSGSTDEYLRQPTGEPTGNILDMAREGLRLKLRIVLRRASQDEAAGPVSEVVSDGGAPAVKITVTRPFDTAHTGKALLVIFARVPVAERPGSLAPTGVDSDLWHLESELRTTQVELGSTIEELEESNSELRVSNEEILSMNEELRSANEELETSKEELQALNEQLNLVNSQLGQKVHQLEVLSEDVANLLASTEIATLLLDRHAVIKRFTPSAARIFGLALADIDRPITNVLGNPLGDTLLEDVQRVMSAQTGQAEKEIQTLTGEWYVRRITPYIAVQGTPPAGVVVTWNDITHVKASDERSRRLAAVVQDSNDAMTVFDLNGRLIAWNRAATAIYGYTEAEALCMTVSDMLPSGARQDHLDFIRYAEHNEALHSYETQRVTKSGRVLDIWITLSILSDNQGHAVAVATTERELTDRSLSNTQLRERAERLAQADRRKNEFLAMLGHELRNPLAALCSAGDLLASESVDARQKVWAVGVIQRQGQAMTQLVNEMLDLTRIASGSIKLNRQAVTLETVVQSALEVCRPIVEERHHTLSVALPEEPVLMFVDPTRLSQVIENIVINAAKYTEPGGKIDLSATRTGRRLSLRVRDNGAGIAPSMLNTLFDMFVQGPLPHGQLHNGLGVGLSVVRRLVELHGGTVEAVSDGKTGSEFIVDLPLGLIPASPDQAGSPQNPGKAPPRRVLIIDDNADASEALAMILASEGHVVATRLDGQQGLEASTTFRPDVVLLDIGLPGMDGYEVAQKLRGSAATRDTLLVAVTGYGQPGDQLRSAAAGFDHHLVKPVDIEALKGLFAAKMKPRDA

SEQ ID NO: 12164 - protein, 192 aa, Cupressus sempervirens
DDHGEVISEIRRPDLEPYLGLHYPATDVPQASRFLFMKNKVRMICDCYANPVEVVEDKRLPRELILCGSSLRAPHGCHAEYMSNMGSIASLVIAVTINAKEEDVDTDAQQQQQKGRRLWGLVVCHHTSPRFVPFPLRYACEFLMQVFAIQLNKEVDLADQLREKHILRTQTLLCDMLLRDAPMGIIREKPNI

SEQ ID NO: 12165 - protein, 181 aa, Cupressus sempervirens
DDHGEVVAEMRRPDLEPYLGLHYPATDIPQSSRFLFLKNRVRTICDCRAPAVKVRHDESLGQVLSLQGSTLRAPFGCHAQYMANMGSIASLVMAVTVSDSEEGGRRLWGLVVCHHTTPRFVPYPLRYACEFLMQVFGIQLNKELELASRLRERHIFRTQTLLCDMLLRDAPVGIVTTTPNI

SEQ ID NO: 12166 - protein, 189 aa, Cupressus sempervirens
DEHGEVLAEIRRSDLEPYLGLHYPATDIPQASRFLFMQNKVRMISDCRADPVRIIQAEELPQRLCLVGSTLRAPHGCHAQYMANMGSIASLAMAVIVNNGNDEAGSSGRNTFKLWGLVVCHHTSPRAVPFPPLRSACEFLMQTFSLQINMEMQLATQLTENNILRTQTLLCDMLLRDAPIGIVTQSPSI

SEQ ID NO: 12167 - protein, 414 aa, Degeneria vitiensis
SGKPFYAIIHRVTGSLIIDFEPVKPYEVPMTAAGALQSYKLAAKAIAKLQALPSGSMEKLVDTIVQEVFELTGYDRAMAYKFHEDDHGEVISEVTKPGLEPYLGLHYPATDIPQAARFLFMKNKVRMICDCHAKPVEVYQDEKLTFDLTLCGSTLRAPHSCHLQYMENMDSIASLVMAVVINEGEDESGGPEQQQQQLKRKRLWGLVVCHNMTPRFVPCPLRYACEFLMQVFAIHVNKEFELENQIREKNILRTQTMPCDMLLRDAPLGIVTQSPNIMDLVKCDGAALLYNNKIWRLGFTPTESQIHDISIWLSEYHTDSTGLSTDSLRDAGYPDALALGDVVCGMAAVRISPKDMLFWFRSPTAAEVRWGGAKHDPCDKDDGRRMHPRSSFKAFLEVVKTRSLPWKDYEMDGI

SEQ ID NO: 12168 - protein, 393 aa, Degeneria vitiensis
DLEPVNPADVPVTAAGALKSYKLAAKAISRLQSLPSGNISLLCDVLVREVSELTGYDRVMAYKFHEDEHGEVIAESRRSDLEPYLGLHYPATDIPQASRFLFMKNKVRMICDCSAPPVKVIQDKRLAQPLSLCGSTLRAPHGCHTQYMANMGSISSLVMSVTINEDDDDMLSEQQQKGRKLWGLVVCHHTSPRFIPFPLRYACEFLIQVFGIQLNKEVELAAQMREKHILRMQTVLCDMLLRDTPVGIITQSPNVMDLVNCDGAALYYRNQFWLLGTTPTEAQIRDIAGWLVEYHDGTTGLSTDSLTEAGYPSAADLGDDVCGMATVKITSKDFLFWFRSHTGKEIKWGGAKHDPVDKDDDGRKMHPRSSFKAFLEVVKQRSLPWEDVEMDAI

SEQ ID NO: 12169 - protein, 105 aa, Flagellaria indica
QAARFLFMKNKVRMICDCRAKPVKIYQDESLPFDISLCGSTLRAPHSCHLQYMENMNSIASLVMAVVVNERGEEDEPEPGQPQQQKRKRLWGLVVCHNESPRFVP

SEQ ID NO: 12170 - protein, 107 aa, Flagellaria indica
QASRFLFMKNKVRMICDCSAPPVKVVQDDRLPQPLSLCGSTLRAPHGCHAQYMANMGSTASLVMSVTVNEEGDDDTGSDQQQQQQQQRGRKLWGLVVCHHTSPRFVP

SEQ ID NO: 12171 - protein, 98 aa, Flagellaria indica
SRFLIKQNRVRMIADCHAPSVRVIQEPSLPQPLCLVGSTLRSPHACHAQYMANMGSIASLVMAVIISSSSDDSSSAVSSGTKLWGLVVCHHTSPRCIP

SEQ ID NO: 12172 - protein, 414 aa, Idiospermum australiense
SGKPFYAIIHRVTGSLIIDFEPVKPYEAPMTAAGALQSYKLAAKAITRLQSLPSGSMERLVDTVVQEVFELTGYDRVMAYKFHEDDHGEVISEITKPGLEPYLGLHYPATDIPQAARFLFMKNKVRMICDCHARPVKVYQDEKLTFDLTLCGSTLRAPHSCHLQYMENMDSIASLVMAVVINEGEEDDEVESAQQQQQKRKRLWGLVVCHNTTPRFVPFPLRYACEFLMQVFAIHVSKEFELENQLREKNILRTQTLLCDMLLRDAPLGIVTQSPNIMDLVKCDGAALLYGSKIWRLGLTPTDSQIQDIAMWLSEYHMDSTGLSTDSLYDAGYPKALSIDDVVCGMAAVRITAKDMLFWFRSHAAAEVRWGGAKHDPSDKDDGRRMHPRSSFKAFLEVVKTRSLPWKDNEMDAI

SEQ ID NO: 12173 - protein, 395 aa, Idiospermum australiense
DLEPVNPADVLVTAAGGLKSYKLAAKAISKLQSLPSGNISLLCDVLVREVSELTGYDRVMAYKFHEDEHGEVIAECRRSDLEPYIGLHYPATDIPQASRFLFRKNKVRMICDCLAPPVKVIQDKRLAQPLSLCGSTLRAPHGCHAQYMANMNSIASLVISVTVHEDDNETGSEQQQQPKGRKLWGLVVCHHTSPRFVPFPLRYACEFLIQVFGIQLNKEIELAAQMNEKHILRTQTVLCDMLQRNAPVGIITQTPNVMDLVKCDGAALYYRNQFWLLGTTPTEAQIRDIVEWLMEYHSSSTGLSTDSLMEAGYQGAAILGDAVCGMAAIRITSKDFLFWFRSHTAKEIKWGGAKHDPVDQDDDGRKMHPRSSFKAFLEVVKRRSLPWEDVEMDAI

SEQ ID NO: 12174 - protein, 465 aa, Tetracentron sinense
SGKPFYAIVHRVTGSLIIDFEPVKPYEVPMTAAGALQSYKLAAKAIARLQSLPSGSIERLCDTVVQEVFELTGYDRAMVYKFHEDDHGEVVSEITKPGLEPYLGLHYPATDIPQAARFLFMKNKVRMICDCRAKHVKVLQDEKLPFDLTLCGSTLRAPHSCHLQYMENMNSIASLVMAVVVNEEDEEGESSSSEQSQKRKKLWGLLVCHHTTPRFVPFPLRYACEFLAQVFAIHVNKELELENQILEKNILRTQTLLCDMLMRDAPLGIVSQSPNIMDLVKCDGAVLLYKNRIWQLGSTPSEFHIHDITSWLSEYHMDSTGLSTDSLYDAGFPGALALGDGVCGMAAVRITSKDMLFWFRSHTAAEVRWGGAKHEPGEKDDGRKMHPRSSFKAFLEVVKTRSLPWKDYEMDAIHSLQLILRNAFKDVENEGLNTSTIRTQLNDLSIEGTEELEAVTNEMVRLMET

SEQ ID NO: 12175 - protein, 390 aa, Tetracentron sinense
DLEPVNPADVPVTAAGALKSYKLAAKAISRLQSLPSGNLSLLRDVLVQEVSDLTGYDRVMVYKFHEDEHGEVVAECLISDLEPYLGLHYPATDIPQASRFLFMKNKIRMICDCLAPPVKVIQDKRLVQPLSLCGSTLRAPHGCHAQYMENMGSIASLVMSVTINDDDDEIESDKRGRKLWGLVVCHHTSPRFVPFPLRYACEFLIQVFGIQLNKEVELVAQLREKQTLRTQTVLCDMLLRDAPVGIVTQSPNVMELVKCDGAALYYRSTFWLLGVTPTEAQIRDIAEWLLEYHNGSTGLSTDSFMEAGYPGAAVLGDAVCGMSAVKITSKDFLFWFRSHTAKEIKWGGAKHDPFDKDDGKKMHPRSSFKAFLEVVKWRSLPWEDMEMDAI

SEQ ID NO: 12176 - protein, 465 aa, Xanthorhiza simplicissima
SGKPFYAIVHRVTGSLIIDFEPVKPYEVPMTAAGALQSYKLAAKAIARLQSLPSGSIERLCDTVVQEVFELTGYDRAMVYKFHEDDHGEVVSEITKPGLEPYLGLHYPATDIPQAARFLFMKNKVRMICDCRAKHVKVLQDEKLPFDLTLCGSTLRAPHSCHLQYMENMNSIASLVMAVVVNEGDEEGESSSSEQSQKRKKLWGLLVCHHTTPRFVPFPLRYACEFLAQVFAIHVNKELELENQILEKNILRTQTLLCDMLMRDAPLGIVSQSPNIMDLVKCDGAVLLYKNRIWQLGSTPSEFHIHDITSWLSEYHMDSTGLSTDSLYDAGFPGALALGDGVCGMAAVRITSKDMLFWFRSHTAAEVRWGGAKHEPGEKDDGRKMHPRSSFKAFLEVVKTRSLPWKDYEMDAIHSLQLILRNAFKDVENEGLNTSTIRTQLNDLSIEGTEELEAVTNEMVRLMET

SEQ ID NO: 12177 - protein, 391 aa, Xanthorhiza simplicissima
DLEPVNPADVPVTAAGAMKSYKLAAKAISRLQSLPSGNITVLCDVLVQEVSDLTGYDRVMVYKFHEDDHGEVVAECRVPELEPYLGLHYPATDIPQASRFLFMKNKVRMICDCSAAPVKVIQDNKLAQPLSLGGSALRAPHGCHALYMANMGSVASLVMSVTINEDDDQMETDQQKGRKLWGLLVCHHTRPRFVPYPLRYACEFLIQVFGMQINKEVELATQFREKHILQTQTVLCDMLLRDAPIGIVTQSPNIMDLVKCNGGALYYRSRFWLLGVTPTEAQIKDIAEWLLQYHNASTGLSTDSLMEAGFPGASVLGNEVCGMAAIKITTKDFLFWFRSHTAKEVKWGGAKHNPTEKDDGWKMHPRSSFKAFLEVVKHRSLPWEDVEMDAI

SEQ ID NO: 12178 - protein, 197 aa, Chara foetida
DEHGEVIAEIRRADLEPYLGLHYPATDVPQAARFLFMKSRIRMIADCSAPQVKVLQDKSHVQLISLSGSTIRGVHGCHAQYMKNMGSAASLVMAVIINDAEDEGGGSGGGGASASITPRGRKLWGLVVCHHATPRVVPFPLRAACEFLMQVFGLQLNMEVELAAQIREKHILRTQTLLCDMLLRDAPTGIVTQSPNI

SEQ ID NO: 12179 - protein, 190 aa, Marsilea quadrifolia
DEHGEVVAEIRKSDLEPYLGLHYPATDIPQASRFLFMKNRVRMICDCRSNPVRVIQDKNLRQPLSLAASTLRAPHGCHSQYMANMGSIASLVMAVIVNDNEEETSNRNQQPKMRKLWGLVVCHHTTPRAVPFQLRSACEFLMQVFGLQLNMELELAAQMREKHILRTQTLLCDMLLRDAPIGIVSESPNI

SEQ ID NO: 12180 - protein, 190 aa, Angiopteris evecta
DEHGEVVAEIRRSDLEPYLGLHYPATDIPQASRFLFMKNRVRMICDCRTPPVRVLQDKELRQPLSLAGSTLRAPHGCHSQYMANMGSIASLVMAVVVNDNDEDSSNRASHQKSRKLWGVVVCHHTTPRAVPFPLRSACEFLTQVFGLQLNMEVELAAQMREKHILRTQTLLCDMLLRDAPIGIVTQSPNI

SEQ ID NO: 12181 - protein, 190 aa, Angiopteris evecta
DEHGQVVAEIRRLDLQPYLGLHYPATDIPQASRFLFMKNRVRMICDCCAPPVKVIQDKELRLPLSLAGSTLRAPHGCHAQYMATMGSIASLVMAVVVNDNDENSTTRAHQPKNRKLWGLVVCHHTTPRAVPFPLRSACEFLMQVFGLQLNMEVELAAQMREKHILRTQTLLCDMLLRDAPIGIVTQSPNI

SEQ ID NO: 12182 - protein, 190 aa, Angiopteris evecta
DDHGEIFAEIRRSNLEPYLGLHYPATDIPQASRFLFMKNRVRMICDCSASPVKVIQDEKLGQPLSLTSSTLRAPHGCHSLYMGNMGSIASLVMAVVINDNEDDISNNGHAYQGRRLWGLVVCHHTAPRFVPFPVRSACEFLMQVFGLQLNMEVGLAAQVREKHILKTQTVLCDMLLRDAPIGIVSKSPNM

SEQ ID NO: 12183 - protein, 466 aa, Aristolochia grandiflora
SGKPVYAIIHRVTGSLIIDFEPVKPYEAPMTAAGALQSYKLAAKAISRLQSLPSGSMERLVDTVVQEVYELTGYDRVMAYKFHDDDHGEVISEVTKPDLEPYLGLHYPATDIPQAARFLFMKNKVRMICDCYAKPVKVFQDEKLSFDLTLCGSTLRAPHSCHLQHMKNMSSIASLVMAVVVNEGEEDDNPDPNQQQQVPKRKRLWGLVVCHNTTPRFVPFPLRYACEFFMQVFAIHVNNEIELENQIREKNILRTQTLLCDMLLRDSPLSIVTRSPNIMDLVKCDGAALMYQNKVYTLGLSPTESQISEINRWLLEYHMDSTGLSTDSLHDAGYPNAPSLGDIVCGMAAVRITSTDMLFWFRSHTAGEVRWGGAKHDPSDKDDGRRMHPRSSFKAFLEVVKNRSLPWKDYEMDAIHSLQLILRGSTKETAAIDTKTVISSQLNNLKLDGLHELQAVTNEMVRLMET

SEQ ID NO: 12184 - protein, 392 aa, Aristolochia grandiflora
DLEPVNLADAQVSASGALKSYKLAAKAISRLQSLPSGNIVLLCDVLVREVRDLTGYDRVMAYKFHEDEHGEVIAECKRPDLEPYLGLHYPATDIPQASRFLFMKNKVRMIYDCSATPVSVIQDKGLAQPLCLGGSTLRAPHGCHSQYMANMGSIASLVMSVTINEDDDEKGSGQRGRKLWGLVVCHHCSPRFIPFPFRYACDFLMQVFGIQINKEVELAAQVREKHILRTQTLLCDMLLRDAPMGIVNKSPNVMDLVKCDGAALYYQNKFWLLGTTPTEAQIRDLAQWLLQYHNNTTGLSTDSLVEAGYPGAQDLGDAVCGMAAVKITSRDFLFWFRSHAGKEIKWGGAKHDPKEHDGDGKKLHPRSSFNAFLEVVKWRSTPWEDVEMDAIQ

SEQ ID NO: 12185 - protein, 463 aa, Dioscorea elephantipes
SGKPFYAIMHRIDVGLVIDLEPVNPADVPVTAAAALKSYKLAAKAISRLQSLPSGNIPLLCDVLVKEVSELIGYDRVMAYKFHEDEHGEVIAECRRSDLEPYLGLHYPATDIPQASRFLFMKNKVRMICDCSAPPVKVIQDKRLPQPLSLGGSTLRAPHGCHAQYMANMGSIASLVMSVTINEDDDETGSGDQQQNGMKLWGLVGCHHTSPRFVPFPLRYACEFLLQVFGIQLNKEVELATQQREHILRTQLSCDMLLRDAPIGYLLNSPNVMDLVKCDGAALYYKNQFWLLEITPTEAQIRDIFAWLLEYHNSTTGLSTNSLTEAGYPGAVELGDAVCSMAATKITSKDFIFWFRSHTSKEIKWGGAKHDPGDRTDEGRKMHPRSSFKAFLEVVKRRSLPWEDVDMDAIHSLQLILRGSLQDEPVTDNSKTIVNATPDDAKQIQHMDELRIVTTEMVRLMET

SEQ ID NO: 12186 - protein, 366 aa, Dioscorea elephantipes
SGKPFYAIVHRVTGCLIFDFEPVKLSDIPTSTTASGALQSYKLAAKAIARPQSLPGGSMDTLCETLVEEVFQFTGYDRVMVYKFHEDDHGEVYQEITKPGMVPYLGLHYPATDIPQAARFLFIKNKVRMICDCRAKHVNIHQDETLLFDITFCGSTLRAAHNCHLQYMSNMNSIASLTMAVVVNEGEEEDDHLEPGQSSQQQQQQQQQQQQQQQKRKHLWGLVVCHNESPRFLPFPMRYACQFLMQVFSVHVTKELELENQIREKNILRTQTLLCDMLLRDTAPVGIITQSPNIMDLVKCDGAALLYDDRIWRLGLTPTKEQIRSIAHWLAEHHMAPTALSTDSLQDAGYPDAQALGDLVCGMAAA

SEQ ID NO: 12187 - protein, 459 aa, Illicium oligandrum
SGKPFYAIMHRIDVGLVIDLEPVNPADVPITAAGALKSYKLAAKAISRLQSLPSGNIGILCDVLVREVSELTGYDRVMAYKFHEDEHGEVIAEYRRTDLEPYLGLHYPATDIPQASRFLFMKNKVRMICDCYAPPVKVIQDKKLAQPLSLGGSTLRAPHGCHAQYMANMGSIASLVMSVTINEDYDETSSNQQKGRKLWGLVVCHHTSPRFVPFPLRYACEFLLQVCGIQLNKEVELVAQMKEKHILKTQTLLCDMLLRDAPIGIMTKSPNVMDLVKCDGAALYYGKQLWLLGITPTEAQIRDITEWLLECHDSTTGLSTDSLMEAGYPGATTLGDTVCGMAAIKVASKDFLFWFRSHTAKEIKWGGSKHDPADKDGKKMHPRSSFKAFLEVVKRRSLPWEDVEMDAIHSLQLILRGSLQQVLESETKAIVDARLDDEQIQGPDELRIVTNEMVRLIET

SEQ ID NO: 12188 - protein, 374 aa, Canotia holacantha
ALSIAGAVESQKLAVRAISHLQSLPGGDIKLLCATVVESVRDLTGYDRVMVYKFHEDEHGEVVAESKRPGLEPYIGLHYPATDIPQASRFLFKQNRVRMIVDCCASPVGVIQDDGLMQPLCLVGSTLRAPHGCHAQYMENMGSKASLAMAVIINGKDEEIVGGRNATRLWGLVICHHTSARCIPFPLRYACEFLMQAFGLQLNMELQLAAQLSEKHVLKTQTLLCDMLLRDSPTGIVTQSPSIMDLVECDGAALYYQGKYYPSGVTPSEAQTKDIVEWLLAFHGDSTGLSTDSLADAGYPGAAFLGDAVCGMAVAYITNRDFLFWFRSHTTKEIKWGGAKHHPEDKDDGQRMHPRSSFKAFLEVVKSRSLSWEN

SEQ ID NO: 12189 - protein, 358 aa, Canotia holacantha
ESQKLAVRAISHLQSLPGGDIKLLCATVVESVRDLTGYDRVMVYKFHEDEHGEVVAESKRPDLEPYIGLHYPATDIPQASRFLFKQNRVRMIVDCCASPVGVIQDDGLMQPLCLVGSTLRAPHGCHAQYMENMGSKASLAMAVIINGKDEEIVGGRNATRLWGLVVCHHTSARCIPFPLRYACEFLMQAFGLQLNMELQLAAQLSERHVLKTQTLLCDMLLRDSPTGIVTQSPSIMDLVKCDGAALYYQGKYYPSGVTPSEAQIKDIVEWLLAFHGDSTGLSTDSLADAGYPGAAFLGDAVCGMAVAYITNRDFLFWFRSHTTKEIKWGGAKHHPEDKDDGQRMHPRSSFKAFLEVVK

SEQ ID NO: 12190 - protein, 245 aa, Gymnosporia mossambicensis
ALSIAGAVQSQKLAVRAISQLQSLPGGDIKLLCDTVVESIRNLTGYDRVMVYKFHEDEHGEVVAESKRSDLEPYIGLHYPASDIPQASRFLFKQNRVRMIVDCHASPVRVIQDDGLMQPLCLVGSTLRAPHGCHAQYMENMGSLASLAMAVIINGNEEEAIGGRSPTRLWGLVVCHHTSARCIPFPLRYACEFLMQAFGLQLNMELQLAAQLLEKHVLKTQTLLCDMLLRDSPTGIVTQSPSIMD

SEQ ID NO: 12191 - protein, 245 aa, Gymnosporia mossambicensis
ALSIAGAVQSQKPAVRAISQLQSLPGGDIKLLCDTVVESVRNLTGYDRVMVYKFHEDEHGEVVAESKRSDLEPYIGLHYPASDIPQASRFLFKQNRVRMIVDCHASPVRVIQDDGLMQPLCLVGSTLRAPHGCHAQYMENMGSLASLAMAVIINGNEEEAIGGRSPTRLWGLVVCHHTSARCIPFPLRYACEFLMQAFGLQLNMELQLAAQLLEKHVLKTQTLLCDMLLRDSPTGIVTQSPSIMD

SEQ ID NO: 12192 - protein, 360 aa, Wimmeria acuminata
AVQSQKLAVRAISQLQSLPGGDIKLLCDTVVESVRHLTGYDRVMVYKFHEDEHGEVVAERKRPDLEPYIGLHYPATDIPQASRFLFKQNRVRTIVDCHASPVRVIQDDGLMQPLCLVGSTLRAPHGCHAQYMENMGSIASLAMAVIINGNDEEVIGVRNATRLWGLVVCHHTSARCIPFPLRYACEFLMQAFGLQLNMDLQLAAQLSEKHVWKTRTLLCDMLLRDSPAGIVTQSPSIMDLVKCDGAALYYQGNYYPLGVTPTEAQITDIVGWLLDFHGDSTGLSTDSLADAGYPGAALLGDAVCGMAVAYITNRDFLFWFRSHTAKEIKWGGAKHHPEDRDDGQRMHPRSSFQAFLEVVK

SEQ ID NO: 12193 - protein, 465 aa, Heuchera canadensis
SGKPFYAIVHRVTGSLIIDFEPVKPYEVPMTAAGALQSYKLAAKAITRLQALPSGSVERLCDTMVQEVFELTGYDRVMAYKFHDDDHGEVVSEITKPGLEPYLGLHYPATDIPQAARFLFMKNKIRMICDCRAKHVKVLQDEKLPFDLTLCGSTLRAPHSCHLQYMENMNSIASLVMAVVVNDGDDESESSNPAQPSKRKRLWGLVVCHNTTPRFVPFPLRYACEFLAQVFAIHVSKELELENQILEKNILRTQTLLCDMLMRDAPLGIVSQSPNIMDLVKCDGAALLYKDKIWRLGVVPTDSQLQDIASWLSKYHMDSTGLSTDSLYDAGFSRALSLGDVVCGMAAVKINSNDILFWFRSHTAAEIRWGGAKHETGEKDDNRKMHPRSSFKAFLEVVKTRSLPWKDYEMDAIHSLQLILRNTFKDIETVDANTNKIHTKLSDLKIEGMQELEAVTSEMVRLIET

SEQ ID NO: 12194 - protein, 435 aa, Heuchera canadensis
SGKPFYAIIHRIDVGLVIDLEPVNPADVPITAAGALKSYKLAAKAISRLQSLPNGNITLLCDVLVKEVSDLTGYDRVMVYKFHEDEHGEVIAESCRPDLEPYLGLHYPATDIPQASRFLFMKNKVRMICDCLASSVKVIQDKRLPQPLSLCGSTLRSPHGCHTQYMANMGTIASLVMSVTINEEDDEMVTDQPKGRKLWGLVVCHHTSPRFVPFPLRYACEFLIQVFGVCINKEVELASQTREKHILQTQTVLCDMLLRNAPVGIVTQSPNVMDLVKCDGAALYYKKKAWLLGSTPTDAQIRDITDWLLEYHGGSTGLSTDSLVEAGYPDALNLGDAVCGMAAIKITSNDFLFWFRSHTAREIKWGGAKHDPDEKDDGRKMHPRSSFKAFLEVVKRRSLPWEDVEMDVIHSLQLILRGSLQDETVDDSKTIVNES

SEQ ID NO: 12195 - protein, 465 aa, Pachysandra americana
  unsure (1)..(465): unsure at all Xaa locations
SGKPFYAIVHRVTGSLIIDFEPVKPYEVPMTAAGALQSYKLAAKAIARLQSLPSGSMERLCDTMVQEVFELTGYDRVMAYKFHEDDHGEVVSEITKPGLEPYLGLHYPATDIPQAARFLFMKNKVRMICDCNAKHVKVLQDEKLPFDLTLCGSTLRAPHSCHLQYMDNMGSIASLVMAVVINEGDEDGEGSDPAQPQKRKRLWGLVVCHNTSPRFVPFPLRYACEFLAQVFXIHVNKEIGLENQILEKNILRTQTLLCDMLMRDAPLGTVSQSPNIMDLVKCDGAALLYKNKIWRLGMAPGDFQINDISSWLSEYHMDSTGLSTDSLYDAGYPGALALGDVVCGMAAVRITTKDMLFWFRSHTAGEVRWGGAKHERGEKDDGRRMHPRSSFKAFLEVVKTRSLPWKDYEMDAIHSLQLILRNAFRDVETMDLDTNTIRMQLNDLKIKGMEELEAVTNEMVRLMET

SEQ ID NO: 12196 - protein, 412 aa, Pachysandra americana
SGKPFYAIMHRIDVGLVIDLEPVNPADVPVTAAGALKSYKLAAKAISKLQSLPSGNISLLCDVLVKEVNELTGYDRVMVYKFHEDEHGEVVAECRRTDLEPYLGLHYPATDIPQASRFLFLKNKVRMICDCLAPPIRVIQDKRLEQPLSLCGSTLRAPHGCHAQYMENMGSIASLVMSVTINEDDDDDDVESDQQKGRKLWGLVVCHHTSPRFVPFPLRYACEFLIQVFGIQINKEVELAAQTKEKHILRNQTMLCDMLLRESPVGIVTKSPNVIDLVKCDGAALYYKNKFWLLGVTPTEAQIRDISEWLIEYHNGSTGLSTDSLMEAGYPGASVLGDAVCGMAAIKITSKEFLFWFRSQTAKEIKWGGAKHEPFNKDDARKMHPRSSFKAFLEAVKQRCLPWEDVEMDAIQ

SEQ ID NO: 12197 - protein, 466 aa, Hedyosmum sp. SM-2000
SGKPFYAIIHRVTASFIIDFEPVKPYEVPMTAAGALQSCKLAAKAISRLQSLPGGSMERLCETVVQEVFELTGYDRVMAYKFHEDDHGEVFSEITKPGLEPYLGLHYPATDIPQAARFLFMKNKVRMICDCHAKPVKVFQDEKLTFDLTLCGSTLRAPHSCHLQYMANMSSIASLVMAVVVNEGEDEGENVDSGQQQQQKRKRLWGLVVCHNTTPRFVPFPLRYACEFLIQVFAIHVNKEIELESQIREKNIFRTQTLLCDTLMRDAPLGIISQNPNILDLVKCDGAALLYKSKVWRLGLTPNEPQIHDISLWLSEYHMDSTGFSTDSLHEAGYQGAVALGNIVCGMAAVWITSKDMLFWFRSHTAAEVRWGGAKHDPDDTDDNRRMHPRSSFKAFLEVVKKRSIPWKDYEMDAIHSLQIILRGNFSDSEKTHANTTFDSRLNDLKLEGMEELQAVTNEMVRLIET

SEQ ID NO: 12198 - protein, 397 aa, Hedyosmum sp. SM-2000
DLEPVNPAEVPVIAAGALKSYKLAAKAISKLRSLPSGNISLLCDVLVREVSELTGYDRVMAYKFHEDEHGEVIAECRRSDLEPYLGLHYPATDIPQASRFLFMKNKVRMICDCSAPPVKVIQDKRLGQPLSLCGSTLRAPHGCHAQYMTNMGSIASLVMSITINEDDEETDNEQQLQQEKPKKLWGLVVCHHTSPRFIPFPLRYACEFLIQVFGIQLNKEVELAAQVREKHTLKTQTVLCDMLLRDAPMGILTQSPNVMDLVKCDGAALNYKNQFWLLGTTPTEAQIKDLAEWLLECHDGTTGLSTDSLTEAGYPGSYVLGDAVRGMAAVKITSKDFLFWFRSHSAKEIKWGGAKHDPIDKDDDGRKMHPRSSFKAFLEVVRQRSVPWEDIEMDAIQ

SEQ ID NO: 12199 - protein, 373 aa, Paspalum simplex
ALFVAGGLQAHKLAVRAISRLQALPGGDVKLLCDTVVELVRDLTGYDRVMVYRFHEDEHGEVVAESRRENLEPYLGLHYPATDIPQASRFLFRQNRVRMIDDCHATPVRVIQDPGLSQPLCLVGSTLRAPHGCHAQYMATWVQLHRLLWQSSFGGDDEQTRGGISSAMKLWGLVVCHHTSPRFIPFSLRYACEFLMQAFGLQLNMELQLARQLSEKHILRTQTLLCDMLLRDSPTGIVTQSPSIMDLVKCDGAALYYHGKYYPWGVTPTESQIKDIIEWLTVCHGDSTGLSTDSLADAGYLGAAALGDAVCGMAVAYITPSDYLFWFRSHTAKEIKWGGAKHHPEDKDDGQRMHPRSSFKAFLEVVKSRSLPW

SEQ ID NO: 12200 - protein, 392 aa, Acmanthera latifolia
DLEPVNPADVPVTAAGALKSYKLAARAISRLQSLPSGNISLLCDVLVKEVRDLTGYDRVMVYKFHEDEHGEVVSECRRPDLEAYLGLHYPATDIPQASRFLFMKNKVRMICDCLAPPVKVFQDKRLAQPLGLCGSTLRSPHGCHAQYMANMGAIASLVMSVTINEGDDMIDGDQQQMARKLWGLVVCHHTSPRFVPFPLRYACEFLIQVFGVQINKEVELAAQVREKHILRTQTLLCDMLLRDAPVAIVTQSPNVMDLVKCDGAALYYRKKFWLLGVTPTEVQIKEIAEWLIEYHSGNTGLSTDSLMEAGYPGASVLGDAVCGMAAVKITSKDFLFWFRSHTAKEIKWGGAKHDPDDKDDGRKMHPRSSFKAFLEVVKWRSLPWEDMEMDAI

SEQ ID NO: 12201 - protein, 392 aa, Acridocarpus natalitius
DLEPVNPADVPVTAAGALKSYKLAAKAISRLQSLPSGNISLLCDVLVKEVRDLTGYDRVMVYKFHEDEHGEVVSECRRSDLEAYLGLHYPATDIPQASRFLFMKNKVRMICDCLAPPIKVIQDERLPQPLSLGGSTLRSPHGCHAQYMANMGTIASLVMSVTINEDDDMMDGDQQQMARKLWGLVVCHHTSPRFVPFPLRYACEFLIQVFGVQINKEVELAAQVREKHILQIQTLLCDMLLRDAPVAIITQSPNVMDLVKCDGAALYYKKKFWLLGITPTEAQIRDIVEWLLEFHSGNTGLSTDSLMEAGYPGASVLGDAVCGMAAVSITSKDFLFWFRSHTAKEIKWGGAKHDPDVKDDGRKMHPRSSFKAFLEVVKWRSLPWEDVEMDAI

SEQ ID NO: 12202 - protein, 392 aa, Aspicarpa brevipes
DLEPVNPADVHVTAAGALKSYKLAAKAISRLQSLPSGNVSLLCDVLVKEVRDLTGYDRVMMYKFHEDEHGEVVSECRRSDLESYLGLHYPATDIPQASKFLFIKNKVRMICDCLAPSVKVIQDERLTQPLSLCGSTLRSPHGCHAQYMTNMGAIASLVMAVTVNEDEDTMDGDQQHMTRKLWGLVVCHHTSPRFVPFPLRYACEFLIQVFGVQVTKEVELAAQVREKHSLQIQTMLCDMLLRDALVAIITQSPNVMDLVKCDGAALYFKNKTWFLGVTPTEEQIRGIAEWLLKYHSGNTGLSTDSLMEAGYPGASGLGDAVCGMAAVSITSRDFLFWFRSHTAKEIKWGGAKHDPDDKDDLRKMHPRSSFKAFLEVVKWRSTPWEDIEMDAI

SEQ ID NO: 12203 - protein, 392 aa, Aspidopterys elliptica
DLEPVNPADVPVTAAGALKSYKLAAKAISRLQSLPSGNISLLCDVLVKEVRDLTGYDRVMVYKFHEDEHGEVVSECLRSDLESYLGLHYPATDIPQASRFLFMKNKVRMICDCVAPPVKVIQDERLPQPLSLCGSTLRSPHGCHAQYMTNMGIIASLVMSVTVNEDDDMVDGDQPQMARKLWGLVVCHHTSTRFVPFPLRYACEFLIQVFGVQINKEVELAAQVREKHILQIQTMLCDMLLRDAPVAIITQSPNVMDLVKCDGAALYFKNKTWLLGVTPTEEQIRDIAEWLLEYHSGNTGLSTDSLMEAGYPGASALGDAVCGMAAVSITSRDFLLWFRSHTAKEIKWGGAKHDPDDKDDGRKMHPRSSFKAFLEVVKWRSMPWEDIEMDAI

SEQ ID NO: 12204 - protein, 392 aa, Blepharandra heteropetala
DLEPVNPADVPVTAAGALKSYKLAARAISRLQSLPSGNISLLCDVLVKEVRDLTGYDRVMVYKFHEDEHGEVISECRRPDLEAYLGLHYPATDIPQASRFLFMKNKVRMICDCLAPAVKVIQDERLPQALSLCGSTLRSPHGCHAQYMANMGTIASLVMSVIINEDNDMMDGDQQHIARKLWGLVVCHHTSPRFVPFPLRYACEFLIQVFGVQINKEVELAAQVREKHILRTQTLLCDMLLRDAPVAIITQSPNVMDLVKCDGAALYYRKKFWLLGVTPTEVQIRDIAEWLLEYHGGNAGLSTDSLMEAGYPGASDLGNAVCGMAAVRITSRDFLFWFRSHTAKEIKWGGAKHHPNDKDDVRKMHPRSSFKAFLEVVKWRSLPWEDIEMDAI

SEQ ID NO: 12205 - protein, 392 aa, Blepharandra heteropetala
DLEPVNPADVPVTAAGALKSYKLAARAISRLQSLPSGNISLLCDVLVKEVRDLTGYDRVMVYKFHEDEHGEVISECCRPDLEAYLGLHYPATDIPQASRFLFMKNKVRMICDCLAPAVKVIQDERLPQALSLCGSTLRSPHGCHAQYMANMGTIASLVMSVIINEDNDMMDGDQQHIARKLWGLVVCHHTSPRFVPFPLRYACEFLIQVFGVQINKEVELAAQVREKHILRTQTLLCDMLLRDAPVAIITQSPNVMDLVKCDGAALYYRKKFWLLGVTPTEVQIRDTAEWLLEYHGGNAGLSTDSLMEAGYPGASDLGNAVCGMAAVRITSRDFLFWFRSHTAKEIKWGGAKHHPNDKDDVRKMHPRSSFKAFLEVVKWRSLPWEDIEMDAI

SEQ ID NO: 12206 - protein, 392 aa, Blepharandra heteropetala
DLEPVNPADVPVTAAGALKSYKLAARAISRLQSLPSGNISLLCDVLVKEVRDLTGYDRVMVYKFHEDEHGEVISECCRPDLEAYLGLHYPATDIPQASRFLFMKNKVRMICDCLAPAVKVIQDERLPQALSLCGSTLRSPHGCHAQYMANMGTIASLVMSVIINEDNDMMDGDQQHIARKLWGLVVCHHTSPRFVPFPLRYACEFLIQVFGVQINKEVELAAQVREKHILRTQTLLCDMLLRDAPVAIITQSPNVMDLVKCDGAALYYRKKFWLLGVTPTEVQIRDIAEWLLEYHGGNAGLSTDSLMEAGYPGASDLGNAVCGMAAVRITSRDFLFWFRSHTAKEIKWGGAKHHPNDKDDVRKMHPRSSFKAFLEEVKWRSLPWEDIEMDAI

SEQ ID NO: 12207 - protein, 392 aa, Blepharandra heteropetala
DLEPVNPADVPVTAAGALKSYKLAARAISRLQSLPSGNISLLCDVLVKEVRDLTGYDRVMVYKFHEDEHGEVISECCRPDLEAYLGLHYPATDIPQASRFLFMKNKVRMICDCLAPAVKVIQDERLPQALSLCGPTLRSPHGCHAQYMANMGTIASLVMSVIINEDNDMMDGDQQHIARKLWGLVVCHHTSPRFVPFPLRYACEFLIQVFGVQINKEVELAAQVREKHILRTQTLLCDMLLSDAPVAIITQSPNVMDLVKCDGAALYYRKKFWLLGVTPTEVQIRDIAEWLLEYHGGNAGLSTDSLMEAGYPGASDLGNAVCGMAAVRITSRDFLFWFRSHTAKEIKWGGAKHHPNDKDDVRKMHPRSSFKAFLEVVKWRSLPWKDVEMDAI

SEQ ID NO: 12208 - protein, 392 aa, Burdachia sphaerocarpa
DLEPVNPADVPVTAAGALKSYKLAAKAISRLQSLPSGNISLLCDVLVKEVRDLTGYDRVMVYKFHDDEHGEVVSECRRSDMESYLGLHYPATDIPQASRFLFMKNKVRMICDCLAPPVKVIQDERLPQPLSLCGSTLRSPHGCHAQYMVNMGAIASLIMSVTINEDDDTIDGDEQQMARKLWGLVVCHHTSPRFVPFPLRYACEFLIQVFGVQITKEVELAAQVREKHILRIQTLLCDMLLRDAPVAIITQSPNVMDLVKCDGAALYYKKKFWLLGVTPTEAQIRDIAEWPVEYHSGNTGLSTDSLMEAGYSGASSLGDAVCGMAAVSITSRDFLFWFRSHTAKEIKWGGAKHDPADKDDGRKLHPRSSFKAFLEVVKWRSLPWEDMEMDAI

SEQ ID NO: 12209 - protein, 392 aa, Callaeum septentrionale
DLEPVNPADVPVTAAGALKSYKLAAKAISRLQSLPSGNISLLCDVLVKEVRDLTGYDRVMVYKFHEDEHGEVVSECRRSDLESYLGLHYPATDIPQASRFLFMKNKVRMICDCLAPPVKVIQDERLPQPLSLCGSTLRSPHGCHAQYMTNMGTIASLVMSVTINEDDDMMDGDQQQMTRKLWGLVVCHHTSPRFVPFPLRYACEFLIQVFGVQINKEVELAAQVREKHILQIQTMLCDMLLRDAPVAIITQSPNVMDLVKCDGTALYFKNKTWLLGVTPTEEQIRDIAEWLLEYHSGNTGLSTDSLMEAGYPGASVLGDAVCGMAAVSITSRDFLFWFRSHTAKEIKWGGAKHDPDEKDDGRKMHPRSSFKAFLEVVKWRSMPWEDIEMDAI

SEQ ID NO: 12210 - protein, 392 aa, Caucanthus auriculatus
DLEPVNPADVPVTAAGALKSYKLAAKAISRLQSLPSGNISLLCDVLVKEVRDLTGYDRVMVYKFHEDEHGEVVSECHRSDLESYLGLHYPATDIPQASRFLFMKNKVRMICDCVAPPVKVIQEERLPQPLSLCGSTLRSPHGCHAQYMTNMGIIASLVMSVTVNEEDDMVDGDQPQMARKLWGLVVCHHTSTRFVPFPLRYACEFLIQVFGVQINKEVELAAQVREKHILQIQTMLCDMLLRDAPVAIITQSPNVMDLVKCDGAALYFKNKTWLLGVTPTEEQIRDIAEWLLEYHSGNTGLSTDSLMEAGYPGASALGDAVCGMAAVSITSRDFLLWFRSHTAKEIKWGGAKHDPDDKDDGRKMHPRSSFKAFLEVVKWRSMPWEDVEMDAI

SEQ ID NO: 12211 - protein, 392 aa, Caucanthus auriculatus
DLEPVNPADVPVTAAGALKSYKLAAKAISRLQSLPSGNISLLCDVLVKEVRDLTGYDRVMVYKFHEDEHGEVVSECHRSDLESYLGLHYPATDIPQASRFLFMKNKVRMICDCVAPPVKVIQEERLPQPLSLCGSTLRSPHGCHAQYMTNMRIIASLVMSVTVNEEDDMVDGDQPQMARKLWGLVVCHHTSTRFVPFPLRYACEFLIQVFGVQINKEVELAAQVREKHILQIQTMLCDMLLRDAPVAIITQSPNVMDLVKCDGAALYFKNKTWLLGVTPTEEQIRDIAEWLLEYHSGNTGLSTDSLMEAGYPGASALGDAVCGMAAVSITSRDFLLWFRSHTAKEIKWGGAKHDPDDKDDGRKMHPRSSFKAFLEVVKWRSMPWEDIEMDAI

SEQ ID NO: 12212 - protein, 392 aa, Caucanthus auriculatus
DLEPVNPADVPVTAAGALKSYKLAAKAISRLQSLPSGNISLLCDVLVKEVRDLTGYDRVMVYKFHEDEHGEVVSECHRSDLESYLGLHYPATDIPQASRFLFMKNKVRMICDCVAPPVKVIQEERLPQPLSLCGSTLRSPHGCHAQYMTNMGIIASLVMSVTVNEEDDMVDGDQPQMARKLWGLVVCHHTSTRFVPFPLRYACEFLIQVFGVQINKEVELAAQVREKHILQIQTMLCDMLLRDAPVAIITQSPNVMDLVKCDGAALYFKNKTWLLGVTPTEEQIRDITEWLLEYHSGNTGLSTDSLMEAGYPGASALGDAVCGMAAVSITSRDFLLWFRSHTAKEIKWGGAKHDPDDKDDGRKMHPRSSFKAFLEVVKWRSMPWEDMEMDAI

SEQ ID NO: 12213 - protein, 392 aa, Caucanthus auriculatus
DLEPVNPADVPVTAAGALKSYKLAAKAISRLQSLPSGNISLLCDVLVKEVRDLTGYDRVMVYKFHEDEHGEVVSECHRSDLESYLGLHYPATDIPQASRFLFMKNKVRMICDCVAPPVKVIQEERLPQPLSPCGSTLRSPHGCHAQYMTNMGIIASLVMSVTVNEEDDMVDGDQPQMARKLWGLVVCHHTSTRFVPFPLRYACEFLIQVFGVQINKEVELAAQVREKHILQIQTMLCDMLLRDAPVAIITQSPNVMDLVKCDGAALYFKNKTWLLGVTPTEEQIRDIAEWLPEYHSGNTGLSTDSLMEAGYPGASALGDAVCGMAAVSITSRDFLLWFRSHTAKEIKWGGAKHDPDDKDDGRKMHPRSSFKAFLEVVKWRSMPWEDVEMDAI

SEQ ID NO: 12214 - protein, 392 aa, Coleostachys genipifolia
DLEPVNPADVPVTAAGALKSYKLAARAISRLQSLPSGNISLLCDVLVKEVRDLTGYDRVMVYKFHEDEHGEVVSECRRPDLEAYLGLHYPATDIPQASRFLFMKNKVRMICDCLAPPVKVIQDKRLVQPLSLCGSTLRSPHGCHAQYMANMGAIASLVMSVTINEGDDTMDGDQQQMARKLWGLVVCHHTSPRFVPFPLRYACEFLIQVFGVQINKEVELAAQVREKHILRTQTLLCDMLLRDAPVAIITQSPNVMDLVKCDGAALYYRKKFWLLGVTPTEAQIKEIAQWLIEYHSGDTGLSTDSLMEAGYPSASVLGDAVCGMAAVKITSRDFLFWFRSHTAKEIKWGGAKHDPDDKDDGRKMHPRSSFKAFLEVVKWRSLPWEDVEMDAI

SEQ ID NO: 12215 - protein, 392 aa, Diacidia ferruginea
DLEPVNPADVPVTAAGALKSYKLAARAISRLQSLPSGNISLLCDVLVKEVRDLTDYDRVMVYKFHEDEHGEVISECCRPDMEAYLGLHYPATDIPQASRFLFMKNKVRMICDCLATPVKVIQDERLPQPLSLCGSTLRSPHGCHAQYMANMGAIASLVMSVTINEDDDMMDGDRQHRARKLWGLVVCHHTSPRFLPFPLRYACEFLIQVFGVQINKEVELAAQVREKHILRTQTLLCDMLLRDAPVAIITQSPNVMDLVKCNGAALYYKKKFWLVGLTPTEAQIRDIAEWLLEYHNGNTGLSTDSLMEAGYPGASELGDTVCGMAVVKITSRDFLFWFRSHTAKEIKWGGAKHDPDDKDDGRKMHPRSSFKAFLEVVKWRSLPWEDIEMDAI

SEQ ID NO: 12216 - protein, 380 aa, Diacidia ferruginea
ETPAGALKSYKLAARAISRLQSLPSGIISLLCDVLVKEVRDLTDYDRVMVYKFHEDEHGEVISECCRPDMEAYLGLHYPATDIPQASRFLFMKNKVRMICDCLATPVKVIQDERLPQPLSLCGSTLRSPHGCHAQYMANMGAIASLVMSVTINEDDDVMDGDRQHRARKLWGLVVCHHTSPRFLPFPLRYACEFLIQVFGVQINKEVELAAQVREKHILRTQTLLCDMLLRDAPVAIITQSPNVMDLVKCNGAALYYKKKFWLVGLTPTEAQIRDIAEWLLEYHNGNTGLSTDSLMEAGYPGASELGDTVCGMAVVKITSRDFLFWFRSHTAKEIKWGGAKHDPDDKDDGRKMHPRSSFKAFLEVVKWRSLPWEDVEMDA

SEQ ID NO: 12217 - protein, 392 aa, Dinemandra ericoides
DLEPVNPADVPVTAAGALKSYKLAAKAISRLQSLPSGNIPLLCDVLVKEVRDLTGYDRVMVYKFHEDEHGEVVSECRRSDMESYLGLHYPATDIPQASRFLFMKNKVRMICDCLSPPVEVIQDERLPQPLSLCGSTLRSPHGCHAQYMANMGTIASLVMSVTVNEDDDMMDGDQQRMARKLWGLVVCHHTSPRFVPFPLRYACEFLIQVFGVQINKEVDLAAQVREKHILRIQTMLCDMLLRDAPVAIITQSPNVMDLVKCDGAALYYKNKFWLLGVTPTEAQIRDIAEWLLEYHRGNTGLSTDSLMEAGYPGASVLGDAVCGMAAVSITSRDFLFWFRSHTAKEIKWGGAKHDPGDKDDGRKMHPRSSFKAFLEVVKWRSLPWKDVEMDAI

SEQ ID NO: 12218 - protein, 392 aa, Dinemandra ericoides
DLEPVNPADVPVTAAGALKSYKLAAKAISRLQSLPSGNIPLLCDVLVKEVRDLTGYDRVMVYKFHEDEHGEVVSECRRSDMESYLGLHYPATDIPQASRFLFMKNKVRMICDCLSPPVEVIQDERLPQPLSLCGSTLRSPHGCHAQYMANMGTIASLVMSVTVNEDDDMMDGDQQRMARKLWGLVVCHHTSPRFVPFPLRYACEFLIQVFGVQINKEVDLAAQVREKHILRIQTMLCDMLLRDAPVAIITQSPNVMDLVKCDGAALYYKNKFWLLGVTPTEAQIRDIAEWLLEYHRGNTGLSTDSLMEAGYPGASVLGDAVCGMAAVSITSRDFLFWFRSHTAKEIKWGGAKHDPGDKDDGRKMHPRSSFKAFLEVVKWRSLPWKDMEMDAI

SEQ ID NO: 12219 - protein, 392 aa, Dinemandra ericoides
DLEPVNPADVPVTAAGALKSYKLAAKAISRLQSLPSGNIPLLCDVLVKEVRDLTGYDRVMVYKFHEDEHGEVVSECRRSDMESYLGLHYPATDIPQASRFLFMKNKVRMICDCLSPPVEVIQDERLPQPLSLCGSTLRSPHGCHAQYMANMGTIASLVMSVTVNEDDDMMDGDQQRMARKLWGLVVCHHTSPRFVPFPLRYACEFLIQVFGVQINKEVDLAAQVREKHILRIQTMLCDMLLRDAPVAIITQSPNVMDLVKCDGAALYYKNKFWLLGVTPTEAQIRDIAEWLLEYHRGNTGLSTDSLMEAGYPGASVLGDAVCRMAAVSITSRDFLFWFRSHTAKEIKWGGAKHDPGDKDDGRKMHPRSSFKAFLEVVKWRSLPWEDMEMDAI

SEQ ID NO: 12220 - protein, 392 aa, Dinemandra ericoides
DLEPVNPADVPVTAAGALKSYKLAAKAISRLQSLPSGNIPLLCDVLVKEVRDLTGYDRVMVYKFHEDEHGEVVSECRRSDMESYLGLHYPATDIPQASRFLFMKNKVRMICDCLSPPVEVIQDERLPQPLSLCGSTLRSPHGCHAQYMANMGTIASLVMSVTVNEDDDMMDGDQQRMARKLWGLVVCHHTSPRFVPFPLRNACEFLIQVFGVQINKEVDLAAQVREKHILRIQTMLCDMLLRDAPVAIITQSPNVMDLVKCDGAALYYKNKFWLLGVTPTEAQIRDIAEWLPEYHRGNTGLSTDSLMEAGYPGASVLGDAVCGMAAVSITSRDFLFWFRSHTAKEIKWGGAKHDPGDKDDGRKMHPRSSFKAFLEVVKWRSLPWEDIEMDAI

SEQ ID NO: 12221 - protein, 392 aa, Dinemandra ericoides
DLEPVNPADVPVTAAGALKSYKLAAKAISRLQSLPSGNIPLPCDVLVKEVRDLTGYDRVMVYKFHEDEHGEVVSECRRSDMESYLGLHYPATDIPQASRFLFMKNKVRMICDCLSPPVEVIQDERLPQPLSLCGSTLRSPHGLHAQYMANMGTIASLVMSVTVNEDDDMMDGDQQRMARKLWGLVVCHHTSPRFVPFPLRYACEFLIQVFGVQIHKEVDLAAQVREKHILRIQTMLCDMLLRDAPVAIITQSPNVMDLVKCDGAALYYKNKFWLLGVTPTEAQIRDIAEWLLEYHRGNTGLSTDSLMEAGYPGASVLGDAVCGMAAVSITSRDFLFWFRSHTAKEIKWGGAKHDPGDKDDGRKMHPRSSFKAFLEVVKWRSLPWEDVEMDAI

SEQ ID NO: 12222 - protein, 390 aa, Echinopterys eglandulosa
DLEPVNPADVPVTAAGSLKSYKLAAKAISRLQSLPSGNISLLCDVLVKEVRELTGYDRVMVYKFLEDEHGDVVSECRRSDLESYLGLHYPATDIPQASRFLFMKNKVRMICDCLAPPVKVIQDERLPQPLSLCGSALRSPHGCHAQYMMGTIASLVMSVTINEDDDTMDGDQQQMARKLWGLVVCHHTSPRFVPFPLRYACEFLIQVFGVQINKEVGLAGQVREKHILRIQTMLCDMLLRDAPVAIITQSPNVMDLVMCDGAALYYKNKFWLLGVTPTEAQIRDIAEWLLKYHSQNTGLSTDSLMEAGYPGASVLGDAVCGMAAVSLTSKDFLFWFRSHTAEGIKWGGATHDPDDKDDGRKMHPRLSFKAFLEVVKWRSLPWEDVEMDAI

SEQ ID NO: 12223 - protein, 392 aa, Ectopopterys soejartoi
DLEPVNPADVPVTAAGALKSYKLAAKAISRLQSLPSGNISLLCDVLVKEVRDLTGYDRVMVYKFHEDEHGEVVSECRRSDLESYLGLHYPATDIPQASRFLFMKNKVRMICDCMAPPVEVIQDERLPQPLSLCGSTLRSPHGCHAQYMTNMGTTASLVMSVTINEDDHMMDGDQQQMTKKLWGLVVCHHTNPRFVPFPLRDACEFLIQVFGVQINKEVELAAQVREKHILQIQTMLCDMLLRDAPVAIITQSPNVMDLVKCDGAALYFKNKTWLLGVTPTEEQIRDIAEWLLEYHSGNTGLSTDSLMEAGYPGASALGDAVCGMAAVSITSRDFLFWFRSHTAKEIKWGGAKHDPDDKDDGRKMHPRSSFKAFLEVVKWRSMPWEDVEMDAI

SEQ ID NO: 12224 - protein, 392 aa, Gallardoa fischeri
DLEPVNPADVPVTAAGALKSYKLAAKAISRLQSLPSGNISLLCDVLVKEVRDLTGYDRVMVYKFHEDEHGEVVSECRRSDLESYLGLHYPATDIPQASRFLFMKNKVRMICDCLAPPVKVIQDEQLPQPLSLCGSTLRSPHGCHAQYMTNMGTIASLGMSVTVNEDDDMMDGDQHQMTRKLWGLVVCHHTSPRFVPFPLRYACEFLIQVCGVQINKEVELAAQVRKKHILQIQTMLCDMLLRDAPVAIITQSPNVMDLVKCDGAALYFKNKIWLLGVTPTEEQIRDIAEWLLKYHSGNTGLSTDSLMEAGYPGASALGDAVCGMAAVSITSRDLLFWFRSHTAKEIKWGGAKHDPDDKDDLRKMHPRSSFKAFLEVVKWRSKPWKDVEMDAI

SEQ ID NO: 12225 - protein, 392 aa, Gaudichaudia albida
DLEPVNPADVPVTAAGALKSYKLAAKAISRLQSLPSGNISLLCDVLVKEVRDLTGYDRVMVYKFHEDEHGEVVSECRRSDLESYLGLHYPATDIPQASRFLFMKNKVRMIYDCLAPPVKVIQDKRLPQPLSLCGSTLRSPHGCHAQYMTNMGTIASLVMSVTVNEDDDTMDGDQQHMTKKLWGLVVCHHTSPRFVPFPLRYACEFLIQVFGVQINKEVELAAQVREKHILQIQTMLCDMLLRDAPVTIITQSPNVMDLVNCDGAALYFKNKTWLLGVTPTEEQIRGIAEWLLKYHSGNTGLSTDSLMEAGYPGASGLGDAVCGMAAVSITSRDFLFWFRSHTAKEIKWGGAKHDPDDKDDLRKMHPRSSFKAFLEVVKWRSMPWEDIEMDAI

SEQ ID NO: 12226 - protein, 392 aa, Gaudichaudia mcvaughii
DLEPVNPADVPVTAAGALKSYKLAAKAISRLQSLPSGNISLLCDVLVKEVRDLTGYDRVMMYKFHEDEHGEVVSECCRSDLESYLGLNYPATDIPQASRFLFMKNKVRITCDCLAPSVEVIQDERLTQPLSLCGSTLRSPHGCHAQYMTNMGAIASLVMSVTVNEDDDTMDGDQQHMTRKLWGLVVCHHTSPRFVPFPLRYACEFLIQVFGVQVNKEVELAAQVRERHSLQIQTMLCDMLLREAPVAIITQSPNVMDLVKCDGAALYFKNKTWFLGVTPTEEQIRGIAEWPLKYHSGNTGLSTDGLMEAGYPGASGLGDAVCGMAAVSITSRDFLFWFRSHTAKEIKWGGAKHDPDDKDDLRKMHPRSSFKAFLEVVKWRSTPWEDIEMDAI

SEQ ID NO: 12227 - protein, 392 aa, Glandonia macrocarpa
DLEPVNPADVPVTAAGALKSYKLAAKAISRLQSLPSGNISLLCDVLVKEVRDLTGYDRVMVYKFHEDEHGEVVSECHRSDLESYLGLHYPATDIPQASRFLFMKNKVRMICDCLAPPVKVIQDERLPQPLSLCGSTLRSPHGCHAQYMANMGAIASLVMSVTINEDDDMIDGDEQQMARKLWGLVVCHHTSPRFVPFPLRYACEFLIQVFGVQITKEVELAAQVREKHIFRIQTLLCDMLLRDAPVAIITQSPNVLDLVKCDGAALYYKKKFWLLGITPTEAQIRDIAEWLLEYHSGNTGLSTDSLMEAGYPGASSLGDAVCGMAAVSITSRDFLFWFRSHTAKEIRWGGAKHDPDDKDDGRKMHPRSSFKAFLEVVKWRSLPWEDVEMDAI

SEQ ID NO: 12228 - protein, 392 aa, Heladena multiflora
DLEPVNPFDVPVTAAGALKSYKLAAKAISRLQSLPSGNISLLCDVLVKEVRDLTGYDRVMVYKFHEDEHGEVVSECRRSDLESYLGLHYPATDIPQASRFLFMKNKVRMICDCLAPPVKVIQDERLPQPLSLCGSTLRSPHGCHAQYMANMGTIASLVMSVTINEDDDTMDGDQQQMARKLWGLVVCHHTSTQFVPFPLRYACEFLIQVFGVQINKEVELAAQAREKHILQIQTTLCDMLLRDAPVAIITQSPNVMDLVKCDGAALYYKNKFRLLGVTPTEAQIRDIAEWLLEYHSGNTGLSTDSLMEAGYPGASVLGDAVCGMAAVSITSRDFLFWFRSHTAKEIKWGGAKHDPDDKDDGRKMHPRSSFKAFLEVVKWRSLPWEDMEMDAI

SEQ ID NO: 12229 - protein, 392 aa, Heteropterys thyrsoidea
DLEPVNPADVPVTAAGALKSYKLASKAISRLQSLPSGNISLLCDVLVKEVRDLTGYDRVMVYKFHEDEHGEVVSECRRSDLESYLGLHYPATDIPQASRFLFMKNKVRMICDCLAPPVKVIQDERLPQPLSLCGSTLRSPHGCHAQYMTNMGTIASLVMSVTINEDDDMMDGDQQQMTRKLWGLVVCHHTSPRFVPFPLRYACEFLIQVFGVQINKEVELAAQVREKHILQIQTMLCDMLLRDAPVAIITQSPNVMDLVECDGAALYFKNKTWLLGVTPTEEQIRDIAEWLLEYHSGNTGLSTDSLMEAGYPGASVLGDAVCGMAAVSITSRDFLFWFRSHTAKEIKWGGAKHDPDDKDDLRKMHPRSSFKAFLEVVKWRSMPWEDVEMDAI

SEQ ID NO: 12230 - protein, 392 aa, Hiptage benghalensis
DLEPVNPADVPVTAAGALKSYKLASKAISRLQSLPSGNISLLCDVLVKEVRDLTGYDRVMVYKFHEDEHGEVVSECRRSDLGSYLGLHYPATDIPQASRFLFMKNKVRMICDCLAPPVKVIQDERLPQPLSLCGSTLRSPHGCHAQYMTDMGTIASLVMSVTINEDDDMMDGDQQQMARKLWGLVVCHHTSPRFVPFPLRYACEFLIQVFGVQINKEVELAAQVREKHILQIQTMLCDMLLRDAPVAIITQSPNVMDLVKRDGAALYFKNKTWLLGVTPTEEQIRDIAEWLLEYHSGNTGLSTDSLMEAGYPGASVLGDAVCGMAAVSITSRDFLFWFRSHTAKEIKWGGAKHDPDDKDDGRKMHPRSSFKAFLEVVKWRSMPWEDVEMDAI

SEQ ID NO: 12231 - protein, 392 aa, Janusia anisandra
DLEPVNPADVPVTAAGALKSYKLAAKAISRLQSLPSGNISLLCDVLVKEVRDLTGYDRVMVYKFHEDEHGEVVSECRRSDLESYLGLHYPATDIPQASRFLFMKNKVRMICDCLAPPVKVIQDERLPQPLSLCGSTLRSPHGCHAQYMTNMGTIASLVMSVTVNEDDDTMDGDQQQMARKLWGLVVCHHSSPQFVPFPLRYACEFLIQVFGVQINKEVELAAQVREKHILQIQTMLCDMLLRDAPVAIITQSPNVMDLVKCDGAALYFKNKTWFLGVTPTEEQIRGIAEWLLKYHSGNTGLSTDSLMEAGYPGASGLGDAVCGMAAVSITSRDFLFWFRSHTAKEIKWGGAKHDPDDKDDLRKMHPRSSFKAFLEVVKWRSVPWEDVEMDAI

SEQ ID NO: 12232 - protein, 392 aa, Janusia californica
DLEPVNPADVPVTAAGALKSYKLASKAISRLQSLPSGNISLLCDVLVKEVRDLTGYDRVMVYKFHEDEHGEVVSECRRSDLESYLGLHYPATDIPQASRFLFMKNKVRMICDCLAPPVKVIQDERLPQPLSLCGSTLRSPHGCHAQYMTNMGTIASLVMSVTVNEDDDTMDGDQQQMTRKLWGLVVCHHTSPQFVPFPLRYACEFLIQVFGVQINKEVELAAQVREKHILQIQTMLCDMLLRDAPVAIITQSPNVMDLVKCDGAALYFKNKTWLLGVTPTEEQIRGIAEWLLKYHSGNTGLSTDSLMEAGYPGASGLGDAVCGMAAVSITSRDFLFWFRSHTAKEIKWGGAKHDPDDKDDLRKMHPRSSFKAFLEVVKWRSMPWEDVEMDAI

SEQ ID NO: 12233 - protein, 392 aa, Janusia californica
DLEPVNPADVPVTAAGALKSYKLASKAISRLQSLPSGNISLLCDVLVKEVRDLTGYDRVMVYKFHEDEHGEVVSECRRSDLESYLGLHYPATDIPQASRFLFMKNKVRMICDCLAPPVKVIQDERLPQPLSLCGSTLRSPHGCHAQYMTNMGTIASLVMSVTVNEDDDTMDGDQQQMTRKLWGLVVCHHTSPQSVPFPLRYACEFLIQVFGVQINKEVELAAQVREKHILQIQTMLCDMLLRDAPVAIITQSPNVMDLVKCDGAALYFKNKTWLLGVTPTEEQIRGIAEWLLKYHSGNTGLSTDSLMEAGYPGASGLGDAVCGMAAVSITSRDFLFWFRSHTAKEIKWGGAKHDPDDKDDLRKMHPRSSFKAFLEVVKWRSMPWEDIEMDAI

SEQ ID NO: 12234 - protein, 392 aa, Janusia californica
DLEPVNPADVPVTAAGALKSYKLASKAISRLQSLPSGNISLLCDVLVKEVRDLTGYDRVMVYKFHEDEHGEVVSECRRSDLESYLGLHYPATDIPQASRFLFMKNKVRMICDCLAPPVKVIQDERLPQPLSLCGSTLRSPHGCHAQYMTNMGTIASLVMSVTVNEGDDTMDGDQQRMTRKLWGLVVCHHTSPQFVPFPLRYACEFLIQVFGVQINKEVELAAQVREKHILQIQTMLCDMLLRDAPVAIITQSPNVMDLVKCDGAALYFKNKTWLLGVTPTEEQIRGIAEWLLKYHSGNTGLSTDSLMEAGYPGASGLGDAVCGMAAVSITSRDFLFWFRSHTAKEIKWGGAKHDPDDKDDLRKMHPRSSFKAFLEVVKWRSMPWEDVEMDAI

SEQ ID NO: 12235 - protein, 392 aa, Janusia californica
DLEPVNLADVPVTAAGALKSYKLASKAISRLQSLPSGNISLLCDVLVKEVRDLTGYDRVMVYKFHEDEHGEVVFECRRSDLESYLGLHYPATDIPQASRFLFMKNKVRMICDCLAPPVKVIQDERLPQPLSLCGSTLRSPHGCHAQYMTNMGTIASLVMSVTVNEDDDTMDGDQQQMTRKLWGLVVCHHTSPQFVPFPLRYACEFLIQVFGVQINKEVELAAQVREKHILQIQTMLCDMLLRDAPVAIITQSPNVMDLVKCDGAALYFKNKTWLLGVTPTEEQIRGIAEWLLKYHSGNTGLSTDSLMEAGYPGASGLGDAVCGMAAVSITSRDFLFWFRSHTAKEIKWGGAKHDPDDKDDLRKMHPRSSFKAFLEVVKWRKMPWEDIEMDAI

SEQ ID NO: 12236 - protein, 392 aa, Janusia linearis
DLEPVNPADVPVTAAGALKSYKLAAKAISRLQSLPSGNISLLCDVLVKEVRDLTGYDRVMVYKFHEDEHGEVVSECRRSDLESHLGLHYPATDIPQASRFLFMKNKVRMICDCLAPPVKVIQDERLPQPLSLCGSTLRSPHGCHAQYMTNMGTIASLVMSVTVNEDDDTMDGDQQQMTRKLWGLVVCHHTSPQFVPFPLRYACEFLIQVFGVQINKEVELAAQVREKHILQIQTMLCDMLLRDAPVAIITQSPNVMDLVKCDGAALYFKNKTWLLGVTPTEEQIRGIAEWLLKYHSGNTGLSTDSLMEAGYPGASGLGDAVCGMAAVSITSRDFLFWFRSHTAKEIKWGGAKHDPDDKDDLRKMHPRSSFKAFLEVVKWRSMPWEDMEMDAI

SEQ ID NO: 12237 - protein, 392 aa, Janusia mediterranea
DLEPVNPADVPVTAAGALKSYKLAAKAISRLQSLPSGNISLLCDVLVKEVRDLTGYDRVMVYKFHEDEHGEVVSECRRSDLESYLGLHYPATDIPQASRFLFMKNKVRMICDCLAPSVKVIQDERLPQPLSLCGSTLRSPHGCHAQYMTNMGTIASLVMSVTVNEDDDTMDGDQQQMARKLWGLVVCHHTSPQFVPFPLRYACEFLIQVFGVQITKKVELAAQVREKHILQIQTMLCDMLLRDAPVAIITQSPNVMDLVKCDGAALYFKSKTWFLGVTPTEEQIRDIAEWLLKYHSGNTGLSTDSLMEAGYPGASGLGDAVCGMAAVSITSRDFLFWFRSHTAKEIKWGGAKHDPDDKDDLRKMHPRSSFKAFLEVVKWRSMPWEDMEMDAI

SEQ ID NO: 12238 - protein, 392 aa, Lophanthera lactescens
DLEPVNPADVPVTAAGALKSYKLAARAISRLQSLPSGNISLPSDVLVKEVRDLTGYDRVMVYKFHEDEHGEVVSECCRPDLEAYLGLHYPATDIPQASRFLFMKNKVRMICDCLAPPVKVIQDERLPQPLSLCGSTLRSPHGCHAQYMANMGSIASLVMSVTVNEDDDMVDGDQQQMARKLWGLVVCHHTSPRFVPFPLRYACEFLIQVFGVQINKKVELAAQVREKHILRTQTLLCDMLLRDAPVAIVIQSPNVMDLVKCDGAALYYRKKFWLLGVTPTEAQIRDIAEWLLEYHSGNTGLSTDSLMEAGYPGTSVLGNAVCGMAAVKITSRDFLFWFRSHTAKEIKWGGAKHDPGDKDDIRKMHPRSSFKAFLEVVKWRSLPWEDIEMDAI

SEQ ID NO: 12239 - protein, 392 aa, Mascagnia anisopetala
DLEPVNPADVPVTAAGALKSYKLAAKAISRLQSLPSGNISLLCDVLVKEVRDLTGYDRVMVYKFHEDEHGEVVSECRRSDLESYLGLHYPATDIPQASRFLFMKNKVRMICDCLAPPVKVIQDERLPQPLSLCGSTLRSPHGCHAQYMTNMGTIASLVMSVTINEDDDMMDGDQQQMTRKLWGLVVCHHTSPRFVPFPLRYACEFLIQVFGVQINKEVELAAQVREKHILQIQTMLCDMLLRDAPVAIITQSPNVMDLVKCDGAALYFKNKTWLLGVTPTEEQIRDIAEWLLDYHSGNTGLSTDSLMEAGYPGASVLGDAVCGMAAVSISSRDFLFWFRSHTAKEIKWGGAKHDPDVKDDGRKMHPRSSFKAFLEVVKWRSMPWEDIEMDAI

SEQ ID NO: 12240 - protein, 392 aa, Mascagnia bracteosa
DLEPVNPADVPVTAAGALKSYKLAAKAISRLQSLPSGNISLLCDVLVKEVRDLTRYDRVMVYKFHEDEHGEVVSECRRSDLESYHGLHYPATDIPQASRFLFMKNKVRMICDCLAPPVKVIQDKRLPQPLSLCGSTLRSPHGCHAQYMTNMGTIASLVMSVTVNEEDDMMDGDQQQMTRKLWGLVVCHHTSPRFVPFPLRYACEFLIQVFGVQINKEVELAAQVREKHILQIQTMLCDMLLRDAPVAIITQSPNVMDLVKCDGAALYFKNKTWLLGVTPTEEQIRDIAEWLLEYHSGNTGLSTDSLMEAGYPGASVLGDAVCGMAAVSITSRDFLFWFRSHTAKEIKWGGAKHDPDDKDDGRKMHPRSSFKAFLEVVKWRSMPWDDVEMDAI

SEQ ID NO: 12241 - protein, 392 aa, Mascagnia chasei
DLEPVNPADVPVTAAGALKSYKLASKAISRLQSLPSGNISLLCDVLVKEVRDLTGYDRVMVYKFHEDEHGEVVSECRRSDLESYLGLHYPATDIPQASRFLFMKNKVRMICDCLAPPVEVIQDERLAQPLSLCGSTLRSPHGCHAQYMTNMGTIASLVMAVTINEDDDMMDGDQQQMTRKLWGLVVCHHTSPRFVPFPLRYACEFLIQVFGVQINKEVELAAQVREKHILQIQTMLCDMLLRDAPVAIIMQSPNVMDLVKCDGAALYFKNKTWLLGVTPTEEQIRDIAEWLLEYHSGNTGLSTDSLMEAGYPGASALGDAVCGMAAVSITSRDFLFWFRSHTAKEIKWGGAKHDPDVKDDGRKMHPRSSFKAFLEVVKWRKMPWENIEMDAI

SEQ ID NO: 12242 - protein, 392 aa, Mascagnia chasei
DLEPVNPADVPVTAAGALKSYKLASKAISRLQSLPSGNISLLCDVLVKEVRDLTGYDRVMVYKFHEDEHGEVVSECRRSDLESYLGLHYPATDIPQASRFLFMKNKVRMICDCLAPPVEVIQDERLAQPLSLCGSTLRSPHGCHAHYMTNMGTIASLVMAVTINEDDDMMDGDQQQMTRKLWGLVVCHHTSPRFVPFPLRYACEFLIQVFGVQIHKEVELAAQVREKHILQIQTMLCDMLLRDAPVAIIMQSPNVMDLVKCDGAALYFKKKTWLLGVTPTEEQIRDIAEWLLEYHSGNTGLSTDSLMEAGYPGSSALGDAVCGMAAVSITSRDFLFWFRSHTAKEIKWGGAKHDPDVKDDGRKMHPRSSFKAFLEVVKWRSMPWEDIEMDAI

SEQ ID NO: 12243 - protein, 392 aa, Mascagnia dipholiphylla
DLEPVNPADVPVTAAGALKSYKLAAKAISRLQSLPSGNISLLCDVLVKEVRDLTGYDRVMVYKFHEDEHGEVVSECRRSDWESYLGLHYPATDIPQASRFLFMKNKVRMICDCLAPPVKVIQDERLPQPLSLCGSTLRSPHGCHAQYMTNMGTIASLVMSVTINEDDDMMDGDQQQMTRKLWGLVVCHHAGPRFVPFPLRYACEFLIQVFGVQIHKEVELAAQVREKHILQIQTMLCDMLLRDAPVVIITQSPNVMGLVKCDGAALYFKNKIWLLGVTPAEEQIRDIAEWLLKYHSGNTGLSTDSLMEAGYPGASVLGDAVCGMAAVSITSRDFLFRFRSHTAKEIKWGGAKHDPDDKDDGRKMHPRSSFKAFLEVVKWRSTPWEDIEMDAI

SEQ ID NO: 12244 - protein, 392 aa, Mascagnia hippocrateoides
DLEPVNPADVPVTAAGALKSYKLAAKAISRLQSLPSGNISLLCDVLVKEVRDLTGYDRVMVYKFHEDEHGEVVSECRRSDLESYLGLHYPATDIPQASRFLFMKNKVRMICDCLAPPVKVIQDERLPQPLSLCGSTLRSPHGCHAQYMTNMGTIASLVMSVTINEDDDMMDGDQQQMTRKLWGLVVCHHASPRFVPFPLRYACEFLIQVFGVQINKEVELAAQVREKHILQIQTMLCDMLLRDAPVAIITQSPNVMDLVKCDGAALYFKNKIWLLGVTPTEEQIRDIAEWLLEYHSGNTGLSTDSLMEAGYPGASVLGDAVCGMAAVSITSRDFLFWFRSHTAKEVKWGGAKHDPHDKDDGRKMHPRSSFKAFLEVVKWRSMPWEDIEMDAI

SEQ ID NO: 12245 - protein, 392 aa, Mascagnia sepium
DLEPVNPADVPVTAAGALKSYKLAAKAISRLQSLPSGNISLLCDVLVKEVRDLTGYDRVMVYKFHEDEHGEVVSECRGSDLESYLGLHYPATDIPQASRFLFMKNKVRMICDCLAPPVKVIQDERLPQPLSLCGSTLRSPHGCHAQYMTNMGTIASLVMSVTVNEDDDMVDGDQPQMTRKLWGLVVCHHTSPRFVPFPLRYACEFLIQVFGVQINKEVELAAQVGEKHILQIQTMLCDMLLRDAPVAIITQSPNVMDLVKCDGAALYFKNKTWLLGVTPTEEQIRDIAEWLLEYHSGNTGLSTDSLMEAGYPGASALGDAVCGMAAVSITSGDFLFWFRSHTAKEIKWGGAKHDPDDKDDGRKMHPRSSFKAFLEVVKWRSMSWEDIEMDAI

SEQ ID NO: 12246 - protein, 393 aa, Mascagnia stannea
VIEPVNPADVPVTAAGALKSYKLAAKAISRLQSLPSGNISLLCDVLVKEVRDLTGYDRVMVYKFHEDEHGEVVSECRRSDLESYLGLHYPATDIPQASRFLFMKNKVRMICDCLAPPVEVIQDERLPQPLSLCGSTLRSPHGCHAQYMTNMGTIASLVMSVTINEDDDMMDGDQQQQMTRKLWGLVVCHHTSPRFVPFPLRYACEFLIQVFGVQINKEVELAAQVREKHILQIQTMLCDMLLRDAPVAIITQSPNVMDLVKCDGAALYFKNKTWLLGVTPTEEQIRDIAEWLLEYHSGNTGLSTDSLMEAGYPGASVLGDGVCGMAAVSITSRDFLFWFRSHTAKEIKWGGAKHDPGDKDDGRKMHPRSSFKAFLEVVKWRSMPWEDVEMDAI

SEQ ID NO: 12247 - protein, 392 aa, Mcvaughia bahiana
DLEPVNPADVPVTAAGALKPYKLAAKAISRLQSLPSGNISLLCDVLVKEVRDLTGYDRVMVYKFHEDEHGEVVTECRRSDLESYLDLHYPATDIPQASRFLFMKNKVRMICDCLAPPVKVIQDKRLSQPLSLCGSTLRSPHGCHAQYMANMGAVASLVMSVTINEDDDTVDGDQQQMARKLWGLVVCHHTSPRFVPFPLRYACEFLIQVFGVQITKEVELAAQVREKHILRIQTLLCDMLLRDAPVAIITQSPNVMDLVKCDGAALYYRKKFWLLGVTPTEAQIRDIAEWLLEYHSGNTGLSTDSLLEVGYPGASALGEVVCGMAAVSITSRDFLFWFRSHTAKEIKWGGAKHDPDDKDDSRKMHPRSSFKAFLEVVEWRSLPWEDVEMDAI

SEQ ID NO: 12248 - protein, 392 aa, Mionandra camareoides
DLEPVNPADVPVTAAGALKSYKLAAKAISRLQSLPSGNISLLCDVLVKEVRDLTGYDRVMAYKFHEDEHGEVVSECRRSDLESYLGLHYPATDIPQASRFLFMKNKVRMICDCLAPPVKVIQDERLPQPLSLCGSTLRSPHGCHAQYMTNMGTIASLGMSVTVNEDDDTMDGDQQQMTRKLWGLVVCHHTSPRFVPFPLRYACEFLIQVFGVQINKEVELAAQVREKHILQIQTMLCDMLLRDAPVAIITQSPNVMDLVKCDGAALYFKNKTWLLGVTPTEEQIRDIAEWLLKYHCGNTGLSTDSLMEAGYPGASALGDAVCGMAAVSITSRDFLFWFRSHTAKEIKWGGAKHDPDDKDDLRKMHPGSSFKAFLEVVKWRSMPWKDVEMDAI

SEQ ID NO: 12249 - protein, 392 aa, Peixotoa glabra
DLEPVNPSDVPVTAAGALKSYKLAAKAISRLQSLPSGNISLLCDVLVKEVRDLTGYDRVMVYKFHEDEHGEVVSECRRSDLESYLGLHYPATDIPQASRFLFMKNKVRMICDCLAPPVQVIQDERLPQPLSLCGSTLRSPHGCHAQYMTNMGTIASLVKSVTVNEDDDTMDGDQQQMTRKLWGLVVCHHTSPRFVPFPLRYACEFLIQVFGVQINKEVELAAQVREKHILQIQTMLCDMLLRDAPVAIITQSPNVMDLVKCDGAALYFKNKTWLLGVTPTEEQIRDIAEWLLKYHSGNTGLSTDSLMEAGYPGASTLGDAVCGMAAVSITSRDFLFWFRSHTAKEIKWGGAKHDPDDKDDLRKMHPRSSFKAFLEVVKWRSMPWEDVEMDAI

SEQ ID NO: 12250 - protein, 392 aa, Peixotoa glabra
DLEPVNPADVPVTAAGALKSYKLAAKAISRLQSLPSGNISLLCDVLVKEVRDLTGYDRVMVYKFHEDEHGEVVSECRRSDLESYLGLHYPATDIPQASRFLFMKNKVRMICDCLAPPVQVIQDERLPQPLSLCGSTLRSPHGCHAQYMTNMGTIASLVMSVTVNEDDDTMDGDQQQMTRKLWGLVVCHHTSPRFVPFPLRYACEFLIQVFGVQITKEVELAAQVRKNHTLQIQTMLCDMLLRDAPVAIITQSPNVMDLVKCDGAALYFKNKTWLLGVTPTEEQIRDIAEWLLKYHSGNTGLSTDSLMEAGYPGASTLGDAVCGMAAVSITSRDFLFWFRSHTAKEIKWGGAKHDPDDKDDLRKMHPRSSFKAFLEVVKWRSMPWEDVEMDAI

SEQ ID NO: 12251 - protein, 392 aa, Pterandra arborea
DLEPVNPADVPVTAAGALKSYKLAARAISRLQSLPSGDISLLCDVLVKEVRDLTGYDRVMVYKFHEDEHGEVVSECRRPDLEAYFGLHYPATDIPQASRFLFMKNKVRMICDCLAPPVQVIQDKRLAQPLSLCGSTLRSPHGCHAQYMANMGAIASLVISVTINEGDDMMDGDQQQMARKLWGLVVCHHTSPRFVPFPLRYACEFLIQVFGVQITKEVELAAQVREKHILRTQTLLCDMLLRDAPVAIITQSPNVMDLVKCDGAALYYRKKFWLLGVTPTEAQIKEIAEWLLEYHSGNMGLSTDSLMEAGYPGASVLGNAVCGMAAVKITSRDLLFWFRSHTAKEIKWGGAKHDPDDKDDGRKMHPRSSFKAFLEVVKWRSLPWEDVEMDAI

SEQ ID NO: 12252 - protein, 392 aa, Ptilochaeta bahiensis
DLEPVNPADVPVTAAGALKSYKLAAKAISRLQSLPGGNISLLCDVLVKEVRDLTGYDRVMVYKFHEDEHGEVVSECRGSDLESYLGLHYPATDIPQASRFLFMKNKVRMICDCLAPPVKVIQDKRLSQPLSLCGSTLRSPHGCHAQYMANMGTIASLVMSVTVNEDDDMMDGDQQQMARKLWGLVVCHHTSPRFVPFPLRYACEFLIQVFGVQINKKVDLAAQVREKHILRIQTMLCDMLFRNAPVAIITQSPNVMDLVKCDGAALYYKNKFWLLGVTPTEAQIREIAEWLLEYHSGNTGLSTDSLMEAGYPGASVLGDAVCGMAAVSITSRDFLFWFRSHTAKEIKWGGAKHDPEDKDDGRKMHPRSSFKAFLEVVKWRSLPWEDVEMDAI

SEQ ID NO: 12253 - protein, 392 aa, Ryssopterys timorensis
DLEPVNPADVPVTAAGALKSYKLAAKAISRLQSLPSGNISLLCDVLVKEVRDLTGYDRVMVYKFHEDEHGEVVSECRRSDLESYLGLHYPATDIPQASRFLFMKNKVRMICDCLAPPVKVLQDERLPQPLSLCGSTLRSPHGCHAQYMTNMGTIASLVMSVTINEDDDMMDGDQQQMTRKLWGLVVCHHNSPQFVPFPLRYACEFLIQVFGVQINKEVELAAQVREKHILQIQTMLCDMLLRDAPVAIITQSPNVMDLVKCDGAALYFKNKTWLLGVTPTEEQIRDIAQWLLEYHSGNTGLSTGSLMEAGYSGASALGDAVCGMAAVSITLRDFLFWFRSHTAKEVKWGGAKHDPDDKDDLRKMHPRSSFKAFLEVVKWRSMPWEDIEMDAI

SEQ ID NO: 12254 - protein, 392 aa, Spachea correae
DLEPVNPADVPVSAAGALKSYKLAARAISRLQSLPSGNISLLCDVLVKEVRDLTGYDRVMVYKFHEDEHGEVVSECRRPDLEAYLGLHYPATDIPQASRFLFMKNKVRMICDCLAPPVKVIQDEKLPQSLSLCGSTLRSPHGCHAQYMANMGSIASLVMSVTVNEDDDMVDGDQQRMARKLWGLVVCHHTSPRFVPFPLRYACEFLIQVFGVQINKEVELAAQGREKHIMQTQTLLCDMLLRDAPVAIVTQSPNVMDLVKCDGAALYYRKKFWLLGVTPTEAQIRDIAEWLLEYHSGNTGLSTDSLMEAGYPGTSVLGNAVCGMAAVKITSRDFLFWFRSHTAKEIKWGGAKHDPDDKDDIRKMHPRSSFKAFLEVVKWRSLPWEDMEMDAI

SEQ ID NO: 12255 - protein, 392 aa, Stigmaphyllon paralias
DLEPVNPADVPVTAAGALKSYKLAAKAISRLQSLPSGNISLLCDVLVKEVRDLTGYDRVMVYKFHEDEHGEVVSECRRSDLESYLGLHYPATDIPQASRFLFMKNKVRMICDCLAPPVKVIQDERLPQPLSLCGSTLRSPHGCHAQYMTNMGTIASLVMSVTINEDDDTMDGDQQQMTRKLWGLVVCHHTSPRFVPFPLRYACEFLIQVFGVQINKEVELAAQIREKHILQIQTMLCDMLLRDAPVAIITQSPNVMDLVKCDGAALYFKNKTWLLGVTPTEEQIRDIAQWLLEYHSGNTGLSTDSLMEAGYPGASALRDAVCGMAAVSITSRDFLFWFRSHTAKEVKWGGAKHEPDDKDDLRKMHPRSSFKAFLEVVKWRSMPWEDVEMDAI

SEQ ID NO: 12256 - protein, 392 aa, Stigmaphyllon puberum
DLEPVNPVDVPVTAAGALKSYKLAAKAISRLQSLPSGNISLLCDVLVKEVRDLTGYDRVVVYKFHEDEHGEVVSECRISDLESYLGLHYPATDIPQASRFLFMKNKVRMICDCLAPPVKVIQDERLPQPLSFCGSTLRSPHGCHAQYMTNMGTIASLVMSVTINEDDDTMDGDQQQMTRKLWGLVVCHHNSPQFVPFPLRYACEFLIQVFGVQINKEVELAAQVREKHILQIQTMLCDMLLRDAPVAIITQSPNVMDLVKCDGAALYFKNKIWLLGVTPSKEQIRDIAQWLLEYHSGNTGLSTDSLMEAGYPGASALGDAVCGMAAVSITSRDFLFWFRSHTAKAVKWGGAKHDPDDKDDLRKMHPRSSFKAFLEVVKWRSMPWEDVEMDAI

SEQ ID NO: 12257 - protein, 392 aa, Stigmaphyllon sagraeanum
DLEPVNPADVPVTAAGALKSYKLAAKAISRLQSLPSGNISLLCDVLVKEVRDLTGYDRVMVYKFHEDEHGEVVSECRRSDLESYLDLHYPATDIPQASRFLFMKNKIRMICDCMAPPVKVIQDETLPQPLSLCGSTLRSPHGCHAQYMTNMGTIASLVMSVTINEDDDTMDGDQQQMTRKLWGLVVCHHTSPRFVPFPLRYACEFLIQVFGVQINKEVELAAQVREKHILQIQTMLCDMLLRDAPVAIITQSPNVMDLVKCDGAALYFKNKTWLLGVTPTEEQIRDMAQWLLEHHSGNTGLSTDSLMEAGYPGASALGDAVCGMAAVSITSRDFLFWFRSHTAKEVKWGGAKHDPDDKDDLRKMHPRSSFKAFLEVVKWRSMPWEDIEMDAI

SEQ ID NO: 12258 - protein, 392 aa, Tetrapterys microphylla
DLEPVNPADVPVTAAGALKSYKLAAKAISRLQSLPSGNISLLCDVLVKEVRDLTGYDRVMVYKFHEDEHGEVVSECRRSDLESYLGLHYPATDIPQASRFLFMKNKVRMICDCLAPPVKVIQGERLPQPLSLCGSTLRSPHGCHAQYMTNMGTIASLVMSVTINEDDDMMDGDQQQMTRKLWGLVVCHHTSPRFVPFPLRYACEFLIQVFGVQINKEVELAAQVREKHILQIQTMLCDMLLRDAPVAIITQSPNVMDLVKCDGAALYFKNKTWLLGVTPTEEQIRDIAEWLLEYHSGNTGLSTDSLMEAGYPGASVLGDVVCGMAAVSITSRDFLFWFRSHTANEIKWGGAKHDPDDKDDGRKMHPRSSFKAFLEVVKWRSMPWEDVEMDAI

SEQ ID NO: 12259 - protein, 392 aa, Tricomaria usillo
DLEPVNPADVPVTAAGALKSYKLASKAISRLQSLPSGNMSLLCDVLVKEVRDLTGYDRVMVYKFHEDEHGEVVSECRRSDLESYLGLHYPATDVPQASRFLFMKNKVRMICDCLAPPVKVIQDERLPQPLSLGGSTLRSPHGCHSQYMTNMGTIASLVMSVTINEEDERMDGDQQQMTTKLWGLVVCHHTSPRFVPFPLRYACEFLIQVFGVQIDKEVELVAQVREKHILQIQTMLCGMLLRDAPVAIVTQSPNVMDLVKCDGAALYFKSKTWLRGVTPTEEQIKDIAEWLLKYHSGNTGLSTDSLMEAGYPGASVLGDAVCGMAAVGITSRDFLFWFRSHTAKEINWGGAKHDPDDKDDGRKMHPRSSFKAFLEVVKWRSMPWEDMEMDAI

SEQ ID NO: 12260 - protein, 392 aa, Triopterys rigida
DLEPVNPADVPVTAAGALKSYKLAAKAISRLQSLPSGNISLLCDVLVKEVRDLTGYDRVMVYKFHEDEHGEVVSESRRSDLESYLGLHYPATDIPQASRFLFMKNKVRMICDCLAPPVKVIQDERLSQPLSLCGSTLRSPHGCHAQHMTNMGTIASLVMSVTVNEDDDMVDGDQPQMTRKLWGLVVCHHTSPRFVPFPLRYACEFLIQVFGLQINKEVELAAQVREKHILQIQTMLCDMLLRDAPVAIITQSPNVMDLVKCDGAALYFKNKTWLLGVTPTEEQIRDIAEWLLEYHSGNTGLSTDSLMEAGYPGASAVGDAVCGMAAVSITSRDFLFWFRSHTAKEIKWGGAKHDPDDKDDGRKMHPRSSFKAFLEVVKWRSMPWEDVEMDAI

SEQ ID NO: 12261 - protein, 392 aa, Tristellateia madagascariensis
DLEPVNPADVPVTAAGALKSYKLAAKAISRLQSLPSGNISLLCDVLVKEVRDLTGYDRVMVYKFHEDEHGEVVSECRRSDLESYLGLHYPATDIPQASRFLFMKNKVRMICDCLAPPVKVIQDERLPQPLSLCGSTLRSPHGCHAQYMANMGTIASLVMSVTINEDDDTMDGDQQQMARKLWGLVVCHHTSPRFVPFPLRYACEFLIQVFGVQINKELELAAQVREKHILRIQTMLCDMLLRDAPVGIITQSPNVMDLVKCDGAALFYKNKFWLLGITPTEAQIRDIAEWLLEYHSGNTGLSTDSLMEAGYPGASVLGDAVCGMASVSITSRDFLFWFRSHTAKEIKWGGAKHDPDDKDDGRKMHPRSSFKAFLEVVKWRSLPWKDMEMDAI

SEQ ID NO: 12262 - protein, 392 aa, Tristellateia madagascariensis
DLEPVNPADVPLTAAGALKSYKLAAKAISRLQSLPSGNISLLCDVLVKEVRDLTGYDRVMVYKFHEDEHGEVVSECRRSDLESYLGLHYPATDIPQASRFLFMKNKVRMICDCLAPPVKVIQDERLPQPLSLCGSTLRSPHGCHAQYMANMGTIASLVMSVTINEDDDTMDGDQQQMARKLWGLIVCHHTSPRFVPFPLRYACEFLIQVFGVQINKELELAAQVREKHILRIQTMLCDMLLRDAPVGIITQSPNVMDLVKCDGAALFYKNKFWLLGITPTEAQIRDIAEWLLEYHSGNTGLSTDSLMEAGYPGASVLGDAVCGMASVSITSRDFLFWFRSHTAKEIKWGGAKHDPDDKDDGRKMHPRSSFKAFLEVVKWRSLPWEDVEMDAI

SEQ ID NO: 12263 - protein, 392 aa, Tristellateia madagascariensis
DLEPVNPADVPVTAAGALKSYKLAAKAISRLQSLPSGNISLLCDVLVKEVRDLTGYDRVMVYKFHEDEHGEVVSECRRSDLESYLGLHYPATDIPQASRFLFMKNKVRMICDCLAPPVKVIQDERLPQPLSLCGSTLRSPHGCHAQYMANMGTIASLVMSVTINEDDDTMDGDQQQMARKLWGLVVCHHTSPRFVPFPLRYACEFLIQVFGVQINKELELAAQVREKHILRIQTMLCDMLLRDAPVGIITQSPNVMDLVKCDGAALFYKNKFWLLGITPTEAQIRDIAEWLLEYHSGNTGLSTDSLMEAGYPGASVLGDAVCGMASVSITSRDFLFWFRSHTAKEIKWGGAKHDPDDKDDGRKMHPRSSFKAFLEVVKWRSLPWEDVEMDAI

SEQ ID NO: 12264 - protein, 392 aa, Tristellateia madagascariensis
DLEPVNPADVPLTAAGALKSYKLAAKAISRLQSLPSGNISLLCDVLVKEVRDLTGYDRVMVYKFHEDEHGEVVSECRRSDLESYLGLHYPATDIPQASRFLFMKNKVRMICDCLAPPVKVIQDERLPQPLSLCGSTLRSPHGCHAQYMANMGTIASLVMSVTINEDDDTMDGDQQQMARKLWGLVVCHHTSPRFVPFPLRYACEFLIQVFGVQITKELELAAQVREKHILRIQTMLCDMLLRDAPVGIITQSPNVMDLVKCDGAALFYKNKFWLLGITPTEAQIRDIAEWLLEYHSGNTGLSTDSLMEAGYPGASVLGDAVCGMASVSITSRDFLFWFRSHTAKEIKWGGAKRDPDDKDDGRKMHPRSSFKAFLEVVKWRSLPWEDVEMDAI

SEQ ID NO: 12265 - protein, 392 aa, Triaspis hypericoides
DLEPVNPADVPVTAAGALKSYKLAAKAISRLQSLPSGNISLLCDVLVKEVRDLTGYDRVMVYKFHEDEHGEVVSECRRSDLESYLGLHYPATDIPQASRFLFMKNKVRMICDCVAPPVKVIQDKRLPQPLSLCGSTLRSPHGCHAQYMTNMGIIASLVMSVTVNEEDDMVDGDQLQMARKLWGLVVCHHTSTRFVPFPLRYACEFLIQVFGVQINKEVELAAQVREKHILQIQTMLCDMLLRDAPVAIITQSPNVMDLVKCDGAALYFKNKTWLLGVTPTEEQIRDIAEWLLEYHSGNTGLSTDSLMEAGYPGASALGDAVCGMAAVSITSTDFLLWFRSHTAKEIKWGGAKHDPDDKDDGRKMHPRSSFKAFLEVVKWRSMPWEDVEMDAI

SEQ ID NO: 12266 - protein, 392 aa, Tetrapterys discolor
DLEPVNPADVPVTAAGALKSYKLAAKAISRLQSLPSGNISLLCDVLVKEVRDLTGYDRVMVYKFHEDEHGEVVSECRRSDLESYLGLHYPATDIPQASRFLFMKNKVRMICDCLAPPVKVIQDERLPQPLSLCGSTLRSPHGCHAQYMTNMGTIASLVMSVTVNDDDDMMDGDQQQMTRKLWGLVVCHHTSPRFVPFPLRYACEFLIQVFGVQINKEVELTAQVREKHILQIQTMLCDMLLRDAPVAIITQSPNVMDLVKCDGAALYFKKKTWLLGVTPMEEQVRDIAEWLLEYHSGSTGLSTDSLMEAGYPGASDLGDAVCGMAAVSITSRDFLFWFRSHTAKEIKWGGAKHDPDDKDDGRKMHPRSSFKAFLEVVKWRSVPWEDIEMDAI

SEQ ID NO: 12267 - protein, 392 aa, Tetrapterys discolor
DLEPVNPADVPVTAAGALKSYKLAAKAISRLQSLPSGNISLLCDVLVKEVRDLTGYDRVMVYKFHEDEHGEVVSECRRSDLESYLGLHYPATDIPQASRFLFMKNKVRMICDCLAPPVKVIQDERLPQPLSLCGSTLRSPHGCHAQYMTNMGTIASLVMSVTVNDDDDMMDGDQQQMTRKLWGLVVCHHTSPRFVPFPLRYACEFLIQVFGVQINKEVELTAQVREKHILQIQTMLCDMLLRDAPVAIITQSPNVMDLVKCDGAALYFKKKTWLLGVTPMEEQVRDIAEWLLEYHSGNTGLSTDSLMEAGYPGASDLGDAVCGMAAVSITSRDFLFWFRSHTAKEIKWGGAKHDPDDKDDGRKMHPRSSFKAFLEVVKWRSVPWEDVEMDAI

SEQ ID NO: 12268 - protein, 376 aa, Bothriochloa odorata
ALSIAGAVQSQKLAVRAISRLQALPGGDVKLLCDTVVEHVRELTGYDRVMVYRFHEDEHGEVVAESRRDNLEPYLGLHYPATDIPQASRFLFRQNRVRMIADCRATPVRVIQDPGLSQPLCLVGSTLRAPHGCHAQYMANMGSIASLVMAVIISSGGDHEQTGRGGISSAMKLWGLVVCHHTSPRCIPFPLRYACEFLMQAFGLQLNMELQLAHQLSEKHILRTQTLLCDMLPRDSPTGIVTQSPSIMDLVKCDGAALYYHGRYYPLGVTPTESQIKDIIEWLTVCHGDSTGLSTDSLADAGYLGAAALGDAVCGMAVAYITPSDYLFWFRSHTAKEIKWGGAKHHPEDKDDGQRMHPRSSFKAFLEVVKSRSLPW

SEQ ID NO: 12269 - protein, 102 aa, Bromus inermis
SRFLFMKNKVRMICDCASTPVKLIQGDNLSQPISLCGSTMRAPHGCHAQYMANMGSIASLVMSITINEDEDEDGDTGSDQQPKGRKLWGLVVCHHTSPRFVP

SEQ ID NO: 12270 - protein, 104 aa, Bromus inermis
QASRFLFRQNRVRMIADCHAAPVRVIQDPAMPQPLCLVGSTLRSPHGCHAQYMANMGSIASLVMAVIISSGGEDEHNMTRGVIPSAMKLWGLVVCHHTSPRCIP

SEQ ID NO: 12271 - protein, 874 aa, Magnetococcus sp. MC-1
MMSFRLKTVLGIALIQAFVLLTLVSSALDDLRQSHQNNLLAHAKTLTTLMDTATKAPILEKNHSALQAIAHEIVQKNAITYLSIYDNQQQILYQFGPAPTPHIKPDINLRDIDDATFDLRHPMLHEQSVYATLALGLPVTPIIKALHAAQNQQLRLALLAMSASILVSWLLGSYLTRQLVHLREAATAIGHGHFNHRIPVQGQDELALTATAFNRMSGELDKTYQRLKKSLYTSNRMAKLEATIMHTVMDGLITMDSSGKVLSFNHAAEGIFGYAAAEVVGEQITMLMPEPYRSQHDDYVQRYLQGAAPRVIGSAGRHVTAQRKDGALLPIRLSVNEMVFEGERLFVGLVADVSERLQEERALIEAKEQAEAANMAKSRFLAVMSHEVRTPMNGILGMLGLLNDRRLDGQQQEWLATAQESAESMLTLLNDILDFSKIEAGHLELEQSAFSPEQILKGVHDLFLPRATAKGITLELEQGANLPAWVQGDPGRLRQVLMNLVSNGIKFTHQGGVTMRVAQQAKREDSLLLQFEVQDSGIGIPPQQLTQLFQPFNQLDPSYSRKYGGSGLGLAICRHLVDLMGGEIRLESPPSGGSRFTFTARFGYAHAPQDEVLDNSEQEVQLHGVRVLLAEDSPTNQMVAVAMLARVGCHVDVAVNGLEVLEALTRAPYDLILMDLAMPEMDGWQAIARIRGMNAPLRDIPIIALTANAYPEVRAQCLAAGAQDFITKPIQRNILLNGILALVTQAQQTGQQGVGAKRCHSNAPIRDEKVLERLAEDTHCSLLPRILEVFIDEADARLQAISTALDNEAWQTVALEVHPLKSSAATFGAARLAACAMQLDAACKAQQWTQMHDLCNCLIEVYRETRGLYKGQQV

SEQ ID NO: 12272 - protein, 764 aa, Magnetococcus sp. MC-1
MLIMLLLTRTLMGSLESNYLLAKQRQANENNIEILLASATEALENRNIIGLKKIFAQALRSQPQLLELTILNDDGKPLFSSTREQAPNTTLTHFRTPIMVQGSFQGILVGAWDLAPDLRAIDTHVNHILLLTSLLFGLITLMVIFMVHRLAIQPVDAIYNRLIKQISPPQSKPETFHAARELRRLHQTVESFSRTAASHLENARTLQESEALLKQRVERRTRELRLAKEAAEQANLAKTEFLATMSHEIRTPLNGVLGMSDLLLESDLNSYQRHHVETIHRSGRTLLRVINDILDLSRIQAGRMPLEVTAFKLRACLEDVQALFKDQARRKGLSFSINCQEELPQRLLGDATRLNQILFNLVGNALKFTERGFVRVSVQAEQVREADLLLRIQVEDSGIGISDEYKNRLFEIFSQQDSSISRRYGGSGLGLVITRKLAQIMGGKLGFSSRSGAGSTFWVTARFGRVPDTLPDHPLLPREEQQSNLLNQRFRAHILLAEDNPVNQDVARLNLERLGCRVTLVENGQQAVTVFQENRFDLVLMDCEMPIMDGYTATRTIRDLERQQGRRATPIIAVTAHALASHRNKAIATGMNDFLSKPFSTTKLIKLLATYLPPHTVIAQPDPAPPVVTQETAPSADPAHKTLDHRALDQIRALDPADPQGMLNRMIDLYFEQSAKDFKAIENGLATQNAELIRFHAHKLKSSSAQMGGQQLSLLCRTIEEQCHTFTRVEESMSQASKAQHELCAALHALRQTAPPTPPSEGEI

SEQ ID NO: 12273 - protein, 890 aa, Magnetococcus sp. MC-1
MLTRDYRCSTPPWIMATWRSLGLPCPRSKLAPALWLFRGAAALGGGLTALMLIPLGWWFIRRQLVSPLHTLLHEIQQFHQEGRIPPRQIRYGASEFRTLTLEFRTLAHSIIEREKRLRTLSTGLEQAPISVLISDTQGNIEYVNPYFEQLTGYYSHEVLGKNPNLLKSDLNPPELFRDLWRTISAGAPWRGEFINRKKNGALHWQMAHIAPVLDNDGQITHFIALSEEITARKQADAALNESNERFRTLAQVSPVGIFQTDHDGEYIYVNTTWESITGTTSPQALSSQWDIHLHPDDQPRVQQRWQETVLHGNAFHEEYRFLRGDGTIRWVIGSAAPQRDPDRVIQGFVGTLTDITERKQMELELGKERALLRSLIDSIPDLIFYKRADGTYMGCNRAFELFCKRPEAALIGHTDQALFSPELAQLLKSGDELVINKNSCFSHEATGLFGDGHQVPFLIQKSPMHGYQGELLGLIGVARDITQRLRVEQELQQAKEDAEAANRSKSEFLAAMSHEIRTPMNVVIGMGEILLETPLNAEQTRYINSMQHAGDALLELIDNILDLSKIEAGRMTLEERAFRLDTMVISITDFFRLQALNHNLSLVVEIAPELEQQYVLGDAGRVRQVLYNLLGNALKFTEEGGVSLHLSLDANQHIHTRVSDTGIGIAPQQLERIFDNFTQEDSSVTRRFGGTGLGLAICRRFTELMGGRIWVESIEGQGSTFHMTLPLVLSHTPLHETPTTAVITPYNQGIVEAPCAFTPEHPQRPLSILLVEDSEDNRTLFKAFLQHTPHALVMVENGADALERVIVERFDLIFMDMQMPIMDGYSATRAIRQWEQQRGVPPHIIYALTAHALSGDRERSLQAGCDDHLTKPIKKRKLLEIIQQHAQPVE

SEQ ID NO: 12274 - protein, 847 aa, Magnetococcus sp. MC-1
MLKMAEQAPKESQESSPSLTLPPDPGPLRLVRSVGVQMLLMLVVLSGLVLSALLLSESAFEHMQRRVDYMVTTDLESLVATAELANESAAHAAAAPALAAAKNDFSRMAVMDQLMDWQRLLARSISGVKKMQRVAADEERGRYLKAVISHRDDLLDNLYALDGVVARRIALDQQLAEKMLILQRNDESLARLLPTVKTQQTPQFQVNLLAFGATFHSMSAILHSAMQSDSRGRLKRLQKRVMDAHQLAHDYYDSLHLESEQLAPFFDAIHELLEGPANLFQLRLEALDVLKKQRGLLQRNKQLASQFNETVARLFDLVRSDVRRQTAQVKEVAKQSSQHLRGIAAVALVAIVIGVMMVRWRLVVPLDQLHSAIVEHLRGNTRSTVRQSGKNEIARISQGLAYFIALIDQRERALRWAKEAAEQAAQAKSEFLANMSHEIRTPMNAITGLTGLCLKTDLNSKQRDYLTKVEGAARSLLRIVDDILDFSKVEAGCLVLEETDFELESVFDHLSTMISQKAHEKGLEVVYGVPRSVPTYLRGDPLRLSQILINLASNAVKFTEEGDIVVQVAVDRYLEEQVVLHFSVRDSGMGMSQPQLERLFHSFTQADSSTTRRFGGTGLGLTISKRLVEMMQGKIWVESSLGQGSAFHFTACFRYDPERALAPCMLTWALQDKRALLVDNNPTSRGFLREMIASFSLKVQLACGLDEGMQKCHQARDEGHPFDVVVLNFSAEQDSATGLAVLQDLQRLGGDEALRRTLVIVPVTQEALIRAADRLDVGVLQFKPIYPAALQSGLTAILCPQQDDDGAAQKLTRRCIWIYTACICYWSRIMRLINWLPAKSSKGLGPR

SEQ ID NO: 12275 - protein, 948 aa, Magnetococcus sp. MC-1
MNIRSIVFLFGFSGSAILAAGIWSFSVSYGEVTALFQRQNIISQITDQGYRLALLTNEVLLQREIRAEQQWLSLYRMLEQFLEKNAAQLTPVQSYVQGIQHSLQNLHQLFERVTEGFKIGPLEGNAYQAQQRLYLLQMSQISIRIAELQTRLGELTNISNDAAEKTAGSSYEGVLFQFGLFLFALILYAVLAILFFYTRLLEPLNRLHKGIQRIQQGDVKHRPSHRVMDELGALFAAFSHLLDELQIAITYRKNNEEHLRQLLKLNEEASHLSERELCDRGLGIVVSLTQSEVGYLHMVHSDQETLTRVTWNHPRMALGHALDDALVFLNQAGVLTDWAAREKPIIQNNKPNFQDDQEVSADRFTFFRHLSVPVIEGNNVRMVMGVGNKAEDYNQNDVRQLQTVANEVGKFVQRRRSEIALRIASDEALKANRAKSDFLAVMSHEIRTPMNAIMGMTELLEETELTTIQRNYLSICRSSGQNLLQLINDILDISKVEAGRMEVAVAPFHLHRIIHDANQVILFRAQEKGLNQIVYIDPAVPTILLGDQARIRQILINFLGNSVKFTQSGTIATLVTTRAHANKEDQLVIHVVDTGIGIEQSEQEAIFKAFHQVDSSNQRQQGGTGLGLAICLKLVALMQGSVSLSSRAGKGSTFTLTLPLTVAPAEQIQSLKVERGLTGYHMVIWHTHPISTLYIEEMFKERGAKVRSCNQSMTLANCAIQGDAVLATTDMMIIHYHEEDKTNPLELINTIRSEQSLHEIPVLVYGRCYDPALLKQLNQLGVRFLPESLMQDVLCEQIVTELSKRPRSAVTSGQGGTLPMHILLVDDSPDNIFLIQAFLKKTSYQISTVYNGKEAVEYVMQADTPPDLILMDIQMPIMDGYAATRQIRLLEQQQGQSRIPIIALTAHAMAEEAEKLKAAGCDLHMAKPVSKRILLEVLGRYHEKMAYS

SEQ ID NO: 12276 - protein, 701 aa, Magnetococcus sp. MC-1
MEMERDILNQKVLICEYIDLNSRLENFVSAFNFHILVVDDTTANRYTMKAILGGLEHVVILEANSGEQALALTIEQQVDLILLDIQMPGMDGFETAHLLKMSASTRDIPIIFITAIYRSEHFYKQGYQVGAVDYLTKPVDENLLLNRILSYMRLLQREKSLQRTMAELQRKEHALQTAHDEIAETLRERTVALDRASDAIISADQQGHVIFWNHGAERIFGYPKQTILHTPLLRLIPDQLHETFLSHFSEVIASGEIKNSDSIYEFSGLRANGEVFPIEVSVSYWQGAERHFFSAVVRDISQRKQLETQLRHAQQISESANRAKSTFLATMSHEIRTPLNTILGMGQLLEETDLTEMQHWCVNILGNSGRALLTLINDILDLSKIEEGHLSLEHTPFDLHQLLQEVEELFTFSALAKGITLRGHFSESLPQWVMGDPTRLRQVLLNLLGNAIKFTKQGFVELSAQTMAEDEICFSVFDSGPGIAKERQQEIFLPFTQADSSTTRKYGGSGLGLTISRRLVKLMHGQIQLESRLGKGSRFYFSLNLPQAPTERIPPPSLPATTVVHSSPQRALTILVADDSDDNRILIEAFLKKSPYKLVMASNGLEALEEFKKQPFDLVLTDIQMPIMDGYEAIRQIRQWESSQKMTTRTPIIALTAHVMKEEAEQIEQAGGDLHLSKPIQKKRLLEVIQTLTHDNRLSVR

SEQ ID NO: 12277 - protein, 1059 aa, Magnetococcus sp. MC-1
MKLSHKFILTLLPPILLALFGLGWWHHHTTMAEVTKANERYLQTLLDGFMENALQRRFVILQENNLNDIASFVQTYRREIYADAERIAQKHEVQLIIYDTRGNVQYATSKPITKQPPIELKQLLLPDSTGRLTALPPSGDEATGALYLQQGFSPWRWQILLLASDAQLTAAVRNIRHTTLLVAALLTAAFILLVYGLLRHLVLQPVALLRQASKCIAHHEPLPKLPLTEGDEISHLAIAIAAMSRSIGEYHRHLQTQRNRFETLLAANPDLISLKNRVGIYQVVNPAFCHFLGLPKEAILGQDDARLFTPHQAARIRQADQWVLSSGAPSAQEEEAVGPDNLPLWLHVIRTPITQATGEVSGILTTVRNISARRMAEEALRTAHEGLEQEVAQRTQALRESETRLRIVTENLPAVVWMSDPLLTSMHFVSPAYEQIWGKSRESLLQDPQSLWTSIHPSDRSFVLKRILNSNGQPWEAEYRILHPDGTTRWIREQGAAFRDTHKQILFLIGCAFDVTPLKETERALSTAKQEAESANHAKSAFLATMSHEIRTPLNGITGMIELLQRSALSVEQRQQVETISKCSVVLMDILNDILDLSKIEAGQLVLERAPFSPTQLLLNLLEVMQPQARNKELDLQLNMDEKLPSTMLGDATRLRQVALNLIGNAIKFTPRGWVKISLLVHERIDDIVWVELAVQDQGIGIADEKLVHLFNPFTQADSSITRNYGGTGLGLAISKRLVEAMAGAISVTSIEGKGTHFRVTLPMQVAHTPLPADAFAPQETLALRPLQMLLVEDETVNQQVVCALLEDEGHHVDVANHGEEAVLMCQQRAYQVILMDLRMPKMDGLSATEQIRQQGMNQQTPIIALTADVLKSTLDRCLEVGMQQVLTKPIRLVQLNHALAHIGLPMAPPRPPAQALSEPAPEATESALPTESEEDTCLNLTRLRYLVSNMDQDHLLNIIQAFKTTSENCLSGMQQALENGDEGALRHTAHKLAGSAATLGLQRVMEMAKIMEEHSSQPSVQHNQLSLLRYQVELGFSAIAKETGLSLQMQETEHVASL

SEQ ID NO: 12278 - protein, 192 aa, Ephedra foeminea
DDHGEVISEIRRSDLEPYLGLHYPATDVPQASRFLFMKNRVRMICDCYSPPVRVIHDKRLKKELSFCGSTLRAPHGCHAQYMANMGSVASLVMAVIVNEKEDEEAENEGQSQPKGRKLWGLVVCHHTSPRFVPFPLRYACEFMMQVFSIQLNKEVELACQMREKQILRTQTLLCDMLLRDTPLGIISQKPSI

SEQ ID NO: 12279 - protein, 205 aa, Ephedra foeminea
DEHGEVVSEIRRSDLVPYLGLHYPATDIPQASRFLFMQNRVRMICDCRALPVKVIQSGELKQPLCLVGSTLRAPYGCHAHYMANMGSIASLVMAVIVRNEDDGGNNNTGSGGGGSGGEGSGSHIGRNTMKLWGLVVCHHTSPRTVPFPLRYACEFLMQAFGLQLNMELQLAAQLTEKHILKTQTLLCDMLLRDTPMGIVTQSPSI

SEQ ID NO: 12280 - protein, 376 aa, Urochloa mutica
ALSIAGAVQSQKLAVRAISRLQALPGGDVKLLCDTVVEHVRELTGYDRVMVYRFHEDEHGEVVAECRRDNLEPYLGLHYPATDIPQASRFLFRQNRVRMIADCHATPVRVIQDPGLSQPLCLVGSTLRAPHGCHAQYMANMGSIASLVMAVIISSGGDDEQTARGGISSSMKLWGLVVCHHTSPRFIPFPLRYACEFLMQAFGLQLNMELQLAHQLSEKHILRTQTLLCDMLLRDSPTGIVTQSPSIMDLVKCDGAALYYHGKYYPLGVTPTESQIKDIIEWLTVCHGDSTGLSTDSLADAGYHGATALGDAVCGMAVAYITPSDYLFWFRSHTAKEIKWGGAKHHPEDKDDGQRMHPRSSFKAFLEVVKSRSLPW

SEQ ID NO: 12281 - protein, 755 aa, Pseudomonas putida KT2440
MTGAFSIMTADNSLADAMERCAQEPIQVPGSIQPHGFLLVLDATDLRVLQASENVEHWLGLPARELIGCHFADLVHEGFDLHAHLTRLPEDEVFPFHIGDVRLRQGAPISALLHMLVHCHDQVLIAEFEPPRLPADLVGQGDYYPLVRSFVASLQVASSIEDLLQQTVLQLKRITGFGRVKAYRFDAEGNGQVLAEVVDPGYPSYAGLCFPAADIPRQARELYRVNRIRVIEDANYQPSPLLPATNPRTGKPLDMSFAALRSVSPVHLQYMRNMGTLASMSLSIVVDGQLWGLISCHHQQPRPVDLRTRTACELLASVLSLQIESRESHASTRKLLTLRQHIVRMISSMADHDSVSDGLRDLPEVLLAFADAQGAAVISAERCDLIGQTPPEAQVTALVHWLGQRDEDKVFHSDNLRRDITELPELANHAGGVLAVAISQIHSHYLLWFRPEQIRTVNWAGQPTKQVGPQGNLDPRHSFERWQEEQRGYSQAWDPLVIEGVIELRAAVLGIVLRKAEELAQLAGELRRSNKELEAFSYSVSHDLRAPLRHIAGYTELLGEIEGQGLSERGKRFLQHIGEAAHFAGSLVDNLLNFSQMGRSALRLSDVDLNALVEAIRSELAPDYEGRAIVWDIAPLPKVIGDPAFINMALHNLIANAIKYTRGRTPARIEISAVQHPEETEVCIRDNGVGFDMAYANKLFGVFQRLHRMEDFEGTGIGLASVRRIIERHDGRVWATGQVDQGASFHFTLPRNTAT

SEQ ID NO: 12282 - protein, 847 aa, Pseudomonas putida KT2440
MTYNPQVNLTNCDREPIQIPGSIQPHGCLLACDASATVVLRHSVNAPQMLGVANDINGQKLHAVLGDEVTHTLRNALARTRDASRPALSFGVTLPNGAAVDIAAHLYKGTAILEFEPAGASIAEPIELARTLIAQLREIDQTHKLFRDAARFVRAVLGYDRVMIYQLGADGAGKVVAESKRSDLESFMGQYFPASDIPQQARALYLRNPIRVISDAQFNTVAINPVLDPSGEPLDLSYAHLRSVSPIHCEYLCNMGVGASMSISVIVNGELWGMIACHHYAPRTLAMGQRVAAEMFGEFFSLHIETLRSRQKLEAAVRIHKALDSLLRDANQAADIDGFFHARLPRLMSLIPCDGIGMSLLGRWSCAGLAPPQTAVPDLLRLADMVSEGRIWASNRLSTVLPSAQAYFNDVSGVLIIPMSQHPRDYLIFFRKEVVETLDWAGDPNKTYDSGALGDRLTPRKSFAIWKETVHQQSLPWTEQDRQFGDAIRTAIVEVVLHNSELLASERAKADVRQRMLNEELNHRVKNILSLIGALVAHPTPESQTLQDYVATLKGRIQALSLAHDQVVRGDGGGRLAKLLEAELSPYRTAADVIELQGPNVILDARAYSVMALVLHELATNAAKYGALSRAGGKLSVSWAIDASNACAISWREMGGPTVRPPSRSGFGTVLIDRSIPFDLGGTSAVEYHPEGLQGFFRIPAKHLSVAEAAETALPATPLARANGAFAARSGLCVLILEDQLVIAVGLEQILNDAQIKDVITASSEDQAMQLLGSHKPDAAILDVNLGTGTSISVADELVRRQVPFLFATGYGDGISIPEHLQHVPVARKPYDANAILASLQSLLELG

SEQ ID NO: 12283 - protein, 643 aa, Pseudomonas putida KT2440
MSKRLSWDIHTRTQIISLGPALLLTLLLISFFTFVRIQDLRQELNHTGQLIANQLAPASEYGVISGNNEVLEGLMRATLSIPHVRFLEVQDSRNHILVYVEQSDESANRAQQVEVFQAPIRLQQIRLDNDFLQQGKATSPAIGDDYLGRVIVGMSDDAFSQRQQEIVIKAGILALFALLFTFLLARRLALSLAKPISDMGHAVKAIQQGEYNTPLPVVDDSELGHLARHINNLASALEQASDEQKQAIAELIQAREEAEQANRAKSDFLAMMSHELRTPMNGVLGMLQLLETTPLSSEQADYTAVASESTGHLLKVINDILDFSRIERAALQLEHIDFNLGELITNSVQSFQHSAQQRGLGLHLQLPAGIEQLQVNGDPTRIRQILLNLIGNALKFTERGQVQVDARWQVLDRQLIWLTCSVRDTGIGIDSDRLEMMFVAFQQADSSISRRYGGTGLGLSIARTLAERMGGKLRGESREGLGSTFTLEMPLALANPAPVPLTPPTTVRTTVPDNDQVLLVEDNPVNRSVVEAMLRSLGLAVCTAEDGLEAVELVGRQRFAAVLMDCRLPHLDGYEATRRIRQLPNGAGLPIIALTANALQGDRERCMAAGMDDYLSKPLRRTELQQVLQRWLPGQTTATGDKC

SEQ ID NO: 12284 - protein, 392 aa, Aspicarpa hirtella
DLEPVNPADVPVTAAGALKSYKLAAKAISRLQSLPSGNISLLCDVLVKEVRDLTGYDRVMVYKFHEDEHGEVVLECRRSDLESYLGLHYPATDIPQASRFLFMKNKVRMICDCLAPPVKVIQDKRLPHPLSLCGSTLRSPHGCHAQYMTNMGTIASLVMTVTVNEDDDMMDGDQQHMTKKLWGLVVCHHTSLRFVPFPLRYACEFFIQVFGVQINKEVELAAQVREKHILQIQTMLCDLLLRDAPVTIITQSPNVMDLVKCDGAALYFKNTTWLLGVTPTEEQIRGIAEWLLKYHSGNTGLSTDSLMEAGYPGASGLGDAVCGMAAVSITSRDFLFWFRSHTAKEIKWGGAKHNPDDKDDLRKMHPRSSFKAFLEVVKWRSMPWEDIEMDAI

SEQ ID NO: 12285 - protein, 392 aa, Lasiocarpus sp. Anderson 13834
DLEPVNPADVPVTAAGALKSYKLAAKAISRLQSLPGGNISLLCDVLVKEVRDLTGYDRVMVYKFHEDEHGEVVSECRRSDLESYLGLHYPAIDIPQASRFLFMKNKVRMICDCLAPPVKVIQDKRLSQPLSLCGSTLRSPHGCHAQYMANMGTIASLVMSVTVNEDDDMIDGDQQQMARKLRGLVVCHHTSPRFVPFPLRYACEFLIQVFGVQINKEVELAAQVREKHILRIQTMLCDMLLRDAPVAIITQSPNVMDLVKCDGAALYYKNKFWLLGVTPTEAQIRDIAEWLLEYHSGNTGLSTDSLMEAGYPGASVLGDAVCGMAAVSITSRDFLFWFRSHTAKEIKWGGAKHDPEDKDDGRKMHPRSSFKAFLEVVKWRSLPWEDVEMDAI

SEQ ID NO: 12286 - protein, 392 aa, Lophopterys floribunda
DLEPVNPADVPVTAAGALKSYKLAAKAISRLQSLPSGNISLLCDVLVKEVRDLTGYDRVMVYKFHEDEHGEVVSECRKSDLESYLGLHYPATDIPQASRFLFIKNKVRMICDCLAPPVKVIQDERLPQPLSLCGSTLRSPHGCHAQYMTNMGTIASLVMSVTINEDDDTMDGDQQQTTRKLWGLVVCHHTNPRFVPFPLRYACEFLIQVFGVQINKEVELAAQVREKHILQIQTMLCDMLLRDAPVAIITQSPNVMDLVKCDGAALYFKNKIWLLGVTPTEEQIRDIAEWLLEYHSGNTGLSTDSLMEAGYPGASVLGDAVCGMAAVSITSRDFLFWFRSHTAKEIKWGGAKHDPDDKDDGRKMHPRSSFKAFLEVVKWRSMPWEDVEMDAI

SEQ ID NO: 12287 - protein, 392 aa, Rhynchophora phillipsonii
DLEPVNPADVPVTAAGALKSYKLAAKAISRLQSLPSGNISLLCDVLVKEVRDLTGYDRVMVYKFHEDEHGEVVSECRRSDLESYLGLHYPATDIPQASRFLFMKNKVRMICDCVAPPVKVIQDERLPQPLSLCASTLRSPHGCHAQYMTNMGIVASLVMSVTVNEEDDMVDSDQPQMARKLWGLVVCHHTSTRFVPFPLRYACEFLIQVFGVQINKEVELAAQVREKHILQIQTMLCDMLLRDAPVAIITQSPNVMDLVKCDGAALYFKNKTWLLGVSPTEEQIRDIAEWLLEYHSGNTGLSTDSLMEAGYPGAAALGDAVCGMAAVSITSRDFLLWFRSHTAKEIKWGGAKHDPDDKDDGRKMHPRSSFKAFLEVVKWRSMPWEDMEMDAI

SEQ ID NO: 12288 - protein, 392 aa, Rhynchophora phillipsonii
DLEPVNPADVPVTAAGALKSYKLAAKAISRLQSLPSGNISLLCDVLVKEVRDLTGYDRVMVCKFHEDEHGEVVSECRRSDLESYLGLHYPATDIPQASRFLFMKNKVRMICDCVAPPVKVVQDERLPQPLSLCASTLRSPHGCHAQYMTNMGIVASLVMSVTVNEEDDMVDSDQPQMARKLWGLVVCHHTSTRFVPFPLRYACEFLIQVFGVQINKEVELAAQVREKHILQIQTMLCDMLLRDAPVAIITQSPNVMDLVKCDGAALYFKNKTWLLGVSPTEEQIRDIAEWLLEYHSGNTGLSTDSLMDAGYPGASALGDAVCGMAAVSITSRDFLLWFRSHTAKEIKWGGAKHDPDDKDDGRKMHPRSSFKAFLEVVKWRSMPWEDVEMDAI

SEQ ID NO: 12289 - protein, 578 aa, Houttuynia cordata
  unsure (1)..(578): unsure at all Xaa locations
SGKPFYAIVHRVTGSLIIDFEPVKPFEVPMTAAGALQSYKLAAKAISRLQSLPSGSMERLIDTMVQEVFELTGYDRVMAYKFHEDDHGEVISEVTIPHLDPYLGLHYPATDIPQAARFLFMKNKVRMICDCRAKPVKVYQDDKLSFDLTLCGSTLRAPHSCHLQYMENMGSIASLVMAVVVNEGGEEDRGGPADSSQQQLGRYRRKKLWGLVVCHNTRPRFVPFPLRYACEFLTQVFAIHVSKELELEETNSRKEILRTQTLLCDMLLRDAPMGIVNQTPNIMDLIKCDGAALFYKDKVFRLGIAPSETDIREIAQWLSAYHMDSTGLSTDSLHDAGYPKAAFLGDLVCGMAAVKITCSDMLFWFRTHTAAEIRWGGAKHDHSDRDDGKRMHPRSSFRAFLDVVKTRSLPWKDYEMDGIHSLQLILRTSVKEPEQVDSNKVIHAQLGDLKLDEMNELHAVTTEVVRLIETATVPILAVDVXGLINGWNAKISELTGMSLEQVMXKHLLTLVEDCSINVVRRMLCLALKGEEEQNIEFQVKTHGTRSDHGPVVLVVNACASRDVHGNVVGVCFVXQDVT

SEQ ID NO: 12290 - protein, 392 aa, Houttuynia cordata
  unsure (1)..(392): unsure at all Xaa locations
DLEPVNPSDVPVTAAGALKSYKLAARAISRLQSLPSGDISLLCDVLVREVSDLTGYDRVMAYKFHEDEHGEVVAECKRADLEPYLGLHYPATDIPPASRFLFMKNKMRMICDCLAQPVKVIQDKRLPQPLSLAGSTLRAPHGCHAQYMSNMGSIASLVMSVVVSEGDDDSNNGEKTGRKLWGLVVCHHTSPRFIPFPLRYACEFLIQVFAIQLSKEVELAAQMKEKHILRMQTVLCDMLLRDAPMGIXTQSPNVMDLVKCDGAALYYRCQCWLLGTTPTENQIRDLAEWLLQYHNSSTGLSTDSLVDAGYPGAHELGDAVCGMAAIRITSRDFLIWFRSHTAKEIKWGGEKHDPSDKDAFESKMNPRTSFKTFLEVVKRRSLPWEDVEMDAI

SEQ ID NO: 12291 - protein, 392 aa, Acridocarpus macrocalyx
DLEPVNPADVPVTAAGALKSYKLAAKAISRLQSLPSGNISLLCDVLVKEVRDLTGYDRVMVYKFHEDEHGEVVSECRRSDLEAYLGLHYPATDIPQASRFLFMKNKVRMICDCLAPPVKVIQDERLPQPLSLCGSTLRSPHGCHAQYMANMGTIASLVMSVTVNEDDDMMDGDQQQMARKLWGLVVCHHTSPRFVPFPLRYACEFLIQVFGVQINKEVELAAQVREKHILQIQTLLCDMLLRDAPVAIITQSPNVMDLVKCDGAALYYKKKFWLLGITPTEAQIRDIVEWLLEYHSGNTGLSTDSLMEAGYPGVSVLGDAVCGMAAVSITSKDFLFWFRSHTAKEIKWGGAKHDPDDKDDGRKMHPRSSFKAFLEVVKWRSLPWEDMEMDAI

SEQ ID NO: 12292 - protein, 384 aa, Brachylophon curtisii
DLEPVNPADVPVTAAGALKSYKLAAKAISRLQSLPSGNISMLCDVLVKEVRDLTGYDRVMVYKFHEDEHGEVVSECRRPDLEAYLGLHYPATDIPQASRFLFMKNKVRMICDCLAPPVKVIQDERLPQPLSLCGSTLRSPHGCHAQYMANMGTIASLVMSVTINEDDDMMDGDQRQMARKLWGLVVCHHTSARFVPFPLRYACEFLIQVFGVQINKEVELAAQVREKHILRIQTLLCDMLLRDAPVAIITQSPNVMDLVKCDGAALYYKKKFWLLGITPTEAQIRDIAEWLLEYHNGNTGLSTDSLMEAGYPGASVLGDAVCGMAAVSITSRDFLFWFRSHTAKEIKWGGAKHDPDDKDDGRKMHPRSSFKAFLEVVKWRSLPW

SEQ ID NO: 12293 - protein, 392 aa, Diplopterys cabrerana
DLEPVNPADVPVTAAGALKSYKLAAKAISRLQSLPSGNISLLCDVLVKEVRDLTGYDRVMVYKFHEDEHGEVVSECRRSDLEPYLGLHYPATDIPQASRFLFMKNKVRMICDCLAPPVKVIQDDRLPQPLSLCGSTLRSPHGCHAQYMTNMGTIASLVMSVTINEDDDTMDGDQQQMTRKLWGLVVCHHTSPRFVPFPLRYACEFLIQVFGVQINKEVDLAVQMREKHILQIQTMLCDMLLRDAPVAIITQSPNVMDLVKCDGAALYFRNKTWLLGVTPTEEQIRDIAEWLLKYHSGNTGLSTDSLMEAGYPGASALGDAVCGMAAVSITSGDFLFWFRSHTAKEIKWGGAKHDPDDKDDLRKMHPRSPFKAFLEVVKWRSMPWEDVEMDAI

SEQ ID NO: 12294 - protein, 381 aa, Heteropterys leona
ETPAGALKSYKLASKAISRLQSLPSGNISLLCDVLVKEVRDLTGYDRVMVYKFHEDEHGEVVSECRRSDLESYLGLHYPATDIPQASRFLFMKNKVRMICDCLAPPVKVIQDETLPQPLSLCGSTLRSPHGCHAQYMTNMGTIASLVMSVTINEDDDMMDGDQQQMTRKLWGLVVCHHASPRFVPFPLRYACEFLIQVFGVQITKEVELAAQVREKHILQIQTMLCDMLLRDAPVAIITQSPNVMDLVKCDGAALYFKNKTWLLGVTPTEEQIRDIAEWLLEYHGGNTGVSTDSLMEAGYPGASILGDAVCGMAAVSITSRDFLFWFRCHTAKEIKWGGAKHDPDDKDDLRKMHPRSSFKAFLEVVKWRSMPWEDIEMDAI

SEQ ID NO: 12295 - protein, 392 aa, Hiraea fagifolia
DLEPVNPADVPVTAAGALKSYKLAAKAISRLQSLPSGNISLLCDVLVKEVRDLTGYDRVMVYKFHEDEHGEVVSECRRPDLESYLGLHYPATDIPQASRFLFMKNKVRMICDCLAPPVKVIQDKRLPQPLSLCGSTLRSPHGCHAQYMTNMRTIASLVMSVTINEDDDTMDGDQQQMTRKLWGLVVCHHTSPRFVPFPLRYACEFLIQVFGVQINKEVELAAQVREKHILQIQTMLCDMLLRDAPVAIITQSPNVMDLVKCDGAALYFKNKIWLLGVTPKEEQIRDIAEWLLEYHSGNTGLSTDSLMEAGYPGASVLGDAICGMAAASITSRDFLFWFRSHTAKEIKWGGAKHEPGDKDDGRKMHPRSSFKAFLEVVKWGSMPWEDIEMDAI

SEQ ID NO: 12296 - protein, 392 aa, Hiraea fagifolia
DLEPVNPADVPVTAAGALKSYKLAVKAISRLQSLPSGNISLLCDVLVKEVRDLTGYDRVMVYKFHEDEHGEVVSECRRPDLESYLGLHYPATDIPQASRFLFMKNKVRMICDCLAPPVKVIQDKRLPQPLSLCGSTLRSPHGCHAQYMTNMRTIASLVMSVAINEDDDTMDGDQQQMTRKLWGLVVCHHASPRFVPFPLRYACEFLIQVFGVQINKEVELAAQVREKHILQIQTMLCDMLLRDAPVAIITQSPNVMDLVKCDGAALYFKNKIWLLGVTPKEEQIRDIAEWLLEYHSGNTGLSTDSLMEAGYPGASVLGDAVCGMAAVSITSRDFLFWFRSHTAKEIKWGGAKHDPGDKDDGRKMHPRSSFKAFLEVVKWRSMPWEDVEMDAI

SEQ ID NO: 12297 - protein, 392 aa, Hiraea fagifolia
DLEPVDPADVPVTAAGALKSYKLAAKAISRLQSLPSGNISLLCDVLVKEVRDLTGYDRVMVYKFHEDEHGEVVSECRRPDLESYLGLHYPATDIPQASRFLFMKNKVRMICDCLAPPVKVIQDKRLPQPLSLCGSTLRSPHGCHAQYMTNMRTIASLVMSVTINEDDDTMDGDQQQMTGKLWGLVVCHHTSPRFVPFPLRYACEFLIQVFGVQINKEVELAAQVREKHILQIQTMLCDMLLRDAPVAIITQSPNVMDLVKCDGAALYFKNKIWLLGVTPKEEQIRDIAEWLLEYHSGNTGLSTDSLMEAGYPGASVLGDAVCGMAAVSITSRDFLFWFRSHTAKEIKWGGAKHDPGDKDDGRKMHPRSSFKAFLEVVKWRSMPWEDVEMDAI

SEQ ID NO: 12298 - protein, 392 aa, Hiraea fagifolia
DLEPVNPADVPVTAAGALKSYKLAAKAISRLQSLPSGNISLLCDVLVKEVRDLTGYDRVMVYKFHEDEHGEVVSECRRPDLEPYLGLHYPATDIPQASRFLFMKNKVRMICDCLAPPVKVIQDKRLPQPLSLCGSTLRSPHGCHAQYMTNMRTIASLVMSVTINEDDDTMDGDQQQMTRKLWGLGCCHHTSPRFVPFPLRYACEFLIQVFGVQINKEVELAAQVREKHILQIQTMLCDMLLRDAPVAIITQSPNVMDLVKCDGAALYFKNKIWLLGVTPKEEQIRDIAEWLLEYHSGNTGLSTDSLMEAGYPGASVLGDAVCGMAAASITSGDFLFWFRSHTAKEIKWGGAKHEPGDKDDGRKMHPRSSFKAFLEVVKWRSMPWEDVEMDAI

SEQ ID NO: 12299 - protein, 392 aa, Hiraea fagifolia
DLEPVNPADVPVTAVGALKSYKLAAKAISRLQSLPSGNISLLCDVLVKEVRDLTGYDRVMVYKFHEDEHGEVVSECRRPDLESYLGLHYPATDIPQASRFLFMKNKVRMICDCLAPPVKVIQDKRLPQPLSLCGSTLRSPHGCHAQYMTNMRTIASLVMSVTINEDDDTMDGDRQQMTRKLWGLVVCHHASPRFVPFPLRYACEFLIQVFGVQINKEVELAAQVREKHILQIQTMLCDMLLRDAPVAIITQSPNVMDLVKCDGAALYFKNKIWLLGVTPKEEQIRDIAEWLLEYHSGNTGLSTDSLMEAGYPGASVLGDAVCGMAAVSITSRDFLFWFRSHTAKEIKWGGAKHDPGDKDDGRKMHPRSSFKAFLEVVKWRSMPWEDIEMDAI

SEQ ID NO: 12300 - protein, 392 aa, Malpighia stevensii
DLEPVNPADVPVTAAGALKSYKLAAKAISRLQSLPSGNISLLCDVLVKEVRDLTGYDRVMVYKFHEDEHGEVVSECRRSDLESYLGLHYPATDIPQASRFLFMKNKVRMICDCVAPPVKVIQDDRLPQPLSLCGSTLRSPHGCHAQYMTNMGIIASLVMSVTVNEDDDMVDGDQPQMARKLWGLVVCHHTSTRFVPFPLRYACEFLIQVFGVQINKEVELAAQVREKHILQIQTMLCDMLLRDAPVAIITQSPNVMDLVKCDGAALYFKNKTWLLGVTPTEEQIRDIAEWLLEYHSGNTGLSTDSLMEAGYPGASALGDVVCGMAAVSITSRDFLFWFRSHTAKEIKWGGAKHDPDDKDDGRKMHPRSSFKAFLEVVKWRSMPWEDVEMDAI

SEQ ID NO: 12301 - protein, 392 aa, Peregrina linearifolia
DLEPVNPADVPVTAAGALKSYKLAAKAISRLQSLPSGNISLLCDVLVREVRDLTGYDRVMVYKFHEDEHGEVVSECRRSDLESYLGLHYPATDIPQASRFLFMKNKVRMICDCLAPPVKVIQHERLPQPLSLCGSTLRSPHGCHAQYMTNMATIASLVMSVTVNEDDETMDGDQQQMTRKLWGLVVCHHTSPRFVPFPLRYACEFLIQVFGVQINKEVELAAQVREKHILQIQTMLCDMLLRDAPVAIITQSPNVMDLVKCDGAALYFKNKTWLLGVTPTEEQIRGIAEWLLEYHSGNTGLSTDSLMEAGYPGASGLGDAVCGMAAVSITSRDFLFWFRSHTAKEIKWGGAKHDPDDKDDLRKMHPRSSFKAFLEVVKWRSMPWEDMEMDAI

SEQ ID NO: 12302 - protein, 392 aa, Ptilochaeta nudipes
DLEPVNPVDVPVTAAGALKSYKLAAKAISRLQSLPGGNISLLCDVLVKEVRDLTGYDRVMVYKFHEDEHGEVVSECRRSDLESYLGLHYPATDIPQASRFLFMKNKVRMICDCLAPPVKVIQDERLSQPLSLCGSTLRSPHGCHAQYMANMGTIASLVMSVTVNEDDDMMDGDQQQMARKLWGLVVCHHTRPRFVPFPLRYACEFLIQVFGVQINKEVELAAQVREKHILRIQTMLCDMLLRDAPVAIITQSPNVMDLVKCDGAALYYKNKFWLLGVTPTEAQIREVAEWLLEYHSGNTGLSTDSLMEAGYPGASVLGDAVCGMAAASITSRDFLLWFRSHTAKEIKWGGAKHDPEDKDDGRKMHPRSSFKAFLEVVKWRSLPWEDVEMDAI

SEQ ID NO: 12303 - protein, 392 aa, Thryallis longifolia
DLEPVNPADVPVTAAGALKSYKLAAKAISRLQSLPSGNISLLCDVIVKEVRDLTGYDRVMVYKFHEDEHGEVVSECRRSDLESYLGLHYPATDIPQASRFLFMKNKVRMICDCLAPPVKVIQDERLPQPLSLCGSTLRSPHGCHAQYMANMGTIASLVMSVTINEDDDMMDGDQQQMARKLWGLVVCHHTSPRFVPFPLRYACEFLIQVFGVQINKEVEFAAQVSEKHILRIQTMLCDMLLRDAPVAIITQSPSVMDLVKCDGAALYYKNRFWLLGVTPTEAQIRDIAEWLLEYHSGNTGLSTDSLLEAGYPGASVLGDAVCGMAAVSITSRDFLFWFRSHTAKEIKWGGAKHDPDDKDDGRKMHPRSSFKAFLEVVKWRSLPWEDVEMDAI

SEQ ID NO: 12304 - protein, 392 aa, Tristellateia africana
DLEPVNPADVPVTAAGALKSYKLAAKAISRLQSLPSGNISLLCDVLVKEVRDLTGYDRVMVYKFHEDEHGEVVSECRRSDLESYLGLHYPATDIPQASRFLFMKNKVRMICDCLAPQVKVIQDERLPQPLSLCGSTLRSPHGCHAQYMANMGTIASLVMSVTINEDDDTMDGDQQQMARKLWGLVVCHHTSPQFVPFPLRYACEFLIQVFGVQINKEIELAAQVREKHILRIQTMLCDMLLRDAPVGIITQSPNVMDLVKCDGAALFYKNKFWLLGITPTEAQIRDIAEWLLEYHSGNTGLSTDSLMEAGYPGASVLGDTVCGMASVSITSRDFLFWFRSHTAKEIKWGGAKHDPDDKDDGRKMHPRSSFKVFLEVVKWRSLPWEDMEMDAI

SEQ ID NO: 12305 - protein, 376 aa, Tristachya superba
ALSIAGAVQSQKLAVRAISRLQALPGGDVKLLCDTVVEHVRELTGYDRVMVYRFHEDEHGEVVAECRRDNLEPYLGLHYPATDIPQASRFLSRQNRVRMIADCHATPVRVIQDPGLSQPLCLVGSTLRAPHGCHAQYMANMGSIASLVMAVIISSGGDDEQTARGGISSSMKLWGLVVCHHTSPRFIPFPLRYACEFLMQAFGLQLNMELQLAHQLSEKHILRTQTLLCDMLLRDSPTGIVTQSPSIMDLVKCDGAALYYHGKYYPLGVTPTESQIKDIIEWLTVCHGDSTGLSTDSLADAGYHGATALGDAVCGMAVTYITPSDYLFWFRSHTAKEIKWGGAKHHPEDKDDGQRMHPRSSFKAFLEVVKSRSLPW

SEQ ID NO: 12306 - protein, 376 aa, Andropogon ternarius
ALSIAGAVQSQKLAVRAISRLQALPGGDVKLLCDTVVEHVRVLTGYDRVMVYRFHEDEHGEVVAESRRDNLEPYLGLHYPATDIPQASRFLFRQNRVRMIADCHATPVRVIQDPGLSQPLCLVGSTLRAPHGCHAQYMANMGSIASLVLAVIISSGGDDEQTGRGGISSAMKLWGLVVCHHTSPRCIPFPLRYACEFLMQAFGLQLNMELQLAHQLSEKHILRTQTLLCDMLLRDSPTGIVTQSPSIMDLVKCDGAALYYHGKYYPLGVTPTESQIKDIIEWLTVCHGDSTGLSTDNLADAGYLGAAALGDAVCGMAVAYITPSDYLFWFRSHTAKEIKWGGAKHHPEDKDDGQRMHPRSSFKAFLEVAKSRSLPW

SEQ ID NO: 12307 - protein, 736 aa, Agrobacterium tumefaciens str. C58 (U. Washington)
MSSHTPKLDSCGAEPIHIPGAIQEHGALLVLSAREFSVVQASDNLANYIGVDLPIGAVATEANLPFISVLSAWYSGEESNFRYAWAEKKLDVSAHRSGTLVILEVEKAGVGESAEKLMGELTSLAKYLNSAPSLEDALFRTAQLVSSISGHDRTLIYDFGLDWSGHVVAEAGSGALPSYLGLRFPAGDIPPQARQLYTINRLRMIPDVDYKPVPIRPEVNAETGAVLDMSFSQLRSVSPVHLEYMRNMGTAASMSVSIVVNGALWGLIACHHATPHSVSLAVREACDFAAQLLSMRIAMEQSSQDASRRVELGHIQARLLKGMAAAEKWVDGLLGGEGEREDLLKQVGADGAALVLGDDYELVGNTPSREQVEELILWLGEREIADVFATDNLAGNYPTAAAYASVASGIIAMRVSELHGSWLIWFRPEVIKTVRWGGDPHKTVQESGRIHPRKSFEIWKEQLRNTSFPWSEPELAAARELRGAIIGIVLRKTEEMADLTRELQRTNKELEAFSYSVSHDLRAPFRHIVGFAQLLRERSDALDEKSLHYLQMISEAALGAGRLVDDLLNFSQLGRTQLTLKPVDMQKVVSEVRRSLSHAVSDRQIEWRIGALPVIFGDPTLLRQVWYNLIENAIKYSSREPVSIITISAVETEDDVTYSVEDNGVGFDMAYYNKLFGVFQRLQRVEDFEGTGIGLALVRRIVERHHGLVGAEGTVGEGATFSFTLPVTKVEEEKIA

SEQ ID NO: 12308 - protein, 745 aa, Agrobacterium tumefaciens str. C58 (Cereon)
MQRERLEKVMSSHTPKLDSCGAEPIHIPGAIQEHGALLVLSAREFSVVQASDNLANYIGVDLPIGAVATEANLPFISVLSAWYSGEESNFRYAWAEKKLDVSAHRSGTLVILEVEKAGVGESAEKLMGELTSLAKYLNSAPSLEDALFRTAQLVSSISGHDRTLIYDFGLDWSGHVVAEAGSGALPSYLGLRFPAGDIPPQARQLYTINRLRMIPDVDYKPVPIRPEVNAETGAVLDMSFSQLRSVSPVHLEYMRNMGTAASMSVSIVVNGALWGLIACHHATPHSVSLAVREACDFAAQLLSMRIAMEQSSQDASRRVELGHIQARLLKGMAAAEKWVDGLLGGEGEREDLLKQVGADGAALVLGDDYELVGNTPSREQVEELILWLGEREIADVFATDNLAGNYPTAAAYASVASGIIAMRVSELHGSWLIWFRPEVIKTVRWGGDPHKTVQESGRIHPRKSFEIWKEQLRNTSFPWSEPELAAARELRGAIIGIVLRKTEEMADLTRELQRTNKELEAFSYSVSHDLRAPFRHIVGFAQLLRERSDALDEKSLHYLQMISEAALGAGRLVDDLLNFSQLGRTQLTLKPVDMQKVVSEVRRSLSHAVSDRQIEWRIGALPVIFGDPTLLRQVWYNLIENAIKYSSREPVSIITISAVETEDDVTYSVEDNGVGFDMAYYNKLFGVFQRLQRVEDFEGTGIGLALVRRIVERHHGLVGAEGTVGEGATFSFTLPVTKVEEEKIA

SEQ ID NO: 12309 - protein, 850 aa, Agrobacterium tumefaciens str. C58 (Cereon)
MASTDYHVDLTNCDREPIHIPGYIQPHGCLIACDNAMRMVLRHSENCGELLGLEGDLNGRTAEDVLGKKLVHDLRNALTVTGRTTRPAMLPAMETSDGRSFDISLHRYKSTTIIEFEPSGSDAQPLGTARKMVDRIREADSVESLISRTTRLVKATLGYDRVMIYRFQEDGAGKVVSEAKQPELESFLGQYFPASDIPQQARALYLKNTLRIISDASGTRIPVLPAVDVSGEPLDLSYAHLRSVSPIHCEYLRNMGVAASMSISVIVDGALWGLIACHHYSPRVLSMPVRIAAEMFGEFFSMHLQVLKQKRRLDTINHAHAALDRFLRLAAHHANIEELLVDSFQDFADLMPCDGVGLWVGNNWHGHGATPPHDAIPRLARFVASASEGRVWATHALSQAIPEAEIYAGTAAGMLAIPLSQVKSDYLLFFRKEIVQNLNWAGNPEKSYETGPMGDRLTPRKSFAIWKETVRLQAQPWSEADREIAEAARIALVEVAFHHSELMAGERERAEVRQRMLNEELNHRVKNVLAIIKSLVGNPSQEGKTLQEYVTALKGRIQALSFAHDQIIRGEGGGALRDLLEAELSPHRSPETTVKLEGPQITLDSRAFSVMALVLHELATNAAKYGALSQNGGQLHVRWDVNENRDCEISWRETLLTTLPAPSRAGFGTALISRSIPYDLGGRSTIRYLPNGLEAEILLPFRHVSSVSAAFETKTEAETLPQPRRYNREEPLKVLLVEDQMLIAMDVENMLEDNGIKAIETATSSAMAIEKLKTYLPDVAILDINLGSDTSIPVARELHRRGIPFLFATGYADGSMVPDEFGAVPVIRKPYDEDALMAGIGVLVGDTERV

SEQ ID NO: 12310 - protein, 929 aa, Yersinia pestis KIM
MTLLMGVTLTVIWLILIATTAFFSYENTRQILINELTHMASMRADLSNHQFEGAERDAASLISRRESLQSTSPLPEISIKHYDSYYIPFNLDSCNINQHKNDLWIIQAYGTAGQTYYLDSFIIKQKEGIVLFPPQKSSSDYLNQRRKDLLLLPKFPTHNNIYWGAPTYTPQGGWHVSVAVCDKVGTLAGFALKLNDLIAYNHPVEQRDINLLLDKNGELLPISQQATSSNQLHEILNQLKNSKLHDGWQQTPDYLVLRTQLKGPGWQQLVIYPRMGFAWEALKPALYQLPFALAILLLLTSVLSLLLRYYLAIPLWNFINIIGATGPQAMEPRLPINRIDELGHIARAYNNLLDTLNEQYDTLEMKVKERTLALAEAKRAAEQANRRKSDHLTTISHEIRTPLNGALGAVELLQNTPLDAGQMRLAETAHQCSLSLLAIINNLLDFSRIESGQMTLSLEKTALLPLLDQAMLTIHSQALSKSLALSTFISANIPLELELDTLRLRQILVNLLGNAVKFTPQGRIQLRVRRQNQTLCFTVEDTGCGIDVQHQQTIFQPFMQTSDHEQGTGLGLAIADNLAKMMGGHLTVFSEPGQGSCFSLCLPFNAITPPMPFHGELFAPQRLHAQLSAWGMTCQPELANQPSRHFVDNALCYLPGRLYAKLKQYLQGAETEALKSLPLQPWQMHILLVDDSETNRDITGMMLQQLGHQVTRADSGTTALAIGRQHRFDLVLMDIRMPVLDGLATTARWRHDPANIDSHCMITALSANASPDEQIKTSQAGMNHYLSKPVTLGQLAEMLDLTAQFQLERGVDLSPQLSEPQPLLDLADSALSLKLYQSLQVLIQQAKDAIENLPVLSHTLHTIKGCAGQAGLIELQDAVIQLEHALDTHETLTQQEIIQLDEIIHVLLQPPTTCESTFIISQGQSLMVK

SEQ ID NO: 12311 - protein, 296 aa, Magnetospirillum magnetotacticum
MTMPRDGSRRRCWPKTSGGATMADARDIDSLSAIVTEAIATISGFERVLVYRFDTDGCGDVVGESLAPDWPQSFLGLRFPDTDIPAQARALYRQTADRWIPTRDYVPVPLVPAANDRDRPISLALSRYRSVSPIHRMYQGNIGVDGSMSISVMRDGELWGLIIGHHRKPHRVPVAIQHLIVALGRAFSLRLDSLLNYTAKVDQEREMQAFSAMLGKLAAADDFLMALTEGKPNIVDLLPGCVGAAVVWESDHEPLHLRALGVTCRGLPVAPGWGGGRVRRPVMAVSTAQPKTLIYC

SEQ ID NO: 12312 - protein, 1043 aa, Magnetospirillum magnetotacticum
MEEELRAANQESRRQAKAHLQAILNTVGEGIVIADQTGTVVSVNPALLSIFGYERDEVIGNNIDMLIPLAALKAAGSSGMERIFDLGRESMALRRGGTSFPIELAAGDLTPTGSAQFVVIMRDISERKRIEREMAESEERFRDFAQSTSDWFWEMGPDLRFTGFSGQFTEHTRALPSHYVGHTRDEMISDDTPMEARLQNLADMEARRPFRDFVYHTKNMDGPGRFLRVNGKPVFDPSGEFKGYRGTASDITEEIEAADRLKASQAEIERLAERNNSILESVDDGIVGIDLNGRATFVNRAAAKLLDFEPAELVGSDILPLMALDMETAESLYQILLRLADSIRDDTASFKRRDGSPLPVEYIASPVMDKGNQVGVVLGFRDITQRRLVERQLREAKEAAEAGNRTKSEFLATMSHEIRTPMNGVIGMTGLLLDTKLTEEQRHFAETIRDSGESLLTVINDILDFSKMEAGKLDLDYTEFELVPLVESVVDILAPRAHAKGIEIASLIDPRLRMLVRSDPGRLRQVLMNLGGNAVKFTEKGGVSIEVTLLERPGAQPMVHFDVRDTGIGIPPEAQGRLFSMFMQVDASTARRYGGTGLGLAICRRLAELMGGEVGLESQPGKGSRFWMSVPMELLAPQSAAPPDLTGHRVLVVDDNPVNCDVIERQLRAFGVEVHACLDAGSGMGELTRAAAMGTPWEVAVIDSQMPVVTGSEMVRMMRAIPMLGGSRIIVTSSQGMPAEQQDGQPAIDAFLHKPLRQSTLLDTIGRVLGLSGPEEQPAAPAEEHNAPDSTAKRLRILVAEDNPVNQQVALGLLRKLGHTVDVVGDGAEALEAVRLLPYDVVLMDVQMPEMDGLEATRAIRSLASAAARIPIVAMTANAMRGDDQMCFDAGMDGYISKPIDRHKLAEALAKYSGAPEPKPAEPTSAQDSKAVDLDVLDALAADIEADTVVEILVKFMEDARTRHANAAVAAPEGDLEKVRREAHTIKGAAASLGLMAVRDACLALEQAARAGEGVAPLVVQLHDRIEALPGQLSTTAYALPPS

SEQ ID NO: 12313 - protein, 478 aa, Magnetospirillum magnetotacticum
  unsure (1)..(478): unsure at all Xaa locations
MARYRALRPVEGERQANRRVPQDRCQPXXXRIQSLKKKGAPELVKQGLLGLDCRYLNHAPQCTGWMDLTSQGGSGSFEISWSGLWKLTTAATIPYYTGPYGKSQRGFGFVTIGANVDDFHAAASREKEHTDQILALRNRDLEAQYNAVMALITSQVESLARELSISTVIMIALVVGIAVWMASFLTRRITAVVGGIHRFSEQETEYRLPVQGHDEMASLAISFNQMADRIGESFVRLDEARKRAEEASRMKSEFLANMSHELRTPLNGIIGFSELIRDEAADDETRENADIIEKSSRHLLELVNSILDIAKIEAGAMTLAVQDVKLAPLVAEAASVHHSAAQAKGITLSSQVSDNCPETIRADPLRLRQIIHNLLSNAVKFTEKGEVSLSVELEPGHLIFRVSDTGAGIPEGMLHAIFEKFRQVDSFLTRSHSGTGLGLTLARHLVELMGGTIGVQSTVGKGTVFHFTLPLHQPESSS

SEQ ID NO: 12314 - protein, 1000 aa, Methanosarcina acetivorans C2A
MCGLKKRLFIDCYEGESIEEIRGKKRADREETEVQEKSHLEEKLVRLEWQADSAVTGLITMDFDGTLSYVNPFFVRMWGYGSAEEPPGRQVSELWASPAEFLQAERECREKGEWIGELQARRRDGTFFYVHTSLSLIRNREGLPLGISGSFVDITRLKQVEEELRNRTLELSEAKARLDLALEATEMGTWDWDVLTNGMTWDDNLFRLVGISREEFLQTHDSLLELSNRILSPEDNRRMLEVMQAVADGKTDSYEFEHDVLRPDGTVRHFLVKGRAHRDSEGKLLRVTGTTTDITDQKIAEDALRRSEANLARSQAMAHLGSYSFDAHTGEIYWSEELKTIWDYDPGPNYSFETVISRIHPEDRKRILEALKNAGQGKHPFNSEYGILKPDGSIRYVHDQGEISLDGNGVPVRMFGTLQDITHRKLMEEQLLKAKEAAESANKAKGDFLANMSHEIRTPMNAVLGMLEMLLETSLTDEQREYLQLAHASAESLLSIIDDVLDFSKIEQNKLELEQISFELESLISHIINLLSGKAGSKGLKLAFHIEKDLPSTFIGDPVRLKQVLFNILGNAIKFTKKGEIALSVEVYMPSERNSGLSNSDFPEEVALLFKVKDTGIGIPPEKLSQIFDPFIQADASVTREYGGTGLGLAISSQLVELMEGRIWVESEVGKGCTFYFTVRVKRGESSENYGQGNNIPEESLLVCMEAKESYGNGITSGESLNVLFAEDHPINQKLILGLLEKKGHKLTLVTSGKDALDALSRRDFDAVLMDIQMPGMDGLEATRRIRDPSSGVRRHNIPIIAFTARALKEDREKCFEAGMNYYISKPLKKEKLLNILEDIRVGKNTREKTARERTVQDRIVQEKNIQERAATPLDLESIAFDFPEDQVFNLEEVLERTEGDEVLLKEMVKIFLGMAPELLDSINSALRKGEAEALRENAHILKSAAGSIGANRVFRVAYYLEQVGRRDRMELASDKFEEIKARFKELEPVLVRYLEKQIC

SEQ ID NO: 12315 - protein, 887 aa, Methanosarcina acetivorans C2A
MKKSNELIFILVLGFIFTLVASNYNLFESVVLFVEEYNLDGLGLLLILSIYTSFGMGIFSLGRWMELENTLTLYRKAEEDLREKDQMYRALFEMSNDAVIISDGKKVLDINNKGCEIFGFREERPLNVSLISFIPPEYLSELQQALKETFKQASSCFEMRYQKAEGEIVDIEVSLSLIDRNNNIIHIVAQDITGVKNAERLEQENRERFKTVLDNTLCSILLIEASSRKIVDANPVALKTTGYSEKELIGMVCSRLICQAGEERCNVPSLDPAGELSESILFKAGGDKISILRNVVPVSIGGNGYFVESFIDLSERKKVEEELLQAKLAAEGANRAMSEFLATMSHELRTPLTAIIGFSELMLGEATGEFDELNRKFLGHISNSGKHLLSLINSVIDLSRIEAGKMDLEPDFFSLYDIFADTKSISSPLALKKNISMDFNVESDFLIYADRTRFKQIMYNLVSNAIKFTPAGGSVEVVGRRSENRIRVTVSDTGIGISQDEIKHLFKPFKQINFALSREYESTGLGLVLSKNFVEMHGGRIWVESEPGKGSTFTFEVPVEILNSGEKMKIPEICGINGANNFEIPAETGEAGNSEIGSQTEKSEEKDFVEIFEPEGSDGSEPLVMIVEDDKLSRELLIFTLKEAGYRVVRALSGKQALSLAQKLNPFVITLDLMLPEMNGWDVLKNLKKDSETAGIPILLLSIDERDECNMVWGAFDHLVKPVEKSILLSTLERLNKKTKKGSPKILIADDQEDMVELMVSLVKEEGYIISRAYGGKEAIDKALTELPDAIILDLMMPEVSGFEVIRTLKKDPETVDIPVIVCTARDLSAEETELLNSNVSVVMQKEDLNKQILMQLIRSLESREEGCRTCILSAPREDRSFCKAEE

SEQ ID NO: 12316 - protein, 869 aa, Leptospira interrogans serovar lai str. 56601
MNIFKIESQSSGFFAIIHLTIKKELLSKMIKSLRISCIFFILISFLTFLLNCSQFKQNNPIASNGVIDLSTWNPNIESINLKGNWEFCWDQWIPPNAEESQWKENCNGFYPAPAYWKFYNIPGKNLSPFGKATYRLKVILPTSFHDSYGIRWTEILSAFQIFINNKSVAQIGVLGTDFNTMTPKLKPDRTEIGPQNNQMTIVIWVSNFNHQNHGFWQPIYLGKWEIIRNTQVSHLMMDIASFASVALIGFYHLVLFLFRTRSKEYLFFGLFCISMGIRQLSVEDHAFIIFFPDIDFDFYIRFIYFTVLSIGIFMCMFIKSLFPEEVSSFFINSAIGVFGCSSFTLALPVRVFTEFFSIIFVLISFLPLGLTTYLFKAHKMKRKGATLILIAYLIFSTVVLNDILFTLGYISTGYISYIGITVFIFFQAGVLAQQLTQAFNHSEDLALELKSTLQENIETHNELLALKELQNTNLEFQVQSRTRELLKARDDAEFANKVKSQFLASMSHEIRTPLNGIIGLIEQFKSTPLDESQQHIRNLIQKSGENLLKIINDILDFSKLEEDKINLELHEFYWKETVEETIGIFLYQATQKGLVLSVDYSPDFIDKSVGDKRRITQVLSNLISNAVKFTDSGKIQIRAFSEKIETKIEYKIQVIDSGIGIPREKIDLLFQKFFQLDSSISRKYGGTGLGLAISKKLVELMNGKIHVSQNKSKGSTFEFTVLLSEFVSKDHSTYLPEITDLSSLSPDTFILIAEDDSTNIFLLSGILKKLKIKFELAKDGLEAITKVRVSRFDLIFMDINMPHLDGISASNFILTDPMISPKPVIIAVTADVLQEDKIKCRQAGMSDFLGKPYYKKDIEQMIYKWLVIH

SEQ ID NO: 12317 - protein, 634 aa, Xanthomonas campestris pv. campestris str. ATCC 33913
MSTATNPLDLDVCAREPIHIPGLIQPYGVLLVIDPADGRIVQASTTAADLLGVPMAALLGMPYTQVLTLPEAQPFAVDDQPQHLMHAEVRFPQRATPPDSAWVAAWHLYPQQWLVEMEPRDARLLDVTLREAMPLLRSVERDPGIAEAAVRVAKGLRSLIGFDRVMIYRFDEEWNGDIIAEARKPELEAYLGLHYPASDIPAQARALYLRNRVRQIADVGYQPSPIQPTVHPQLGTPVDLSDVSLRSVSPVHLEYLANMGVTATLVASIVVNDALWGLISCHHYSPHFTNHAMRDVTDAVARTLAGRIGALQAVARARLESVLLTVREKLITDFNDAEHMTVELLDDMAPDLMDVVDADGVAIFHGNDISRHGTTPDVAALRRIRDHIESEHHDALREDAVGALHVDAIGEVFPELADLAPLAAGFIFVPLMPQSRSALLWTRREQIQQIKWAGNPQLAKLEDIPNSRLSPRKSFDLWQQTVRGRARRWSPLHLESARSLRVLIELMERKRFQQDFTLLEASLSRLRDGVAIIERGTANAAHRLLFVNTAFADVCGSDVAELIGRELQTLYASDAPRANVELLQDALRNGRAAYVTLPLQVSDGAPVYRQFHLEPLPSPSGVTAHWLLQLRDPE

SEQ ID NO: 12318 - protein, 1364 aa, Xanthomonas campestris pv. campestris str. ATCC 33913
MPHGRWDLRRKYGRRASIGAVLLLSAGLIAAFLVGFAVHRHNELERERRFDMVVRVLARNISERMYTFEHGLRGARGAVIGAGSDVISRDRFTRYSRSRDYPREFPGVLGYGYIHRVAAADEAAFLDAARADGAPDIQRRLLAPWDGERFIVLYFEPESSGNRPLGLDVASEPRRRIAAIAAARSGQPTMTSPVSLSGYQTPSEGGFLVLLPVYREGMPLQTPQQRMDATTGWAYAPLSVKQMLESTLGDRDDVAISLSDREDTQHTFYRSGIAAPESMRRAAHTQLLPIYGRTWVLTARPTLHFIGSLNQNSPWLMGSLVLGTAILLAALLGLYFSNGLRREEVLRKQMELAALVSHSSEAIVAETPDGEITHWNPAAEAMFGYPADVAIGQDLTTLLSPQPYAMPQIDQDEAPPVAALSAAQTMRHRDGHQVFVLASKAPIIEHDNAVSGHSHFFRDISERVRSHQRIVDLNASLEHQVAERTSELVQFSVLQRAILAHAGYAIIATDSSGFVTMFNPAAEKLLGYSADDVIGRRKASQFIEADELQERALRLAEQTGTPVAGTLEAVAALTSLGRSDTSEWTYVSQDGRRLPVLLTLSTLRDDNDQVIGYLGVAVDLTEQKLHEKQLRLAMDAARSANQSKSDFLANMSHEIRTPMNAILGMLYLLQRSELPGAAQDMVTKIDRSARSLLEIINDILDFSKIEAGRIDLERAPFDLNQLFDNIADLMRSSLSAKPVEMIVEPLPRECRWLLGDALRINQVLVNLVGNAIKFTEQGEVVLSVRRFPSGDPNKIKLLFSVRDTGIGISKEKQSLIFSPFLQADTSTSRRYGGSGLGLTISRRLIELMGGALEVESVPGRGSEFYFVITLERTDPPKAQQEAALLPPESMPRVLIADDHDAALNNLVRIATELGWRVDAVASGQAAMQAIEDATEPYDIFLLDWRMPDIDGVAIARQVRARATPGRHPVIVMVTAYERRLLEQHPEQQDLDAVMTKPVTSAALHRLVEQLVDERPNARPATPTFVARRLEGAQLLLVDDSEINCEVAQRILEGEGAMVTVAHDGEQAVNTLKRAPDLFHLVLMDVQMPVVDGYEATRRLRQIPSLASLPVIALTAGAFRPQQEKALEAGMNGFIAKPFNVEELVTAIRHFLQPGSRRVSSLPHERAPAAGPEWAHTDPLLLDAARAQSLWREREPYERYLLKLLRDNPDPAETAAAHLRNNELPAIGALAHKLRGAAGSLALPALAGASGDLESRVEQGHDLTAALLALKDTMAQTTAAIHAFLQTSPSTQDTGQTGAALDDDSALILENALRSDDADKIDHALLICAPRLPPPLQEDLQRAVDDFDFRRAEATLRDWQANHPR

SEQ ID NO: 12319 - protein, 767 aa, Xanthomonas campestris pv. campestris str. ATCC 33913
MAARAGGLRGWSTLVALAALVAASAAALQWLGVAGPWRIVTTAASVLALVCGICTAVAAYRASRTLSALTRQLDDTNTAQARMQQELQRHGELEQELLRAKQAAEAASLAKGEFLATMSHEIRTPLNGIIPMLELISRGQLSLDQRDMLQTATGSSLQLLRIVDDILDYSKLEANKLELEITTFNLRELLDGVAQLMQRTAEGKQLRLGLDIEPSVRLLVRGDPIRLRQVLGNLIGNAIKFTERGSVDIQLRRLGETRAQHLLRFQVRDTGIGIAADQQARLFRSFAQADASTTRLYGGTGLGLAICKRIIDLMGGRIGVESEPGRGATFWFEIPLLKVIGDLQQTTGADAARVMVISSDARLSQRLKRLLDSWGISHVLMETTQEALERVRRHTDDEGFRCVIADHETLRYSARAVHRALARPEDLSGSRLIWLYGDEPVPDELQANATLVPRQSPDETLRALVLPPEPKPSVAPTLASAMIPEPLPPPVAHARDVRILLVEDNPVNLLVAQKLLGVLGFEADTATDGEAALSSMESTRYDMVFMDCQMPVLDGYAATRRWRAMETESGGRPIPIVAMTANAMAGDRERCLAAGMDDYLSKPVAREQLNACLQRWLPRQALLPGPSTGAPSADAESAASAAQARALPILESGVIDELYEVAGADTIRILQLFLEDAPGIIEGLEAAASNRDSMHLRDLAHTLKSSSANVGAQALANAARRIELAARTGTIERPSVMVALVIAEYARARLALLGQVTRLQAASRAAG

SEQ ID NO: 12320 - protein, 634 aa, Xanthomonas axonopodis pv. citri str. 306
MNQPTEPLDMDVCAQEPIHIPGLIQPYGVLLVIEPADGRIVQASSTAADLLGVPMDALLGTPYTQVLELPDAQPFAVDDQPQHLLHADVRFPQRSAPTDHPWVAAWHLYPEQWLVEIEPRDARLMDVTLREALPLLRSIERDAGIDEAAVRAAKGLRSMIGFDRVMVYRFDEEWNGDVIAEARQPELEAYLGLHYPASDIPAQARALYLRNRVRQIADVRYQPSPIQPTLHPRLGTPVDLSDVSLRSVSPVHLEYLANMGVSATLVSSIVVNDALWGLISCHHYSPHFTSHAMRDATDAVTRALAGRIGALQAVGRARLESVLLTIREKLITDFNDAEHLTVDMLADMAPDLMDVVDADGVAIFHGNEISRHGSVPDAEALRRIREHLESEHHDALREDAVGALHVDAIGEVFPELADLAPLAAGFIFVPLMPQSRSALLWTRREQVQQVKWAGNPQLAKLQDIPNSRLSPRKSFDLWQQTVRGRARRWSPLHLESARSLRVLIELMERKRFQQDFTLLEASLSRLRDGVAIIERGAKGAAHRLMFVNPAFAELSQTEVADLIGCDILALLDDDAARGKVELLEEALRLGRAAYVTLPLRTRDGAPVYRQFHLEPLPSPSSITAHWLLQLRDPE

SEQ ID NO: 12321 - protein, 769 aa, Xanthomonas axonopodis pv. citri str. 306
MRERAAGLRAWSILAVLAALAAALGAGLQWSSLQGPWRAVSAVSAALAVVCGLCAAFAAHRAAHAQHALAQRLEEADLARERLQQELRRHGELEQELLRAKQAAEAATLAKGEFLATMSHEIRTPLNGIIPMLELISSGQLSLDQRDMLQTATGSSLQLLRIVDDILDYSKLEANKLELEITTFNLRELLDGVIQLLQRTAEGRQLRLSLDIEPSVRLLVRGDPIRLRQVLGNLIGNAIKFTERGSVDIQLRRLGETRAQHLLRFQVRDTGIGIAPDQQARLFRSFAQADASTTRLYGGTGLGLAICKRIIDLMGGRIGVESEPGRGSTFWFEIPLLKVIGDLQQATGADAARVMVISSDARLSQRLKRLLDSWGVSHVLMETTQEALERVRRHSDGEGFRCVIADHDTLRYSARAVHRALARPENASSARLIWLYGEEPVPAELQDHATLVPRLSPDETLRALVLPPEPKPAHATTLASAMIPEPLPPPMANAREVRILLVEDNPVNLLVAQKLLAVLGFEADTATDGEAALARMESTRYDMVFMDCQMPVLDGYAATRRWRAMETESGGRPVPIVAMTANAMAGDRERCLAAGMDDYLSKPVAREQLDACLQRWLPRQALLPGPSPAGQATHDPESASAAAQARALPILDNSVIDELYEVAGADTITILQLFLEDAPLIIEQLEAAAANRDSMQLRDLSHTLKSSSANVGAQAVSNAARRIELAARTGTIERPSVMVALVIAEYARARLALLGQVARLQADASTTNH

SEQ ID NO: 12322 - protein, 1191 aa, Xanthomonas axonopodis pv. citri str. 306
MRVLIVVLAVLLAIWPCAAKIPEVPRFRIVGPSEGLPSTMVVAIGQDRAGYLWLGTLDGLVRYDGAGFRTWRHDPADPGSLPCNAVQALHIDALDRVWVGCGKTLSVLDAGRGHFRHYRAADYPLLKDGEIFSIAAFDGGIWAGTTTGALVRIDASGGMSSVDLGGIEGALDRAMVMNLAVDNQHRLWIGTSNGLAYYDGKQLHRQFIADEPNRQSSIFGLQWTGDRLWLGSESGLHVLRADGHWQPLAWSTMFGNGNEFWGAVATPDGEFWLGSGRGLWRTRGERPPVPALSGEGPLSRRNVIGLMGAADGGLWVPMHGTGLGYLPADWKRSAVLKPAVPMGDAIYCNLAPARRSGGLWQVDAQGRLLRVDPSTGDSFQTGLQSPQLKGMELVSALEDRLQRVWLGNLTFGLSRMDLRTGDFVHWPSDGPEPSSSLSAPEWIMEHGDTVWMAFIDMVQQRDLRTGKVLQRMTQQDLHGLRAIDIQQLDQGPDGRVWVAGEGGMFAWDDATGRFVPVAGLEGMPIQAFASQSADTLWVYRASGAEQWQKLAAGWKRVRQVGEADGLNGFDASAMRIDPRGRVWISSLRGLWRIDPSVHPARVRNIGTRDGLTSQEFIQHCLLMSGDTLIGATSDGSTVLLDTAMPDVAPFVPALQLEHVSVLRNGARIALPMDRPFQLGPEDRQLQIVTRLLSYSDPLSNRYRSFLKGFDTDWQTIGNTGIREFASLPAGNYELALQGIDPLGNRSQVRSLQFSVRPPWWRSEIGIALICFSGLLLSALLAAAYRRRIRMRAQWQLAQHKRELAEQASLAKTRFLATLGHEVRTPMTGVLGMSELLLQTPLDGRQQGYASAIQLAGKHLLRLVNDALDLARIEAGKLPLDYRDFDLRQLVGQAVELVRPSAEQKQLAFHCELDDALPPALHGDASRVQQILLNLLFNAVKFTERGSVHLRVTTLSQHTRQGLRVEVRDTGPGMSAEQRGRLFQRFEQAEGALTLARHGGSGLGLAICRELAAAMGGAVTVASELGQGACFVVELPLHWVSTLPTVTPPAVRAPSLREQAPLQLLLVEDDATVAQVIVGLLQARGHHVTHALHGLAALAEVSTRSFDAGLCDLDLPGLDGAALVAQLRARGVRFPIVAVTARADTDAEPQAMAAGCNGFLRKPVTGELLAQALARVLADVDDGQRDNVAVDA

SEQ ID NO: 12323 - protein, 653 aa, Caulobacter crescentus CB15
MNAATLVDTHAVDTALQEAFEAAPEGFALFDAEDRCVIWNARYGELWSKWGVTLAVGATFESLLLAGLAAGRFPEANGDRAAWLAHQLGRRKLDRIEEIREEFGEYLRFESRRTPAGGLITTCANLTNLRRREAQALAARSFLDTIVENTPAMLFVKDGDTGAFLLVNRAAENQLGVPRAELLGKSDYDFFPKEQADAFAADDRRVIASGKLVTIDEEPLDTPHNGRRWLQTRKIAIPGEDGRRHLLVICEDITERKAGAAALAEALQKAEAGSVAKSEFLANMSHEIRTPLNGVIGMAEVLSRTALDDAQREMMEVILNSGRALNLLLSDILDLSKIEAGGLELSRDPLDLREAITAAVAVFKAVAESKGLVFRLTFADDFHDHVLGDALRVRQIVANLTSNAVKFTTAGSVIIEARTLVAEDGRIDLTVSVQDTGEGFDEDSADRLFERFQQADGSVTRKVGGTGLGLPIARRLARLMDGEISCVAHPGEGATFVFEALFLADGQRTPAASADPAGELALDRRLRVLLAEDHPTNQKVIGLMLADAADVTVAEDGQAAVEAFEKHAYDVVLMDTQMPVMDGLAAIAEIRRREREAQARRTPIISLTANAMPHQVRACLEAGADLHLAKPVSIQGLFATLGAALETRPGGEG

SEQ ID NO: 12324 - protein, 392 aa, Madagasikaria andersonii
DLEPVNPADVPVTAAGALKSYKLAAKAISRLQSLPSGNISLLCDVLVKEVRDLTGYDRVMVYKFHEDEHGEVVSECRRSDLESYLGLHYPATDIPQASRFLFMKNKVRMICDCVAPPVKVIQDERLPQPLSLCASTLRSPHGCHAQYMTNMGIVASLVMSVTVNEEDDMVDGDQPQMARKLWGLVVCHHTSTRFVPFPLRYACEFLIQVFGVQINKEVELAAQVREKHILQIQTMLCDMLLRDAPVAIITQSPNVMDLVKCDGAALYFKNKTWLLGVTPTEEQIRGIAEWLLEYHSGNTGLSTDSLMEAGYPGASALGDAVCGMAAVSINSRDFLLWFRSHTAKEIKWGGAKHDPGDKDDGRKMHPRSSFKAFLEVVKWRSMPWEDMEMDAI

SEQ ID NO: 12325 - protein, 392 aa, Microsteira sp. Davis et al. 38-01
DLEPVNPADVPVTAAGALKSYKLAAKAISRLQSLPSGNISLLCDVLVKEVRDLTGYDRVMVYKFHEDEHGEVVSECRRSDLESYLGLHYPATDIPQASRFLFMKNKVRMICDCVAPPVKVIQDERLPQPLSLCASTLRSPHGCHAQYMTNMGIIASLVMSVTVNEEDDMVDGDQLQMARKLWGLVVCHHTSTRFVPFPLRYACEFLIQVFGVQINKEVELAAQVREKHILQIQTMLCDMLLRDAPVAIITQSPNAMDLVKCDGAALYFKNKTWLLGVTPTEEQIRDIAEWLLEYHSGNTGLSTDSLMEAGYPGASALGDTVCGMAAVSITSRDFLLWFRAHTAKEIKWGGAKHDPDDKDDGRKMHPRSSFKAFLEVVKWRSMPWEDVEMDAI

SEQ ID NO: 12326 - protein, 392 aa, Sphedamnocarpus sp. Davis 3-01
DLEPVNPADVPVTAAGALKSYKLAAKAISRLQSLPSGNISVLCDVLVKEVRDLTGYDRVMVYKFHEDEHGEVVSECRRSDLESYLGLHYPATDIPQASRFLFIKNKVRMICDCLAPPVKVIQDERLPQPLSLCGSTLRSPHGCHSQYMTNMGTIASLVMPVTINEDDDTMDGDQQQMTRKLWGLVVCHHTSPRFVPFPLRYACEFLIQVFGVQINKEVELAAQVREKHILQIQTMLCDMLLRDAPVAIITQSPNEMDLAKSDGTDLYYKNKTWLLGVTPTEEQIRDIAEWLLQYHSGNTGLSTDSLMEAGYPGASALGDSVCGMAAVSITSRDFLFWFRSHTAKEIKWGGAKHDPDDKDDLRKMHPRSSFKAFLEVVKWRSMPWEDVEMDAI

SEQ ID NO: 12327 - protein, 315 aa, Stellaria longipes
MGLHYPATDIPQASRFLFKQNRVRMIVDCHADSVSVVQDERLRQPLCLVGSTLRAPHGCHSQYMANMGSIASLVMAVIINGNDDEGSTRNAMRLWGLVVCHHTSPRSIPFPLRYACEFLMQAFGLQLNMELQLSAQVLEKRVLRTQTLLCDMILRESPTGIVTQSPSIMDLVKCDGAALLFCGKYYPLGVTPTELQLKDIVQWLLSNHGDSTGLSTDSLADAGYPGALALADAVCGMAVAFITRSDFLFWFRSHPAKEIKWGGAKHHPEDKDDGRMHPRSSFKAFLECGSYKPELAWENAEMDAIHSLQLILRDS

SEQ ID NO: 12328 - protein, 902 aa, Clostridium thermocellum ATCC 27405
MDCRVKNEVRDDLNVNLEVMVAGNDEEFAASLKNALLDVGCKHSVKSAATFNEFKNYLRKNNFHIVFFDCSSDISFADVMESFENLKKEMPVVAVLEEDGSRHGFEMIKLGACEYLEKKDSSRLRSIIFKRCRELERERERIRFEKRLKEENERLLTTLESIGDGVIVTDKAGCVIMMNKAAQELTGYLSCNSIGKPLSEVFVIINGVNREPEPDPYERVLSERKTVGLRKNTMLVSKDGTLRYVSASTAPIKSSDREIMGVVVVFRDITRIRKAEEKLQKLSQAVEQSPGIIVMADTRGNIEYVNPRFTEVTGYSFDEVKGKSLFFMELEENGEEKCKDMIQAVFSGKEWRSEIRHKSKNNVVFWEYAYYSPIINSEGVVTNYLKVSEDITERKLMSENLFKAKEAAEAANRAKSEFLANMSHEIRTPLNGIIGMTNLTLQTELTDEQRENLNIVNSCAELLLRVINDILDYSKIEAGKMTLENVKFDFFNLLEKTYKAHIVQANEKGLRLSYTVQKGIPRILVGDPGRLQQVLNNLISNAVKFTDIGEVRIDVDIIEKRDDSVKLKFTVSDTGIGIDGDKMNMLFKSFSQVDSSITRKYGGTGLGLAISKQLVEMMGGEIWVESQKGKGSTFYFTAGFKRKAKSSVKAECTSNADERVLGRKLNILLAEDDKVNQQVIAGMLKKEQCSLTIAENGFEAIKLFEENEFDLILMDVQMPEMDGIEATKRIRKMEEGTFRHIPIIAVTAFAFENDREKILEAGMDDYISKPFSFDDIYAAINRVLYKDEQSSDDMQKEKEDEKGSLDPDEKVNETLSESGTVNETGPDYSLKDIMERLDLSILNGNFTAIDKSALAVKEFAQNRGFDKVKNLAFKIQLSARKNQLEDVKKLYEVLKQEISKFN

SEQ ID NO: 12329 - protein, 1653 aa, Microbulbifer degradans 2-40
MNKSSFNYLTRNSKWLIPTFAAIVLLTLAIAVDRVIYSRFALEERTAVHNEASKLRASIESTINSNLQAVQGLVLVLNAFPEPSQEEFASFAAPLFNQNTQLRNIAAAPGMVIKYMHPLEGNEAAIGLDFRATPAQKEAAERAERTGQLVLAGPVNLKQGGQGFIGRIPVFTYNKQNNTKSSWGLLSTVIDLDRFYSATGITQFNETLQLALRGKDAKGAQGQVFYGDEALFHADAVLLEVSVPSGSWQLAILPKQGWANSAEDSALLRIILLLIILAILIPIIISVNLLANRHDSDLKFRGLFELSPVGIALNRFTDGKYVETNTALENMLGYSADELHGKTYLEITSPVYEDHQKAVINSLKNYGRYGPYEKEFIRRDGTLLPVIMNGMLVTDSNGEKLIWSIVEDITSRKQAELALAQNRKQLEQIIDSTSVAIWDWNIVTGEIVINERWAEIIGYSLMDLEPVSIDTWTNFTHPEDLDKSSELLNAHWNGESNHYQCEARMHHKDGHWVWVLDSGKVIEWTSEGKPLRMVGTHLDITEQKESQRLIEQSQIELKNFFDLSPNFMCIIDREGFFERINDTFLSQLDFTRDDFFSCKYIDFVHPDDREITQDHFEKMKSGALTQVFTNRYMHSNGDYLYLQWYTFADPASGMVYTTALDITNQKLDEKRMARQQEMLLSMSEQGRIGAWEVNLEEQQMYWSTMTKDIHEVDANYTPHYESAIDFYKEGESRDTISRLLNLAINKGIPASIELPIITAKHNERWVSVTVQPEFRNKQCIRLFGSIQDIDARKRIEQGVQLANTKLEKQMTLVNAIAAAQASFIQQTDIAIAFRNLLDGVLELAESEYGFVSEILYTEKNEPYIRTHAIANRSTHDRYNAFFAAQGENPIEFFNLDSLLGAAVTSCKPVIANSPTTDSRRAGVPDGHPQLESYLGIPIILNGSIIGLIGLANNPNGYNQALVDWLAPLINTVGQMIENTRAIRERDNAQQALVKAKNAAELAARTKSEFLAMMSHEIRTPLNGVLGMLNLVKRTQLEDKQRYQIDIAKSSAESLLNLINDILDFSKVDAGKLDLEVVDFNIITLLEDIAHAMAGRALERGNELIIDTTKLEFTYLSGDPSRLRQILVNLIGNAIKFTQNGEVTVTASLTKNTSGFNLNISVADTGIGIAEEKIPLLFSAFTQVDASTTRKYGGTGLGLAICKKLCALMGGDINITSQEGNGSEFSFQILVKNSVKNIDLPPLIEQKVDLNDKTIFIAESNPKNTAILENMISSKRCIAVSSLPDSNLNLPNEPIDVAFIDRKLLTSMESITPLKNKPNFANTQWLMLTAINQTKDIENYTAKGFDTYLTKPITQSGLTLSLKSLKLDSNQAESEQQQTSEKLTLPQSPQGEASQFAARILLVDDNTVNQDVAKMMLEDFGLIIDVANNGLEAIAALDACSIREPYSLILMDCQMPELDGYETTKRIRKGATDFDNTKIPIIAMTANAMKGDKEKCIAAGMDDYLSKPIEADALEHMLKLWLPLHNFSQDSNTQATSQHPQVVEGFWQHDELLATLKGREDRLKILVASFTKRIPALLEEFEEATASNDLEALSFIAHSVKGSAGQLKCNLLFVCASELELTAKNGDLTTALELSQNFKQYTLDFYNLLNKYLA

SEQ ID NO: 12330 - protein, 1368 aa, Microbulbifer degradans 2-40
  unsure (1)..(1368): unsure at all Xaa locations
MSKQNKNKFTHSIQKTLIQWFLLLSLVPLFLVAFIGYQVARNSLVASAQDHLESDARNTMNFLNNWFEYRLMDSLSGAQDENNIKFLQELHEAAVQTELSIESFHKSIKWAEITASRQGGLVDISRNYDYIYDVFLIDVDGNILFTVAKESDLGTNLVHGKYANTKFGGTVRKTLATGQTLFADFEHYEPSAGIIAGFVVSPLVNSEGQRIGAYAMQFRIDRIINHLKLNSASMYRHYLVGPDGTLRTQRRQSEQLLITQINTAPVKRWLEANETAKHSDKPKLIKYSEADGTVYLGMHQNLTLRNLDWLLVSEVKEADALASSNWLAGVMLLSVWFTAMLLSVLAFFLSIRITNPIKAITIVANKLVKGDFSQRVQVQESNEFGLLANSFNELIQSRKYYELELLAAKNEAESSSRAKSEFLACMSHEIRTPMNGVLGMLGLVLNSSLTPEQERKLLLAQSSGQSLLSVINXXXXXXXXXXXXXXXXXSASMYRHYLVGPDGTLRTQRRQSEQLLITQINTAPVKRWLEANETAKHSDKPKLIKYSEADGTVYLGMHQNLTLRNLDWLLVSEVKEADALASSNWLAGVMLLSVWFTAMLLSVLAFFLSIRITNPIKAITIVANKLVKGDFSQRVQVQESNEFGLLANSFNELIQSRKYYELELLAAKNEAESSSRAKSEFLACMSHEIRTPMNGVLGMLGLVLNSSLTPEQERKLLLAQSSGQSLLSVINDILDYSKVEAGKLELEHLDFDPHRLLSDVVQSFNYSAQEKGIELVLDDIGLGGKVLRGDPSRLRQIINNLLSNALKFTSQGEIIVRAKLDSEINGLNQLRCSVTDTGIGIPSDKISGLFDSFTQVDSSTTRRYGGTGLGLSICKMLTRIMGGDIFVVSEVGKGTRFDFVVHVETGSCLPVDNAESDVTGLNVLLVDDNLTNLDVISGQLISWGIHVTKVAGPEQALVLVAEVQDTVFDLVLMDCHMPNINGIDLAERIQGSPCIKPNSVIILSSSADMASRFHMQEVGVVGCLMKPVSAPYLHQAIQYFIQIKKSNKQQFITPALLESVHATTESTANPNIVWGDNVRILVVEDNLVNQQVIAGILEDFGLAFTLVDDGQQAISALKENTGDLRYHFVFMDCQMPVLDGYNATKQIREGAAGEECKIVPIVALTANAMQGDRDKCLRAGMNDYVAKPVDADEVRLALVSWLPAELRTDEAAIENNPETPDTPDILEKKSPPAEENPVEPQVVKVDLGLLKLPKGLVIHTPAMLQPMFKNKPERYVKILTTLLNAHASFNTSLNEAFANNDTEQVRHLVHAMKGSSGNISMGKVHEYCKQVEAQIDADGAASAEYINKLQQLIEAMFDEANQIVELNS

SEQ ID NO: 12331 - protein, 109 aa, Ceratonia siliqua
LVMAVVVNDSDEDGDSSDSVQPQKRKRLWGLVVCHNTTPRFVPFPLRYACEFLAQVFAIHVNKELELEYQLIEKNILRTQTLLCDMLMRDAPLGIVSQSPNIMDLVKCD

SEQ ID NO: 12332 - protein, 103 aa, Caragana arborescens
QAARFLFMKNKIRMIVDCHAKHVKVLQDEKLPFDLTLCGSTLRAPHSCHLQYMANMNSIASLVMAVVVNDSDEDEDSSDAVHPQKRKRLWGLVVCHNTTPRFV

SEQ ID NO: 12333 - protein, 103 aa, Caragana arborescens
QATLFLFMKNKVHMMVDRRAKHVKVLQDQKIPFDLTLCGSTLRAPHSCHLQYMENMNTSASLVMAVVVNDSNEDEDSSDDVQLQKRKRLWGLVVCHHITPRFV

SEQ ID NO: 12334 - protein, 758 aa, Pseudomonas syringae pv. syringae B728a
MFRALARGSKGTVMSQLDKDAFEVLLANCADEPIQFPGAIQPHGLLFTLAEPELTILQVSANVQTVLGHVPEQLLGKGLDCVLGAGWAEVIRSASAHDSFIDAQRLLMSINGIEFEALLHRHQGVLVLELEIQGKDAQSVSYSERTGNMGRMLRQLHAASDLQTLYEVSVREIQKMTGYDRVLIYRFEEEGHGQVIAEASAPSMELFNGLFFPASDIPEQARELYRRNWLRIIPDADYIPVPLVPQLRPDTQQQLDLSFSTLRSVSPIHCQYMKNMGVLSSMSVSLIQSGKLWGLISCGNRTPLYVSHELRSACQAIGQVLSLQISAMEALEISRQREAKVRALEQLNLAMAGSEENVFDGLAQQPQLLMDLVGATGVAIIEDRQTHCFGICPEPSDIRALHAWMIAGGEPVYASHHLSSVYAPAEAYQPVASGVLAMSLPKPVDNGVIWFRPEVKETVQWSGDPKKPLNMESSAGGMRLRPRTSFEIWKVEMTGIATKWSYGDVFAANDLRRSALENDLARQVRREQQAVRARDELVAVVSHDLRNPMTVISMLCGMMQKSFSSDGPHTSRRISTAIDTMQQAASRMNVLLEDLLDTSKIEAGRYTITPQPLEVSQIFEEAYTLLAPLAMDKSIEISFNAEPDLKVQADPERLFQVLSNLIGNAIKFTPKMGTIGVAAMSNGTEIVFTVRDSGEGIPPEQLPHIFERYWTVKEGNPTGTGLGLYISQGIIKAHGGELAAQSQVGEGSEFRFTVPMAV

SEQ ID NO: 12335 - protein, 1003 aa, Pseudomonas syringae pv. syringae B728a
MEFTQLIKDMLDAKPDAALEAALAECAREPIRVPGAIQPHGVLLSVAGDPLCIEQVSANCATEFGMAADELLGKPLSWLLSPEQSALIDHAYGHPAAPHIDPIKLTIGTAHYSASLQRADDVLIIELEPFVETGHGQSRIITRVLRNLQAATTLETLFDISVHEIQALTGYDRVMIYRFEPEGHGQVVAQALTGPLPSYSGLNFPGSDIPAQARELYRLNWIRVIPDATYVPVPLIPTLRPATGQPLDLGFSTLRSVSPVHCEYLKNMGVRSSMSISLLDGGELWGLVACGHPEPLRVSRELRDACAMIGQLLSVKISAIVATNIQREREEKVVLLGQLADAMSRANHEVLDGLVSRPELLMSLTLADGAAVLIDDQVYLFGTCPSIEQVRELYTWIRDTGLASQRSRQRATGLQGLGVFHTNSMQRELADSAVYRDIASGVIAFTLPKPIDNAVMWFRAQLTSTMNWSGNPTHHVSTRPESSASHRLHPRQSFDVWEQEVTGIASPWSRADLYGAEDIRRSALESDLERQVQREQEAVRLRDELVAVVSHDLRNPMSIIIMQCGMMQSWAVGDTHFENRNIRRALGTIEKATTRMNSLLEDLLDTAQIEAGRYQLSRLPLSVTSLLEEACSLLVMLTTEKNIELNCTAAQGLVIDADPERIFQVLSNLVGNAIKFTPKGGRINIDAVADQNEVLFRVSDDGIGIPAEHLPFIFQRYWSVKEGNPRGNGLGLYICQGIITAHGGRLWADSSLDSGSVFSFTLPVHQGTDSIGETTFLKQSGTTHRLAQSISSKLERQQLEDRLTRAGLLNELNHRVKNTLATVQAIASLTVNSSASLESFHKSFGARLFALSQAHDALARAEWISTELVDLIEQLQEQDSGAHRISFEGDPVTLEPRFSLTLSMVLHELMANALQHGALSSASGQVTVTSTLTAEHTPPTLKIEWKETGGPPVVATTVKGFGLRLIRRSIERELKGQADIQFARTGIIWSMLIPWPDKPESRL

SEQ ID NO: 12336 - protein, 1353 aa, Pseudomonas syringae pv. syringae B728a
MKKSSLTWLVGWMAVVLLAGLSVSFIASHEQRRSIDARIGQALKEAGEGIGDNLQARLRVYEYRLRGLRGAVHMLDLQHINSSQMGRYSKGRNIEKEYPGARGFGFIRRVAASDEAEFVRRVREDGRPDFSLSRLSGPGTRQGDRFIIQFIDPLDRNVQALGLDITSEEHRRDAALQAMRSGAATLSAPITLLQDNDDHMRAFLFLLPVYSTPEIPTDIAQRETSLIGWTYAPLAMREVMSNLDPLNHRLHLKLYDVNEGRQLIYQTPENDHDQEVLQTYAFEREIYGRVWRMEVGAHPAFIAALDPVPAGRVFIIGTLVSLMLTVLVGTLLLSRQRKQQVVAGQARLATIVENSSDAIIGEALDGRIITWNRAAEQMFGYDEHEVLGRPLAPLLVPPELVHEDEQLLERVARGERGPTLETRRLHKNGQLIDVTITCSFIRETDGTLLGAAKMMHDITDRKRVERYLMEFNAQLEQQVSERTAELSRVAGLLQGVLDASSEVSIIATDTQGQIFVFNRGAELLLGYSNSEMLSGNGPGVFHLPEEVAARSAELSREYGTLIEGIDVFCYKASREGSETRQWTYVRKDGTTVPVLMIITPIRTADGELIGHLGIAQDITERLHHSAELHAAKSSAEAANAAKSLFLANMSHEIRTPMNAVIGISHLLHNTALNDQQRQLLTKLQIAGRTLLGIINDILDIAKIEAGEMRLEHNPFSPRQLLDELGELFTPQAQEKGLRFSVNVVASLPGQLIGDALRVNQILMNLVGNALKFTSVGGVDVTVSREDDHADTCCLRFSVQDTGCGIPGDVLGQLFSPFTQADASTTRRFGGTGLGLSVVRGLAEQMGGRIGVESELGTGSEFWVELPFQISQSDLEPSGPGSSLEVMLLSDDAQSSMALQRLCRGLGWRVASLTGEHDLRTALQERNHVNAALPDVLLVDWQQPQVEEVQQLIEATPLPVILVTSSEIRAELHPLVDKVLLKPLDSSALFNAVNACIARYQGSTERVIQATRMDTSMTLWLSGLHLLLVDDSEINLEVASLLLQQQGAVVQTCSNGLLALERLRQTPDFFDAVLMDVQMPEMDGYEATRRLRSELGLTRLPVLALTAGALAEERRQAELAGMDDFLTKPLDPAALIRAVRRAVERVRGAPLAVGTLLQEASTGSAWPVIEGIDTQEVAARLGNDVPLFLSSLRRFFSEFAAFGESESVLARARQNPDQTMADLHKLRGSALLLGATQVGLHAGQAETLLRNAADPEQAVRALSAAFRSLQERTPVLEERPLAPRIDADPDVSRQALSTLRELLENHDIAALDQFPLAAVALQELAGQALVEQLWQTIEGLEFEQALHLLERAEL

SEQ ID NO: 12337 - protein, 754 aa, Pseudomonas fluorescens PfO-1
MARKSGGSGMNPQDKEAFEELLANCADEPIRFPGAIQPHGLLLTLSEPDLSIIQISANVETLLARPAQELIGQPLQSLIGDAHAAQVREALQQAALSDAPPLHFRLNGTAFEGLLHRHQDVLILELEIHVENFQPRNVAGTETHLGRMLARLQKAQSLQALYDISVKEIQAMTGYDRVLIYRFEEEGHGQVIAEASDPSMEVFNGLFFPASDIPEQARELYRTNWLRIIPNADYQPVPLVPKLRPDTQTPLDLSFATLRSVSPIHCQYMKNMGVLSSMSISLLKGDKLWGLISCGNRQPLHVPHELRTACQTIGQVLSLQISAMEALEVSRQREEKLEALALLNQAMIDSPQNVFDGLANQPQVLMALANAGGIAIIEDKQLHRYGNCPEPEEIRALHKWLQERGEPVFASHHLASVYPPAAHYQQVASGVLAMSLPKPVDNGVLWFRPEVKENINWSGDPRKPLDLENSDAGLRLRPRTSFEIWKVEMAGISTKWSHGDLFAANDLRRSALENDLARQVRREQEAVRARDELVAVVSHDLRNPMTVISMLCGMMQKAFSSDGPHTSRRISTAIDTMQQAAGRMNTLLEDLLDTSKIDAGRYTIAPQKLDVAQMFEEAQSLLAPLALDKDISISFEADPDLSIHADPERLFQVLSNLVGNAIKFTPRLGTVDVYAKSVGDDIVFTVRDSGEGIPKDHLPHVFDRYWTVKEGNPTGTGLGLYITQGIVEAHGGQIVAESEPGQGSEFRFTVPRLD

SEQ ID NO: 12338 - protein, 633 aa, Pseudomonas fluorescens PfO-1
MIFRRWDINTRTQLISLGPALLLTLLLISFFTFVRIQDLRQELNHTGQLIANQLAPATEYGVISGNNEVLESLLKATLATPNVRFLEVQDSANRILSYVEQPADAHNRPHQVEVFQAPVRLQRIALHNDFFQDGKSSPGVASEDYLGRVIVGLSNDAFSQRQQEILLKAGILALFALLFTFVLARRLAGSLSQPIRDIGNAVKAIQDGDYKTPLPIVDDTELGALSQHINNLAQALEQASREQHQAMAQLIQTREEAEKANNAKSDFLAMMSHELRTPMNGVLGMLQLLETTDMTEEQVEYAALASESTEHLLKVINDILDFSRIERSELELEHIPFNLAEVIGACAQSFQHSAAQRGLALQLRIPEDLRDLQVQGDPTRIRQILVNLVGNALKFTEQGRVSIEAQWQSLDHELLWFTCAVRDSGIGISPESLELMFNAFQQADSSISRRYGGTGLGLPIARTLAERMGGTLRAQSEEGRGSVFTLEIPLALYKQALPALAAPRTLNGASHGEGRNVLLVEDNPVNQTVIEAMLRSLGFTVSVATDGVQAVRSAGDNRFEAILMDCRLPLIDGYEATRRIRQLPGCGQVPIIALTANALQGDRENCLAAGMNDYLAKPFKHNDLQQILQRWVQ

SEQ ID NO: 12339 - protein, 945 aa, Pseudomonas fluorescens PfO-1
MPGPPYCAGMRLKNYLHQISPVLSTPHAARRLLRIFALVLLAGILGGVYSFLLFTFNNEISQRRSYMSSAIAEAHTFFTGREALLESLSLSATRQTALSAPLSEEEIRLLLGHPPGKQWSIWLTQRMRDFLQARKLNLLYVSSGADAQVWRLYNTTPMADDFPHEMLDRLETLKCDNNGALKEIWLTHNWQGHSQLYIFIRLDERDLDSGWLGLEMDDREVSNALSDHSAGEFTMFNSQGMPLFSNSHKPPPGQNLPLLRQQDFFGFVGDGWLPEQLVLRKQLKSSDRQLTYSIDLLAVLWALWPQLLGALAFCLASISLVWLLIRRLEHRFITPTLQRIQALVESELFSRDVIQTAPVALCVLRRSDARVVLENTLARHWLGECGQQLGPGWIRAAFADKSPCLTDYFETADGRHLYLSCAPTRYKGEDVLLCAFSDISARRQIEAALERARQSADAANEAKTLFLATMSHEIRTPLYGVLGTLELLARTQLDTQQKSYLRAIEGSSATLLQLICDVLDVSKIEAGQLALELSDFSIVALAQEVVQGYAAAAQSKGLQLYACFDPQLPDSLIGDISRVRQILNNLLSNAVKFTDSGRVVLRVNVLSREGERVCVQWQVSDTGRGIAHDDQAFIFEPFYQTRGNSHVIAGTGLGLPICLRLTNLMNGTLRMVSEPGLGSSFSLTLPLEQRSGNTPPDIQPKLAGDIIYVVSPVRELADSLAGWLRRWGARPQVGAPASQVPADGGVLLELYPTPMDQRSELRWSGPRVLASGAGACEPQCTVDGWIANLNDLAAIRQALRQAQGGAVIEHQQTQTQALAPLHLHILVAEDNAINQLILRDQLQELGCTVALASDGEEALSLWQANTFDVVLSDVNMPRLNGYELAKTLRRLGCTTPIIGATANALRGEEALCLAAGMNHCLIKPFTLRALSIVLAPYQRVAHEVP

SEQ ID NO: 12340 - protein, 773 aa, Desulfovibrio desulfuricans G20
MNRTPLKRRFTVTLMLFTLLCCALYTVTASSFMHYHNAQITSRTERLLHALVLQRENDLANQIFVGHIRALRSTAADLQETDDVYSITVYDKSGKPLIHTRPERPLPLTGAEMAILAQGDVDARGTENGVPLLYHTSALMVIGELQGFVTVAYDLSHVRRDTILLSAMLTILLLGTVIAAGMVCSHFITQHIRRPLTALRDAMHRARSGELQHRAPIEAQDEVGRLAESFNAMVATLQRNESSLRHAQTIYKDIFENALEGIFQITGRGYLINANPALARMLGYSSVMELLAERGTTPLKSLVNRRDLARMLRMLRAKGAVDGYETRVYTKGGGITWISVSARTIAKEETGQPESFRYEGFVKDITEHRRLRELEQTRTAMIEADKAKSDFLAHMSHEIRTPMNSVLGMAEQMLRTPLSAEQKECMDVLKNSGESLLHLINDILDLTRVEGGQLALASAPFTVHAVVYGVRDMLSLQARQKNILLAATIAPDVRKNHMGDAQRLQQILVNLLGNAVKFTDNGEVSLHVSRAPDAVHDGDLLFTVRDTGIGITPAEQSRLFQKFSQASTAIHSRYGGSGLGLAISRHLVDLMGGTIRLESEPGVGTTVTFTARFAAVPEETARTGHEAEQPDTAGDDATALPALTVLLAEDTPSNRAVVRMMLQDTPCTVIEAEDGQQALHLFGQYDIDVVLMDINMPVMDGMEATRQLRRQEHGSGRRTPVIALTANAFQQDIIRYRQAGCDGHLVKPVTRKALLTALQSCAGGGATHSGSGA

SEQ ID NO: 12341 - protein, 728 aa, Pseudomonas aeruginosa PAO1
MTSITPVTLANCEDEPIHVPGAIQPHGALVTLRADGMVLAASENIQALLGFVASPGSYLTQEQVGPEVLRMLEEGLTGNGPWSNSVETRIGEHLFDVIGHSYKEVFYLEFEIRTADTLSITSFTLNAQRIIAQVQLHNDTASLLSNVTDELRRMTGYDRVMAYRFRHDDSGEVVAESRREDLESYLGQRYPASDIPAQARRLYIQNPIRLIADVAYTPMRVFPALNPETNESFDLSYSVLRSVSPIHCEYLTNMGVRASMSISIVVGGKLWGLFSCHHMSPKLIPYPVRMSFQIFSQVCSAIVERLEQGRIAELLRVSTERRLALARRARDADDLFGALAHPDDGIAALIPCDGALVMLGGRTLSIRGDFERQAGNVLQRLQRDPERDIYHTDNWPQPSEDSPDGGDCCGVLAIRFHRQESGWIFWFRHEEVHRIRWGGKPEKLLTIGPSGPRLTPRGSFEAWEEVVRGHSTPWSETDLAIAEKLRLDLMELCLNHAAEVDRMRQRLIAVLGHDLRNPLQSISMAAALLSSSDTRTTELRQHISASSSRMERLVSQILDMSRLQSGIGLTVNPVDTDVSQLVRQIVCETDVAYPGLVIEIAIDPQVRAVVDPDRYAQVAANLLSNARHHGLPGRPVLVTLTRQGDEVCLSVLNETSGLSEAQLANLFEPFKRESADNQRNRNGLGIGLYISQAIAQAHQGRIDVDCRDDVITFCLRLPVRQAETGSSS

SEQ ID NO: 12342 - protein, 1417 aa, Pseudomonas aeruginosa PAO1
MNVQQSKFRLSRWAGATLALGLLLSGLGAWGLALVNEQQARMALEREAELLAEAVTRRVELYQYGLRGVRGALLTAGEVHIDRELFRRYSLTRDIDREFPGARGFGFIRRVAAADEAGFLRQARADGQPEFRIQQLTPHDGERYVIQYIEPVARNGQALGLDIASEANRREAARAALETGQVRLTGPITLVQASGLRQQSFLILMPIYRSGITPPPGPQRELEGFGWSYAPLLTGEVLAGLPIDNAAIHLELSDVTGDGAAVPFFVNGAAAPAQRLFGHMLRREIYGRHWQMAFSALPLFVQRLHQPSPRILFLAGSLVSLLLAALVNASALGRLRRRREAATQARLAAIVGNSADGIIGVGLDGVISDWNRGAEALFGYREEQAVGRRVVDLLVPPSKENEELDILARIARKEQVVSFDTVRRHQDGHLLDVAVTVSPILGPDGGVVGASKTVRDISAKKAAEARIRELNTGLEHQIAERTAELRRLNVLLGSVLQAASEVSIITLDRDGIISGFNLGAERMLGYRADEVVGKASPTLLHSERELLARGQELGEEGFRVLVARAEQEGAETREWTYLRKDGSPLSVTLSVTVLRDEAGAINGYLGIAVDVTEWRNAEREMAAARDQLQMAADVARLGIWRWNLADDSLQWNERMCEMYGQPLALRDGGLVYEHWRSRLHPEDLERTEASLRAAVEGRGNYDVIFRVVLPDGGIRFIQAGAQVERDADGNPLQVTGINIDITSDQQLQARLREAKEQADAASAAKSSFLANMSHEIRTPMNAVLGMLQLARQTDLNERQRDYLDKASSAATSLLGLLNDILDYSKIEAGKLVLEMLPFELEPLMQDLAVVLSGNQGDKDVEVIFDIDPELPSAVVGDRLRLQQILINLAGNALKFTARGHVLVSLRRLAHDAHLVRLRVLVADTGIGISAEQQQRIFEGFTQAEASTSRRFGGTGLGLFICKRLVDLMGGELRVESAPGSGSRFWFDLDLDVAHDQPLRAACPGAGEPLRLLVADDNLVAGELLERTVGALGWRADCVGSGSEAVARVQAAMAEGRRYDVVLMDWRMPDLDGLSAAQLIRQLQGDLPPPMVIMITAYGREVLADARDHSAPPFVDFLTKPVTPKQLADSVLHALHGEQGAPANPPPRPVERTQRLRGVRLLVVEDNALNRQVAAELLSSEGARVALADGGLAGVQQVLEASVPFDAVLMDMQMPDIDGLEATRRIRADGRFAGLPILAMTANASLADREACLAAGMNDHVAKPIDKERLVLCLLGHLGRSGARGAPATAADAGELVEARGDIVGRFGGSLELIVQVLRRFVPDMQDLFAQLERQLGEGDVQGSAATLHTIKGSASTVGASALAGRASELEQALRRADPLRGMEILAGIRLDELRTLCDACLLRLQAMFGDVQAESAS

SEQ ID NO: 12343 - protein, 1141 aa, Shewanella oneidensis MR-1
MSAIQKIRYQLLCILSYLPLLCMTFITHAEQPNTTTISVGVLANGWGPFQQVNDQITTGFSVELIQLLAKNLHYQIDWKIYPDWMSLYSAGCNGEVDVLLDAFRTTERTQCLMFSRSYYTSPTVVVIRYDSRFFRDVSEFGQARIAVEKGFSTEKLVKLHYPTVTEVTFSNTEQALSSVIDKTTDAYIGNLHVANQYISAHPELLIVAQAPLMMENLHLGITKNNSLLVTQLDNALMALSVEERNALEVTWLGMGDLHFLGHSNFLLRPNEREWLAGLPSLRVGFVDDWMPFSSVNNNGILVGLIADYLEQFREKLGLDYAAQKTRTWNEIQSALINHEIDLAIIPTRLKAQYPDWHMSEVFTSFPIVIATARNSPRIAGLSELNFQRVVITDNLLLPSIKKAYPNIDVVVSANPDEGLTLVAKGNAAAYMGNLAVVAMLIDNKFIDELRVAAPTPYKDELAVAIREPYWQLIPLINRVFSSMSEKEKQQIRNTWLAVNYSEGISWHTLITTLLPIAIGLLLFIGGLTIAYLKLRQEINKRRIVENALAIAKENAELATKRKAEFLAAMSHEIRTPMNGLVGMAEQLSFTPLGIEQKQMVQIISNGAEEILQIINNILDFSKIDMGKMRLESTPILLREVLDSTLNMVMNDLRTKDLSLYLHVDQGVAARVTGDSLRIKQILFNWVSNAIKFTERGFIEVSVKLEAEEEGQQLLLIGVQDTGIGMNADTQARIFNIFEQADVSTTRSYGGAGLGLAISHTLAEMMGGDIILNSAPHLGTFIGLRIRLPVVAQDEFDEQLQGLQAYIAISDIKLRHTLSWHLASLGIVLTQNKANADLLFTDNASDDRQHILCTHFNEALGYRYQNDQCLLNVNPLTSQAVKDVCYINMGWIDTIVSTPQRDITLKVNWPECKILLIEDHQLNQILVQRQLKQLRLDCDIAEHGVQALDLMQQTHYDLILCDCRMPVMDGYTFTQQVRAQEIDGQHVPIIALTANVLNEQKQRCAAVEMDDLLAKPLHLNELHEMLLKWLPHSKPALIDIKILENAFGRREALSKMLLMFKDELESSLKDIQLTAPQLADNIHRTAGTISMLGLTSIAEQAWLLEEKIRQEDSNNGEVELTEFRAIIIQLISELNAIIHTSN

SEQ ID NO: 12344 - protein, 939 aa, Yersinia pestis CO92
MGKASSLVTRLTLLMGVTLTVIWLILIATTAFFSYENTRQILINELTHMASMRADLSNHQFEGAERDAASLISRRESLQSTSPLPEISIKHYDSYYIPFNLDSCNINQHKNDLWIIQAYGTAGQTYYLDSFIIKQKEGIVLFPPQKSSSDYLNQRRKDLLLLPKFPTHNNIYWGAPTYTPQGGWHVSVAVCDKVGTLAGFALKLNDLIAYNHPVEQRDINLLLDKNGELLPISQQATSSNQLHEILNQLKNSKLHDGWQQTPDYLVLRTQLKGPGWQQLVIYPRMGFAWEALKPALYQLPFALAILLLLTSVLSLLLRYYLAIPLWNFINIIGATGPQAMEPRLPINRIDELGHIARAYNNLLDTLNEQYDTLEMKVKERTLALAEAKRAAEQANRRKSDHLTTISHEIRTPLNGALGAVELLQNTPLDAGQMRLAETAHQCSLSLLAIINNLLDFSRIESGQMTLSLEKTALLPLLDQAMLTIHSQALSKSLALSTFISANIPLELELDTLRLRQILVNLLGNAVKFTPQGRIQLRVRRQNQTLCFTVEDTGCGIDVQHQQTIFQPFMQTSDHEQGTGLGLAIADNLAKMMGGHLTVFSEPGQGSCFSLCLPFNAITPPMPFHGELFAPQRLHAQLSAWGMTCQPELANQPSRHFVDNALCYLPGRLYAKLKQYLQGAETEALKSLPLQPWQMHILLVDDSETNRDITGMMLQQLGHQVTRADSGTTALAIGRQHRFDLVLMDIRMPVLDGLATTARWRHDPANIDSHCMITALSANASPDEQIKTSQAGMNHYLSKPVTLGQLAEMLDLTAQFQLERGVDLSPQLSEPQPLLDLADSALSLKLYQSLQVLIQQAKDAIENLPVLSHTLHTIKGCAGQAGLIELQDAVIQLEHALDTHETLTQQEIIQLDEIIHVLLQPPTTCESTFIISQGQSLMVK

SEQ ID NO: 12345 - protein, 857 aa, Vibrio vulnificus CMCP6
MTNEQLQRKHQSLATLITRIIFLVLGLITIGIFIQSYYFSNKIIKQEVMLTKQQTSALVKSLFNNHLSILQIHHDSNSKNEAIRRFFLDGDDEKLEYYFLSMDQADPTHTPEFRFLTTGEGLLWDDGNAHFYGVNEVLLEKISQSVLFGNNWHFMSLHTLMGLRNMLVRRSPVIDTTTGEVLGQYYISVVLDNNFPLVEMLESGSNSDNIVMLVGDKVISHSLSGNEPYDLDSLLAMRDEPSAFDDCLISQTPIEINSTDTLVSILAIQENSHVASLQRQHYLGLATSVVLMLMLSLAIRSWIQNRVANALESLMAYSRFAGTGEKYERFNGSDILEFAHIGHTLENTFEQLESQRRSFQDLFNFALSPMMVWSESGLLIQMNPAAMKELGIEHASPQDFSNPLFQLFKLKLSPHLKMAAQGATLTGINVPIGEKIFRWNLSPIVVENGISGIIVQGQDITTLIDAEKQSNLARREAEQSAKTRADFLAKMSHEIRTPLNGILGIAQLLKRSVNDAENLKQVDVLCNSGEHLLAVLNDILDFSKIEQGKFNIKKRDFNFYDTLNTLENIYRPICREKGVSFEIHNQIPLDCQLHTDQVRLNQIMFNLISNAVKFTPAGRIEVSFKLEKFARSEHSILSIQVSDTGIGIDESKLESIFEPFVQADSLSTREYGGSGLGLTIVKNLVEMLEGEISVQSELCKGSTFYLSIPVEKGECEEQKTPTNPKPEQLFGQGLKVLLVEDNHTNAFILKAFCQKYQMSVEWVQDGTQALEKLKEHAFDLILMDNQLPKMGGIEATREIRETLKLGTPIYACTADAQESTKQEFLSAGANRVIVKPIKEQELHDELLHFKAHYWVEH

SEQ ID NO: 12346 - protein, 390 aa, Lactoris fernandeziana
PYEVPMTAGALQSYKLAAKAISRLQSLPSGSMERLVDTVVQEVFELTGYDRIMAYKFHEDDHGEVISEVTKPDLEPYLGLHYPATDIPQASRFLFMKNKVRMICDCRAKPVKVYQDEKLSFDLTLCGSTLKAPHSCHLQYMENMGFIASLVMAVVVNEGEEEVDSQESSQQQAPKRKRLWGLVVCHNTTPRFVPFPLRYACEFLMQVFAIHVNKEFELENQILEKNILRTQTLLCDMLFRDAPMGIVTQSPNIMDLVKCDGAVLLYQNKVYRLGLAPTESQIHDIAQWLSEYHKDSTGLSTDSFHDAGYTRARSLGDIVCGMAAVRINSGDMLFWFRSHTAAEVRWGGAKHDPDEKDDGRRMHPRSSFKAFLEVVKYRSFPWKDYEMDAI

SEQ ID NO: 12347 - protein, 341 aa, Lactoris fernandeziana
DLEPVNPSDVPVTAAGALKSYKLAAKAISRLQSLPSGNIPLLCDVLVREVSDLTGYDRVMAYKFHEDEHGEVIAECKRSDLEPYLGLHYPATDIPQASRFLFTKNKVRMICDCSARPVKVIQDKRLAQPLSLGGSTLRAPHGCHAQYMLNMGSVASLVMSVTISEDDDDSASEQKGRKLWGLVVCHHTTPRFIPFPLRYACEFLIQVFGIQLNKEVELAAQVREKHILRTQTVLCDMLLRNAPVGIMTKSPNVMDLVNCDGAALYYRNRCWFLGTTPTESQIRDLAEWLLQYHNSTTGLSTDSLVEAGYPCAHGFGEAVCGMAAVKITSRDFLFWFRSHTA

SEQ ID NO: 12348 - protein, 745 aa, Pseudomonas syringae pv. tomato str. DC3000
MSQLDKDAFEVLLANCADEPIQFPGAIQPHGLLFTLKEPELTILQVSANVQSVLGKVPDQLAGQTLDCVLGAGWAEVIRSTSANDSLVDVPRLLMSVEGVEFEALLHRSQEALVLELEIQDKAAQAISYSERTGNMGRMLRQLHAAADLQTLYEVSVREIQRMTGYDRVLIYRFEEEGHGQVIAEASAPAMELFNGLFFPASDIPEQARELYRRNWLRIIPDANYTPVPLVPQLRPDTQQQLDLSFSTLRSVSPIHCQYMKNMGVLSSMSVSLIQGGKLWGLISCGHRTPLYVSHELRSACQAIGQVLSLQISAMEALEVSRQRETKIQTLQQLHQMMATSDTDVFDGLAQQPQLLMDLVGATGVAIIEDRQTHCYGNCPEPSDIRALHTWMMAGGEPVYASHHLSSVYPPGEAYQTLASGVLAMSLPKPVDNGVIWFRPEVKQSVQWSGDPNKPLNLDASDNTLRLQPRTSFEIWKVEMTGIATKWSHGDVFAANDLRRSALENDLARQVSKEQQAVRARDELVAVVSHDLRNPMTVISMLCGMMQKSFSSDGPHTSRRISTAIDTMQQAASRMNVLLEDLLDTSKIEAGRYTITPQPLEVSQIFEEAYTLLAPLAMDKSIEISFNAEPDIKVNADPERLFQVLSNLIGNAIKFTPKLGRIGVAAMSNGDEVVFTVRDSGEGIPPEQLPHIFERYWTVKEGNPTGTGLGLYISQGIIKAHGGELAAQSQVGHGSEFRFTVPIAH

SEQ ID NO: 12349 - protein, 993 aa, Pseudomonas syringae pv. tomato str. DC3000
MIEHTLDANPDAALEAALAECAREPIRIPGAIQPHGVLLSVAGDPLCIEQVSANCAKSLGLESAELLGQPLSILLSAAHSMLINQAYSQPAMPNSDPIRLTVRAVDYNASLSRAGDVLIIELEPFVEAAHEQSRIITRVLRNLQAATTLETLFDIGVHEIQALTGYDRVMIYRFEPEGHGKVVAQALTGPLPSYSGLNFPGSDIPAQARELYRLNWIRLIPDATYVPVALIPTLRPATGQPLDLSLSTLRSVSPVHCEYLKNMGVRSSMSISLLDGGELWGLITCSHPEPLLVSRELRDACAMIGQLLSVKISAIVATHIQREREEKVVLLGQLADAMNRADHEILHGLVSRPQLLQALTQADGAAVLIDDQVHLFGQCPTSEEVRALYQWIRDTGLTRQRSKERATGLQGLGVFHTDSMQRERPESAAYRETASGVIAFTLPKPVDNAVMWFRSQLASTMNWSGNPAHHVSTRAAGSASHGLRPRQSFDVWKQEVTGIARPWSRADLYGAEDIRRSALESDLERQVQREQEAVRLRDELVAVVSHDLRNPMSIIIMQCGMMQRWAVDDTNFENRNIRRALGTIEKATTRMNSLLEDLLDTAQIEAGRYQLSRLALSVTSLLEEACSLLVMLTTEKNIELNCTSAQGLVIDADPERIFQVLSNLVGNAIKFTPKGGRINIDAVADGDDVLFRVSDDGIGIPAQHLPYIFQRYWSVKEGNPRGNGLGLYICQGIITAHGGRLWADSSLDSGSVFSFTLPMHQGQDTIGESTFLKQSGTTHRLAQSISSKLERQQLEDRLTRAGLLNELNHRVKNTLATVQAIASLTVNSSTSLDSFRKSFDARLFALSQARAEWMSTELADLLAQLQDVNGGQHRITFTGDPVRLEPRISLTLSMVLHKLMANALQHGALSSPAGQVTVASTLNSHHNPPTLSIDWLETEGPPVVASNVKGFGLRLIRRSIERELKGKVDIKFASTGVSWSMLIPWPEKPESSL

SEQ ID NO: 12350 - protein, 858 aa, Vibrio parahaemolyticus RIMD 2210633
MTITSKLKKRRSLSTLITKIIILVLAPIILGIFVQSYYFSKQIIWQEVDRTKQQTSALILNIFESHFAAIQIHHDSNSKSDVILDFYSERNEEALNYFFLSIDQSDPSHTPEFRFLTDHQGIIWDDGNAHFYGINDSMLDGLTSKVTFSNNWYYVTSITSMGARHLLLRRVPVLEPKTGEVMGYSYNAVVLDNNFALMEKLKNEGNVDNVVLVANDIPVASSLAGDESYKIFDVLKRKETQKKLDQLLIIQTPIEVNAAITNLKLLTVQDNQSVVTLQIQHFLAMLASVIGMIMIALMTKEWIENRVVEELGSLMSYTRSAREEKGFERFGGSDIEEFDHIGSTLESTFEELEAQKRSFRDLFNFALSPIMVWSEAGVLIQINPAARKELVIENDIETMHPVFKGFKDKLVPHLRMAAQGATLTGVNVPIGDKVFRWNLSPIRVDGDISGIIVQGQDITTLIEAEKQSNLARREAEKSAQARADFLAKMSHEIRTPINGILGVAQLLKDSVEAEEQKNQIDVLRHSGEHLLAVLNDILDFSKIEQGKFNIQKHPFSFADTMRTLENIYRPICENKGVELVIENQLDGNVEIFTDQVRLNQILFNLVSNAVKFTPSGCVRLHAELEQFYGADNSVLVVEISDTGIGIESDKLDEMFEPFVQEEATTTREYGGSGLGLTIVKNLVDMLDGDVQVRSQKGQGTTFVVTLPVKDRERVLAPLDSSQRVKPAELFDESLKVLLVEDNHTNAFILKAFCTKYKMQVDWAKDGLEAMEFLKDHSYDLILMDNQLPHLGGIETTKEIRQNLKLGTPIYACTADTAQETSDAFMEAGANYVLLKPIKENALHEAFVDFKQRFLIERT

SEQ ID NO: 12351 - protein, 897 aa, Bradyrhizobium japonicum USDA 110
MNEQVDQGHLRTPPGRLFRKYLYSIVALAFAALAINTGFDVWFSYREQKQLLAATQREQAASAAIQIGQFIGQIENQIRWLSRLPPELSTNEDERLNAIRLLRLSPAIAEIAELDAQGREQVRVSRRVADRVGSKIDLSASPAFRGANESRTYYGPVYFIGDTEPFMTLAARGVGRGPNVIVAEVNLRFIWDLVAGIRVGNTGKAYVVDRMGLLIAHPDLWPALRRSDLSGHADVRAALDGAGPPSGGLVKEDLSGQRVLSTYATVPSLGWLVFVELPLTEAYAPIYASIGRSTFLLVALLACAVLVSLFLSRRMTVPIQILTQGARRIGSGDLGLRLAIKTGDELEALGDQFNRMAAHLRESYATLERKVIERTSELEKARDHALAEHDAAERARSIAVQANETKSRFLAVVSHELRTPLNGVMGVLQLLDDGSLGEAQRRHLATAAASGETLIALVDAILEYARLEASAETLEMRDFRLDQLIEAAADLMRPQAFGKGLTFDLASDVTVNTSVHGDPVRLNRILLNLIGNAIKFTPRGGIGLKASAEQHEDHILLSITVRDTGIGIAPDMHERIFEDFVQADDSIARRFGGTGLGLAIARRLTRLMRGELTVESTPGAGSTFALEVPLGLAASGIAQGALPPPSRRLRVLLVDDDPVNCQVGEAILNRLGHHPTIARNGASAVALARDQAFDIILMDLHMPDMDGVEAASQIGKLGLPRMPRIIAVTADVSRSARERLASAGIAKVVSKPILINALREAIEDDPPDQPAEVRLAAGALIDRHFLDDQKELLGATQIAKLHQLLRQTSQQRIEDIAEAAAIDDHLQLARSAHQLGSAASALGLVRLFERCREVELAVATMSASECHGAARELAALQKASMSALDELLLPVEQRSVS

SEQ ID NO: 12352 - protein, 683 aa, Coxiella burnetii RSA 493
MGRQNWKIKNLEVCMEVSTTRIHKPILKKLGSLFLNLAETSQDIFWIRSVDFYTHVYVSPAFENIFGISRQTLYANPNKWMNAVIIEDRDRLRHLIMEWQVKNKKGAAYTVDYRIIDAYGEMHWINETSYPVYEDDQCLGYAGVVKDVSSEKLRVKEFDNAVHYFRHFVERVSGVFWVKGSRGDKQIYISPTYEKIWGVSCESLYQNPKSWIDYVLPEDISNGKVNVNFYETAADQRTPDSKYEFHFRIRRPDGEIRWIKDTYFPIMENGKLVGFAGIAEDVTNDALREKELWEAKEFAEQANRTKSDFLAMMSHELRTPLNAILGMSQILKTHNLSDEQQGQIDVISQAGQNLLALLNDLLDFAKLEAGKLSFTEETMDLHELVMKIKGDMLLLAHKKGIQLKFDYPENIPSKVMGDAKRIRQVLVNLLSNALKFTEKGYVQLTANCLKKDHKKMTLCFTVKDTGIGMEKTKLSSIFNRFQQINSVYQRKYDGVGLGLSIVKELLEKMGGTISVTSEPGVGSEFTCIIPFRLQADSNPTLPARDLLEKQAVNNSTYDRESRFNMNVLVVEDNLINQRISKIMLEQVGCQVDIAGCGKDAIEKMKKHYDMVFMDIGLPDMDGFETTQCIRHNETPGQRVPIVAMTAHVFAQDRKRCFDVGMDEVMAKPIMQDDLIKVLKRWAA

SEQ ID NO: 12353 - protein, 220 aa, Pyrus communis
CDFEPVKPYEVPMTAAGALQSYKLAAKAIAAIARLQSLPSGSMERLCDTMVQEVSELTGYDRVMAYKFRDDDHGEVVSEITKPGLEPYLGLHYPSTDIPQASRFLFMKNKVRMIVDCCAKQVKVLQDEKVPFDLTLCGSTLRAPHSCHLQYMKNMDSIASLVMAVVVNEGDDEVASPDSVQPQKRKRLWGLVVCHNTSLRFVPFPLRYACEFLAQVFAIP

SEQ ID NO: 12354 - protein, 193 aa, Taxus baccata
DEHGEVVAEIRRSDLEPYLGLHYPATDIPQASRFLFMQNRVRMICDCRATPVKVIQSGELKQPLCLVGSTLRAPHGCHAQYMANMGSIASLVMAVIVNGNGNGNDEDGGGGSGRSSMKLWGLVVCHHTSPRAVPFPLRSACEFLMQTFGLQINMELQLAAQLIENNILRTQTLLCDMLLRDAPIGILTQSPSI

SEQ ID NO: 12355 - protein, 214 aa, Citrus limon
IDFRPVKPYEVPMTAAGALQSYKLAAKAITRLQSLPSGSMERLCDTMIQEVFELTGYDRVMAYKFHEDDHGEVVSEITKSGLEPYLGLHYPATDIPQAVRFLFMKNKVRMIVDCRARHVKVLQDEKLPFDLTLCGSTLRAPHSCHLQYMENMNSIASLVMAVVVNDEEEEGDNTLPQKRKRLWGLVVCHNTTPRFVPFPLRYACEFLAQVFAIH

SEQ ID NO: 12356 - protein, 148 aa, Citrus limon
VMVYKFHEDEHGEVVAESKRPDLEPYFGLHYPATDIPQASRFLFKQNRVRMIVDCHATPLCVIQDEGLMQPLCLVGSTLRAPHGCHAQYMANMGSIASLALAVIINGNDEEAVGGRSTTRLWGLVVCHHTSARCIPFPLRYACEFLTQ

SEQ ID NO: 12357 - protein, 1313 aa, Geobacter metallireducens
MNRRELMAGVLLGSAGFLVNWFKLSLFFNVDFLFGSVFSMFALLRFGPATGLLAAVIAAGCTWLQWHHPWAIVIFGCEALCAGWLRNRKRMDLMLGDIIYWFSGGLVLVWLFYHQVMGFNAGATLLVALKQGMNGIINTLIAEALFLLSWRLRGGTELPSLRKWLGVILEGVVLVPAFVFAFLDTSWYFRQQMTRLQESTARTAEVGNLTISSWLDEEQHKLGMLVKLVGDPDHNPSQEMQRLLERYHAAHGSDTYRLGVMDRNHVTRAFSPRVDEKGVSTIGVWLGDRPYIAELNDPSHPIVFDAFMGKIGVPGPRLIMLAPCMVGGEYRGAVFSVVSLGHPAALLKGIVGKRDVNLTLLDRHRRVVASTDSGKKFLEQFALPKGGQLHSVGSNVSQWVPDPQPGGGPMKRWNRSFYMTEIALEPKSGFRLVVQSSLAPSLKEINNRASILLGVLAILTLVVVGLSRYFSRRLLAPFAMLGKVTSQLPVRIAQGEQISWRPAEVREEQELQDNFRLMENALQNSFSELTAINEELEHRVTERTAELRIAKEAAENSELQLRSITNSAHDAILMMDHQGSISYWNPAAEQILGYSAAEALGKNLHDLLTPERYLADHLTAFSEFQQTGSGNAVGKTLELFARRKDGQEIEVALSLSAVFLNGAWNAVGLLRDITEQKRINASLRMLSAAVEHSPVSIIITDRDGRIEYVNPKSCQMTGYAFEELRGQNPRIMKGPTHPPEFYKNLWETILSGREWYGEFHNRRKDGSLVWVMASISPIYDEKGEITHFVGVREEIEKQKKLQEELANIAQLEKVARDRAEQANRAKSEFLAGMSHEIRTPLNAIIGMSDLLAETRLDGEQSGYLSVVHSAGETLQGLINDILDLSKIEAGMLQLDSVPFSLRDCIRQLTDITSVKASSKGVTYSFSVKSAVPDWLMGDSLRLRQVLINLVGNAVKFTDSGGSVLLEVEPVQQSDAEVLIRFSVADTGIGIAPEKLDTIFESFSQADSSTTRRYGGTGLGLAISRHLAGMMGGEIGVESTVGKGSCFRFTVPFAISRRTEEPLPKEQLPGDKLGRPLSILVVDDNLANRTVLTAYFRRTEHTVECAVNGEEALAKIKGGGYDVVFMDMEMPVMDGYTAVRLVREWERETGRAPLPVIALTANALKEDQLRSLDAGCTAHLTKPIKKDKLLEIVGEYQQRPRTNGKQGTNMDRDNVPDKIVVVCDPDLEDIIPAYLEGRKTEGSVIRELAVNGQFDEVRTIAHGLKGSGGCYGFSRITEIGRDMELAANDGNLVEVLKQLDTLEAYLQAIEVRYE

SEQ ID NO: 12358 - protein, 914 aa, Geobacter metallireducens
  unsure (1)..(914): unsure at all Xaa locations
MPEPGTTPTFDAFHRSAEGLLRAMNLETWRIRNWRLFTKIFLMSTVAVFVIIAGLLGFFLPLLESKLIHERTDNASHIVDAARSIAAHYHSLQLRGELSEPEARRLAVNTLRALRYNVNGYVWVHDLENRMVMHPLQPELEGHYLTRLADARGKPLFLTMNNLVRREGKGEVDYLWPRPGEQEPSRKVSYVSLFEPWQWVLGSGVYLDDVQDEISMLEARVITGALVTLLLSVVFSAYAAYRINRPLRQALFCAAAAMGHDTSVVEDKSHDETHQVLHTIERMVNDLKRSRDEAESASRMKGEFLANMSHEIRTPMNAIIGMTELTLETPLSPSQRENLEIIGSSAESLLGLLNDILDFSRIEAGRLLLEKVPFDLRNTVEGALDVVAPQAHGKGLELILDVARDLPEAFIGDPXXXXXXXXXXXXXXXXXGSGVYLDDVQDEISMLEARVITGALVTLLLSVVFSAYAAYRINRPLRQALFCAAAAMGHDTSVVEDKSHDETHQVLHTIERMVNDLKRSRDEAESASRMKGEFLANMSHEIRTPMNAIIGMTELTLETPLSPSQRENLEIIGSSAESLLGLLNDILDFSRIEAGRLLLEKVPFDLRNTVEGALDVVAPQAHGKGLELILDVARDLPEAFIGDPTRLRQVLINLLSNAVKFTAKGEVGLKVERAPSSGTDDGVMLLFTVSDTGIGIPADKLSLIFESFTQADGSTTRKYGGSGLGLAICRALVSMMGGDISVKSAVGVGSTFRFTARLGTCALQNREIRQAGIPRFGREVKILLAEDNPMNLKVSRLLLEMMGCQVVAVENGGDVVSAMKGERFDVVLMDIQMPVLDGLEATRVIRSGSERGIDQTTPVIAMTAHALKGYEKVCHEAGMNDFISKPVRAGELYNVILRNLPPAPGGGGVTPSAL

SEQ ID NO: 12359 - protein, 365 aa, Averrhoa carambola
ALSIAGAVQSQKLAVRAISQLQLLPGGDIKLLCDTVVESVRELTGYDRVMVYKFHEDEHGEVVAESKRPDLEPYIGLHYPATDIPQASRFLFKQNRVRMIVDCNAKPVRVIQDEGLMQPLCLVGSTLRAPHGCHAQYMANMGSIASLAMAVIINGNDEEAIGGRNSMRLWGLVVCHHTSARCIPFPLRYACEFLMQAFGLQLNMELQLASQLSEKHVLRTQTLLCDMLLRDSPTGIVTQSPSIMDLVKCDGAALYYQGKYYRLGVTPTEAQIKDIIEWLLAFHGDSTGLSTDSLADAGYPGATSLGDAVCGMAVAYITKTDYLFWFRSHTAKEIKWGGAKHHPEDKDDGQRMHPRSSFKAFLEVV

SEQ ID NO: 12360 - protein, 365 aa, Averrhoa carambola
ALSIAGAVQSQKLAVRAISQLQLLPGGDIKLLCDTVVESVRELTGYDRVMVYKFHEDEHGEVVAESKRPDLEPYIGLHYPATDIPQASRFLFKQNRVRMIVDCNAKPVRVIQDEGLMQPLCLVGSTLRVPHGCHAQYMANMGSIASLAMAVIINGNDEEAIGGRNSMRLWGLVVCHHTSARCIPFPLRYACEFLMQAFGLQLNMELQLASQLSEKHVLRTQTLLCDMLLRDSPTGIVTQSPSIMALVKCDGAALYYQGKYYRLGVTPTEAQIKDIIEWLLAFHGDSTGLSTDSLADAGYPGATSLGDAVCGMAVAYITKTDYLFWFRSHTAKEIKWGGAKHHPEDKDDGQRMHPRSSFKAFLEVV

SEQ ID NO: 12361 - protein, 193 aa, Sciadopitys verticillata
DDHGEVISEIRRSDLEPYLGLHYPATDIPQASRFLFMKNRIRMICDCCAPPVIVVEDKRLPRELSLCGSTLRAPHGCHAQYMSNMGSIASLVMAIVVNEKEEEDEDTDGEKQQQNGRRLWGLVVCHHTSARFVPFPLRYACEFLMQVFAIQLNKEVELAAQLREKHILRTQTLLCDMLLRDAPMGIVTQKPNI

SEQ ID NO: 12362 - protein, 187 aa, Sciadopitys verticillata
DEHGEVVSEIRRSDLEPYLGLHYPATDIPQASRFLFMQNRVRMICDCCATPVKAVQAEELKQPLCLVGSTLRAPHGCHAQYMANMGSIASLVMAVIINGNDEEGASGRSSMKLWGLVVCHHTSPRAVPFPLRYACEFLMQAFGLQLNMELQLAAQLTEKHILRTQTLLCDMLLRDAPIGIVTQSPSI

SEQ ID NO: 12363 - protein, 192 aa, Taxodium distichum
DNHGEVISEIRRSDLEPYLGLHYPATDLPQAARFLFMKNKVRMICDCYATPVKVVEDKRFPRELILCGSTLRAPHGCHAEYMSNMGSVASLVIAETINAKEEAEITDGQQQQQKGRRLWGLVVCHHSSPRFVPFPMRYACEFLMQVFAIHVNKEVELADQLREKHILRTQTLLCDMLLRDAPTGIIRQKPNI

SEQ ID NO: 12364 - protein, 189 aa, Taxodium distichum
DEHGEVVAEIRRSDLEPYLGLHYGATDIPQASRFLFMQNRVRMICDCRPNPVRVIQAEELKQPLCLVGSTLRAPHGCHAQYMANMGSIASLVMAVIVNGNGNDEEGSSGRSAVKLWGLVVCHHTSPRAVPFPPLSACEFLMQTFGLQINMEMQLAAQLTENNIVRTQTLLCDMLLRDAPIGIVTQSPSI

SEQ ID NO: 12365 - protein, 745 aa, Pseudomonas fluorescens
MNPQDKEAFEELLANCADEPIRFPGAIQPHGLLLTLSEPDLSIIQISANVETLLARPAQELIGQPLQSLIGDAHAAQVREALQQAALSDAPPLHFRLNGTAFEGLLHRHQDVLILELEIHVENFQPRNVAGTETHLGRMLARLQKAQSLQALYDISVKEIQAMTGYDRVLIYRFEEEGHGQVIAEASDPSMEVFNGLFFPASDIPEQARELYRTNWLRIIPNADYQPVPLVPKLRPDTQTPLDLSFATLRSVSPIHCQYMKNMGVLSSMSISLLKGDKLWGLISCGNRQPLHVPHELRTACQTIGQVLSLQISAMEALEVSRQREEKLEALALLNQAMIDSPQNVFDGLANQPQVLMALANAGGIAIIEDKQLHRYGNCPEPEEIRALHKWLQERGEPVFASHHLASVYPPAAHYQQVASGVLAMSLPKPVDNGVLWFRPEVKENINWSGDPRKPLDLENSDAGLRLRPRTSFEIWKVEMAGISTKWSHGDLFAANDLRRSALENDLARQVRREQEAVRARDELVAVVSHDLRNPMTVISMLCGMMQKAFSSDGPHTSRRISTAIDTMQQAAGRMNTLLEDLLDTSKIDAGRYTIAPQKLDVAQMFEEAQSLLAPLALDKDISISFEADPDLSIHADPERLFQVLSNLVGNAIKFTPRLGTVDVYAKSVGDDIVFTVRDSGEGIPKDHLPHVFDRYWTVKEGNPTGTGLGLYITQGIVEAHGGQIVAESEPGQGSEFRFTVPRLD

SEQ ID NO: 12366 - protein, 139 aa, Nostoc sp. PCC 8009
VYRFDENWNGIVIAEEKLEHLTAYLGLHYPASDIPQQARKLYSQNWLRIIPDATYQPVAIVPTNNPLTEQPLDLSNSVLRSVSPLHVEYMHNMGVAASMSISLKKNQKLWGLIACHHQTPKYIPYELRNTCEFLAQITS

SEQ ID NO: 12367 - protein, 144 aa, Pseudanabaena sp. PCC 7409
IYRFSEQGDGTVISEVKQPDLEPFLGLRYPDSDIPKQAKHLYTLNWLRLIPDVNYQPTGLVSHGLPEAASPLQNASLDMSYCTLRSVSPIHIKYLQNMGVTASMSVSLIQNKKLWGLIACHHYTPKFVPYETRTICEFLGQLMS

SEQ ID NO: 12368 - protein, 394 aa, Brachypodium pinnatum
EPARTEDPALSIAGAVQSQKLAVRAISRLQALPGGDVKLLCDTVVEHVRELTGYDRVMVYKFHDDEHGEVLAESRRTDLEPYLGLHYPATDIPQASRFLFRQNRVRMIADCHAAPVRVIQDPAMPQPLCLVGSTLRSPHGCHAQYMANMGSIASLVMAVIISSGGEDEHNMGRGAIPSAMKLWGLVVCHHTSPRCIPFPLRYACEFLMQAFGLQLNMELQLAYQLSEKHILRTQTLLCDMLLRDSPTGIVTQSPSIMDLVKCDGAALYYHGKYYPLGVTPTEVQIKDIIEWLTVSHGDSTGLSTDSLADAGYSGATALGDAVCGMAVAYITPSDYLFWFRSHTAKEIKWGGAKHHPEDKDDGQRMHPRSSFKAFLEVVKSRSLPWENAEMDAIH

SEQ ID NO: 12369 - protein, 376 aa, Cleistachne sorghoides
ALSIAGAVQSQKLAVRAISRLQALPGGDVKLLCDTVVEHVRELTGYDRVMVYRFHEDEHGEVVAESRRDNLEPYLGLHYPATDIPQASRFLFRQNRVRMIADCHATPVRVIQDPGLSQPLCLVGSTLRAPHGCHAQYMANMGSIASLVMAVIISGGGDDEQTGRGGISSAMKLWGLVVCHHTSPRCIPFPLRYACEFLMQAFGLQLNMELQLAHQLSEKHILRTQTLLCDMLLRDSPTGIVTQSPSIMDLVKCDGAALYYHGKYYPLGVTPTESQIKDIIEWLTVCHGDSTGLSTDSLADAGYLGAAALGDAVCGMAVAYITPSDYLFWFRSHTAKEIKWGGAKHHPEDKDDGQRMHPRSSFKAFLEVVKSRSLPW

SEQ ID NO: 12370 - protein, 393 aa, Hakonechloa macra
EPARTEDPALSIAGAVQSQKLAVRAISRLQALPGGDVKLLCDTVVEHVRELTGYDRVMVYRFHEDEHGEVVAESRRADLETYLGLHYPATDIPQASRFLFRQNRVRMIADCHATPVRVIQDPGLPQPLCLVGSTLRAPHGCHAQYMANMGSIASLVMAVIISSGGDDEQTARGGISSTMKLWGLVVCHHTSPRFIPFPLRYACEFLMQAFGLQLNMELQLAHQLSEKHILRTQTLLCDMLLRESPTGIVTQSPSIMDLVKCDGAALYYHGKYYPLCVTPTESQIKDIIEWLTVCHGDSTGLSTDSLADAGYLGAAALGDAVCGMAVAYITPSDYLFWFRSHTAKEIKWGGAKHHPEDKDDGQRMHPRSSFKAFLEVVKSRSLPWENAEMDAIH

SEQ ID NO: 12371 - protein, 394 aa, Lygeum spartum
EPARTEDPALSIAGAVQSQKLAVRAISRLQALPGGDVKLLCDTVVEHVRELTGYDRVMVYKFHDDEHGEVLAESRRTDLEPYLGLHYPATDIPQASRFLFRQNRVRMIADCHAAPVKVFQDPAMPQPLCLVGSTLRSPHGCHAQYMANMGSIASLVMAVIISSGGDDEHNMSRGVIPSAMKLWGLVVCHHTSPRCIPFPLRYACEFFMQAFGLQLNMELQLAHQLSEKHILRTQTILCDMLLRDSPTGIVTQSPSIMDLVKCDGAALYYHGKYYPLGVTPTESQIKDIIDWLTVCHGDSTGLSTDSLADAGYPGAAALGDAVCGMAVAYITPSDYLFWFRSHTAKEIKWGGAKHHPEDKDDGQRMHPRSSFKAFLEVVRSRSLPWENAEMDAIH

SEQ ID NO: 12372 - protein, 387 aa, Nardus stricta
PALSIAGAVQSQKLAVRAISRLQALPGGDVKLLCDTVVEHVRELTGYDRVIVYKFHDDEHGEVLAESRRTDLEPYLGLHYPATDIPQASRFLFRQNFVRMIADCHAAPVRVIQDPAMPQPLCLVGSTLRSPHGCHAQYMANMGSIASLVMAVIISSGGDDEHNMARGVVPSAMKLWGLVVCHHTSPRCIPFPLRYACEFLMQAFGLQPNMELQLAHQMSEKHILRTQTLLCDMLLRDSPTGIVTQSPSIMDLVKCDGAALYYHGKYYPLGVTPTESQIKDIIEWLTVCHGDSTGLSTDSLADAGYPGAAALGDAVCGMAVAYITQSDYLFRFRSHTAKEIKWGGAKHHPEDKDDGQRMHPRSSFKAFLAVVKSRSLPWENAEMDAIH

SEQ ID NO: 12373 - protein, 388 aa, Phragmites australis
EDPALSIAGAVQSQKLAVRAISRLQALPGGDVKLLCDTVVEHVRELTGYDRVMVYRFHEDEHGEVVAESRRADLETYLGLHYPATDIPQASRFLFRQNRVRMIADCHATPVRVIQDPGLPQPLCLVGSTLRAPHGCHAQYMANMGSIASLVMAVIISSGGDDEQTARGSISSTMKLWGLVVCHHTSPRFIPFPLRYACEFLMQAFGLQLNMELQLAHQLSEKHILRTQTLLCDMLLRDSPTGIVTQSPSIIDLLKCDGAALYYHGKYYPLGVTPTEFQIKDIIEWWTVCHGDSTGLSTDSVADAGYLGASALGDAVCGMAVAYITSSDYLFWFRSHTAKEIKWGGAKHHPEDKDDGQRMHPRSSFKAFLEVVKSRSLPWENAEMDAIH

SEQ ID NO: 12374 - protein, 104 aa, Phragmites australis
ARFLFMKNKVRMICDCRARSVKIIEDEGLSIDISLCGSTLRAPHSCHLQYMENMNSIASLVMAVVVNENEEDDEAEPGQPSQQLKKKKLWGLIVCHHESPRYVP

SEQ ID NO: 12375 - protein, 104 aa, Phragmites australis
QASRFLFMKNKVRMICDCSATPVKIIQDDSLSQPLSLCGSTLRAPHGCHAQYMANMGSVASLVMSVTINEDEEEDRDTGSDQQPKGRKLWGLVVCHHTSPRFVP

SEQ ID NO: 12376 - protein, 748 aa, Pseudomonas putida
MTADNSLADAMERCAQEPIQVPGSIQPHGFLLVLDATDLRVLQASENVEHWLGLPARELIGCHFADLVHEGFDLHAHLTRLPEDEVFPFHIGDVRLRQGAPISALLHMLVHCHDQVLIAEFEPPRLPADLVGQGDYYPLVRSFVASLQVASSIEDLLQQTVLQLKRITGFGRVKAYRFDAEGNGQVLAEVVDPGYPSYAGLCFPAADIPRQARELYRVNRIRVIEDANYQPSPLLPATNPRTGKPLDMSFAALRSVSPVHLQYMRNMGTLASMSLSIVVDGQLWGLISCHHQQPRPVDLRTRTACELLASVLSLQIESRESHASTRKLLTLRQHIVRMISSMADHDSVSDGLRDLPEVLLAFADAQGAAVISAERCDLIGQTPPEAQVTALVHWLGQRDEDKVFHSDNLRRDITELPELANHAGGVLAVAISQIHSHYLLWFRPEQIRTVNWAGQPTKQVGPQGNLDPRHSFERWQEEQRGYSQAWDPLVIEGVIELRAAVLGIVLRKAEELAQLAGELRRSNKELEAFSYSVSHDLRAPLRHIAGYTELLGEIEGQGLSERGKRFLQHIGEAAHFAGSLVDNLLNFSQMGRSALRLSDVDLNALVEAIRSELAPDYEGRAIVWDIAPLPKVIGDPAFINMALHNLIANAIKYTRGRTPARIEISAVQHPEETEVCIRDNGVGFDMAYANKLFGVFQRLHRMEDFEGTGIGLASVRRIIERHDGRVWATGQVDQGASFHFTLPRNTAT

SEQ ID NO: 12377 - protein, 994 aa, Ralstonia solanacearum
MATMLRRALPAPAHLWRRGRTALLLCATAIALLTTSDRAQADRTTRALPPMGHPLMPSAAAQMASGTPAAAIALWTLAVLSMRHVQLRRENRRRRRAEADLARQLDFHHRLLESLPFPLAAQDTQHRYVAVNAAFCHLFGQPREALLGRTPAHLGWRCAHTAARAQDIDRRATAASQGACEALTITAADGRERHVLYWVAPVHGPDGRPGGTVASLIDIDGIRDAQAPAEQRAQRLHELTESLPALVCQFEMRPGTAARGRMRHLAGNASETLGAPAGKARGRLPSPARLVHRDDRQRMRGAALQSAAQLTLLDQQFRHGNGDGPVRWLHIRARPRRGADGCTVWNGYLRDVTAERAQADALVSARQAAESALRAKDRFLATMSHEIRTPMNGVLGLVELLLQTRLEREQQRMMTLVQESSRALLHVLDDILDYAKIEADRLSITPAPTDLRALLDSTVGLLASRAHERSLAVRVDVDAAVPATVSVDGMRLRQVLCNLLSNAIKFTEHGSVRLSAKCMETAADTVHLIIRVTDTGIGIAPEAQATLFTPFVQADSTITHRQCGTGLGLAISRQLARLMGGSLDMDSTPNVGTTLTLRLEVPVVDARYRLPRLASATVRVAVDDDTCRHGLEQFAVAAGLRVVHTGTADLTLVDSVRAPADAPRIVPVTGDAPYTGPGRSIPRPEALSTNPLNWQAFVQACDTALARPADGHAANGMPKSRTVPEPAPAAETPGMHILVAEDHPINRELITRQLRLLGYRVTLAEDGAAALQRLCETRFDALLTDCCMPRLDGFDLARQIRQREQQAPGGRRLPILAITATTLAEEHARCRTVGMDGYVLKPTTLATLQDALSRLGNAAVSPDAAKAPATAPDNALAFRLDDLRQTLGDGPAAVSLIRVFTTALGDDARQLGGLLATADRPALRKWTHRTGGALALLHHTAIDAEMSAFRHAVHSADDTGLRQAGARMLQLLAHLQGVMRLAETPSPGTAPTCQ

SEQ ID NO: 12378 - protein, 744 aa, Pseudomonas syringae
MSQLDKDAFEVLLANCADEPIQFPGAIQPHGLLFTLKEPELTILQVSANVQSVLGKVPDQLAGQTLDCVLGAGWAEVIRSTSANDSLVDVPRLLMSVEGVEFEALLHRSQEALVLELEIQDKAAQAISYSERTGNMGRMLRQLHAAADLQTLYEVSVREIQRMTGYDRVLIYRFEEEGHGQVIAEASAPAMELFNGLFFPASDIPEQARELYRRNWLRIIPDANYTPVPLVPQLRPDTQQQLDLSFSTLRSVSPIHCQYMKNMGVLSSMSVSLIQGGKLWGLISCGHRTPLYVSHELRSACQAIGQVLSLQISAMEALEVSRQRETKIQTLQQLHQMMATSDTDVFDGLAQQPQLLMDLVGATGVAIIEDRQTHCYGNCPEPSDIRALHTWMMAGGEPVYASHHLSSVYPPGEAYQTLASGVLAMSLPKPVDNGVIWFRPEVKQSVQWSGDPNKPLNLDASDNTLRLQPRTSFEIWKVEMTGIATKWSHGDVFAANDLRRSALENDLARQVSKEQQAVRARDELVAVVSHDLRNPMTVISMLCGMMQKSFSSDGPHTSRRISRQSTHAASCQPHERVARDLLDTSKIEAGRTPSRRSRWKSARYSKRPIRCSPRWRMDKSIEISFNAEPDIKVNADPERLFQVLSNLIGNAIKFTPKLGRIGVAAMSNGDEVVFTVRDSGEGIPPEQLPHIFERYWTVKEGNPTGTGLGLYISQGIIKAHGGELAAQSQVGHGSEFRFTVPIAH

SEQ ID NO: 12379 - protein, 190 aa, Anthoceros punctatus
DEHGEVVAEIRRSDLEPYLGLHYPATDIPQASRFLFMKNRVRMIADCFSPPVKVIQSKDLPQPVSLAGSTLRAPHGCHAQYMGNMGSIASLVMAVVINDNDEDFNGRGYQQKGRKLWGLVVCHHTTPRAVPFPLRSACEFLMQVFGLQLNMEVELAAQMREKHILRTQTLLCDMLLRDAPIGIVTQSPNI

SEQ ID NO: 12380 - protein, 794 aa, Psilotum nudum
GSIGSLVMAVIVNDNDAEPSGRGNQPKNRRLWGMVVCHHTTPRAVPFSLRSACEFLMQVFGLQLNMEIELAAQMREKHILRTQTLLCDMLLRDAPIGIVTQSPNIMDLVKCDGAALYYGKKFWLLGTTPTEAQIKDLADWLLDVHRDSTGLSTESLADAGFPGAAALGDAVCGMAAVKITPRDYLFWFRSHTAKEIKWGGAKHNPDDKDDGKKMHPRSSFKAFLEVVKWRSSPWEDVEMDAVHSLQLILRGSFQDIDDSESKTMIHHRLNDLNLHGMDELSTVANEMVRLMETATAPILAVDSSGFINGWNGKAAELTGLPLEDAMNKSLVRDLVVDESVSTVERLLYLALQGEEERNVEIKLKTFGTQADKGPVILVVNACASRNITANVVGVCFVGQDVTGEKVVMDKFTRIQGDYRTIVQSPNPLIPPIFGSDEFGYCSEWNPAMVKLSGWKMEEVLGKMNVGEIFGSEMACCRLRGQDAMTKFMIVLNSAMGGQDSDRFPLGFFDRQGKYVEALLIANKRTDGAGAITGVFCFLHIASAEVQQALQVQKRSARTALDKLKEVAYMRQEIRNPLYGIMFTRRLLEGTNLSEEQKQIIDTSAVCEKQLHQILDEDNFENLDHGNIDLDTIEFTMGTVMDAVISQGMIRSREKGLQLIRETPVDIKNMRLYGDQLRLQQVLADFLTTAVRFTSSSDGWVGIKVVPTMKGLGGGLHVMRFDYRISHPGKGIPEDLVQQMFDCSREITQEGMGLSVSRKLVRLMNGDVSYIREAGVCYFLVNVEFPLADRDDSQN

SEQ ID NO: 12381 - protein, 190 aa, Psilotum nudum
DEHGEVVAEIRRSDLDPYLGLHYPATDIPQASRFLFLKNRVRMICDCSAPVIRIIQDKELKQPLSLAGSTLRAPHGCHAYYMRNMGSIGSLVMAVIVNDNDAEPSGRGNQPKNRRLWGMVVCHHTTPRAVPFSLRSACEFLMQVFGLQLNMEIELAAQMREKHILRTQTLLCDMLLRDAPIGIVTQSPNI

SEQ ID NO: 12382 - protein, 187 aa, Equisetum arvense
DEHGEVVAEIRRADLEPYLGLHYPATDIPQASRFLLMKNRVRMIHDCRAPPIRVIQDEHLPQPLSLAGSALRAPHGCHAQYMENMGSIASLVMAVTLNDNEFDNANESLKRRKLWGLIVCHHTSPRAVPFLRSACEFLMQVFGLQLNMEVELAAQMREKHILRTQTLLCDMLLRDAPIGIVTQSPNI

SEQ ID NO: 12383 - protein, 119 aa, Equisetum arvense
HYPATTIPQASRFLFMKNRVRMICDCRTNPVRVIQDKQLGQPISLAGSTLRAPHGCHAQYMANMGSIASLVMAVVVNDNEDESSSSSRLYQPKKRKLWGLIVCHHTSPRAVPYPFRYAC

SEQ ID NO: 12384 - protein, 190 aa, Dicksonia antarctica
DEHGEVVAEIRKSDLEPYLGLHYPATDIPQASRFLFMKNRVRMICDCRAIPVKVIQDRELRQPLSLAGSTLRAPHGCHGQYMANMGSAASLAMAVTVNDNEEESSSRNHLFKQRKLWGLVVCHHTTPRAVPFPLRSACEFLMQVFGLQLNMEVELSAQLREKHILRTQTLLCDMLLRDAPIGIVSKSPNI

SEQ ID NO: 12385 - protein, 187 aa, Osmunda regalis
DEHGEVVAEMRRSDLEPYLGLHYPATDIPQASRFLFMKNRIRMICDCCASPIQVIQDEKLRQPLSLAGSTLRAPHGCHSQYMVSMGSVASLVMAVIVNNNDEEPSSRSYQTKLWGLVVCHHTTPRAVPFPLRSACEFLMQVFGLQLNMEVKLSAQMREKHILRTQTLLCDMLLRDAPIGIVSQSPNI

SEQ ID NO: 12386 - protein, 189 aa, Osmunda regalis
DEHGEVVAEIRRSDLEPYIGLHYPATDIPQASRFLFMKNRVRMICDCTLPPVKVIQDRNLAQPLSSTGSTLRAPHGCHAQYMGNMNSIASLVMAVIVNDTAEVDANGRAYQGTRLWGLVVCRHTSPRAVPFPLRSACEFLMQVFGLQLNMEVGMAAQVREKHILRTQTVLCDMLLRDAPIGIVSQSPNV

SEQ ID NO: 12387 - protein, 188 aa, Osmunda regalis
DEHGEVVAETRRSDLEPFIGFHYPATDIPQASRFLFMKNKVRMICDCTMPPVKVIQDRNLAQSLSLTGSTLRAPHGCHAQYMGNMGSIASLVMAVIIYDGEVDANGRAYQAMKLWGMVVCHHTSARAVPFPLRSACEFLMQVFGLQLNMEVAMAAHVRENHILRTQTILCDMFLRDALVGVVSQSPNV

SEQ ID NO: 12388 - protein, 206 aa, Dryopteris filix-mas
VMAYKFHEDEHGEVLAEIRRSDLEPYLGLHYPATDIPQASRFLFMKNRVRMICDCRAIPVRVIQDKELRQPLSLAGSTLRAPHGCHGQYMANMGSIASLVMAVVVNDNDEDLSNRPHQPKMRRLWGLVVCHHTTPRAVPFALRSACEFLMQVFGLQINMELELAAQMREKHILRTQTLLCDMLLRDAPIGIVSESPNIMDFVKGSI

SEQ ID NO: 12389 - protein, 106 aa, Calamovilfa longifolia
QAARFVFMKNKVRMICDCRARSVKIIEDEAVSINISLCGSTLRAPNSCHLQYMENMNLIASLVMVVVVNENEEDDEAETEQPPQQQKKRKLWGLIVCHHESPRYVP

SEQ ID NO: 12390 - protein, 112 aa, Calamovilfa longifolia
HYPATDIPQASRFLFMKNKVRMICDCSAKPVKILQDDSLAQPLSLCGSTLRAPHGCHAQYMANMGSVASLVMSVTVNEDEDDDAETRSDQQPKGRKLWGLVVCHHTSPRFVP

SEQ ID NO: 12391 - protein, 393 aa, Panicum capillare
EPARTEAPALSIAGAVQSQKLAVRAISRLQALPGGDVKLLCDTVVEHVRELTGYDRVMVYRFHEDEHGEVVAECRRDNLEPYLGLHYPATDIPQASRFLFRQNRVRMIADCHATPVRVIQDPGLSQPLCLVGSTLRAPHGCHAQYMANMGSIASLVMAVIISSGGDDEQTARGGISSAMKLWGLVVCHHTSPRFIPFSLRYACEFLMQAFGLQLNMELQLAHQLSEKHILRTQSLLCDMLVRDSPTGIVTQSRSIMDLVKCDGAALYYHGKYYPLGVTPTESQIKDIIEWLTVCHGDSTGLSTDSLADAGYHGAAALGDAVCGMAVAYITPSDYLFWFRSHTAKEIKWGGAKHHPEDKDDGQRMHPRSSFKAFLEVVKSRSLPWENAEMDAIH

SEQ ID NO: 12392 - protein, 105 aa, Panicum capillare
QAARFLFMKNKVRMICDCRARSVKILEDEALSIDISLCGSTLRAPHSCHLQYMENMNSIASLVMAVVVNENEEDDEPNPEQPQQQQKKRLWGLLVCHHESPRYVP

SEQ ID NO: 12393 - protein, 113 aa, Panicum capillare
QAARFLFMKNKVRIISDCHARPVKIIEDAKLPLHVSLCGSTLRAPHTCRLQYMKNMKSVASLVIAVVVNEDAEDVEVVIKQQTQHHQKKKLWGLIICHHGSPRYVPFPLRYAC

SEQ ID NO: 12394 - protein, 192 aa, Ginkgo biloba
DDHGEVVAEIRRSDLEPYLGLHYPATDIPQASRFLFMKNRVRMISDCLAPPVKVIQDKGLPRDLSLCGSTLRASHGCHAQYMSNMGSIASLVLAVIINEKEDEEGDSEGPQQQKGRKLWGLVVCHHTSPRFVPFPLRYACEFLMQVFGIQLNKEVELAAQLREKHVLRTQTLLCDMLLRDAPMGIVTQIPNI

SEQ ID NO: 12395 - protein, 187 aa, Ginkgo biloba
DDHGEVVAEIRRSDLEPYLGLHYPATDIPQASRFLFMKNRVRMICDCCAPPVKVIQDKKLPQPLSLFGSTLRAPHGCHIQYMANMGSIASLVMSVTINENDDDNGQQQKGRKLWGLVVCHHTSPRFVPFPLRYACEFLMQVLGIQLYKEVELAAQLREKHILRTQTVLCDMLLRDAPVGIVAQTPNI

SEQ ID NO: 12396 - protein, 187 aa, Ginkgo biloba
DEHGEVVAEIRRSDLEPYLGLHYPATDISQASRFLFMQNRVRMICDCCATPVKVIQDEELRQPLCLVGSTLRAPHGCHAQYMANMGSIASLVMAVIINGTDEEGLSGRNSMKLWGLVVCHHTSPRAVPFPLRYACEFLMQAFGLRLNMELQLGAQLHEKHILRTQTLLCDMLLRDAPIGIVTQSPSI

SEQ ID NO: 12397 - protein, 113 aa, Ginkgo biloba
YSATDIPQASRFLFMQNRVRMICDCCATPVKVIQDEELRQPLCLVGSTLRAPHGCHAQYMANMGSIASLVMAVIINGTDEEGLSGRSSMKLWGLVVCHHTSPRASPFPLRYAC

SEQ ID NO: 12398 - protein, 114 aa, Ginkgo biloba
HYPATDIPQASQFLFMKNRVRMIYDCCVTPIKVIQDEEWGQPLCLVGSTLQSPHGCRASYMANMGSIASFVMAVIINGIDEEGISGRSSMKLWGLVVFHHISPCAVPFPLRYAC

SEQ ID NO: 12399 - protein, 112 aa, Billbergia nutans
HYPATDIPQASRFLFKQNRVRMIVDCNAKPVSVIQDETLMQPLCLVGSTLRAPHGCHAQYMANMGSIASLVMAVIINGSDEEGSRNPTKLWGLVVCHHTSPRCIPLPLRYAC

SEQ ID NO: 12400 - protein, 99 aa, Quercus turbinella
PATDIPQAARFLFKQNRVRMICDCHAKSVRIIQSEELKQPLCLVNSTLRSPHECHAQYMDNMGSIASLVMAIIINANDSSKLWGLVVCHHTSTRYVPYP

SEQ ID NO: 12401 - protein, 109 aa, Quercus turbinella
HYSATDIPQASRFLFKQNRVRMIVDCNAMPVGVIQDDRLMQPLCLVGSTLRAPHGCHAQYMANMGSIASLAMAVIINGNDEEGVGRRSAMRLWGLVVCHHTSARCIPFP

SEQ ID NO: 12402 - protein, 192 aa, Thuja plicata
DDHGEVISEIRKSNLEPYLGLHYPATDIPQASRFLFMKNRVRMICDCCAPPVSVVEDKRLPRDLNLCGSTLRAPHGCHVQYMVNMGSIASLVMAIIINEKEEEEGDSEGQQQQKGRRLWGLVVRHHTSPRFVPFPLRYACEFLMQVFGIQLNKEVELAAQLKEKHILRTQTLLCDMLLRDAPVGIMTQRPNI

SEQ ID NO: 12403 - protein, 191 aa, Thuja plicata
DDHGEVISEIRRSDLEPYLGLHYPATDIPQASRFLFMKNKIRMICDCYATPVKVVEDRRLPRELILCGSTLRAPHGCHADYMSSMGSIASLVIAVHHAKEEDGVFDGQQQQQKGRRLWGLVVCHHTSPRFVPFPLRYACEFLMQVFAIQLNKEVELADQLREKHILRTQTLLCDMLLRDAPMGIIREKPNI

SEQ ID NO: 12404 - protein, 181 aa, Thuja plicata
DDHGEVVAEMRRPDLEPYLGLHYPATDIPQASRFLFMKNRVRMICDYRATAVKVRQDKRLGQVLSLSRSTLRAPYGCHAQYMANMGSIASLVMAVTVDNSEVGGRRLWGLVVCHHTTPRFVPYPLRYACEFLTQVFGVQLNKEVELAARLRERHILRSQTVLCDMLLRDAPVGIVTKTPNI

SEQ ID NO: 12405 - protein, 368 aa, Pseudotsuga menziesii
IQPFGCMVAVNDKTFEVIAYSENAPDMLQVSAHAVPSVEDQQILCIGSDARTLFTPSSTMALQKAAKFGDLNLLNPILVHSKSSGKPFYAILHRIDVALVMDFEPIKPSDVSTSAMGALQSYKLAAKAISRLQSIPSGNIGLLCDMIAQEVHELMGYDRVMAYKFHDDDHGEVISEIRRSDLEPYLGLHYPATDIPQASRFLFMRNRVRMICDCCAPPVIVIQDKRLPRDLSFCGSTLRAPHGCHAQYMANMGSIASLVMAVVVTEKEEDADSEGQIQQKGRRLWGLVVCHHTSPRYVPFPLRYACEFLMQVFGIHLNKEVELAIQMKEKRILRTQTLLCDMLLRDAPLGIVSQKPNIMDLVKSDGAA

SEQ ID NO: 12406 - protein, 187 aa, Pseudotsuga menziesii
DEHGEVVAEIRRSDLEPYLGLHYPATDIPQASRFLFMQNRVRMICDCMATPVKLIQSEELMQPLCLVGSTLRAPHGCHAQYMANMGSVASLVMAVIINGNDDEGGGSGRNSMKLWGLVVCHHTSPRAVPFPLRYACEFLMQAFGLQLNMELQLAAQLTEKHILRTQTLLCDMLLREPQWNVTQSPSI

SEQ ID NO: 12407 - protein, 115 aa, Pseudotsuga menziesii
HYPATDIPQASRFLFMQNRVRMICDCMATPVKLIQSEELMQPLCLVGSTLRAPHGCHAQYMANMGSVASLVMAVIINGNDDEGGGSGRNSMKLWGLVVCHHTSPAAVPYPLRYAC

SEQ ID NO: 12408 - protein, 192 aa, Cryptomeria japonica
DDHGEVISELRRSDLEPYLGLHYPATDLPQASRFLFMKNKVRMICDCQATPVKVVEDKRLPRELVLCGSTLRAPHGCHAEYMSNMGSVASVVIAVTINAKEEDGDTDGQQRQQKGRRLWGLVVCHHTSPRFVPFPMRYACEFLMQVFAIQLNKEVELADQLREKHILRTQTLLCDMLLRDAPMGIIREKPNI

SEQ ID NO: 12409 - protein, 181 aa, Cryptomeria japonica
DDHGEVVAEMLRPDLEPYLGLHYPATDIPQASRFLFLKNRVRMICDCRAPAVKVRQDKRWCRSLSISGSTLRAPDGCHAQYMANMGSIASLVMAVTVSNSEEGGRRLWGLVVCHHATPRFVPYPLRYACEFLMQVFGVQLNKEVELAARLRERHILRTQTVLCDMLLRDAPVGIVTKTPNI

SEQ ID NO: 12410 - protein, 187 aa, Cryptomeria japonica
DEHGEVVAEIRRSDLEPYLGLHYPATDIPQASRFLFMQNRVRMICDCRANPVGVIQVEELKQPLCLVGSTLRAPHGCHAQYMANMGSIASLVMAVIVNGNGNDEEGSSGRVKLWGLVVCHHTSPRAVPFPLRSACEFLMQTFGLQINMEMQLAAQLTENNILRTQTLLCDMLLRDAPIGIVTQSPSI

SEQ ID NO: 12411 - protein, 192 aa, Metasequoia glyptostroboides
DDHGEVISEIRRSDLEPYLGLHYPATDLPQASRFLFMKNKVRMICDCYATPVKVVEDSRLPRELILCGSALRAPHGCHAEYMSNMGSIASLVIAVTINAKEEDGDTDGQQHQQKGRRLWGLVVCHHTSPRFVPFPMRYACEFLMQVFAIQLNKEVELADQLREKHILRTQTLLCDMLLRDAPMGIIGQKPNI

SEQ ID NO: 12412 - protein, 181 aa, Metasequoia glyptostroboides
DDHGEVVAEMRRPDLEPYLGLHYPATDIPQASRFLFLKNRVRMICDCRAPAVKVRHDKRVAQALSLSGSTLRAPYGCHAQYMANMGSIASLVMAVTVSNNEEGGRRLWGLVVCHHTVPRFVPYPLRYACEFLMQVFGVQLNKEVELAARLRERHILRTQTVLCDMLLRDAPVGIVTKTPNI

SEQ ID NO: 12413 - protein, 192 aa, Welwitschia mirabilis
DDHGEVISEIRRSDLEPYLGLHYPATDIPQASRFLFMKNRVRMICDCYATPVRVIQDKKLPKDLSFCGSTLRAPHGCHAQYMANMGSVACVVMAVMINEREEEEGDSGGQGHQKGRRLWGLIVCHHTSPRFVPFPLRYACEFTMQVFSIQLNKEVELALQLREKNILRTQMLLCDMLLRESPLAIVTQKPNI

SEQ ID NO: 12414 - protein, 189 aa, Welwitschia mirabilis
DEHGEVVSEIRRSDLEPYLGLHYPATDIPQASRFLFMQNRVRMIYDCRANPVKVVQSKELKQPLCLVGSTLRAPHGCRAQYMANMGSVASLAMAVIVNVSEEEAGGSSGRNTMRLWGLIVCHHTSPWAVPFPLRYACEFLMRAFGHQLNMELQLAAQLTEKNILKTQTLLCDMLLRDAPVGIVTQSPSI

SEQ ID NO: 12415 - protein, 192 aa, Gnetum gnemon
DDHGEVISEIRRSDLEPYLGLHYPATDIPQASRFLFLRNRVRMICDCYAQPVKVIQDKKLSKDLSFCGSTLRAPHGCHSQYMANMGSVASLVLAVIVNEREEEEGDSENQVEQKGRKLWGLVVCHHTSPRFVPFPMRYACEFMMQVFSIQLNKEVELAFQVREKHILRTQTLLCDMLLRDAPLGIVTQKPNI

SEQ ID NO: 12416 - protein, 187 aa, Cycas revoluta
DEHGEVVAEIRRSDLEPYLGLHYPATDIPQASRFLFMQNRVRMICDCRATPVKVIQAAELNLPLCLVGSTLRAAHGCHSQYMANMGSIASLVLAVIINANDEEGWSGRSSVKLWGLVVCHHTSARAIPFPVRYACEFLMQAFGLQLNMELQLAAQMTEKHILRTQTLLCDMLLRDAPIGIVTQSPSI

SEQ ID NO: 12417 - protein, 454 aa, Myxococcus xanthus
MPLRATLLPLLLPAVVVATLVALLDGPKEVFAAALVALAGSLMSLGVSRGTMQRQLDLLARHTRERAEGGASTAAPGVPERLDEVAGLEGAIDSLHAQLSARNAALTQEARTLTAVLDGMTEGVWVTDAEGTVVRHNDALRPLLASTNSPLTGQRPLALIRNEALHDAVMRACRESASSHLELTLDGHFPRTLSIRVTPLAKDLPGSAAVFHDVTELRRLEKVRKDFVANVSHELRTPITAIRGYAETLQGGALNDPVMAPKMVEIIHRQSERLSELVEDLLELSRLESREVSLKLARVTLADAAARAADTVRPKAGGKGQVVSLHVPQDLLAVGDPRAVEQVLLNLLDNAVKYTPAGGRVDVYGEYEQGRCVVRVKDTGVGIEAKHQSRIFERFYRVDKGRSRDMGGTGLGLAIVKHLLQAMDGEVKVESEPNGGSTFTIFLPLAASSSAATG

SEQ ID NO: 12418 - protein, 884 aa, Rhodospirillum centenum
MPDRTTDDFGPFTEQIRGTIDGMGTAEFDALPVGAIQVDGSGVIHRYNRTESRLSGRIPERVIGRNFFTEVAPCTNIPAFSGRFMDGVTSGTLDARFDFVFDFQMAPVRVQIRMQNAGVPDRYWIFVRKLEDLRPPGPAPEAPAAHTASVTGEVVDFSVCEQEDIRRVGAIQPWGAVLAVDPRDWTVCAASDNAQALLDCARPPLGRPLGEVLDAGPLAALRDWLPDRTSRSWRGEMARGRRIDIRAHRSGGCVVLDLEPLTARPGEAPVCSLLAAVEADVAVIRQASSLTGLAQACARSVRVLTGFERAIVYRFDADWHGEVIAEDKVEDWPQSFAGLHFPASDIPRQARELYSQSLSRHVPDRDYVPVPVHRIEGTEPLDLSFSRHRSLSPVHLQYLRNMGVTASMSFSILVEGRLWGMVAAHHRQPHHVAIPRRSAAMTVVEAVALSIAAVERAEAMRGRQVDHAVLTALMVQMASSDAVEPALTQQATRLTDLFGATGAALSIDGHLLTVGDWPPPAEVAALRAWLEPRWGSAGLFRTSSLSSVFPDATAYRQKASGCLALRLSGGDFVMWTRPEEPRQITWGGDPAKALGAAGQRPMPRISFDRWVEERRGHAAPWPTWADEIATSLRHAISDMMLRHLRHVKELSDQLAASNEAKSRFLANMSHELRTPLNAIIGFSDLMMSGMAGTLPPRIQDYVQSIHASGEHLLRMVVNDVLDLSRIEAGRMELSPESLDAGILAAECVGMLLPRAVRGEVLLEVQAESPLPLTADALRLRQILLNIIGNAVKFTPPGGRVDVRARALAGGGAVFTVRDTGPGMTPEEVLTAMEPFRQVAQTRAAVEGTGLGLPIAKSLVDLHAGNLAIETAPGLGTTVTIEIGA

SEQ ID NO: 12419 - protein, 391 aa, Magnolia x soulangeana
DFEPVKPYEVPMTAAGALQSYKLAAKAIARLQALSSGSMEKLVDTVVQEVFELTGYDRVMAYKFHEDDHGEVISEITKPGLEPYLGLHYPATDIPQAARFLFMKNKVRMICDCNAKPVKVYQDEKLTFDLTLCGSTLRAPHSCHSQYMENMSSIASLVMAVVINEGVDEEEGMEPAQQEQQQLKRKRLWGLVVCHNTTPRFVPFPLRYACEFLMQVFAIHVNKELELENQIQEKNILRTQTLLCDMLLRDALVGIRTQNPNIMDLVKCDGAALFYNNKIWRLGLTPTDSQMRDISVWLSEYHMDSTGLSTDSLYDAGYPGALALGDVVCGMAAVRINPKDMLFWFRSHTAAEVKWGGAKHDPSDKDDGRRMHPRSSFKAFLEVVKTKSLPW

SEQ ID NO: 12420 - protein, 358 aa, Magnolia x soulangeana
PFYAIVHRIDIGLVIDLEPVNPADVPVTAAGALRSYKLTAKAISRLQSLPSGNISLLCDVLVREVSELTGYDRVMAYKFHEDEHGEVIAECRGSDLEPYLGLHYPATDIPQASRFLFMENKVRMTCDCLAPPVKVIQDKKLAQPLILCGSTLRAPHGCHSQYMANMGSIASLVMSVTINEDDDDDTSVSNGRRRKLWGLVVCHHTSPSFVPFPLRYACEFLVQVFGIQLNKEVELPAQMREKHILRMQTVFCDMLLRDAPVGIITQSPNVMDLVKCDGAAFYYRNQFRLLGTTPTEAQIRDIAGWLLEYHDGTTGLSTDSLTEAGYPGAADLGDDVCGMAAIKITSKDYLFWFRSHTA

SEQ ID NO: 12421 - protein, 112 aa, Elodea sp.
YPATDIPQASRFLFMKNKVRMICNCHASPVHVIQDKRLGQPLSLCGSTLRAPHGCHAQYMANMGSIASLVMSVVINEDINDPDSPEPQRSRKLWGLVVCHHTSSRFVPFPLR

SEQ ID NO: 12422 - protein, 388 aa, Drimys winteri
PMTAAGALQSYKLAAKAIARLQSLPGGSLKRLIDTVVLEVFELTGYDRVMAYKFHEDDHGEVISEVTKPDLEPYLGLHYPATDIPQAARFLFMKNKVRMICDCNAKPVKVYQDEKLTFDLTLCGSTLRAPHSCHLQYMENMGSIASLVMAVVINEREEQDENSGSEQQREQPRRKRLWGLVVCHNTTPKFVPFPLRYACEFLAQVFAIHVNKELELENQIQENNILRTQTLLCDMLMRAALLGIVTQSPSILDLVKCDGASLLYQNKIWRLGVAPTESQILDIALWLSEYHMDSTGLSTDSLQDAGHPGALSLGDVVCGMAAVRINSKDTLFWFRSHTAAEIRWGGAKHDPNQKDDGRKMHPRSSFKAFLEVVKTRSSPWADYEMDAI

SEQ ID NO: 12423 - protein, 394 aa, Drimys winteri
DLEPVNPVDVPVTAAGALKSYKLAAKAISKLQYLPSGNISLLCDVLVREVSELTGYDRVMAYKFHGDEHGEVIAECRRSDIEPYLGLHYPATDIPQASRFLFMKNKVRMICDCTARPVKVIQDKKLAQPLSLCGSALRAPHGCHAQYMANMGSIASLVMSVTISEDDDEASTEEQRQKGRKLWGLVVCHHVTPRFVPFPLRYACEFLIQVFGIQLNKEVELEAQLREKNMLRTQTMLCDMLLRDAPVGIVTQSPNVMDLVKCDGAALYYRNQFWLLGITPTEAQIRDIAEWLLEYHNSTTGLSTDSLMEAAYPGASILGDAVCGMAAVKITCKDFLFWFRSHTAKEIKWGGAKHDPGDKDGDGRKMHPRSSFKAFLDVVKQRSLPWEDVEMDAI

SEQ ID NO: 12424 - protein, 111 aa, Muscari sp.
ARFLFMKSKVRMICDCRAKPVRIVQDEKLPFDITFCGSTLRAPHSCHLQYMENMNSIASLVMAVVVNEEAEEAERDPEAEQSQQPKRKRLWGVVCHHESPRFVPFPLRYAC

SEQ ID NO: 12425 - protein, 104 aa, Muscari sp.
HYPATDIPQASRFLFMKNKVRMICDCSAPPVKVIHDKKLPQSLSLCGSTLRAPHGCHAQYMANMGSVASLVMSVTINDDDKLWGLVVCHHTSSRFVPFPLRYAC

SEQ ID NO: 12426 - protein, 110 aa, Muscari sp.
YSATDIPQASRFLFKQNRVRMIADCHAVPVRVVQDESLAQPLCLVGSTLRAPHGCHAQYMANMGSVSSLAMSVLSTGARGRTRNTMKLWGLVVCHHTSQRCIPFPLRYAC

SEQ ID NO: 12427 - protein, 393 aa, Canella winterana
DLEPVNPTDVPVTAAGALKSYKLAAKSISRLQSLPSGNIQLLCDVLVREVSDLTGYDRVMAYKFHEDEHGEVIAECRRSDLEPYLGLHYPATDIPQASRFLFMKNKVRMICDCSAPPVKVIQDKRLAQSLSLCGSTLRAPHGCHAQYMANMGSIASLVVSVTVSEDDDETESEQQQKGRKLWGLVICHHTCPRFVPFPLRYACEFLIQVFGIQLNKEVDLASQIREKHMLRTQTMLCDMLLRDAPVGIVTQSPNVMDLVKCDGAALYYKNQFWLLGTTPTEAQIRDITNWLVEYHNSTTGLSTDSLAVAGYPGASVLGDAVCGMAAVKFTNKDLLFWFRSHTAKEIMWGGAKHDPVDKDDDGRKLHPRSSFKAFLEVVKRRSLPWEDVEMDAI

SEQ ID NO: 12428 - protein, 349 aa, Canella winterana
DFEPVKPYEAPMTAAGALQSYKLAAKAIARLQSLPSGSMKRLVDTVVQEVFDLTGYDRVMAYKFHEDDHGEVISEITKPDLEPYLGLHYPSTDIPQAARFLFMKNKVRMICDCHALPVKVYQDDKLTFDLTLCGSTLRAAHSCHSQYMANMGSIASLVMAVVVNEREEEDENSESSEQQQQQKKKRLWGLVVCHNTTPRFVPFPLRYACEFLMQVFAIHVNKELELENQIQEKNILRTQTLLCDMLMRSAPLAIVTQNPNIMDLVKCDGASLLYQSKIWRLGVAPTESQIRDIARWLSDCHMDSTGLSTDSLHDAGYPGALLLGDVVCGMAAVKINSKDMPFWFRSHTA

SEQ ID NO: 12429 - protein, 390 aa, Calycanthus floridus
PYEVPMTAAGALQSYKLAAKAITRLQSLPSGSMERVVDTVVQEVFELTGYDRVMAYKFHEDDHGEVISEITKPGLEPYLGLHYPATDIPQAARFLFMKNKVRMICDCHAKPVKVCQDEKLTFDLTLCGSTLRAPHSCHLQYMENMGSIASLVMAVVINEGEEDDEVGISQQQQQRRKRLWGLVVCHNTTPRFVPFPLRYACEFLMQVFAIHVSKEIELENQLREKNILRTQTLLCDMLLRDALLGIVTQSPNIMDLVKCDGASLLYGNKMWRLGLTPTESQIHDIAMWVSEYHMDSTGLSTDSLYDAGYPKALSIGDVVCGMAAVRITAKDMLFWFRSHAAAEVRWGGAKHDPSDKDDGRRMHPRSSFKAFLEVVKTRSSPWKDYEMDAI

SEQ ID NO: 12430 - protein, 393 aa, Calycanthus floridus
DLEPVNPDDVPVTAAGALKSYKLAAKAISKLQSLPSGNISLLCDVLVREVSELTGYDRVMAYKFHEDDHGEVIAECRRSDLEPYLGLHYPATDIPQASRFLFMKNKVRMICDCLAPPVKVIQDKRLAQPLSLCGSTLRAPHGCHAQYMANMNSIASLVMSVMVHENDDRQEMSSSRKGRKELWGLVVCHHTTPRLSFPLRYACEFLIQVFGIQLNKEIELAAQMREKHILRTQTVLCDMLQRDAPVGIIRQTPNVMDLVKCDGAALYYRNQFWLLGTTPTDAQIRDIAEWLLEYHSSSTGLSTDSLMEAGYPGASVLGDAVCGMAAIRITSKDFLFWFRSHTAKEIKWGGAKHDPVDQDDDDRKMHPRSSFKAFLEVVKCRSLPWEDIEMDAI

SEQ ID NO: 12431 - protein, 407 aa, Nymphaea alba
PFYGILHRIDVGLVIDLEPVNPTDVPVTAAGALKSYKLAAKAISRLQALPSGNIGLLCDVLVREVSELTGYDRVMAYKFHEDHHGEVIAECKKPDLEPYLGLHYPATDIPQASRFLFMKNKVRMICDCTAPSVKVIQDKQLEAAVELCGSTLRSPHGCHAQYMVNMGSIASLVMSVVIMNHDEEPANDNPQKGSKLWGLVVCHHTSPRFIPFPLRYACEFLIQVFAVQLNKEVELAAQLREKHILRTQTVLCDMLLRDAPVGIVTPSPNVMDLVKCDGAALYYGKQFWLLGTTPTETQVRDIAGWLYECHGGSTGLSTDSLMEAGYSGAVALGDAACGMAAVKITYRDFLFWFRSHTAKEIKWGGAKHDTVDKDAGKRMHPRSSFKTFLEVVKHRSHPWENAEMDAI

SEQ ID NO: 12432 - protein, 189 aa, Nymphaea alba
DQHGEVIAECKKPDLEPYLGLHYPATDIPQASRFLFMKNNLRMICDCTAPSVKVIQDKQLEQPLSLCGSTLRSPHGCHAQYMANMGSIASLVMSVVINDHDEEPAIDNSQKGTKLWPLVVCHHTRPRFIPFPLRYACEFLIQVFAVQLNKEVELAAQLREKHILRMQTVLCDMLLRDAPVGIVTRSPNV

SEQ ID NO: 12433 - protein, 111 aa, Aquilegia sp.
HYSATDIPQAARFLFMKNKIRMICDCRAKHVRVLQDEKLPFELTLCGSTLRAPHSCHLQYMENMDSIASLVMAVVINDGDEEEGTVEGASQSQKRKRLWGLVVCHNTTPRF

SEQ ID NO: 12434 - protein, 106 aa, Aquilegia sp.
HYPATDIPQAARFLFKQNRVPMICDCQASSVGIVQSGELKRPLCLVNSTLRAPHGCHTQYMANMGSIRSLVMAVVVNWRDQSSLWGLVVCHHTSPRYVPYPLRYAC

SEQ ID NO: 12435 - protein, 107 aa, Aquilegia sp.
PQASRFLFKQNRVRMIVDCHATPVHVIQDEALMQPLCLVGSTLRAPHGCHAQYMANMGSIASLALAVVINGNDEEGTSGRNPMKLWGLVVCHHTSARCIPFPLRYAC

SEQ ID NO: 12436 - protein, 192 aa, Araucaria heterophylla
DDHGEVISEVRKSDLEPYLGLHYPATDIPQASRFLFMKNRVRMICDCCAPPVRVIEDKRLPRELNLCGSTLRAPHGCHAQYMSNMGSISSLVMAVIVNEKEEEEGDSDGQQQQKGRRLWGLVVCHHTSPRFVPFPLRYACEFLMQVFGIQLNREIELAAQSREKHILRTQTLLCDMLLRDAPMGIVTQKPNI

SEQ ID NO: 12437 - protein, 195 aa, Araucaria heterophylla
DDDHGEVISEIRRSDLEPYLGLHYPATDIPQASRFLFMKNRIRMICDACAPPVRVVEDKRLPRELSLCGSTLRAPHGCHVQYMCNMGSIASLVMSVVVNEKEEKEGDSDGQQQQQKGRRLWGLVVCHHTSPRFVPFPLRYACEFLMQVFGIQLNKEVELGTQLREKQILRTQTLLCDMLFRGGAPMGIITRKPNV

SEQ ID NO: 12438 - protein, 193 aa, Araucaria heterophylla
DDHGEVIAEIRRVDLEPYLGLHYPATDIPQASRFLFMKNKVRMICDCRADPVKVIQDKRLAQPLSLSGSALRALHGCHVQYMANMGSIASLVMAMTINENENENDEETSGSGQKGGRRLWGILVCHHTSPRFVPFPLRYACEFLMQVFGIQLNKEVELAAQLREKHMLRTQTVLCDMLLRDAPVGIVTQTPNI

SEQ ID NO: 12439 - protein, 195 aa, Araucaria heterophylla
DEHGEVLAEIRRSDLEPYLGLHYPATDIPQASRFLFMQNRVRMICDCRAAPVEVIQAEELKQPLCLVGSTLRAPHGCHAQYMANMGSIASLVMAVVINGNEDEGGGGGGSGSGSGRGSMKLWGLVVCHHTSPRAVPFPLRYACEFLMQAFGLQLNMELQLAAQLTEKHILRTQTLLCDMLLRDAPIGIVTHSPSI

SEQ ID NO: 12440 - protein, 192 aa, Stangeria eriopus
DDHGEVVAEIRRSDLEPYLGLHHPATDIPQAARFLFMKNRVRMICDCCAAPVRVIQDKNLARDLTLCGSTLRAPHGCHSHYMSNMGSIASLVMAVIINEREDEEGDNLGQQQVKGRRLWGLVVCHHASPRFVPFPLRYACEFLMQVFGIQLNKEVELAAQLREKHILRTQTLLCDMLLRDAPIGIVIRSPSI

SEQ ID NO: 12441 - protein, 189 aa, Stangeria eriopus
DDHGEVLAEIRRSDLEPYLGLHYPATDIPQASRFLFMRNRVRMIYDCSSPPVKVIQDKRLPKPLSLCGSTLRAPHGWHAQYMANMGSIASLVMAVTINDSDDDIGSSGQQKGRRLWGLVVCHHTSPRFVPFPLRYACQFLMQVFGIQLNREVELAAQLREKHILRTQTMLCDMLLRDAPVGIVAQTPNI

SEQ ID NO: 12442 - protein, 188 aa, Stangeria eriopus
DEHGEVVAEIRRSDLEPYLGLHYPATDIPQASRFLFMQNRVRMICDCRAKPVRVIQAAKLRQPLCLVGSTLRAPHGCHAQYMVNMGSIASLVMAVVINVNDDAAGSGRGSSMKLWGLVVCHHTSPRAVPFPVRCACEFLMQAFGLQVNMELQLAAQLTEKHILKTQTLLCDMLLRDAPIGIVTQTPSV

SEQ ID NO: 12443 - protein, 192 aa, Ephedra major
DDHGEVISEIRRSDLEPYLGLHYPATDVPQASRFLFMKNRVRMICDCYSPPVRVIQDKRLKKELSFCGSTLRAPHGCHAQYMANMGSVASLVMAVIVNEKEDEEAENEGQSQQKGRKLWGLVVCHHTGPRFVPFPLRYACEFMMQVFSIQLNKEVELACQMREKQILRTQTLLCDMLLRDTPLGIISQKPSI

SEQ ID NO: 12444 - protein, 114 aa, Urtica dioica
HYPATDIPQAARFLFMKNKVRMIVDCNAKHVKVFQDEPLPLDLTLCGSTLRAPHSCHLQYMANMNSIASLVMAVVVNEGEEDGDNAQKRKRLWGLVVCHNTSPRFVPFPLRYAC

SEQ ID NO: 12445 - protein, 102 aa, Urtica dioica
HYSATDIPQAARFLFRQNRVRIICNCNAEPVRVVQSEDLKQPMCLVNSTLRAPHGCHVQYMSNMGSMASLALAVVINQTDSSRLWGLVVCHHSSPRYVPYPL

SEQ ID NO: 12446 - protein, 923 aa, Azotobacter vinelandii
MTRPGGGMGMVRIVWTLLLLLSCSASALAVQPAVLADREVRLSLGPYTLYVEDRDADLDAAQVLAMPESAFRPVEGDQANLGQSRSAWWFRVDLQNARDQSLGGFLEVNYPLLDDVRLTVLTPDGRQLQQESGDTRPPGMRPVPIRNLWFPLELPPGTSTLLVRVKSSSAITIPLYFGTSGASLAAHERQEGLNGVFYGVLLALFCCQLFLFLFLREPSQGWYLVYSLNSILLALGFDGYLFQWPPGLQHITVLLLIFSFWLTATQLTRHFLNIPQYFPLLDRILRLWMLGLGAVLLAAPLIGLSAWTTLAHFATLIGALLLPSCGAHVWRKNLRAGAYHLTAWALLLVSLGGQAFAELGLDLLGEHATMLAKIGIASNLLILAVGLADRFQQLRREGLYSHRAAEEALLQNQAKSRFLAKMSHEIRTPLNGVLGMLQLLKETRLDHSQRFYVDTIASSGSTLMAVINDILDYARIESGKLSLEHIEFDLEEMLSDTLNLFTAQAMEKRLRLHMSLDEGVPRHIQGDPTRLKQVLTNLLSNALKFTSEGQVRLDVSRRRKSDGSEHLYFGVSDSGIGIRQEAQARLFESFSQGDSSTTRRYGGSGLGLAISKELVEMMGGHIEVQSTPGLGSRFTFNLPLQRGGEMRDELFQLLAGRTALLASLDGFALDAIGRLLGRWGMNTERCRIPEKLPEQLASFDEPPLLLLIAPWPGSVEYWLDALYPHLAPGQRLLLICPPEQCRQLPASRSSLHMLGLPQPVGVAALRKKLVELHMEPSHALVPIEDHAGESHIPCILIAEDNPVNQLVVQELLKKRGYNVRLAGNGAEAVAEYHRAPSSIQMILMDCEMPEMDGFEATLQIRLLERLRKWPAVPIIALTAHTLDEHREYGLEVGMNDFLGKPVDKQLLHATVERYLSTRTLVDN

SEQ ID NO: 12447 - protein, 117 aa, Spinacia oleracea
HYSATDIPQAARFLFMKNKVRLICDCRARYVQVIQDEKLPFDLTLCGSTLRAPHGCHAQYMENMNSIGSLVMAVVVNDEDDDNNDGGSAPPQTQKRKRLWGLVVCHHTSPRFVPLPL

SEQ ID NO: 12448 - protein, 117 aa, Spinacia oleracea
ASRFLYKQNRVRMIVDCHVNPVSVIQDERLQQPLCLVGSTLRAPHGCHSQYMANMGSIASLVMAVIINGSDDEAAPGGRNAMRLWGLVVCHHTSPRSIPFPLRYACEFLMQAFGLQL

SEQ ID NO: 12449 - protein, 112 aa, Dianthus caryophyllus
PQASRFLFMKNKVRMICDCRAKFVRVIQDEKLSVDLSLCGSTLRAPHGCHAQYMENMNSIGSLVLAIVVNDEDEEEGGSAPAQPHKRKRLWGLVVCHHTSPRFVPFPLRYAC

SEQ ID NO: 12450 - protein, 113 aa, Dianthus caryophyllus
YPQAARFLFMKNKVRMICDCRAKFVRVFQDEKLSSDWTLCGSTLRAPHGCHAQYMENMNSIGSLVMAVVVNDEDEADNGSGPSQPQKRKRLWGLVVCHHTSPRFVPLPLRYAC

SEQ ID NO: 12451 - protein, 112 aa, Dianthus caryophyllus
TDIPQASRFLFLKNKVRMICDCLSSPVKVVQGEDLSQPLSLGGSTLRAPHGCHAQYMANMGSIASLVMAVTINDEEVEVTDQRKTRKLWGLVVCHHTSSRFIPYPLRYACEF

SEQ ID NO: 12452 - protein, 111 aa, Dianthus caryophyllus
TDIPQASRFLFKQNRVRVIVDCHAKPVCVVQDERLQQPLCLVGSTLRAPHGCHSQYMANMGSIASLVMAVIINGNDDESGGRNAMALWGLVVCHHTSPRSIPFPLRYACEF

SEQ ID NO: 12453 - protein, 1115 aa, Ipomoea nil
MENYGKAVTFSSSATSNLNTGKAIAQYNADAKLMAEFEQSRESGKSFDYSRSVIHAPQNVTEEEMTAYLSRIQRGGLIQPFGCMLAIEEPSFKIVGFSENCFDLLGLKSGVEPPERMSLIGIDARTLFTLSSRASLAKAVASREISLLNPIWVHSKINQKPFYAVLHRIDVGIVIDLEPANSADPALLLAGAVQSQKLAVRAISRLQSLPGGDIGTLCDTVVEDVQKLTGYDRVMVYKFHDDSHGEVVSEIRRSDLEPYLGLHYPATDIPQAARFLFKQNRVRMICDCNAQPVKVLQCEELKQPLCLVNSTLRSPHGCHTKYMANMGSIASLVMAVVINSSESMKLWGLVVCHHTSPRYVPFPLRYACEFLMQAFSLQLYMELQLASQLAEKKILQTQTLLCDMLLRDAPFGIVTQTPSIMDLVRCDGAALYYNGKCWLLGVTPTETQVKDIAEWLLHNHGDSTGLSTDCLSDAGYPGAPLLGDAVSGMATARITSKDFLFWFRSHTAKEVKWGGAKHHPEDKDDGGRMHPRSSFIAFLEVVKSRSLPWEDSEINAIHSLQLIMRDSLQGIGENYMKSVSSPQQNDSDGVRFYELSSMALELVRLVETATVPIFGVDSSGLINGWNAKIAELTGLQANVAIGKYLIDDVTHEDSHETFKALMCRALQGEEDRNVEVKLLKFGNHPTKEVVYLVVNACTSRDYKNDIIGVCFVGQDITPEKAVMDKFVRLQGDYEAIIQSLNPLIPPIFASDENACCSEWNAAMERLTGLVKCEVIGKRLPGEIFGGLCRLKGQDALTKFMILLYQGISGHDTEKLSFGFFDRKGNFIDVFITANKRTDERGNIIGCFCFLQTMAVDHPQISARDIEDDRECLSTLKEFAYIQQQMKNPLNGIRFTHKLLEGTVTSDHQKQFLETSEACEKQILSIIENMDSGGIVDGNRVELKTEEFVIGNVIDAVVSQVMIPLKEKNLQLLHDIPDQIKSLPIYGDQIKLQLVLSDFLLSIVRHAPSPDGWVEIRVSPGLKLIQDGNVFIHIQFRMTHPGQGLPSALIEDMVRGGTRWTTQEGVVLHLSQKLVRMMNGHVHYVREQQKCYFLIDLDFKTQKPRSRESSMDTKAD

SEQ ID NO: 12454 - protein, 1124 aa, Cucurbita pepo
MSTSRPSQSSSNSGRSRHSTRIIAQTSVDANVQADFEESGNSFDYSSSVRVTSDVSGDQQPRSDKVTTAYLHHIQKGKLIQPFGCLLALDDKTFKVIAYSENAPEMLTMVSHAVPSMGDYPVLGIGTDVRTIFTAPSASALLKALGFGEVTLLNPILVHCKTSGKPFYAIVHRVTGSLIIDFEPVKPYEGPVTAAGALQSYKLAAKAITRLQSLPSGSMARLCDTMVQEVFELTGYDRVMAYKFHDDDHGEVISEVAKPGLQPYLGLHYPATDIPQAARFLFMKNKVRMIVDCRAKHLKVLQDEKLQFDLTLCGSTLRAPHSCHLQYMENMNSIASLVMAVVVNEGDEENEGPALQQQKRKRLWGLVVCHNSSPRFVPFPLRYACEFLAQVFAIHVNKELELENQIIEKNILRTQTLLCDMLMRDAPLGIVSRSPNIMDLVKSDGAALLYKKKIWRLGLTPNDFQLLDIASWLSEYHMDSTGLSTDSLYDAGYPGAIALGDEVCGMAAVRITNNDMIFWFRSHTASEIRWGGAKHEHGQKDDARKMHPRSSFKAFLEVVKTRSLPWKDYEMDAIHSLQLILRNTFKDTDATEINRKSIQTTLGDLKIEGRQELESVTSEMVRLIETATVPILAVDLDGLINGWNTKIAELTGLPVDKAIGKHLLTLVEDSSVEVVRKMLFLALQGQEEQNVQFEIKTHGSHIEVGSISLVVNACASRDLRENVVGVFFVAQDITGQKMVMDKFTRLEGDYKAIVQNPNPLIPPIFGSDEFGWCSEWNPAMAKLTGWSREEVIDKMLLGEVFGVHKSCCRLKNQEAFVNLGIVLNNAMCGQDPEKASFGFLARNGMYVECLLCVNKILDKDGAVTGFFCFLQLPSHELQQALNIQRLCEQTALKRLRALGYIKRQIQNPLSGIIFSRRLLERTELGVEQKELLRTSGLCQKQISKVLDESDIDKIIDGFIDLEMDEFTLHEVLMVSISQVMLKIKGKGIQIVNETPEEAMSETLYGDSLRLQQVLADFLLISVSYAPSGGQLTISTDVTKNQLGKSVHLVHLEFRITYAGGGIPESLLNEMFGSEEDASEEGFSLLISRKLVKLMNGDVRYMREAGKSSFIITVELAAAHKSRTT

SEQ ID NO: 12455 - protein, 1125 aa, Populus tremuloides
MSSSRPSHSSSNSARSRHSARIIAQTTVDAKLHADFEESGSSFDYSSSVRVTDSVGGDQPPRSDKVTTAYLHHIQKGKLIQPFGCLLALDEKTFRVVAYSENAPELLTMVSHAVPSVGEHPVLGIGTDIRTIFTAPSASALQKAMGFGDVSLLNPILVHCKTSGKPFYAIVHRVTGSLIIDFEPVKPYEVPMTAAGALQSYKLAAKAITRLQSLPSGSMERLCDTMVQEVFELTGYDRAMAYKFHDDDHGEVVSEVTKPGMEPYLGLHYPATDIPQASRFLFMKNKVRMIVDCHAKHVKVLQDEKLPFDLTLCGSTLRAPHSCHLQYMENMNSIASLVMAVVVNDGDEDGDTPDSANPQKRKRLWGLVVCHNTSPRFVPFPLRYACEFLAQVFAIHVNKELELENQIVEKNILRTQTLLCDMLMRDAPLGIVTQSPNIMDLVKCDGAVLFYRNKIWRLGITPSDLQLQDIAFWLSEYHMDSTGLSTDSLYDAGYPGALALGDVVCGMAAVRITSKDMLFWFRSQTAAEIRWGGAKHEPGEKDDGRRMHPRSSFKAFLEVVKTRSLPWKDYEMDAIHSLQLILRNTFKDIETMDVDTKTIHARLSDLKIEGMQELEAVTSEMVRLIETATVPILAVDVDGLVNGWNTKISELTGLLVDKAIGKHLLTLVEDSSVDIVKRMLFLALQGKEEQNIQFEIKTHGSKSECGPICLVVNACASRDLHENVVGVCFVGQDITGQKMVMDKFTRIEGDYKAIVQNRNPLIPPIFGTDEFGWCSEWNPAMTNLTGWKREEVLDKMLLGEVFGLNMACCRLKNQEAFVNLGVVLNTAMTGQESEKVSFGFFARTGKYVECLLCVSKKLDREGAVTGVFCFLQLASQELQQALHVQRLSEQTALKRLKALAYLKKQIWNPLSGIIFSGKMMEGTELGAEQKELLHTSAQCQCQLSKILDDSDLDSIIEGYLDLEMVEFTLREYYGCYQSSHDEKHEKGIPIINDALKMAETLYGDSIRLQQVLADFCRCQLILTPSGGLLTVSASFFQRPVGAILFILVHSGKLRIRHLGAGIPEALVDQMYGEDTGASVEGISLVISRKLVKLMNGDVRYMREAGKSSFIISVELAGGHKSQKRA

SEQ ID NO: 12456 - protein, 1122 aa, Arabidopsis thaliana
MSGSRPTQSSEGSRRSRHSARIIAQTTVDAKLHADFEESGSSFDYSTSVRVTGPVVENQPPRSDKVTTTYLHHIQKGKLIQPFGCLLALDEKTFKVIAYSENASELLTMASHAVPSVGEHPVLGIGTDIRSLFTAPSASALQKALGFGDVSLLNPILVHCRTSAKPFYAIIHRVTGSIIIDFEPVKPYEVPMTAAGALQSYKLAAKAITRLQSLPSGSMERLCDTMVQEVFELTGYDRVMAYKFHEDDHGEVVSEVTKPGLEPYLGLHYPATDIPQAARFLFMKNKVRMIVDCNAKHARVLQDEKLSFDLTLCGSTLRAPHSCHLQYMANMDSIASLVMAVVVNEEDGEGDAPDATTQPQKRKRLWGLVVCHNTTPRFVPFPLRYACEFLAQVFAIHVNKEVELDNQMVEKNILRTQTLLCDMLMRDAPLGIVSQSPNIMDLVKCDGAALLYKDKIWKLGTTPSEFHLQEIASWLCEYHMDSTGLSTDSLHDAGFPRALSLGDSVCGMAAVRISSKDMIFWFRSHTAGEVRWGGAKHDPDDRDDARRMHPRSSFKAFLEVVKTRSLPWKDYEMDAIHSLQLILRNAFKDSETTDVNTKVIYSKLNDLKIDGIQELEAVTSEMVRLIETATVPILAVDSDGLVNGWNTKIAELTGLSVDEAIGKHFLTLVEDSSVEIVKRMLENALEGTEEQNVQFEIKTHLSRADAGPISLVVNACASRDLHENVVGVCFVAHDLTGQKTVMDKFTRIEGDYKAIIQNPNPLIPPIFGTDEFGWCTEWNPAMSKLTGLKREEVIDKMLLGEVFGTQKSCCRLKNQEAFVNLGIVLNNAVTSQDPEKVSFAFFTRGGKYVECLLCVSKKLDREGVVTGVFCFLQLASHELQQALHVQRLAERTAVKRLKALAYIKRQIRNPLSGIMFTRKMIEGTELGPEQRRILQTSALCQKQLSKILDDSDLESIIEGCLDLEMKEFTLNEVLTASTSQVMMKSNGKSVRITNETGEEVMSDTLYGDSIRLQQVLADFMLMAVNFTPSGGQLTVSASLRKDQLGRSVHLANLEIRLTHTGAGIPEFLLNQMFGTEEDVSEEGLSLMVSRKLVKLMNGDVQYLRQAGKSSFIITAELAAANK

SEQ ID NO: 12457 - protein, 1122 aa, Arabidopsis thaliana
MSGSRPTQSSEGSRRSRHSARIIAQTTVDAKLHADFEESGSSFDYSTSVRVTGPVVENQPPRSDKVTTTYLHHIQKGKLIQPFGCLLALDEKTFKVIAYSENASELLTMASHAVPSVGEHPVLGIGTDIRSLFTAPSASALQKALGFGDVSLLNPILVHCRTSAKPFYAIIHRVTGSIIIDFEPVKPYEVPMTAAGALQSYKLAAKAITRLQSLPSGSMERLCDTMVQEVFELTGYDRVMAYKFHEDDHGEVVSEVTKPGLEPYLGLHYPATDIPQAARFLFMKNKVRMIVDCNAKHARVLQDEKLSFDLTLCGSTLRAPHSCHLQYMANMDSIASLVMAVVVNEEDGEGDAPDATTQPQKRKRLWGLVVCHNTTPRFVPFPLRYACEFLAQVFAIHVNKEVELDNQMVEKNILRTQTLLCDMLMRDAPLGIVSQSPNIMDLVKCDGAALLYKDKIWKLGTTPSEFHLQEIASWLCEYHMDSTGLSTDSLHDAGFPRALSLGDSVCGMAAVRISSKDMIFWFRSHTAGEVRWGGAKHDPDDRDDARRMHPRSSFKAFLEVVKTRSLPWKDYEMDAIHSLQLILRNAFKDSETTDVNTKVIYSKLNDLKIDGIQELEAVTSEMVRLIETATVPILAVDSDGLVNGWNTKIAELTGLSVDEAIGKHFLTLVEDSSVEIVKRMLENALEGTEEQNVQFEIKTHLSRADAGPISLVVNACASRDLHENVVGVCFVAHDLTGQKTVMDKFTRIEGDYKAIIQNPNPLIPPIFGTDEFGWCTEWNPAMSKLTGLKREEVIDKMLLGEVFGTQKSCCRLKNQEAFVNLGIVLNNAVTSQDPDKVSFAFFTRGGKYVECLLCVSKKLDRKGVVTGVFCFLQLASHELQQALHVQRLAERTAVKRLKALAYIKRQIRNPLSGIMFTRKMIEGTELGPEQRRILQTSALCQKQLSKILDDSDLESIIEGCLDLEMKEFTLNEVLTASTSQVMMKSNGKSVRITNETGEEVMSDTLYGDSIRLQQVLADFMLMAVNFTPSGGQLTVSASLRKDQLGRSVHLANLEIRLTHTGAGIPEFLLNQMFGTEEDVSEEGLSLMVSRKLVKLMNGDVQYLRQAGKSSFIITAELAAANK

SEQ ID NO: 12458 - protein, 1122 aa, Armoracia rusticana
MSGSRPSQSSEGSRRSRHSARIIAQTTVDAKLHADFEESGSSFDYSTSVRVTGPVVENQPPRSDKVTTTYLHHIQKGKLIQPFGCLLALDEKTFKVIAYSENAPELLTMASHAVPSVGEHPVLGIGTDIRSLFTAPSASALQKALGFGDVSLLNPILVHCKTSAKPFYAIVHRVTGSIIVDFEPVKPYEVPMTAAGALQSYKLAAKAITRLQSLPSGSMERLCDTMVQEVFELTGYDRVMAYKFHEDDHGEVVSEVTKPGMEPYLGLHYPATDIPQAARFLFMKNKVRMIVDCNAKHARVLQDEKLSFDLTLCGSTLRAPHSCHLQYMANMDSIASLVMAVVVNEEDGEGDAPDSTTQPQKRKRLWGLVVCHNTTPRFVPFPLRYACEFLAQVFAIHVNKEVELENQIVEKNILRTQTLLCDMLMRDAPLGIVSQSPNIMDLVKCDGAALLYKDKIWKLGTTPSEFHLQEIASWLYEYHTDSTGLSTDSLYDAGFPKALSLGDAVCGMAAVRISSKDMIFWFRSHTAGEVRWGGAKHDPDDRDDARRMHPRSSFKAFLEVVKTRSLPWKDYEMDAIHSLQLILRNAFKDGESTDVNTKFIHSKLNDLKIDGIQELEAVTSEMVRLIETATVPILAVDSDGLVNGWNTKIAELTGLPVDEAIGKHLLTLVEDSSVEIVKRMLENALEGTEEQNVQFEIKTHLSRADAGPISLVVNACASRDLHENVVGVCFVAHDLTGQKTVMDKFTRIEGDYKAIIQNPNPLIPPIFGTDEFGWCTEWNPAMSKLTGLKREEVIDKMLLGEVFGTQTACCRLKNQEAFVNLGIVLNSAVTSQESEKVSFAFFTRGGKYIECLLCVSKKLDREGVVTGVFCFLQLASHELQQALHVQRLAERTALKRLKTLAYIKRQIRNPLSGIMFTRKMMEGTELGPEQRQILQTSSLCQKQLSKVLDDSDLERIIEGCLDLEMKEFSLNEVLTASTSQVMMKSNGKSVRITNETGEEVMSDTLYGDSIRLQQVLADFMLMSVNFTPSGGQLTVTASLRKDQLGRSVHLAYLEIRLTHTGAGIPELLLNQMFGTEKDVSEEGLSLMVSRKLVKLMNGDVQYLRQAGKSSFIISAELAAANK

SEQ ID NO: 12459 - protein, 1122 aa, Armoracia rusticana
MSGSRPSQSSEGSRRSRHSARIIAQTTVDAKLHADFEESGSSFDYSTSVRVTGPVVENQPPRSDKVTTTYLHHIQKGKLIQPFGCLLALDEKTFKVIAYSENAPELLTMASHAVPSVGEHPVLGIGTDIRSLFTAPSASALQKALGFGDVSLLNPILVHCKTSAKPFYAIVHRVTGSIIVDFEPVKPYEVPMTAAGALQSYKLAAKAITRLQSLPSGSMERLCDTMVQEVFELTGYDRVMAYKFHEDDHGEVVSEVTKPGLEPYLGLHYPATDIPQAARFLFMKNKVRMIVDCNAKHARVLQDEKLSFDLTLCGSTLRAPHSCHLQYMANMDSIASLVMAVVVNEEDGEGDAPDSTTQPQKRKRLWGLVVCHNTTPRFVPFPLRYACEFLAQVFAIHVNKEVELENQIVEKNILRTQTLLCDMLMRDAPLGIVSQSPNIMDLVKCDGAALLYKDKIWKLGTTPSELHLQEIASWLYEYHTDSTGLSTDSLHDAGFPKALSLGDAVCGMAAVRISLKDMIFWFRSHTAGEVRWGGAKHNPDDRDDARRMHPRSSFKAFLEVVKTRSLPWKDYEMDAIHSLQLILRNAFKDGESTDVNTNIIHSKLNDLKIDGIQELEAVTSEMVRLIETATVPILAVDSDGLVNGWNTKIAELTGLPVDEAIGKHLLTLVEDSSVEIVKRMLENALEGTEEQNVQFEIKTHQSRADAGTISLAVNACASRDLHENVVGVCFVAHDLTGQKTVMDKFTRIEGDYKAIIQNPNPLIPPIFGTDEFGWCTEWNPAMSKLTGLKREEVIDKMLLGEVFGTQKSCCRLKNQEAFVNLGIVLNGAVTSQESEKVSFAFFTRGGKYIECLLCVSKKLDREGVVTGVFCFLQLASHELQQALHVQRLAERTALKRLKAIAYIKRQIRNPLSGVMFTREMIEGTELGPEQRQILHTSALCQEQLSKVLDDSDLESIIEGCLDLEMKEFSLNEVLTASTSQVMMKSNGKSVRITNETGEEVMSDTLYGDSIRLQQVLADFMLMSVNFTPSGGQLTVTASLRKDQPGRSVHLAYLEIRLTHTGAGIPEFLLNQMFGTEEDVSEEGLSLMVSRKLVKLMNGDVQYLRQAGKSSFIISAELAAANK

SEQ ID NO: 12460 - protein, 1122 aa, Armoracia rusticana
MSGSRPSQSSEGSRRSRHSARIIAQTTVDAKLHADFEESGSSFDYSTSVRVTGPVVENQPPRSDKVTTTYLHHIQKGKLIQPFGCLLALDEKTFKVIAYSENSPELLTMASHAVPSVGEHPVLGIGTDIRSLFTAPSASALQKALGFGDVSLLNPILVHCKTSAKPFYAIVHRVTGSIIVDFEPVKPYEVPMTAAGALQSYKLAAKAITRLQSLPSGSMERLCDTMVQEVFELTGYDRVMAYKFHEDDHGEVVSEVTKPGLEPYLGLHYPATDIPQAARFLFMKNKVRMIVDCNAKHARVLQDEKLSFDLTLCGSTLRAPHSCHLQYMANMDSIASHVMAVVVNEEDGEGDATDSTTQPQKRKRLWGLVVCHNTTPRFVPFPLRYACEFLAQVFAIHVNKEVELENQIVEKNILRTQTLLCDMLMRDAPLGIVSQSPNIMDLVKCDGAALLYKDKIWKLGTTPSELHLQEIASWLYEYHTDSTGLSTDSLHDAGFPKALSLGDAVCGMAAVRISLKDMIFWFRSHTAGEVRWGGAKHNPDDRDDARRMHPRSSFKAFLEVVKTRSLPWKDYEMDAIHSLQLILRNAFKDGESTDVNTNIIHSKLNDLKIDGIQELEAVTSEMVRLIETATVPILAVDSDGLVNGWNTKIAELTGLPVDEAIGKHLLTLVEDSSVEIVKRMLENALEGTEEQNVQFEIKTHQSRADAGTISLAVNACASRDLHENVVGVCFVAHDLTGQKTVMDKFTRIEGDYKAIIQNPNPLIPPIFGTDEFGWCTEWNPAMSKLTGLKREEVIDKMLLGEVFGTQKSCCRLKNQEAFVNLGIVLNGAVTSQESEKVSFAFFTRGGKYIECLLCVSKKLDREGVVTGVFCFLQLASHELQQALHVQRLAERTALKRLKAIAYIKRQIRNPLSGVMFTRKMMEGTELGPEQRQILHTSALCQEQLSKVLDDSDLESIIEGCLDLEMKEFSLNEVLTASTSQVMMKSNGKSVRITNETGEEVMSDTLYGDSIRLQQVLADFMLMSVNFTPSGGQLTVTASLRKDQLGRSVHLAYLEIRLTHTGAGIPEFLLNQMFGTEEDVSEEGLSLMVSRKLVKLMNGDVQYLRQAGKSSFIISAELAAANK

SEQ ID NO: 12461 - protein, 190 aa, Botrychium lunaria
DEHGEVVSEIRQPDLEPYLGVHYPATDIPQASRFLFMKNKVRMICDCRAPPVRVIQDKESRRPISLAGSTIRAPHDCHAQYMENMGSIASLVMAVVVNENDEQPSNQSYRRKNRKLWGLIVCHHTTSRAVPFSLRSACEFLMQVFGLQLNIEVELAGQMREKHILRTQTLLCDMLLRDAPLGIVTQIPNI

SEQ ID NO: 12462 - protein, 214 aa, Prunus dulcis
TGVRPYEVPMTAAGALQSYKLAVKAIARLQSLPSGSMERLCDTMVQEVFELTGYDRVMAYKFHDDDHGEVVSEITKPGLEPYLGLHYPSTDIPQASRFLFMKNKVRMIVDCCAKQVKVLQDEKLPFDLTLCGSTLRAPHSYHLQYMKNMESIASLVMAVVVNEGDDEVASPDSVQPQKRKRLWGLVVCHNTSPRFVPFPLRYACEFLAQVFPYT

SEQ ID NO: 12463 - protein, 214 aa, Prunus persica
IDFEPVKPYEVPMTAAGALQSYKLAAKAIARLQSLPSGSMERLCDTMVQEVFELTGYDRVMAYKFHDDDHGEVVSEITKPGLEPYLGLHYPSTDIPQASRFLFMKNKVRMIVDCCAKQVKVLQDEKLPFDLTLCGSTLRSPHSCHLQYMKNMESIASLVMAVVVNEGDDEVASPDSVQPQKRKRLWGLVVCHNTSPRFVPFPLRYACEFLAQSS

SEQ ID NO: 12464 - protein, 149 aa, Prunus persica
VMVYKFHDDEHGEVVAESKRPDLEPYLGLHYPATDIPQASRFLFKQNRVRMIVDCHATPVHVIQDEGLMQPLCLVGSTLRAPHGCHSQYMANMGSIASLALAVIINGNDEEAVGGRNSMRLWGLVVCHHTSARCVPFPLRYACEFFTQA

SEQ ID NO: 12465 - protein, 933 aa, Ectocarpus siliculosus virus
MNMAGRTSNCDLLDLAKIAEIQSEGFLVCTHFKRDSMRLQIRNVSSNIGDAPFSLPAVRKDPHLFIGKCVPDCFSDSFADRISALFQRYLGNRSTRCSYTCDSSHKRYLVTVARTRDGLVFEVLPDDESPLEPFEMGHGGDLCALTVHTDQSALFKAACAAVTDFVDYDRSMVYQFQDDLSGKVVYEAIKPSLAETLEPYLNTFFPESDIPLPARQMFLIRPVRVMFDNDLSPVEIIGGDIDTSKCLLCSSHPVHKSYMRNMGVRSSLSIGIVVNSELWGLMCFHSYGDSVVHPTGREVSHFENLSTQVSVCLSNIQSATSFGRQTALSAIVDKGLSTDDIPAFFAENAPDLLRLMKTDCVFIRLGHQIKHWGDADLVLAGTDLDRVSRNASGKGWCLEEFDRPSRGVLGIIHGNLSIVFVRRSITSDKAWAGDPTHVKIMRPDGVPGPRGSFERYIQSGADKLNKWNAQDREMATHLSSRIEILVSTAKFFADKTKALVRGSPDNAGEADGYVRYDTEKTPVPLGAALISHFSHELKTPLHGVSSVLTLLYEEQSIGNANMQKQLGYGLECLETISKVVESVLVAASGRAHRKIESVCLERFVNSLAEKYAENNTLTVTITVPENYTRVMVDADLLRKTICGIIDNSMSAKSTVKPTHLSLSCCSTHREATMAWKSRTKGYAHRNIRNSEDASSISDSDWWYTFSVQDPGCGIHSDMIDNVLAFNDSSRMTTTITNSHQGVGVGVYECIANVFELNGSIGIASTVSKGTIVSVMLPAKVVVTDKSTVQVVPEAEDVFFVVDDNTVNRRLTSRLVKVAFRKTTGVAPLVGDFANGHLCIEEIKRARKSGKNILGILMDHHMPVMSGKEATQFIRDTEAHEGLAKIPIFGFTADCTDSTRDELLMSGMDDVLPKPMSMKVLEQTCIKMMSRKES

SEQ ID NO: 12466 - protein, 394 aa, Nassella viridula
EPARTEIPALSIAGAVQSQKLAVRAISRLQALPGGDVKLLCDTVVEHVRELTGYDRVMVYKFHDDEHGEVLAESRRADLEPYLGLHYPATDIPQASRFLFRQNRVRMIADCHAAPVRVIQDPAMQQPLCLVGSTLRSPHGCHAQYMANMGSIASLVMAVIISSGGDDEHNMGRGTIPSAMKLWGLVVCHHTSPRCIPFPLRYACEFLMQAFGLQLNMELQLAHQLSEKHILRTQTLLCDMLLRDSPTGIVMQSPSIMDLVKCDGAALYYHGKYYPLGVTPIEAQIKDIIEWLTVCHGDSTGLSTDSLADAGYSGATALGDAVCGMAVAYITPSDYLFWFRSHTAKEIKWGGAKHHPEDKDDGQRMHPRSSFKAFLEVVKSRSLPWENAEMDAIH

SEQ ID NO: 12467 - protein, 395 aa, Peridictyon sanctum
EPARTEDPALSIAGAVQSQKLAVRAISRLQALPGGDVKLLCDTVVEHVRELTGYDRVMVYKFHDDEHGEVLAESRRVDLEPYLGLHYPATDIPQASRFLFRQNRVRMIADCHAAPVRVIQDPAMPQPLCLVGSTLRSPHGCHAQYMANMGSIASLVMAVIISSGGEDEHNMTRGVIPSAMKLWGLVVCHHTSPRCIPFPLRYACEFLMQAFGLQLSMELQLAHQLSEKHILRTQTLLCDMLLRDSPTGIVTQSPSIMDLVKCDGAALFYHGKYYPLGVVTPTEAQIKDIIEWLTVCHGDSTGLSTDSLADAGYPGATALGDAVCGMAVAYITPSDYLFWFRSHTAKEIKWGGAKHHPEDKDDGQRMHPRSSFKAFLEVVKSRSLPWENAEMDAIE

SEQ ID NO: 12468 - protein, 190 aa, Tmesipteris tannensis
DQHGEVVAEIRRSDLDPYLGLHYPATDIPQASRFLFMKNRVRMICDCCAPAVRIIQDKELKQPLSLAGSTLRAPHGCHAYYMRNMGSIGSLVMAVIVNDNDAEASSSGHQPKNRKLWGMVVCHHTTPRAVPFSLRSACEFLMQVFGLQLNMEIELGAQMREKHILCTQTPLCDMLLRDAPIGIVSQSPNI

SEQ ID NO: 12469 - protein, 855 aa, Rhizobium leguminosarum
MSGTHEPVDLTNCDREPIHQLGSVQPFGFLLAVSSDWIVIRASANLAEFLGVTEANALGRPVISLISPEALHAIRNKLTTLRGSDVVERIFGIALTPDQNSFDLAVHLNEGQVIIEGERCQEDRHDAASLSMRSMMSRLDHTETLEAFFREGARQARALTGFDRVMVYRFDESGSGEVVAEAARAGIGSFLGLHYPASDIPVQARALYLRNLFRIIADVDAVPVPILPPLDEHGQPLDLSMSVLRSVSPIHIEYLKNMGVGASLSISIVVDGKLWGLFACHHYGPRLPSAQSRSTAELFGQMFASRLESRERRLALDYETKARRIADRLLTSVADNASLLDDPAWLIEALADAIPADGIGVWINGRLALAGIGPDERSFAALVRHLNRNAAGRIYAVDRLAETYPDLEVDDAVAGMLAIPISRSPRDYVVLFRQELVRTVRWGGDPHKPVEYGPNGPRLTPRKSFEAWSELVRGRSLPFTEAERRVAETIRVTLIEVVLRLTDEVSMARQTANERQELLIAELNHRVRNILSLITGIIRQSQATSVSLGDYIRQLEGRIQSLARAHDQITRDHWAPASLRQLLLAETAAYLGKNAQRIQMGGEDVLLEPQAFSTAALVFHELMTNSAKYGSLSGTGSGTVQLRWHRDDEGNLRIGWREKDGPPVVEPKRHGFGSTIIRRSIPYDLGGKAEVRYVEDGLEADFSIPARHVVGPTSERSNPLPVGATGRKTIPDDQPLSGLNVLLVENNLIIAMDGEDILRRLGADVATAPSVTEAMEILAGQSFDLALLDVNLGDETSFGIADRLAADGVPFVFATGYGEGIAQANSHSDAPVLQKPYTMEGVTDILARVPLPRRE

SEQ ID NO: 12470 - protein, 1137 aa, Glycine max
  unsure (1)..(1137): unsure at all Xaa locations
MSTSRPSQSSSNSGRSRRSARAMALATVDAKLHATFEESGSSFDYSSSVRISGTADGVNQPRVRKVTTAYLHHMQKGKMIQPFGCLLALDEKTRMHTAXVIAYSENAPEMLTMVSHAVPSVGDHPALGIGTDIKTLFTAPSASALQKALGCADVSLLNPVLVHCKTSGKPFYAIVHRVTGSVMVDFEPVRPYEVPMTAAGALQSYKLAAKAITRLQSLPSGNMERLCDTMVQEVFELTGYDRVMAYKFHEDDHGEVIREITKPCLEPYLGLHYPATDIPQASRFLFRKNKVRMIVDCHAKHVRVLQDEKLPFDLTLCGSTLRAPHSCHAQYMANMDSIASLVMAVVVNDNEEDGDTDAIQPQKRKRLWGLVVCHNTTPRFVPFPLRYACEFLAQVFAIHVNKEIELEYQIIEKNILXHPDTLVCLVMRDAPLGIVSESPNIMDLVKCDGAALIYRNKVWRLGVTPSEPQIREIALWLSEYHMDSTGFSTDSLFDAGFPSALSLGDVVCGMASVRVTAKDMVFWFRSHTAAEIRWGGAKHEAGEKDDSRRMHPRSSFKAFLEVVKARSLPWKEYEMDAIHSLQIILRNAFKEDTESLDLNAKAINTRLSDLKIEGINDLKIERMQELEAVTSEIVRLIDTATVPILAVDVDGLVNGWNIKIAELTGLPIGEATGKHLLTLVEDSSTDRVKKMLNLALLGEEEKNVQFEIKTHGSKMDSGPISLVVNACASRDLRDNVVGVCFVAHDITAQKNVMDKFIRIEGDYKAIVQNRNPLIPPIFGTDEFGWCCEWNPAMMKLTGWKREEVMDKMLLGEIFGTQMAPCWFRNREGFIKYDAQLNKXAMTGSETEKVPFGFFARNGKYVECLLSVSKKLDVEGLVTGVFCFLQLASPELQQALHIQRLSEQTASKRLNALSYMKRQIRNPLCGIVFSRKMLEGTDLGTEQKQLLRTSAQCQQQLSKILDDSDLDTIIDGYLDLEMAEFTLHEVLVTSLSQVMTKSNGKSIRIVNDVAEQIVMETLYGDSLRLQQVLADFLLISINFTPNGGQVVVAGTLTKEQLGKSVHLVKLELSITHGGSGVPEVLLNQMFGNNGLESEEGISLLISRKLLKLMNGDVRYLREAGKSAFILSAELAAAHNLKA

SEQ ID NO: 12471 - protein, 1131 aa, Glycine max
MSTSRPSQSSSNSRRSRHSARMAQATVDAKIHATFEESGSSFDYSSSVRVSGTADGVNQPRSDKVTTAYLRGKMIQPFGCLLAIDEKNHMQTCKVIAYSENEPEMLTMVSHAVPSVGDHPALGIGTDIKTLFTAPSVSGLQKALGCADVSLLNPILVHCKTSGKPFYAIVHRVTGSLIVDFEPVKPYEVPMTAAGALQSYKLAAKAITRLQSLPSGNMERLCDTMVQEVFELTGYDRVMAYKFHEDDHGEVIREITKPCLEPYLGLHYPATDIPQASRFLFRKNKVRMIVDCHAKHVRVLQDEKLQFDLILCGSTLRAPHSCHAQYMANMDSIASLVLAVVVNDNEEDGDTDAVQPQKTERLWGLVVCHNTTPRFVPFPLRYAREFLPQVFADHVHKEIELEYQIIEKNILHHPGHLLCMLMRDAPLGIASESPNIMDLVKCDGAALIYRNKVWRLGVTPSEPQIREIALWLSEYHMDSTSFSTDSLFDAGFPSALSLGDVVCGMASVRVTAKDMVFWFRSHTAAEIRWGGAKHEAGEKDDSRRMHPRSSFKAFLEVVKARSLPWKEYEMDAIHSLQIILRNAFKEDTESLDLNAKAINTRLRDLKIEGINDLKIERMQELEAVTSEIVRLDYTATVPILAVDVDGLVNGWNIKIAELTGLPIGEATGKHLLTLVEDSSTDRVKKMLNLALLGEEEKNVQFEIKTLGSKMDSGPISLVVNRCASRDLRDNVVGVCFVAHDITAQKNVMDKFIRIEGDYKAIVQNRNPLIPPIFGTDEFGWCCEWNPAMMKLTGWKREEVMDKMLLGEIFGTQMAACRLKNQEAFVNLGVVLNKAMTGSETEKVPFGFFARNGKYVECLLSVSKKLDVEGLVTGVFCFLQLASPELQQALHIQRLSEQTASKRLNALSYMKRQIRNPLCGIVFSRKMLEGTDLGTEQKQLLRTSAQCQQQLSKILDDSDLDTIIDGYLDLEMAEFTLHEVLVTSLSQVMEKSNGKSIRIVNDVAGHIMMETLYGDSLRLQQVLADFLLISINFTPNGGQVVVAGSLTKEQLGKSVHLVKLELSITHGGSGVPEVLLNQMFGNNGLESEEGISLLIRAKLLKLMNGDVRYLREAGKSAFILSAELAAAHNLKA

SEQ ID NO: 12472 - protein, 1131 aa, Glycine max; identical to SEQ ID NO: 12471

SEQ ID NO: 12473 - protein, 191 aa, Vittaria lineata
DEHGEVVAEIRKSDLEPYLGLHYPATDIPQASRFLFMKNRVRMICDCRADAVKVTQDREVRQPLSLAASTLRAPHGCHSQYMANMGSAASLVMAVAVNSNEEDTSSSKPHQLKPRKLWGLVVCHHTSPRAVAFPLRSACEFLVQVFGLQLNMEVELAVQMREKHILRTQTLLCDMLLRDAPIGVVSESPNI

SEQ ID NO: 12474 - protein, 103 aa, Lathyrus odoratus
QAARFLFMKNKVRMIVDCHAKHVKVLQDEKLPFDLTLCGSTLRAPHSCHLQYMANMDSIASLVMAVVVNDSDEDGDSRDAVLPQKKKRLWGLVVCHNTTPRFV

SEQ ID NO: 12475 - protein, 1124 aa, Lathyrus sativus
MSTTRPSQSSNNSGRSRNSARIIAQTTVDAKLHATFEESGSSFDYSSWVRVSGSVDGDQQPRSNKVTTAYLNHIQRGKQIQPFGCLLALDEKTCKVVAYSENAPEMLTMVSHAVPSVGDHPALGIGTDIRTVFTAPSASALQKALGFAEVSLLNPILVHCKTSGKPFYAIIHRVTGSLIIDFEPVKPYEVPMTAAGALQSYKLAAKAITRLQSLASGSMERLCDTMVQEVFELTGYDRVMAYKFHEDDHGEVIAEIAKPGLEPYLGLHYPATDIPQAARFLFMKNKVRMIVDCNAKHVKVLQDEKLPFDLTLCGSTLRAPHSCHLQYMANMDSIASLVMAVVVNDSDEDGDSADAVLPQKKKRLWGLVVCHNTTPRFVPFPLRYACEFLAQVFAIHVNKEIELEYQILEKNILRTQTLLCDMLMRDAPLGIVSQSPNIMDLVKCDGAALFYRNKLWLLGATPTEYQIREIALWMSEYHTDSTGLSTDSLLDAGFPGALSLSDTVCGMAAVRITSKDIVFWFRSHTAAEIRWGGAKHEPGEQDDGRKMHPRSSFKAFLEVVKARSVPWKDFEMDAIHSLQLILRNASKDTDIIDLNTKAINTRLNDLKIEGMQELEAVTSEMVRLIETATVPILAVDVDGTVNGWNIKIAELTGLPVGEAIGKHLLTLVEDSSTDIVKKMLNLALQGEEEKNVQFEIKTHGDQVEFGPISLIVNACASRDLRENVVGVCFVAQDITAQKTVMDKFTRIEGDYKAIVQNPNQLIPPIFGTDEFGWCCEWNAAMIKLTGWKREEVMDKMLLGEVFGTQMSCCRLKNQEAFVNFGIVLNKAMTGLETEKVAFGFFSRKGKYVECLLSVSKKIDAEGLVTGVFCFLQLASPELQQALHIQRLSEQTALKRLKVLTYMKRQIRNPLAGIVFSSKMLEGTDLETEQKQIVNTSSQCQRQLSKILDDSDLDGIIDGYLDLEMAEFTLHEVLVTSLSQVMNRSNTKGIRIANDVAEHIAKESLYGDSLRLQQVLADFLLISINSTPNGGQVVIASSLTKEQLGKSVHLVNLELSITHGGSGVPEAALNQMFGNNVLESEEGISLHISRKLLKLMNGDVRYLKEAGKSSFILSVELAAAHKLKG

SEQ ID NO: 12476 - protein, 394 aa, Anomochloa marantoidea
EPARTEDPALSIAGAVQSQKLAVRAISRLQALPGGDVKLLCDTVVEHVRELTGYDRVMVYKFHDDEHGEVVAESRRADLEPYLGLHYPATDIPQASRFLFRQNRVRMIADCHAAPVRVIQNPSLTQPLCLVGSTLRAPHECHAQYMANMGSIASLAMAVIISSSGDDENNVGRCGISSTMKLWGLVVCHHTSPRCIPFPLRYACEFLMQAFGLQLNMELQLAHQLSEKHILRTQTLLCDMLLRDSPTGIATQSPSIMDLVKCDGAALYYHGKYYPLGVTPTESQIKDIIEWLGMCHGDSTGLSTDSLADAGYPGAASLGDAVSGMAVAYITPNDYLFWFRSHTAKEIKWGGAKHHPDDKDDGQRMHPRSSFKAFLEVVKSRSLPWENAEMDAIH

SEQ ID NO: 12477 - protein, 394 aa, Pharus lappulaceus
EPARTEDPALSIAGAVQSQKLAVRAISRLQALPGGDVKLLCDTAVEHVRELTGYDRVMVYRFHDDKHGEVVAESRRDDLEPYLGLHYPETDIPQASRFLFRQNRVRMIADCHAAPVRVIQDPALPQPLCLVGSTLRAPHGCHAQYMANMGSIASLVMAVIISSGGDDEHNVARGAISSAMKLWGLVVCHHTSPRCIPFPLRYACEFLMQAFGLQLNMELQLAHQLSEKHILRTQTLLCDMLLRDSPTGIVTQSPSIMDLVKCDGAALYYHGKYYPLGVTPTEAQIKDIIEWLTLCHGDSTGLSTDSLADAGYPGAAALGDAVCGMAVAYITPSDYLFWFRSHTAKEIKWGGAKHHPEDKDDGQRMHPRSSFKAFLEVVKSRSLPWENAEMDAIH

SEQ ID NO: 12478 - protein, 388 aa, Molinia caerulea
EDPALSIAGAVQSQKLAVRAISRLQALPGGDVKLLCDTVVENVRELTGYDRVMVYRFHEDEHGEVVAESRRADLEPYLGLHYPATDIPQASRFLFRQNRVRMIADCHATPVRVIQDPGLSQPLCLVGSTLRAPHGCHAQYMANMGSIASLVMAVIIIIGGDDEQTARGSISSAMKLWGLVVCHHTSPRFIHFPLRYACEFLMQAFGLQLNMELQLAHQLSEKHILRTQTLLCDMLLRDSPSGIVMQSPSIMDLVKCDGAALYYHGKYYPLGVTPTESQIMDIIEWLTMCHGGSTGLSTDSLADAGYLGAAALGDAVCGMAVAYITSSDYLFWFRSHTAKEIKWGGAKHHPEDKDDGQRMHPRSSFKAFLEVIKSRSLPWENAEMDAIH

SEQ ID NO: 12479 - protein, 394 aa, Diarrhena obovata
EPARTEDPALSIAGAVQSQKLAVRAISRLQALPGGDVKLLCDTVVEHVRELTGYDRVMVYKFHDDEHGEVLAESRRADLEPYLGLHYPATDIPQASRFLFWQNRVRVIADCHAAPVRVIQDPAMPQPLCLVGSTLRSPHGCHAQYMANMGSIASLVMAVIISSGGEDEHNMARGAIPSAMKLWGLVVCHHTSPRCIPFPLRYACEFLMQAFGLQLNMELQLAHQLSEKHILRTQTLLCDMLLRDSPAGIVMQSPSIMDLVKCDGAALYYHGKYYPLGVTPTEAQIKDIIEWLTVCHGDSTGLSTDSLADAGYSGATALGDEVCGMAVAYITPSDYLFWFRSHTAKEIKWGGAKHHPEDKDDGQRMHPRSSFKAFLEVVKSRSLPWENAEMDAIH

SEQ ID NO: 12480 - protein, 397 aa, Streptogyna americana
TGYDRVMVYRFHDDEHGEVVAESRRADLEPYLGLHYPATDIPQASRFLFRQNRVRMIADCHAAPVKVIQDPALPQPLCLVGSTLRAPHGCHAQYMANMGSIASLVMAVIISSGGDDEHNMMRGGIPSAMKLWGLVVCHHTSPRCIPFPLRYACEFLMQAFGLQLNMELQLAHQLSEKHILRTQTLLCDMLLRDSPTGIVTQSPSIMDLVKCDGAALYYHGKYYPLGVTPTEAQIKDIIEWLTLCHGDSTGLSTDSLADAGYPSAAALGDAVCGMAVAYITPSDYLFWFRSHTAKEIKWGGAKHHPEDKDDGQRMHPRSSFKAFLEVVKSRSLPWENAEMDAIHSLQLILRDSFRDAAEGTSNSKAIVNGQVQLGELELRGIDELSSVAREMVRLIET

SEQ ID NO: 12481 - protein, 304 aa, Aristida longiseta
QYMANMGSIASLVMAVIISSGGDDEQLGRGGISSAMKLWGLVVCHHTSPRFIPFPLRYACEFLMQAFGLQLNMELQLAHQLSEKHILRTQTLLCDMLLRDSPTGIVAQSPSIMDLVKCDGAALYYHGKYYPLGVTPTESQIKDIIEWLMLCHGDSTGLSTDSLADAGYHGAAALGDAVCGMAVAYITPSDYLFWFRSHTAKEIKWGGAKHHPEDKDDGQRMHPRSSFKAFLEVVKSRSLPWENAEMDAIHSLQLILRDSFRDAAEGTSNSKAMVNGQVQLGELELRGINELSSVAREMVRLIET

SEQ ID NO: 12482 - protein, 106 aa, Aristida longiseta
QAARFLFMKNKVRMICDCRARSVKIIEDEALSIDISLCGSTLRAPHSCHLQYMENMKSIASLVMAVVVNENEEGDEAEPGQPPQQQQKKKLWGLLVCHHESPRYVP

SEQ ID NO: 12483 - protein, 104 aa, Aristida longiseta
QASRFLFMKNKVRMICDCSATPVKIIQDDGLAQPLSLCGSTLRAPHGCHAQYMANMGSVASLVMSVTVNEDDEEDGDTGSDQQPKGRKLWGLVVCHHTSPRFVP

SEQ ID NO: 12484 - protein, 394 aa, Olyra latifolia
EPARTEDPALSIAGAVQSQKLAVRAISRLQALPGGDVKLLCDTVVEHVRELTGYDRVMVYRFHEDEHGEVVAESRRADLEPYLGLHYPATDIPQASRFLFRQNRVRMIADCHAAPVKVIQDSALQQPLCLVGSMLRAPHGCHAQYMANMGSIASLVMAVIISSGGDDEHNITRGGIPSAMKLWGLVVCHHTSPRCIPFPLRYACEFLMQAFGLRLNMELQLAHQLSEKHILRTQTLLCDMLLRDSPTGIVTQSPSIMDLVKCDGDALYYHGKYYPLGVTPTEVQIKDIIEWLTVCHGDSTGLSTDSLADAGYPGAAALGDAVCGMAVAYITPSDYMFWFRSHTAKEIKWGGAKHHPEDKDDGQRMHPRSSFKAFLEVVKSRSLPWENAEMDAIH

SEQ ID NO: 12485 - protein, 102 aa, Joinvillea ascendens
QASRFLFMKNKVRMICECSAPPVKVVQDDRLAQPLSLCGSTLRAPHGCHAQYMANMGSIASLVMSVTINEDDDDDTGSDQQQKGRKLWGLVVCHHTCPRFVP

SEQ ID NO: 12486 - protein, 103 aa, Joinvillea ascendens
  unsure (1)..(103): unsure at all Xaa locations
QASRFLFRQNRVRMIADCHAAXVRVIQDPALPQPLCLVGSTXRAPHGCHAQYMANMGSIASLVMAVIISHGADDDNVPRTGTSSAMKLWGLVVCHHTSPRCIP

SEQ ID NO: 12487 - protein, 396 aa, Thysanolaena maxima
  unsure (1)..(396): unsure at all Xaa locations
TGYDRVMVYRFHEDEHGEVVAESRRDGLEPYLGLHYPATDIPQASRFLFRQNRVRMIVDCHATAVRVIQDPGLSQPLCLVGSTLRAPHGCHAQYMANMGSIASLVMAVIISSGGDDEQTMRGGISSAMKLWGLVVCHHTSPRFIPFPLRYACEFLMQAFGLQLNMELQLAHQLSEKHILRTQTLLCDMLLRDSPTGIVTQSPSIMDLVKCDGAALYYHGRYYPLGVTPTEFQIKDIIEWLTACHGDSTGLSTDSLADAGYHGAAALGDAVCGMAVAYITPSDYLFWFRSHTAKEIKWGGAKHHPEDKDDGQRMNPRSSFKAFLEVVKSRSLPWENAEMDAIHSLQLILRDSFRDSAEGTSNSKAIVNGQVQLGELELRGINELSSVAREMVRXIET

SEQ ID NO: 12488 - protein, 394 aa, Streptochaeta angustifolia
EPASTEDPALSIAGAVQSQKLAVRAISRLQALPGGDVKLLCDTVVEHVRELSGYDRVMVYRFHDDEHGEVVAENRRADLEPYLGLHYPAMDIPQASRFLFRQNRVRMIADCHAAPVRVIQDPSLKQPLCLVGSTLRAPHECHAQYMANMGSIASLVMAVIISSGGDDENSVGRSGISSATKLWGLVVCHHTSPRCIPFPLRYACEFLMQAFGLQLNMELQLAHQLSEKHILRTQTLLCDMLLRDSPTGIVMQSPSIMDLVKCDGAALYYHRKYYPLGITPTEAQIKDIIDWLAMCHGDSTGLSTDSLADAGYPGAAALGDAVCGMAVAYITPNDYLFWFRSHTAKEIKWGGAKHHPEDKDDGQRMHPRSSFKAFLEVVKSRSLPWENAEMDAIH

SEQ ID NO: 12489 - protein, 386 aa, Chasmanthium latifolium
PALSIAGAVQSQKLAVRAISRLQALPGGDVKLLCDTVVEHVRELTGYDRVMVYRFHEEEHGEVVAESRRDGLEPYLGLHYPATDIPQASRFLFRQNRVRMIADCHATAVRVIQDPGLSQPLCLVGSTLRAPHGCHAQYMANMGSIASLVMAVIISSGGDDEQTSRGGMSSAMKLWGLVVCHHTSPRFIPFPLRYACEFLMQAFGLQLNMELQLAHQLSEKHILRTQTLLCDMLLRDSPTGIVTQSPSIMDLVKCEGAALYYHGKYYPLGVTPTESQIKDIIEWLMLCHRDSTGLSTDSLADAGYVSAAALGDAVCGMAVAYITPSDYLFWFRSHTAKEIKWGGAKHHPEDKDDGQRMHPRSSFKASLEVVKSRSLPWENAEMDAIH

SEQ ID NO: 12490 - protein, 392 aa, Lithachne pauciflora
EPARTEDPALSIAGAVHSQKLAVRAISRLQALPGGDVKLLCDTVVEHVRELTGYDRVMVYRFHEDEHGEVVAESRRADLEPYLGLHYPATDIPQASRFLFRQNRVRMIADCHAAPVRVIQDPALQQPLCLVGSTLRAPHGCHAQYMANMGSIASLVMAVIISSGGDDEHNITRGGIPSAMKLWGLVVCHHTSPRCIPFPLRYACEFLMQAFGLQLSMELQLAHQLSEKHILRTQTLLCDMLLRDSPTGIVTQSPSIMDLVKCDGAALYYHGKYYPLGVTPTEAQIKDIIEWLTLCHGDSTGLSTDNFADAGYPGAAALGDAVCGMAVAYITPSDYLFWFRSHTAKEIKWGGAKHHPEDKDDGQRMHPRSSFKAFLEVVKSRSLPWENAEMDA

SEQ ID NO: 12491 - protein, 465 aa, Coptis trifolia
SGKPFYAIAHRVTGSLIIDFEPVKPYEVPMTAAGALQSYKLAAKAITRLQSLPGGSMERLCDAVVQEVYELTGYDRVMAYKFHEDDHGEVVSEVTKEGLEPYLGLHYPATDIPQAARFLFMKNKIRMICDCRAKHVRVLQDEKLSFDLTLCGSTLRAPHSCHLQYMENMDSIASLVMAVVVNDDDEDDEGTRPSQPQKRKRLWGHAVCHNTTPRFVPFPLRYACEFLIQVFAIHVSKEFELENQILEKNILRTQTLLCDMLMRNVPLGIVSQSPNIMDLVKCDGAALLYKNKIWRLGSSPNEIQIRDIASWLSDYHMDSTGLSSDSLYDAGFPGALSIADTVCGMAAVRINSKDMLFWFRSHTAAEVRWGGAKHDPGEKDDGRKMHPRSSFKAFLEVVKTRSAPWKDYEMDAIHSLQLILRSAFKDIETTDGNTKAFHSQLDNLKINGMEELEAVTNEMVRLIET

SEQ ID NO: 12492 - protein, 391 aa, Coptis trifolia
DLEPVNPADVPVTAAGAMKSYKLAAKAISRLQSLPSGNIAVLCDVLVQEVSDLTGYDRVMVYKFHEDDHGEVIAECRVPELEPYLGLHYPATDIPQASRFLFMRNKVRMICDCSAAPVKVIQDNKLEQPLSLGGSALRAPHGCHAQYMANMGSVASLVMSVTINENDDQMETDQQKGRKLWGLLVCHHTSPRFVPYPLRYACEFLIQVFGMQINKEVELATQVRERHILQTQTVLCDMLLRDAPIGIVTQSPNIMDLVKCNGAALYYRSRFWLLGVTPTEAQIRDIAEWLLQYHNASTGLSTDSLMEAGFPGASVLGTAVCGMAAIKITLKDFLFWFRSHTAKEIKWGGAKHNPTEKDDGWKMHPRSSFKAFLEVVKHRSLPWEDVEMDAI

SEQ ID NO: 12493 - protein, 179 aa, Phaseolus vulgaris
GLHYPATDIPQASRFLFMKNKVRMIVDCYAKHVKVLQDEKLPFDLTLCGSTLRAPHSCHAQYMANMDSIASLVMAVVVNDNEEDGDTDAVQPQKRKRLWGLVVCHNTTPRFVPFPLRYACEFLAQVFAIHVNKEIELEYQIIEKNILRTQTLLCDMLMRDAPLGIVSQSPNIMDLVKCD

SEQ ID NO: 12494 - protein, 1124 aa, Pisum sativum
MSTTRPSQSSNNSGRSRNSARIIAQTTVDAKLHATFEESGSSFDYSSSVRVSGSVDGDQQPRSNKVTTAYLNHIQRGKQIQPFGCLLALDEKTCKVVAYSENAPEMLTMVSHAVPSVGDHPALGIGTDIRTVFTAPSASALQKALGFAEVSLLNPILVHCKTSGKPFYAIIHRVTGSLIIDFEPVKPYEVPMTAAGALQSYKLAAKAITRLQSLASGSMERLCDTMVQEVFELTGYDRVMAYKFHEDDHGEVIAEIAKPGLEPYLGLHYPATDIPQAARFLFMKNKVRMIVDCNAKHVKVLQDEKLPFDLTLCGSTLRAPHSCHLQYMANMDSIASLVMAVVVNDSDEDGDSADAVLPQKKKRLWGLVVCHNTTPRFVPFPLRYACEFLAQVFAIHVNKEIELEYQILEKNILRTQTLLCDMLMRDAPLGIVSQSPNIMDLVKCDGAALFYRNKLWLLGATPTESQLREIALWMSEYHTDSTGLSTDSLSDAGFPGALSLSDTVCGMAAVRITSKDIVFWFRSHTAAEIRWGGAKHEPGDQDDGRKMHPRSSFKAFLEVVKARSVPWKDFEMDAIHSLQLILRNASKDTDIIDLNTKAINTRLNDLKIEGMQELEAVTSEMVRLIETATVPILAVDVDGTVNGWNIKIAELTGLPVGEAIGKHLLTLVEDSSTDIVKKMLNLALQGEEEKNVQFEIKTHGDQVESGPISLIVNACASKDLRENVVGVCFVAQDITAQKTVMDKFTRIEGDYKAIVQNPNQLIPPIFGTDEFGWCCEWNAAMIKLTGWKREEVMDKMLLGEVFGTQMSCCRLKNQEAFVNFGIVLNKAMTGLETEKVPFGFFSRKGKYVECLLSVSKKIDAEGLVTGVFCFLQLASPELQQALHIQRLSEQTALKRLKVLTYMKRQIRNPLAGIVFSSKMLEGTDLETEQKRIVNTSSQCQRQLSKILDDSDLDGIIDGYLDLEMAEFTLHEVLVTSLSQVMNRSNTKGIRIANDVAEHIARETLYGDSLRLQQVLADFLLISINSTPNGGQVVIAASLTKEQLGKSVHLVNLELSITHGGSGVPEAALNQMFGNNVLESEEGISLHISRKLLKLMNGDVRYLKEAGKSSFILSVELAAAHKLKG

SEQ ID NO: 12495 - protein, 415 aa, Hypecoum imberbe
SGKPFYAIVHRVTGSLIVDFEPVKPYEVPMTAAGALQSYKLAAKAIAKLQSLPSGSMERLCNTVVQEVFELTGYDRVMAYYFHEDDHGEVIAEVTKPGLEPYLGLHYPATYIPQAARFLFMKNRIRMICDCRAKHVKVLQDEKLPADLTLCGSTLRAPHTCHLQYMENMGSIASLVMAVVVNESNDEEESSEPPSQAPKKKKLWGLVVCHNTSPRFVPFPLRYACEFLIQVFAVHVNKEFELDNQIHEKRILRTQTLLCDMLMRDAPFGIISQSPNVMDLVKCDGAALLYKNKIYRLGLTPSEFQINDIASWLTEYHMDSTGLSTDSLYDAGFPGALSLGDAVCGMAAVRITCKDMLFWFRSHTAAEVRWGGAKHDPDERDDGRKMHPRSSFKAFLEVVKTRSLPWKDYEMDAIH

SEQ ID NO: 12496 - protein, 392 aa, Hypecoum imberbe
DLEPVNPSDVPITAAGALKSYKLAAKAISRLQSLPSGNIPLLCDVLAREVRELTGYDRVMVYKFHEDEHGEVIAECRELDLEPYLGLHYPATDIPQASRFLFLKNKVRMICDCSAQPVKVIQDEKLAQPLSLCGSTLRAPHGCHSQYMTNMGSVASLVMSLTINEDDDEMETSTQKGRKLWGLVVCHHTSPRFVPYPLRYACEFLIQVFGIQLNKEVELASQLMEKHILKMQTVLCDMLLRDAPVGIVAQSHNVMDLVKCDGAALYYRNKLWLLGVTPTEAQVRDIARWLLECHYGTTGLSTDSLMEAGYPGASGLGDAVCGTAAISITSKDFLFWFRSQTAKEIKWGGAKHDPMDKDGLRKMHPRSSFKAFLEVVKCRSVPWEDIEMDAIQ

SEQ ID NO: 12497 - protein, 103 aa, Wisteria floribunda
QATRFLFMRNKVRMIVDCRAKHVKVLQDKKIPFDLTFCGSTLRAPHSCHLQYMENMNASASLVLAVVVNDNDEDEDSSNDVQPQKRKRLWGLVVCHHITPRFV

SEQ ID NO: 12498 - protein, 103 aa, Wisteria floribunda
QAARFLFMKEQGAYIVDCHAKHVKVLQDEKLPFDLTLCGSTLRAPHSCHLQYMANMDSIASLVMAVVVNDSDEDGDSPDAVHPQKRKRLWGLVVCHNTTPRFV

SEQ ID NO: 12499 - protein, 90 aa, Wisteria floribunda
QASRFLFKQNRVRMICDCHAKPVKVIQSEELRQPLCLVNSTLRSPHDCHTHYMANMGSIASLVMAVIVNANDAPRLWGLLVCHHTSPRYV

SEQ ID NO: 12500 - protein, 245 aa, Goupia glabra
ALSIAGAVQSQKLAVRAISQLQSLPGGDIKVLCDTVVESVRELTGYDRVMVYKFHEDEHGEVVAENKRPDLEPYIGLHYPSTDIPQASRFLFKQNRVRMIVDCHATPVRVIQDKGLMQPLCLVGSTLRAPHGCHAQYMANMGSTASLAMAVIITGNDEEAIGGRNSMRLWGLVVCHHTSARCIPFPLRYACEFLMQAFGLQLNMELQLASQLSEKRVLRTQTLLCDMLLRDSPTGIVTQSPSIMD

SEQ ID NO: 12501 - protein, 245 aa, Goupia glabra
ALSIAGAVQSQKLAVRAISQLQSLPGGDIKVLCDTVVESVRELTGYDRVMVYKFHEDEHGEVVAENKRPDLEPYIGLHYPSTDIPQASRFLFKQNRVRMIVDCHATPVRVIQDKGLMQPLCLVGSTLRAPHGCHAQYMANMGPTASLAMAVIITGNDEEAIGGRNSMRLWGLVVCHHTSARCIPFPLRYACEFLMQAFGLQLNMELQLASQLSEKRVLRTQTLLCGMLLRDSPTGIVTQSPSIMD

SEQ ID NO: 12502 - protein, 441 aa, Pteridophyllum racemosum
  unsure (1)..(441): unsure at all Xaa locations
PYEVPMTAAGALQSYKLAAKAIAKLQPLHSGNMERLCDTVVQEVFDLTGYDRTMAYKFHDDDHGEVISEVTKPGLEPYLGLHYPATDIPQAARFLFMKNKIRMICDCNAKQVKVLQDEKIPFDLTLCGSTLRAPHTCHLLYMKNMGSAASLVMAIVXNEGDEEEEASGPSQPQKKKRLWGLVVCHNTTPRFVPFPLRYACEFLLQVFAIHVNKEFELENQILEKNILRTQTLLCDMLMRDAPLGILSQSPNIMDLVRCNGAALLYKNKIHRLGLTPSDFQIHDIASWLSEHHMDSTGLSTDSLYDAGFPGALSLGDQVCGMAAVRITSKDMLFWFRSHTAAEVRWGGAKHNPSEEDDGRKMHPRSSFKAFLEVVKTRSSPWRDYEMDAIHSLQLILRNAFKDAETADLNATVIHSGLNNLKIEGMEELEAVTNEMVRLIET

SEQ ID NO: 12503 - protein, 461 aa, Pteridophyllum racemosum
SGKPFYAILHRIDVGFVIDLEPVNPLDVPVTAAGALKPYKLAAKAISRLQSLPSGNISLLCDVLAREVSELTGYDRVMVYKFHEDEHGEVVSECRKIDLESYRGLHYPATDIPQASRFLFMKNRARIICDCSATPVKVIQDEKLAQPLSLCGSTLRAPHGCHAQYMANMGSIASLVMFVTINDDDDDIKIETHKGRKLWGLVVCHHTSSRFVPYPLRYACEFLIQVFGIQLNKEVELAVQSREKRILRTQTLLCDMLLRDSPVGIVTQSPNVMDLVRCDGAALYFRNKFWLLGVPPTEKQIRDIVGWLMEHYVGTTGLSTDSLMEAGYPDSSVLGDAVCGMAAINFTSKDFLFWFRSQTAKELKWGGAKHDPVDMDDVRKMNPRSSFNAFLEVVKWRSLPWEDVEMDAIHSLQLILRESMKNEIVNDVKTIVNTTPVIDARLRGMDQLCVVTGEMVSLMET

SEQ ID NO: 12504 - protein, 245 aa, Siphonodon australis
ALSIAGAVQSQKLAVRAISQLQSLAGGDIKLLCDTVVESVRDLIGYDRVMVYKFHEDEHGEVLAESKRPDLEPYIGLHYPATDIPQASRFLFKQNRVRMIVDCHASPVRVIQDDGLMQPLCLVGSTLRAPHGCHAQYMENMGSTASLVMAAMINGNDEKATGGRNTTKLWGLVVCHHTSARCIPFPLRYACEFLMQAFGLQLNMELQLAAQLSEKHVLKTQTLLCDMLLRDSPTGIVTQSPSIMD

SEQ ID NO: 12505 - protein, 364 aa, Brexia madagascariensis
VQSQKLAVRAISRLQSLPGGDIKLLCDTVVESVRDLTGYDRVMVYKFHEDEHGEVVAESQRPDLEPYIGLHYPATDIPQASRFLFKQNRVRIIVDCHASSVRVIQDDGLMQPLCLVGSTLRAPHGCHAQYMENMGSIASLAMAVIINGNDEEVIGGRNPTRLWGLVVCHHTSARCILFPLRYACEFLMQAFGLQLNMELQLAAQLLEKHVLKTQTLLCDMLLRESPTGIVTQSPSIMDLVKCDGAALYYQGNFYPLGVTPTEAQIKDIVEWLLAFHGDSTGLSTDSFADAGYPGAALLGDAVCGMAVAYITNRDFLFWFRSHTAKEIKWGGAKHHPEDKDDGQRMHPRSSFKAFLEVVKRRSLP

SEQ ID NO: 12506 - protein, 361 aa, Brexia madagascariensis
QSQKLAVRAISRLQSLPGGDIKLLCDTVVESVRDLTGYDRVMVYKFHEDEHGEVVAESQRPDLEPYIGLHYPATDIPQASRFLFKQNRVRIIVDCHASSVRVIQDDGLMQPLCLVGSTLRAPHGCHAQYMENMGSIASLAMAVIINGNDEEVIGGRNPTRLWGLVVCHHTSARCILFPLRYACEFLMQAFGLQLNMELQLAAQLLEKHVLKTQTLLCDMLLRESPTGIVTQSPSIMDLVKCDGAALYYQGNFYPLGVTPTEAQIKDIVEWLLAFHGDSTGLSTDSFADAGYPGAALLGDAVCGMAVAYITNRDFLFWFRSHTAKEIKWGGAKHHPEDKDDGQRMHPRSSFKAFLEVVKRRS

SEQ ID NO: 12507 - protein, 374 aa, Loeseneriella africana
ALSIAGAVQSQKLAVRAISQLQSLPGGDIKLLCDTAVENVRNLTGYDRVMVYKFHEDEHGEVVAESRRPDLEPYIGLHYPATDIPQASRFLFKQNRVRIIVDCHASPVSVIQDDGLMQPLCLVGSTLRAPHGCHAQYMENMGSIASLAMAVIINGNDEDGMGGRNPTRLWGLVVCHHTSARCIPFPLRYACEFLMQAFGLQLNMELQLAAQLLDKHVLKTQTLLCDMLLRESPTGIVTQSPSIMDLVKCDGAALYYQANYYPLGVTPTEAQIKDIVEWLLAFHGDSTGLSTDSLADAGYPGATSLGDAVCGMAVAYITNKDFLFWFRSHTAKEIKWGGAKHHPEDKDDGQRMHPRSSFKAFLEVVKSRSLPWEN

SEQ ID NO: 12508 - protein, 365 aa, Loeseneriella africana
AVQSQKLAVRAISQLQSLPGGDIKLLCDTAVENVRNLTGYDRVMVYKFHEDEHGEVVAESRRPDLEPYIGLHYPATDIPQASRFLFKQNRVRIIVDCHASPVSVIQDDGLMQPLCLVGSTLRAPHGCHAQYMENMGSIASLAMAVIINGNDEDGMGGRNPTRLWGLVVCHHTSARCIPFPLRYACEFLMQAFGLQLNMELQLAAQLLEKHVLKTQTLLCGMLLRESPTGIVTQSPSIMDLVKCDGAALYYQANYYPLGVTPTEAQIKDIVEWLLAFHGDSTGLSTDSLADAGYPGATSLGDAVCGMAVAYITNKDFLFWFRSHTAKEIKWGGAKHHPEDKDDGQRMHPRSSFKAFLEVVKSRSLP

SEQ ID NO: 12509 - protein, 363 aa, Loeseneriella africana
QSQKLAVRAISQLQSLPGGDIKLLCDTAVENVRNLTGYDRVMVYKFHEDEHGEVVAESRRPDLEPYIGLHYPATDIPQASRFLFKQNRVRIIVDCHASPVIVIQDDGLMQPLCLVGSTLRAPHGCHAQYMENMGSIASLAMAVIINGNDEDGMGGRNPTRLWGLVVCHHTSARCIPFPLRYACEFLMQAFGLQLNMELQLAAQLLEKHVLKTQTLLCDMLLRESPTGIVTQSPSIMDLVKCDGAALYYQANYYPLGVTPTEAQIKDIVEWLLAFHGDSTGLSTDSLADAGYPGATSLGDAVCGMAVAYITNKDFLFWFRSHTAKEIKWGGAKHHPEDKDDGQRMHPRSSFKAFLEVVKSRSLP

SEQ ID NO: 12510 - protein, 1128 aa, Oryza sativa (japonica cultivar-group); identical to SEQ ID NO: 362

SEQ ID NO: 12511 - protein, 113 aa, Daucus carota
HYPATDIPQAARFLFPEDKVRIICDCRAKNVKVLQDDKLPFELTLCGSTLRAPYSCHLQYMENMNSIASLVMAVVINDSDEVGDSSDPNSVKNKKLWGLVVCHNTSPRFVPYP

SEQ ID NO: 12512 - protein, 114 aa, Daucus carota
HYPATDIPQASRFLFQQNRVRMIVDCHATSVPVIQDDSLMQPLCLVGSTLRAPHGCHAQYMANMGSIASLAMAVIVNATGEEGTRGRNSTRLWGLVVCHHTSARSIPYPLRYAC

SEQ ID NO: 12513 - protein, 114 aa, Daucus carota
HYPATDIPQASRFLFQQKWVRMIVDCHAISVPVIQDDLLMHPLCLVGSTLRAPHGCHAQYMANMGSVASLVVAVMSMRLVRKVRGGRHSTRLWGLVVCHHMSARSIPYPLRYAC

SEQ ID NO: 12514 - protein, 110 aa, Daucus carota
HYSATDIPQAVRFLFQKNKSRMIVDCHATFVPVIQDESLDKPLCLGGSTLRAPHGCHAQYMANMGSIGTLVMAVIVHANDKVTGSHQKHEEKLWGLVACHHKSARSLPFP

SEQ ID NO: 12515 - protein, 1129 aa, Petroselinum crispum
MSSSRPANSSSNPGRANQNARVVLTTLDAKIHADFEESGNSFDYSSSVRVTSAVGENSSIQSNKLTTAYLHHIQKGKLIQPVGCLLAVDEKSFKIMAYSENAPEMLTMVSHAVPSVGEHPVLGIGTDVRTIFTAPSAAALQKAVGFTDINLLNPILVHCKTSGKPFYAIAHRVTGSLIIDFEPVKPYEVPMTAAGALQSYKLASKAVNRLQALPGGSMERLCDTMVQEVFELTGYDRVMAYKFHDDDHGEVTAEVTKPGLEPYFGLHYPATDVPQAARFLFLKNKVRMICDCRANSAPVLQDEKLPFELTLCGSTLRAPHSCHLQYMENMNSIASLVMAVVINDSDEVVESSDRNSVKSKKLWGLVVCHNTSPRFVPFPLRYACEFLAQVFAIHVSKELELENQIVEKNILRTQTLLCDLLMRDAPLGIVSQSPNMMDLVKCDGAALLYKNKVYRLGATPSDYQLRDIVSWLTEYHTDSTGLSTDSLYDAGYPGALALGDVVCGMAVVKITSHDMLFWFRSHAAGHIRWGGAKAEPDENHDGRKMHPRSSFKAFLEVVKTRSTTWKEFEMDAIHSLQLILRKALSVEKAVAAQGDEIRSNTDVIHTKLNDLKIEGIQELEAVTSEMVRLIETATVPIFAVDADEIVNGWNTKIAELTGLPVDQAMGKHLLTLVEDSSVGTVVFLLALALQGKEEQGIPFEFKTYGSREDSVPITVVVNACATRGLHDNVVGVCFVAQDVTSQKTIMDKFTRIQGDYKAIVQNPNPLIPPIFGTDEFGWCSEWNQAMTELSGWRREDVMNKMLLGEIFGIQTSCCHLKSKEAFVNLGVVLNNALTGQISEKICFSFFATDGKYVECLLCASKKLHGEGTVTGIFCFLQLASQELQQALHIQRLTEQTAMKRLKTLSYLRRQAKNPLCGINFVREKLEEIGMGEEQTKLFRTSVHCQRHVNKILDDTDLDSIIDGYLDLEMSEFRLHDVYVASRSQVSMRSNGKAIQVVDNFSEEMMSETLYGDSLRLQKVLADFMSVCVNLTPVGGHLGISVTLTEDNLGQSVQLVHLEFRITHTGAGVPEEAVSQMFGSDSETSEEGISLLISRKLVKLMNGDVHYLREAGKSTFIITVELAAASKRES

SEQ ID NO: 12516 - protein, 1123 aa, Lycopersicon esculentum
MSSSRPSQSSTTSSRSKHSARIVAQTSIDAKLHADFEESGDSFDYSSSVRVTSVAGDEEKPKSDKVTTAYLHQIQKGKFIQPFGCLLALDEKTLKVIAFSENAPEMLTMVSHAVPSVGEHPVLGIGTDIRTIFTGPSGAALQKALGFGEVSLLNPVLVHCKNSGKPFYAIVHRVTGSLILDFEPVKPYEVPMTAAGALQSYKLAAKAITRLQSLPSGSMERLCDTMVQEVFELTGYDRVMGYKFHEDDHGEVVSEITKPGLEPYLGLHYPATDIPQAARFLFMKNKVRMICDCRAKHVKVVQDEKLPFDLTLCGSTLRAPHYCHLQYMENMNSIASLVMAVVVNDGDEEGESSDSSQSQKRKRLWGLVVCHNTTPRFVPFPLRYACEFLAQVFAIHVNKELELENQFLEKNILRTQTLLCDMLMRDAPLGIVSQSPNIMDLVKCDGAALLYKNKIHRLGMNPSDFQLQDIVSWLCEYHTDSTGLSTDSLYDAGFPGALALGDAVCGMAAVRISDKDWLFWFRSHTAAEVRWGGAKHEPGEKDDGRKMHPRSSFKAFLEVVKTRSIPWKDYEMDAIHSLQLILRNAFKDAEVVNSNTNSIYKKLNDLKIDGMQELESVTAEMVRLIETALVPILAVDVDGQVNGWNTKIAELTGLPVDEAIGKHLLTLVEDSSVDTVNKMLELALQGKEEKNVEFEIKTHGPSRDSSPISLIVNACASKDVRDNVVGVCFMAHDITGQKSIMDKFTRIEGDYRAIIQNPHPLIPPIFGTDQFGWCSEWNTAMTKLTGWRRDDVMDKMLLGEVFGTQAACCRLKNQEAFVNFGVVLNNAITGQESEKIPFGFFARYGKYVECLLCVSKRLDKEGAVTGLFCFLQLASHELQQALYVQRLSEQTALKRLKVLAYIRRQIRNPLSGIIFSRKMLEGTSLGEEQKNILHTSAQCQRQLNKILDDTDLDSIIDGYLDLEMLEFKLHEVLVASISQVMMKSNGKNIMISNDMVEDLLNETLYGDSPRLQQVLANFLLVSVNATPSGGQLSISGRLTKDRIGESVQLALLEFRIRHTGGGVPEELLGQMFGSEADASEEGISLLVSRKLVKLMNGEVQYLREAGQSTFIISVELAVATNSS

SEQ ID NO: 12517 - protein, 1124 aa, Nicotiana tabacum
MSSSRPSQSSTTSARSKHSARIIAQTTIDAKLHADFEESGDSFDYSSSVRVTSVAGDERKPKSDRVTTAYLNQIQKGKFIQPFGCLLALDEKTFKVIAFSENAPEMLTMVSHAVPSVGELPALGIGTDIRTIFTGPSAAALQKALGFGEVSLLNPVLVHCKTSGKPYYAIVHRVTGSLIIDFEPVKPYEVPMTAAGALQSYKLAAKAITRLQALPSGSMERLCDTMVQEVFELTGYDRVMTYKFHDDDHGEVVAEITKPGLDPYLGLHYPATDIPQAARFLFMKNKVRMICDCRAKHVKVVQDEKLPFDLTLCGSTLRAPHYCHLQYMENMSSIASLVMAVVVNDGDEEGESSDSTQSQKRKRLWGLVVCHNTTPRFVPFPLRYACEFLAQVFAIHVNKELELESQILEKNILRTQTLLCDMLMRVAPLGIVSQSPNIMDLVKCDGAALLYKNKIHRLGMTPSDFQLHDIVSWLSEYHTDSTGLSTDSLYDAGFPGALALGDVVCGMAAVRISDKGWLFWYRSHTAAEVRWGGAKHEPGEKDDGRKMHPRSSFKAFLEVVKTRSVPWKDYEMDAIHSLQLILRNASKDADAMDSNTNIIHTKLNDLKIDGLQELEAVTAEMVRLIETASVPIFAVDVDGQLNGWNTKIAELTGLPVDEAIGNHLLTLVEDSSVDTVSKMLELALQGKEERNVEFEIKTHGPSGDSSPISLIVNACASRDVGDSVVGVCFIAQDITGQKNIMDKFTRIEGDYRAIIQNPHPLIPPIFGTDQFGWCSEWNSAMTKLTGWRRDDVIDKMLLGEVFGTQAACCRLKNQEAFVNFGVVLNNAMTGQECAKISFGFFARNGKYVECLLCVSKRLDREGAVTGLFCFLQLASHELQQALHIQRLSEQTALKRLKVLAYIRRQIRNPLSGIIFSRKMLEGTNLGEEQKNILRTSSQCQRQLNKILDDTDLDSIIDGYLDLEMLEFKLHEVLVASISQIMMKSNGKNIMIVNDMVEDLLNETLYGDSPRLQQVLANFLLVCVNSTPSGGQLSISGTLTKDRIGESVQLALLEVRISHTGGGVPEELLSQMFGTEAEASEEGISLLISRKLVKLMNGEVQYLREAGRSTFIISVELAVATKSSC

SEQ ID NO: 12518 - protein, 1123 aa, Solanum tuberosum
MSSSRPSQSSTTSSRSKHSARIIAQTSIDAKLHADFEESGDSFDYSSSVRVTNVAEGEQRPKSDKVTTAYLHQIQKGKFIQPFGCLLALDEKTLKVIAFSENAPEMLTMVSHAVPSVGEHPVLGIGIDIRTIFTGPSGAALQKALGFGEVSLLNPVLVHCKNSGKPFYAIVHRVTGSLIIDFEPVKPYEVPMTAAGALQSYKLAAKAITRLQSLPSGSMERLCDTMVQEVFELTGYDRVMGYKFHDDDHGEVVSEITKPGLEPYLGLHYPATDIPQAARFLFMKNKVRMICDCRAKHVKVVQDEKLPFDLTLCGSTLRAPHYCHLQYMENMNSIASLVMAVVVNDGDEEGESSDSSQSQKRKRLWGLVVSHNTTPRFAPFPLRYACEFLAQVFAILVNKELELENQFLEKNILRTQTLLCDMLMRDAPLGIVSQSPNIMDLIKCDGAALLYKNKIHRLGMNPSDFQLHDIVSWLCEYHTDSTGLSTDSLYDAGFPGALALGDAVCGMAAVRISDKDWLFWYRSHTAAEVRWGGAKHEPGEKDDGRKMHPRSSFKGFLEVVKTRSIPWKDYEMDRIHSLQLILRNAFKDADAVNSNTISIHTKLNDLKIDGMQELEAVTAEMVRLIETASVPIFAVDVDGQVNGWNTKVAELTGLPVDEAIGKHLLTLVEDSSVDTVNKMLELALQGQEERNVEFEIKTHGPSRDSSPISLIVNACASKDVRDSVVGVCFIAQDITGQKSIMDKFTRIEGDYRAIIQNPHPLIPPIFGTDQFGWCSEWNSAMTMLTGWRRDDVMDKMLLGEVFGTQAACCRLKNQEAFVNFGVILNNAITGQESEKIPFGFFARYGKYVECLLCVSKRLDKEGAVTGLFCFLQLASHELQQALHVQRLSEQTALKRLKVLAYIRRQIRNPLSGIIFSRKMLEGTSLGEEQKNILHTSAQCQRQLDKILDDTDLDSIIEGYLDLEMLEFKLHEVLVASISQVMMKSNGKNIMISNDMVEDLLNETLYGDSPRLQQVLANFLLVSVNSTPSGGKLSISGKLTKDRIGESVQLALLEFRIRHTGGGVPEELLSQMFGSEADASEEGISLLVSRKLVKLMNGEVQYLREAGRSTFIISVELAVATKSS

SEQ ID NO: 12519 - protein, 1123 aa, Solanum tuberosum
MSSSRPSQSSTTSSRSKHSARIIAQTSIDAKLHADFEESGDSFDYSSSVRVTNVAEGEQRPKSDKVTTAYLHQIQKGKFIQPFGCLLALDEKTLKVIAFSENAPEMLTMVSHAVPSVGEHPVLGIGIDIRTIFTGPSGAALQKALGFGEVSLLNPVLVHCKNSGKPFYAIVHRVTGSLIIDFEPVKPYEVPMTAAGALQSYKLAAKAITRLQSLPSGSMERLCDTMVQEVFELTGYDRVMGYKFHDDDHGEVVSEITKPGLEPYLGLHYPATDIPQAARFLFMKNKVRMICDCRAKHVKVVQDEKLPFDLTLCGSTLRAPHYCHLQYMENMNSIASLVMAVVVNDGDEEGESSDSSQSQKRKRLWGLVVSHNTTPRFAPFPLRYACEFLAQVFAILVNKELELENQFLEKNILRTQTLLCDMLMRDAPLGIVSQSPNIMDLIKCDGAALLYKNKIHRLGMNPSDFQLHDIVSWLCEYHTDSTGLSTDSLYDAQFPGALALGDAVCGMAAVRISDKDWLFWYRSHTAAEVRWGGAKHEPGEKDDGRKMHPRSSFKQFLEVVKTRSIPWKDYEMDRIHSLQLILRNAFKDADAVNSNTISIHTKLNDLKIDGMQELEAVTAEMVRLIETASVPIFAVDVDQGVNGWNTKVAELTGLPVDEAIGKHLLTLVEDSSVDTVNKMLELALQGQEERNVEFEIKTHGPSRDSSPISLIVNACASKDVRDSVVGVCFIAQDITGQKSIMDKFTRIEGDYRAIIQNPHPLIPPIFGTDQFGWCSEWNSAMTMLTGWRRDDVMDKMLLGEVFGTQAACCRLKNQEAFVNFGVILNNAITGQESEKIPFGFFARYGKYVECLLCVSKRLDKEGAVTGLFCFLQLASHELQQALHVQRLSEQTALKRLKVLAYIRRQIRNPLSGIIFSRKMLEGTSLGEEQKNILHTSAQCQRQLDKILDDTDLDSIIEGYLDLEMLEFKLHEVLVASISQVMMKSNGKNIMISNDMVEDLLNETLYGDSPRLQQVLANFLLVSVNSTPSGGKLSISQKLTKDRIGESVQLALLEFRIRHTGGGVPEELLSQMFGSEADASEEGISLLVSRKLVKLMNGEVQYLREAGRSTFIISVELAVATKSS

SEQ ID NO: 12520 - protein, 113 aa, Antirrhinum majus
HYPATDIPQAARFLFMKNKVRMICDCRAKHVKVIQDEKLSVDLTLCGSTLRAPHTCHLQYMENMDSIASLVMAVVVNEGDEEETDTVQPQKRKRLWGLVVCHNTTPRFVPYPL

SEQ ID NO: 12521 - protein, 105 aa, Antirrhinum majus
HYSATDIPQAARFLFKQNRVRMICDCNAQPVKIVQTEELKQPLCLVNSTLRAPHGCHMQYMVNMGSIASLAMAVLSNNGDSMKLWGLVVCHHTSPRYVPYPLRYA

SEQ ID NO: 12522 - protein, 107 aa, Antirrhinum majus
PQASRFLFKQNRVRMIVDCHATPVRVFQDEALMQPLCLVGSTLRAPHGCHAQYMENMGSIASLTLAVIINGNDEDGVGGRNSMRLWGLVVGHHTSARCIPLPLRYAC

SEQ ID NO: 12523 - protein, 464 aa, Lardizabala biternata
SGKPFYAIIHRVTGSLIIDFEPVKPYEVPMNAAGALQSYKLAAKAIARLQSLPNASMDRLCDTVVQEVFELTGYDRVMAYKFHDDDHGEVVSEITKPGLELYLGLHYPATDIPQAARFLFMKNKIRMICGCNATHVKVFQDEKLPLDLTLCGSTLRAPHSCHLQYMDNMGSIASLVMAVVVNEGDEENDGSGPAQPQKRKRLWGLVVCHNTTPRFVPFPLRYACEFLIQVFAIHINKELELENQVLEKTFYVPQTLLCDMLMRNAPLGIVSQSPNIMDLVKCDGAALLYKNKIWRLGLSPSEFHIRDIASWLYEYHMDSTGLSTDSLHDAGFPGALSLGDGVCGMAAVRITSKDMIFWFRSHIATEVRWGGAKHDPSEKDDGRKMHPRSSFKAFLEVAKTRSLAWKDYEMDAIHSLQLILRNAFKDGDTADLNSSVIHSRLDNLKIDGMEELEAVTNEMVRLME

SEQ ID NO: 12524 - protein, 394 aa, Lardizabala biternata
DLEPVNRADVPVTAAGALKSYKLAAKAISKLQSLPSGNISLLCDVLVHEVSDMTGYDRVMVYKFHEDEHGEVVSECLRSDLEPYLGLHYPATDIPQASRFLFLKNKVRMICDCSARSVEIIQDKRLTQPLSLGGSTLRAHHGCHTQYMSNMGSVASLVMSITINDDDDDDETETTKRKGRKLWGLVVCHHTSPRFVPFPLRYACEFLIQVFGIQLTKEVELATQLREKHILQIQTVLCDLLLRNAPVGIFTQSPNVMDLVKCDGAALYYKNKFWLLGVTPTEAQIREIAAWILEYHDGSTGLSTDSLMEAGYPGASVLGNAVCGMAAINITSKDFIFWFRSHTAKEIKWGGAKHDPVDKDDGRKMHPRSSFRAFLEVVQWRSLLWEDIEMDAIQ

SEQ ID NO: 12525 - protein, 396 aa, Danthonia spicata
  unsure (1)..(396): unsure at all Xaa locations
TGYDRVMVYKFHEDEHGEVVAESRRPDLEPYLGLHYPATDIPQASRFLFQQNRVRMIHDCHATAVRVIQDPGLQQALCLVGSTLRAPHGCHAQYMANMGSIASLVMAVIISSGSDDEQMARGGXSSAMKLWGLVVCHHTSPRFIPFPLRYACEFLMQAFGLQLNMELQLAHQMSEKHILRXQTLLCDMLLRDSPTGIVTQSPSIMDLVKCDGAALYYHGKYYPLGVTPTESQIKDIIEWLTVCHGDSTGLSTDSLADAGYLGAAALGDAVCGMAVAYITPSDYLFWFRSHTAKEIKWGGAKHHPDDKDDGLRMHPRSSFKAFLEVVKSRSLPWENAEMDAIHSLQLILRDSFRXAAEGTSNSKAIVBGQVQLGELELRGINELSSVAREMVRLIET

SEQ ID NO: 12526 - protein, 376 aa, Hyparrhenia hirta
ALSIAGAVQSQKLAVRAISRLQALPGGDVKLLCGTVVEHVRELTGYDRVMVYKFHEDEHGEVVAESKRDNLEPYLGLHYPATDIPQASRFLFRQNRVRMIADCHATPVRVIQDPGLSQPLCLVGSTLRAPHGCHAQYMANMGSIASLVMAVIISSGGDDEQTGRGGISSAMKLWGLVVCHHSSPRCIPFPLRYACEFLMQAFGLQLNMELQLAHQLSEKHILRTQTLLCDMLLRDSPTGIVTQSPSIMDLVKCDGAALYYHGKYYPLGVTPTESQIKDIIEWLTVCHGDSTGLSTDNLADAGYLGAAVLGDAVCGMAVAYITPSDYLFWFRSHTAKEIKWGGAKHHPEDKDDGQRMHPRSSFKAFLEVVKSRSLPW

SEQ ID NO: 12527 - protein, 191 aa, Salvinia natans
DEHGEVVAEIRRSDLEPYLGLHYPATDIPQASRFLFMKNRVRMICDCRAPSVRIIQDKELPQPLSLVGSTLRAPHGCHAQYMANMGTIASLVMAVVVNDNDEETRCKTPHYSKARRLWGLVVCHHTTPRVVPFALRSACEFLVQVFGLQLNMELELAAQMREKHILRTQTLLCDMLLRDAPIGIVSESPNI

SEQ ID NO: 12528 - protein, 190 aa, Salvinia natans
DEHGEVVAEIRRSDLEPYLGLHYPATDIPQASRFLFMKNRVRMICDCRALNVRIIQDRELKQPISLAGSTLRAPHGCHSQYMGNMGSIASLVMAVIVNDNDEEGSSHAHQPKLRKLWGLVVCHHTSPRAVPFPLRSACEFLMQVFGLQLNMEVELAAQMREKHILHTQSLLCDMLLRDAPIGIVSESPNI

SEQ ID NO: 12529 - protein, 392 aa, Byrsonima crassifolia
DLEPVNPADVPVTAAGALKSYKLAARAISRLQSLPSGNISLLCDVLVKEVRDLTGYDRVMVYKFHEDEHGEVISECRRPDLEAYLGLHYPATDIPQASRFLFMKNKVRMICDCLAPPVKVIQDERLLQPLSLCGSTLRSPHGCHAQYMANMGTIASLVMSVTINEDDDMMDMDQQHMAGKLWGLVVCHHTSPRFVPFPLRYACEFLIQVFGVQINKEVELAAQVREKHILRTQTLLCDMLLRDAPVAIITQSPNVMDLVKCNGAALYYRKKFWLLGVTPTEAQIRDIAEWLLEYHSGNTGLSTDSLMEAGYPGASDLGHAVCGMAAVKITSRDFLFWFRSHTAKEIKWGGAKHDPDDKDDGRKMHPRSSFKAFLEVVKWRSLPWEDMEMDAI

SEQ ID NO: 12530 - protein, 191 aa, Araucaria araucana
DDHGEVISEVRKSDLEPYLGLHYPATDIPQASRFLFMKNRARMICDCCASPVRVVEDKRLPRELNLCGSTLRAPHGCHAQYMSNMGSISPLVMAVIVHEKEEERSRCGPQQQKGRRLWGLVVCHHTSPRFVPFPLRYACEFLMRVFGIQLNREIELAAQSREKHILRTQTLLCDMLLRDAPMGIVTQKPNI

SEQ ID NO: 12531 - protein, 191 aa, Araucaria araucana
DDHREVVAEIRRANLEPYLGLHYPATDIPQASRFLFMKNKVRMIYDCRADGVKVIQDKRLAKPLSLSSSALRALHGCHAQYMANMGSVASFVMAVTINENETDEETSGSGQKGGRRLWGLVVCHHTSPRFVPFPLRYACEFLMQVFGIQLNKEVELAAQLRVKHMLRTQTVLCDMLLRDAPVGIVTQTPNI

SEQ ID NO: 12532 - protein, 192 aa, Araucaria araucana
DEHGEVVAEIRRSDLEPYLGLHYPATDIPQASRFLFMQNRVRMICDCRAVPVKVVQAGQLQQPLCLVGSTLRAPHGCHAQYMANMGSIASLVMAVVIIGNEDEEEGRWKRKRRGSMKLWGLVVCHHTSPRAVPFPLRYACEFLMQAFGLQLNMELQLAAQLTEKHILRTQTLLCDMLLRDAPIGIVLILPSI

SEQ ID NO: 12533 - protein, 374 aa, Euonymus alatus
ALSIAGAVQSQKLAVRAISQLQSLPGGDIKLLCDTVVETVRDLTGYDRVMVYKFHDDEHGEVVAENKKPDLEPYIGLHYPATDIPQASRFLFKQNRVRMIVDCHASTVRVIQDDRLVQPLCLVGSTLRAPHGCHAQYMENMGSQASLALAVISNGNDEEVIGGRNATRLWGLVVCHHTSARCIPFLFRYACEFLMQAFGLQLNMELQLAAQVSEKHVLKTQTLLCDMFLRDSPTGIVTKSPSIMDLVKCDGAAFYYQGKYYPLGVTPAEAQIKDIVEWLLAFHGDSTGLSTDSLADAGYPAAASLGDSVCGMAVAYITNRDFLFWFRSHTTEEIKWGGAKHHHEDKDDGQRMHPRSSFKAFLEVVKSRSFPWEN

SEQ ID NO: 12534 - protein, 245 aa, Corynocarpus laevigatus
ALSIAGAVQSQKLAVCAISQLQSLPGGDIKLLCDTVVESVRELTGYDRVMVYKFHEDEHGEVVAESKRADLDPYIGLHYPATDIPQASRFLFKQNRVRMIVNCHASSVRVIQDEELRQPLCLVGSTLRAPHGCHAQYMANMGSIASLAMAVVINGTDEEGTGGRNSMRLWGLVACHHTSARCIPFPLHYACEFLMQAFGLQLNVELQLALQLSEKHVLRTQTLLCDMLLRDSPTGIVTQSPSIMD

SEQ ID NO: 12535 - protein, 245 aa, Corynocarpus laevigatus
ALSIAGAVQSQKLAVCAISQLQSLPGGDIKLLCDTVVESVRELTGYDRVMVYKFHEDEHGEVVAESKRADLDLYIGLHYPATDIPQASRFLFKQNRVRMIVNCHASSVRVIQDEELRQPLCLVGSTLRAPHGCHAQYMANMGSIASLAMAVVINGTDEEGTGGRNSMRLWGLVACHHTSARCIPFPLRYACEFLMQAFGLQLNMELQLALQLSEKHVLRTQTLLCDMLLRDSPTGIVTQSPSIMD

SEQ ID NO: 12536 - protein, 401 aa, Trochodendron aralioides
GKPFYAIVHRVTGSLIIDFEPVKPYEVPMTAAGALQSYKLAAKAIARLQSLPSGSIERLCDTLVQELFELTGYDRAMVYKFHEDDHGEVVSEITKPGLEPYLGLHYPATDIPQAARFLFMKNKVRMICDCRAKNVKVLQDEKLPFDLTLCGSTLRAPHSCHLQYMENMNSIASLVMAVVVQEGDEQARALVPHSLRRRKRLWGLLVCHHSTPRFVPFPLRYACEFLAQVFAIHVNKELELENQILEKNILRTQTLLCDMLMRDAPLGIVSQSPNIMDLVKCDGAVLLYKNRTWRFGSTPSELQIHDIALWLSEYHMDSTGLSTDSLYDAGFPGALTLGDGVCGMAAVRITSKDMLFWFRSHTAAEVRWGGAKHEPGEKDDGRRMHPRSSFKAFLEVVKSRS

SEQ ID NO: 12537 - protein, 390 aa, Trochodendron aralioides
DLEPVNPADVPVTAAGALKSYTLAAKAISRLQSLPSGNLSLLCDVLVREVSELTGYDRVMVYKFHEHKHGEVVAECRISDLEPYLGLHYPATDIPQASRFLFMKNKIRTICDCLAPPVKVIQDKRLVQPLSLCGSTLRAPHGCHAQYMENMGSIASLVMSVMNHEDEDEIESDRKGRKLWGLVVCHHTSPRFVPFLLRYACEFLIQVFGIQLNKEVELAAQLREKHILRTQTVLCDMLLRDAPVGIVTQSPNVMDLVKCDGAALYYRNTIWLLGVTPTEAQIRDIAGWLLEYHNGSTGLSTDSLMEAGYSDALLLGDAVCGMAAVKITSKDFLFWFRSHTAKEIKWGGVKHDPVDKDDGRKMHPRSSFKAFLEVVKRRSLPWEDVEMDAI

SEQ ID NO: 12538 - protein, 415 aa, Nymphaea odorata
GKPFYAIVHRVVSGLVMDFEPVKPSELPITAAGALQSYKLAGKAISRLQSLPGGSITRLCDTVVEEVHQLTGYDRVMTYKFHDDDHGEVVSEIRKPDLEPYLGLHYPATDIPQAARFLFMKNKVRMICDCRAKPVKVYQDENLKTDLTLCGSTLRAPHSCHLQYMENMSSIASLVMAVVINEGEDEGEDETDPNQRSQKRKRLWGLVVCHNTSPRFVPFPLRYACEFLAQVFAIHVNKEVELENQNALKKNILRTETLLCDMLLRGSPLGIVSQTPNIMDLVKCDGAAFLYGSKLYLLGRTPAESQIRDIAIWLSEYHKDSTGLSTDSLCEAGYPGALAIGSPVCGMAAVRITANDMLFWFRSHTASEIRWGGAKHDPEEKDDGRRMHPRCSFKAFLEVVKTRSLPWKDFEMDAI

SEQ ID NO: 12539 - protein, 396 aa, Brasenia schreberi
PYEVPMTAAGALQSYKLAAKAIARLQSLPSGSVGRLIDTVVEEVHQLTGYDRVMTYKFHEDDHGEVVSEIRKPDLEPYLGLHYPATDIPQAARFLFMKNKVRMICDCRAKPVKVYQDENLKTDLTLCGSTLRAPHSCHLQYMDNMGSIASLVMAVVINEGEDEGDDEPEQNQGQQQQQQQKKKRLWGLVVCHNTTPRFVPFPLRYACEFLMQVFAIHVNKEVELENQMREKNILRTQTLLCDMLLRDAPLGIVTQSPNVMNLVKCDGAALLYGNKLWLLGQTPSESQMRDLAVWLSEYHRDSTGLSTDSLYEAGYPGALAIGDVVCGMAAVRITNSDMLFWFRSPTASEIRWGGAKHDPEEKDDGRRMHPRSSFKAFLEVVKTRSLPWKGFEMDAI

SEQ ID NO: 12540 - protein, 463 aa, Ceratophyllum demersum
GKPFYAVVHRVTGSLVIDFEPVRPYEVPTTAAGALQSYKLAAKAITKLQSLPSGSMQRLCDTIVKEVYELTGYDRVMVYKFHEDDHGEVVAEVTKPNMEPYLGLHYPATDIPQASRFLFMKNKVRMICDCHAKAIKVYQDGNLPMDLTLCGSTLRAPHSCHVQYMHNMGSVASLVMAVVVNEGEDDQGESTESGQQRKKKLWGLVVCHNTSPRFVPFPLRYACEFLMQVFAIHVGKQIELENQLQEKNILRIQTLLCDMLMRDSPLGIVSKSPSIMDLVKCDGAALLYKNKVWLLGLTPSELQIHDIASWLSTHHMDSTGLSADSLYDAGYPGALSLGNAVCGMASVRITSKDMIFWFRMHTASEVRWGGAKHYPDDKDDGQKMHPRSSFKAFLEVVKTRSLPWKDYEMDAIHSLQLILQGTFKEIENGGIKNTIDSQFDGLKIDQMEELQVVANEMVRLMET

SEQ ID NO: 12541 - protein, 356 aa, Ceratophyllum demersum
ILHRIDAGIVIDLEPVNPSDVPVTAAGALKSYKLAAKSISRLQSIPSGNISLLCDVLVREVSELTGYDRVMAYKFHEDEHGEVIAECKRSDLEPYLGLHYPATDIPQASRFLFMKNRVRMICDCMVKPVKVIQDKRLNQSLSLCGSTLRAPHGCHAQYMANMGSIASLVMSVTINDDEEEEAPGEVQNQKTRKLWGLVVCHHTSPRFVPFPLRYACEFLIQVFGIQLNKEVELAVQLREKHILRTQTMLCDMILRDTPIGIVTRSPNVMDLVKCDGAALYYQNQFWLLGITPTEVQIRDILLWLLEYHKGTTGLSTDSLMEAGYPGALVLGDAVCGMAAIEITPKDYLFWFRSHTA

SEQ ID NO: 12542 - protein, 119 aa, Ceratophyllum demersum
HYSATDIPQASRFLFMKNKVRMICDCHAKPIKVYQDENLPIDLTLCGSILRAPHSCHVQYMLNMGSVASLVMAVVVNEGEDDQGESTESGQQRKKKLWGLVVCHNTSPRFVPFPLRYAC

SEQ ID NO: 12543 - protein, 104 aa, Ceratophyllum demersum
MKNKVRMICDCHAKPVKVLQDEKLSFDLTLCGSTLRAPHSCHLQYMENMNSIASLVMAVVINEGEENVDNSETLEQSKRKRLWGLVVCHNTSPRFVPFPLRYAC

SEQ ID NO: 12544 - protein, 108 aa, Ceratophyllum demersum
YSATDIPQAPRFLFKQNRVRVIVDCNAKPIEIIQDSRLNQPLCLVNSTLRSPHGCHMQYMANMGSIASLVMAIIINGNDSSKLWGLVVCHHTSARYLLFPLRYACEFL

SEQ ID NO: 12545 - protein, 389 aa, Nelumbo nucifera
PYEVPMTAAGALQSYKLAAKAIARLQALPSGCMDRLCDTVVQEVFELTGYDRVMAYKFHEDDHGEVVSEITKPGLEPYLGLHYPATDIPQAARFLFMKNKVRMICDCRAKHVKVLQDEKLPFDLTLCGSTLRAPHSCHLQYMENMDSIASLVMAVVVNEGDEEGEASGSSQQQKRKKLWGLVVCHNTTPRFVPFPLRYACEFLIQVFAIHVNKEIELENQILEKNILRTQTLLCDMLMRDALLGIISQSPNVMDLVKCDGAALLYKNKIWQLGTTPTEFQIHDIASWLSEYHMDSTGLSTDSFYDAGFPGALSLGDAVCGMAAVRITSKDMLFWFRSHTAAEVRWGGAKHDPDEKDDGRRMHPRSSFKAFLEVVKTRSLPWKDYEMDAI

SEQ ID NO: 12546 - protein, 391 aa, Nelumbo nucifera
DLEPVNPADVPVTAAGALKSYKLAAKSISRLQSLPSGNISLLCDVLVREVSDLTGYDRIMVYKFHEDEHGGVVAECRRPDLESYLGLHYPATDIPQASRFLFMKNKVRMICDCLAPPVKVIHDKKLAQPLSLCASTLRVPHGCHAQYMANMGSIASLVMSVTINDDDNEMESDQPKGRKLWGLVVCHHTSPRFVPFPLRYACEFLVQVFGIQLDKEVELAAQLREKHILKTQTLLCDMLLRNAPVGIFTESPNVMDLVKCDGASLYYKNKFWLLGITPTEAQIRDIAGWLLEHHDGSTGLSTDSLMEAGYPGASVLGDAVCGMAAIKITSKDFLFWFRSHTAKKIKWGGAKHDPVVKDGGRKVHPRSSFKAFLEVVKRRSLPWEDVEMDAI

SEQ ID NO: 12547 - protein, 2062 aa, Dictyostelium discoideum
MDLELDGLLTQCIHCCPHCKNKISISQLSACNLIKNRFYELNNKYNNFKNNNIYDIDCNNNSNLNNTNNNNNNNNNNDNNNSNNSFRNILNKDKDITNNNSHFNISDSFINFNNKIKNKSNKIKNGGNNNNNNNNNNNNNNNNNNNNNNNNNNNNNNNNNNNGESYNLFLDSLLKSLETVKGGDFKSRVKSNEQLFTEKENKIISTYNEILNFQDSTVTEFKRIEKQVGKEGNVMSRAFLPNAVGSWEFCIEFVNNLIGDMIQPTEEVIKVITSVARGDLSQTINLELGQGRKLTGEFLRIAKVVNTMVSQLNSFSSEVTRVAREVGTDGKLGGQAVVTGVDGIWKDLTDNVNTMAANLTGQVREIALVTTAVATGDLSKKITLDVKGEIQELKLTINTMVDQLKSFSSEVTRVSREVGTEGILGGQAQVKGVDGVWKDLTDNVNTMAANLTGQVRSIAEVTTAVAEGDLSKNITIDAQGEILQLKNTINTMVQQLKGFSSEVTRVAREVGTKGILGGQAEVTGVGGVWKGLTDNVNTMAANLTGQVRSIAEVTTAVAKGDLSKNITIDAQGEILQLKNTINTMVDQLKSFSSEVTRVSREVGTEGILGGQAEVTGVDGVWKGLTDNVNTMAANLTGQVRSIAEVTTAVAKGDLSKNITIDAQGEILQLKNTINTMVQQLKSFSSEVTRVSREVGTEGILGGQAQVEGVGGVWKDLTDNVNTMAANLTGQVRSIAEVTTAVACGDLSKNITIDAEGEILQLKNTINTMVDQLKSFSSEVTRVAREVGTEGILGGQAQVEGLGVGGVWKDLTDNVNTMAANLTGQVRSIAEVTTAVAEGDLSKQVSINAQGEILQLKNTINTMVDQLKSFSSEVTRVSREVGTEGILGGQAQVKGVGGVWKDLTENVNTMAANLTGQVRSIAEVTTAVACGDLSKNITIDAKGEILQLKNTINTMVQQLKGFSSEVTRVSREVGTEGILGGQAQVEGVGGVWKDLTDNVNTMAANLTGQVRSIAEVTTAVACGDLSKKISIDAQGEICELKNTINTMVDQLKSFSSEVTRVAREVGTEGILGGQAEVKDVGGVWKGLTDNVNTMAANLTGQVRSIAEVTTAVACGDLSKKISIDVRGEFLELKITINTMVDLLNSFSSEVTRVALEVGTEGILGGQAQVEGVDGVWKYLTQNVNTMAAKFTSQVREIANVTTAVANGDLSKKVNLDVRGEILQLKITINTMVDQLNSFSSEVTRVAREVGTEGMLGGQAQVEGVGGVWKDLTDNVNTMAANLTTQVRSIAEIAKAVTKGDFTRVISVDAKGEVNLLKLIINEMIHNLKETPLKNTLAKETAEAASRAKSDFMANMSHEIRTPMNGIIGMTDLTLDTELTAEQREYLSMVQSSAGSLLTIINDILDFSKIEAGRLELDQAEFSLRAHLYDALKTLSWRAHQKCIELVCDIASDVPDSLIGDPGRLRQIVNNLVGNAIKFTSQGEVDLVVKVEKSLSCGEVVLKFSVIDTGIGIPKDKLHLIFEAFSQADGSITRRYGGTGLGLTISTRLVELMKGKLSVVSKSGKGSTFEFTAQFPTSPNQLPLTEKLNDVHTLIVDDNKSTLKVLKQILSEFGITSEVSNNTQDAFNMIVKATKTTKPFEFIFVDAQLGTSLIDMMVEKNMNHCKTKIIMLISGGGQRGYPDSSSNFITGYLSKPVSPSEIFDILTRQGITRQIPKQLCKKIQLTSEIFGDILLAEDNAVNQRLAIRLLEKFGHRVQLAENGLQAVASSQLRKFDLILMDVQMPHCGGFEATAQIRKREHEQGIHTPIIAMTAHALARDRVKCLEAGMDDYISKPINPDQLKAMIEKYLFISKSCNSYEQFQQLQAQKSANYINSTSYYGQLTPTTTTTTTTTTALPSPQKILSIEDDKNLNSNDNNEKDNNNQNNNNNQNDNNKNDNNQNDFDQIKTISNNKESGVGENKKTTRNTSDNERIPKKSDMFDGDFVVQPQLVNRSSSNNKKSNDINGKPQQSQQQPHQQEQQQDIYFSKHQQQSNSPPLANTKRKENDLSNSSIPASKKNNTKQ

SEQ ID NO: 12548 - protein, 393 aa, Lemna gibba
DLEPVNPSDVPVTAAGALKSYKLAAKAISRLQSLPSGNISLLCDVLVREVKDLTGYDRVMAYKFHEDEHGEVVSECRGSDLEPYLGLHYPATDIPQASRFLFLKNKVRMICDCSAQPVRIIQDKRLSQPLSLCGSTLRAPHGCHAQYMKNMGSIASLVMSVTINDEGVDHGGEEQQKSRKLWGLVVCHHSSPRFIPFPLRYACEFLMQVFAIQVNKEVEIAAQKREKHILKTQTFFCDMLLREAPVGIFTQSPNVMDLVKCDGAALYYRNQFRLLGVTPTEAQIKDLCDWLMDWHNNTTGLSTDSLSEAGFPGASSLGDAVCGMAAIKITGKDFVFWFRSHVAKEIKWGGAKDESVGRSEEGRKLYPRSSFQAFLEIVKRRSLPWEDVEMDAI

SEQ ID NO: 12549 - protein, 104 aa, Lemna gibba
PQASRFLFLKNKVRMICDCKAKPVRVAGEVSLCGSTLRAPHGCHAQYMENMGSVASLVMAVVVNDGEEEGEEQQQQRSRLWGLVVCHHGSPRFVPFPLRYACEF

SEQ ID NO: 12550 - protein, 108 aa, Lemna gibba
PQASRFLFLKNKVRMICDCSAQPVRIIQDKRLSQPLSLCGSTLRAPHGCHAQYMKNMGSIASLVMSVTINDEGVDHGGEEQQKSRKLWGLVVCHHSSPRFIPSPRYAC

SEQ ID NO: 12551 - protein, 1129 aa, Avena sativa
MSSSRPASSSSSRNRQSSQARVLAQTTLDAELNAEYEESGDSFDYSKLVEAQRDGPPVQQGRSEKVIAYLQHIQKGKLIQTFGCLLALDEKSFNVIAFSENAPEMLTTVSHAVPSVDDPPRLGIGTNVRSLFSDQGATALHKALGFADVSLLNPILVQCKTSGKPFYAIVHRATGCLVVDFEPVKPTEFPATAAGALQSYKLAAKAISKIQSLPGGSMEVLCNTVVKEVFDLTGYDRVMAYKFHEDDHGEVFSEITKPGLEPYLGLHYPATDIPQAARFLFMKNKVRMICDCRARSIKVIEAEALPFDISLCGSALRAPHSCHLQYMENMNSIASLVMAVVVNENEEDDEAESEQPAQQQKKKKLWGLLVCHHESPRYVPFPLRYACEFLAQVFAVHVNREFELEKQLREKNILKMQTMLSDMLFREASPLTIVSGTPNIMDLVKCDGAALLYGGKVWRLRNAPTESQIHDIAFWLSDVHRDSTGLSTDSLHDAGYPGAAALGDMICGMAVAKINSKDILFWFRSHTAAEIRWGGAKNDPSDMDDSRRMHPRLSFKAFLEVVKMKSLPWSDYEMDAIHSLQLILRGTLNDASKPKREASLDNQIGDLKLDGLAELQAVTSEMVRLMETATVPILAVDGNGLVNGWNQKAAELTGLRVDDAIGRHILTLVEDSSVPVVQRMLYLALQGKEEKEVRFEVKTHGPKRDDGPVILVVNACASRDLHDHVVGVCFVAQDMTVHKLVMDKFTRVEGDYKAIIHNPNPLIPPIFGADEFGWCSEWNAAMTKLTGWNRDEVLDKMLLGEVFDSSNASCPLKNRDAFVSLCVLINSALAGEETEKAPFGFFDRSGKYIECLLSANRKENEGGLITGVFCFIHVASHELQHALQVQQASEQTSLKRLKAFSYMRHAINNPLSGMLYSRKALKNTDLNEEQMKQIHVGDNCHHQINKILADLDQDSITEKSSCLDLEMAEFLLQDVVVAAVSQVLITCQGKGIRISCNLPERFMKQSVYGDGVRLQQILSDFLFISVKFSPVGGSVEISSKLTKNSIGENLHLIDLELRIKHQGLGVPAELMAQMFEEDNKEQSEEGLSLLVSRNLLRLMNGDVRHLREAGVSTFIITAELASAPTAMGQ

SEQ ID NO: 12552 - protein, 1129 aa, Avena sativa
MSSSRPASSSSSRNRQSSQARVLAQTTLDAELNAEYEESGDSFDYSKLVEAQRDGPPVQQGRSEKVIAYLQHIQKGKLIQTFGCLLALDEKSFNVIAFSENAPEMLTTVSHAVPSVDDPPRLGIGTNVRSLFSDQGATALHKALGFADVSLLNPILVQCKTSGKPFYAIVHRATGCLVVDFEPVKPTEFPATAAGALQSYKLAAKAISKIQSLPGGSMEVLCNTVVKEVFDLTGYDRVMAYKFHEDDHGEVFSEITKPGLEPYLGLHYPATDIPQAARLLFMKNKVRMICDCRARSIKVIEAEALPFDISLCGSALRAPHSCHLQYMENMNSIASLVMAVVVNENEEDDEAESEQPAQQQKKKKLWGLLVCHHESPRYVPFPLRYACEFLAQVFAVHVNREFELEKQLREKNILKMQTMLSDMLFREASPLTIVSGTPNIMDLVKCDGAALLYGGKVWRLRNAPTESQIHDIAFWLSDVHRDSTGLSTDSLHDAGYPGAAALGDMICGMAVAKINSKDILFWFRSHTAAEIRWGGAKNDPSDMDDSRRMHPRLSFKAFLEVVKMKSLPWSDYEMDAIHSLQLILRGTLNDASKPKREASLDNQIGDLKLDGLAELQAVTSEMVRLMETATVPILAVDGNGLVNGWNQKAAELTGLRVDDAIGRHILTLVEDSSVPVVQRMLYLALQGKEEKEVRFEVKTHGPKRDDGPVILVVNACASRDLHDHVVGVCFVAQDMTVHKLVMDKFTRVEGDYKAIIHNPNPLIPPIFGADEFGWCSEWNAAMTKLTGWNRDEVLDKMLLGEVFDSSNASCPLKNRDAFVSLCVLINSALAGEETEKAPFGFFDRSGKYIECLLSANRKENEGGLITGVFCFIHVASHELQHALQVQQASEQTSLKRLKAFSYMRHAINNPLSGMLYSRKALKNTDLNEEQMKQIHVGDNCHHQINKILADLDQDSITEKSSCLDLEMAEFLLQDVVVAAVSQVLITCQGKGIRISCNLPERFMKQSVYGDGVRLQQILSDFLFISVKFSPVGGSVEISSKLTKNSIGENLHLIDLELRIKHQGLGVPAELMAQMFEEDNKEQSEEGLSLLVSRNLLRLMNGDVRHLREAGVSTFIITAELASAPTAMGQ

SEQ ID NO: 12553 - protein, 1129 aa, Avena sativa
MSSSRPASSSSSRNRQSSRARVLAQTTLDAELNAEYEESGDSFDYSKLVEAQRDGPPVQQGRSEKVIAYLQHIQKGKLIQTFGCMLALDEKSFNVIAFSENAPEMLTTVSHAVPSVDDPPRLGIGTNVRSLFSDQGATALHKALGFADVSLLNPILVQCKTSGKPFYAIVHRATGCLVVDFEPVKPTEFPATAAGALQSYKLAAKAISKIQSLPGGSMEVLCNTVVKEVFDLTGYDRVMAYKFHEDDHGEVFAEITKPGLEPYLGLHYPATDIPQAARFLFMKNKVRMICDCRARSIKVIEAEALPFDISLCGSALRAPHSCHLQYMENMNSIASLVMAVVVNENEEDDEAESEQPAQQQQKKKLWGLLVCHHESPRYVPFPLRYACEFLAQVFAVHVNREFELEKQLREKSILKMQTMLSDMLFREASPLTIVSGAPNIMDLVKCDGAALLYGGKVWRLRNAPTESQIHDIAFWLSDVHRDSTGLSTDSLHDAGYPGASALGDMICGMAVAKINSKDIIFWFRSHTAAEIRWGGAKHDSSDMDDSRRMHPRLSFKAFLEVVKMKSLPWTDYEMDAIHSLQLILRGTLNDASKPKREASLDNQIGDLKLDGLAELQAVTSEMVRLMETATVPILAVDGNGLVNGWNQKAAELTGLRVDDAIGRHILTLVEESSVPVVQRMLYLALQGKEEKEVRFEVKTHGPRRDDGPVILVVNACASRDLHDHVVGVCFVAQDMTVHKLVMDKFTRVEGDYKAIIHNPNPLIPPIFGADEFGWCSEWNAAMTKLTGWNRDEVLDKMLLGEVFDSSNASCPLKNKNAFVSLCVLINSALAGEETEKAPFGFFDRSGKYIECLLSANRKENEGGLITGVFCFIHVASHELQHALQVQQASEQTSLKRLKAFSYMRHAINNPLSGMLYSRKALKNTDLNEEQMKQIHVGDNCHHQINKILADLDQDSISEKSSCLDLEMAEFVFQDVVVAAVSQVLITCQGKGIRISCNLPERFMKQSVYGDGVRLQQILSDFLFISVKFSPVGGSVEISSKLTKNSIGENLHLIDLELRIKHQGLGVPAELMEQMFEEDNKEQSDEGLGLLVSRKLLRLMNGDVRHLREAGVSTFILTAELASAPTAIGQ

SEQ ID NO: 12554 - protein, 495 aa, Avena sativa
MSSSRPASSSSSRNRQSSQARVLAQTTLDAELNAEYEESGDSFDYSKLVEAQRDGPPVQQGRSEKVIAYLQHIQKGKLIQTFGCLLALDEKSFNVIAFSENAPEMLTTVSHAVPSVDDPPRLGIGTNVRSLFSDQGATALHKALGFADVSLLNPILVQCKTSGKPFYAIVHRATGCLVVDFEPVKPTEFPATAAGALQSYKLAAKAISKIQSLPGGSMEMLCNTVVKEVFDLTGYDRVMAYKFHEDDHGEVFSEITKPGLEPYLGLHYPATDIPQAARFLFMKNKVRMICDCRARSIKVIEAEALPFDISLCGSALRAPHSCHLQYMENMNSIASLVMAVVVNENEEDDEAESEQPAQQQKKKKLWGLLVCHHESPRYVPFPLRYACEFLAQVFAVHVNREFELEKQLREKNILKMQTMLSDMLFREASPLTIVSGNPNIMDLVKCDGAALLYGGKVWRLRNAPTESQIHDIAFWLSDVHRDSTGLSTDSLHDAG

SEQ ID NO: 12555 - protein, 830 aa, Hordeum vulgare
RAPHGCHAQYMANMGSIASLVMSVTVNEDDDEDGDTGSDQQPKGRKLWGLVVCHHTSPRFVPFPLRYACEFLLQVFGIQLNKEVELASQAKERHILRTQTLLCDMLLGDAPVGIFTQSPNVMDLVKCDGAALCYQNQIMVLGSAPSEGEIKKIAAWLLECHDGSTGLSTDSLLEAGYPGASALGEVVCGMAAIKISSKGFIFWFRSHTAKEIKWSGAKHEPGDADDNGRRMHPRSSFRAFLEVVKWRSVPWEDVEMDAIHSLQLILRGSLQDEDANDNNVGSIVEAPSDDVRKIQGLLELRVVTNEMVRLIETATAPILAVDIVGSINGWNGKVAEITGLPTTEAIGMLLVDLVEGDSVEVIKQMLNSAMQGTEEQNFEIKLKTFHQQEGNGPVVLMVNACCSRDLSDKVVGVCFVAQDLTGHKMVMDKYTQIQGDYVAIVKNPNELIPPIFMINDLGSCLEWNEAMQKITGIKREDAIDKLLIGEVFTLHDYGCRVKDQATITKLSILMNTVISGQEPEKLAFGFFSTDGKYMESLLTANKRTDAEGKITGALCFLHVPSPELQHALQVQKMSEQAAARSFKELTYIRQELKNPLNGMQFTRKLLEPSDLTEEQRQLFASNVLCQEQLKKILHDNDLEGIEQCYMEMNTVEFNLEEALNTVLMQGMSLSKEKQISLDRDWPVEVSSMYLYGDDLRLQQVLADYLACTLQFTRPAEGPIVLQVIPKKEHIGSGMQIAHLEFRVVHPAPGVPEALIQEMFRHGPGVSREGLGLHISQKLVKTMSGTVQYLREAESSSFIVLVEFPVAQLNSKRSKPSTSKWSKPSTSKSNF

SEQ ID NO: 12556 - protein, 112 aa, Hordeum vulgare
DIPQAATFLFMKNKVRMICDVRARTLKVIADEALPFDISLCGSSLRAAHSCHLQYMENMNSIASLVMAVVVNESEEDDEAESEQPAQQQKKKILWGLVVCHHESPRYVPYPF

SEQ ID NO: 12557 - protein, 111 aa, Hordeum vulgare
ATDIPQASRFLFMKNKVRMICDCAASPVKLIQDGNLSQPISLCGSTMRAPHGCHAQYMANMGSIASLVMSVTVNEDDDEDGDTGSDQQPKGRKLWGLVVCHHTSPRFVLPL

SEQ ID NO: 12558 - protein, 104 aa, Hordeum vulgare
QASRFLFRQNRVRMIADCHAAAVRVIQDPAMPQALCLVGSTLRSPHGCHAQYMANMGSIASLVMAVIISSGGEDEHNMTRGVIPSAMKLWGLVVCHHTSPRCIP

SEQ ID NO: 12559 - protein, 392 aa, Lolium perenne
TGYDRVMVYKFHDDEHGEVLAESRRADLEPYLGLHYPATDIPQASRFLFRQNRVRMIADCHAAPVRVIQDPAMPQPLCLVGSTLRSPHGCHAQYMANMGSIASLVMAVIISSGGEDEHNMGRGAVPSAMKLWGLVVCHHTSPRCIPFPLRYACEFLMQAFGLQLNMELQLAHQMSEKHILRTQTLLCDMLLRDSPTGIVTQSPSTMDLVKCDGAALYYHGKYYPLGITPTEAQIKDIIKWLTVCHGDSTGLSTDSLADAGYPGATELGDAVCGMAVAYITPSDYLFWFRSHTAKEIKWGGAKHHPEDKDDGQRMHPRSSFKAFLEVVKSRSLPWENAEMDAIHSLQLILRDSFRDAGEGTSNSKAIVNGHVQLGELELRGIDELSSVAREMV

SEQ ID NO: 12560 - protein, 169 aa, Oryza longistaminata
KEEKEVKFEVKTHGSKRDDGPVILVVNACASRDLHDHVVGVYFVAQDMTVHKLVMDKFTRVEGDYKASSCLDLEMAEFVLQDVFVAAVSQVLITCQGKGIRVSCNLIKHQGKGVPADLLSQMYEDDNKEQSDEGMSLAVSRNLLRLMNGDVRHMREAGMSTFILSVELA

SEQ ID NO: 12561 - protein, 170 aa, Oryza rufipogon
KEEKEVKFEVKTHGSKRDDGPVILVVNACASRDLHDHVVGVCFVAQDMTVHKLVMDKFTRVEGDYKAIISSCLDLEMVEFVLQDVFVAAVSQVLITCQGKGIRVSCNIKHQGKGVPADLLSQMYEDDNKEQSDEGMSLAVSRNLLRLMNGDVRHMREAGMSTFILSVELA

SEQ ID NO: 12562 - protein, 171 aa, Oryza rufipogon
KEEKEVKFEVKTHGSKRDDGPVILVVNACASRDLHDHVVGVCFVAQDMTVHKLVMDKFTRVEGDYKAIISSCLDLEMVEFVLQDVFVAAVSQVLITCQGKGIRVSCNLIKHQGKGVPADLLSQMYEDDNKEQSDEGMSLAVSRNLLRLMNGDVRHMREAGMSTFILSVELA

SEQ ID NO: 12563 - protein, 176 aa, Oryza rufipogon
KEEKEVKFEVKTHGSKRDDGPVILVVNACASRDLHDHVVGVCFVAQDMTVHKLVMDKFTRVEGDYKAIISSCLDLEMVEFVLQDVFVAAVSQVLITCQGKGIRVSCNLSMFFRIKHQGKGVPADLLSQMYEDDNKEQSDEGMSLAVSRNLLRLMNGDVRHMREAGMSTFILSVELA

SEQ ID NO: 12564 - protein, 172 aa, Oryza rufipogon
KEEKEVKFEVKTHGSKRDDGPVILVVNACASRDLHDHVVGVCFVAQDMTVHKLVMDKFTRVEGDYKAIISSCLDLEMVEFVLQDVFVAAVSQVLITCQGKGIRVSCNLPIKHQGKGVPADLLSQMYEDDNKEQSDEGMSLAVSRNLLRLMNGDVRHMREAGMSTFILSVELA

SEQ ID NO: 12565 - protein, 171 aa, Oryza rufipogon
GKEEKEVKFEVKTHGSKRDDGPVILVVNACASRDLHDHVVGVCFVAQDMTVHKLVMDKFTRVEGDYKASSCLDLEMVEFVLQDVFVAAVSQVLITCQGKGIRVSCNLPIKHQGKGVPADLLSQMYEDDNKEQSDEGMSLAVSRNLLRLMNGDVRHMREAGMSTFILSVELA

SEQ ID NO: 12566 - protein, 162 aa, Oryza rufipogon
KEEKEVKFEVKTHGSKRDDGPVILVVNACASRDLHDHVVGVCFVAQDMTVHKLVMDKFTRVSSCLDLEMVEFVLQDVFVAAVSQVLITCQGKGIRVSCNIKHQGKGVPADLLSQMYEDDNKEQSDEGMSLAVSRNLLRLMNGDVRHMREAGMSTFILSVELA

SEQ ID NO: 12567 - protein, 166 aa, Oryza rufipogon
KEEKEVKFEVKTHGSKRDDGPVILVVNACASRDLHDHVVGVCFVAQDMTVHKLVMDKFTRVEGSSCLDLEMVEFVLQDVFVAAVSQVLITCQGKGIRVSCNLPIKHQGKGVPADLLSQMYEDDNKEQSDEGMSLAVSRNLLRLMNGDVRHMREAGMSTFILSVELA

SEQ ID NO: 12568 - protein, 1128 aa, Oryza sativa
MSSSRPTQCSSSSSRTRQSSRARILAQTTLDAELNAEYEEYGDSFDYSKLVEAQRTTGPEQQARSEKVIAYLHHIQRAKLIQPFGCLLALDEKTFNVIALSENAPEMLTTVSHAVPSVDDPPKLRIGTNVRSLFTDPGTTALQKALGFADVSLLNPILVQCKTSGKPFYAIVHRATGCLVVDFEPVKPTEFPATAAGALQSYKLAAKAISKIQSLPGGSMEVLCNTVVKELFDLTGYDRVMAYKFHEDDHGEVFAEITKPGLEPYLGLHYPATDIPQAARFLFMKNKVRMICDCRARSIKIIEDESLHLDISLCGSTLRAPHSCHLQYMENMNSIASLVMAVVVNENEDDDEVGADQPAQQQKRKKLWGLLVCHHESPRYVPFPLRYACEFLAQVFAVHVNKEFELERQVREKSILRMQTMLSDMLLRESSPLSIVSGTPNIMDLVKCDGAALLYGGKVWRLQNAPTESQIRDIAFWLSDVHRDSTGLSTDSLHDAGYPGAAALGDMICGMAVAKINSKDILFWFRSHTAAEIRWGGAKHDPSDKDDSRRMHPRLSFKAFLEVVKMKSLPWNDYEMDAIHSLQLILRGTLNDDIKPTRAASLDNQVGDLKLDGLAELQAVTSEMVRLMETATVPILAVDSNGLVNGWNQKVAELTGLRVDEAIGRHILTVVEESSVPVVQRMLYLALQGKEEKEVKFEVKTHGSKRDDGPVILVVNACASRDLHDHVVGVCFVAQDMTVHKLVMDKFTRVEGDYKAIIHNPSPLIPPIFGADEFGWCSEWNAAMTKLTGWHRDEVINKMLLGEVFDSTNASCLVKNKDAFVSLCILINSALAGDETEKAPFSFFDRNGKYIECLLSVNRKVNADGVITGVFCFIQVPSHELQHALHVQQASQQNALTKLKAYSYMRHAINNPLSGMLYSRKALKNTGLNEEQMKEVNVADSCHRQLNKILSDLDQDSVMNKSSCLDLEMVEFVLQDVFVAAVSQVLITCQGKGIRVSCNLPERYMKQTVYGDGVRLQQILSDFLFVSVKFSPVGGSVEISCSLTKNSIGENLHLIDLELRIKHQGKGVPADLLSQMYEDDNKEQSDEGMSLAVSRNLLRLMNGDVRHMREAGMSTFILSVELASAPAK

SEQ ID NO: 12569 - protein, 1128 aa, Oryza sativa; identical to SEQ ID NO: 12568

SEQ ID NO: 12570 - protein, 1128 aa, Oryza sativa; identical to SEQ ID NO: 12568

SEQ ID NO: 12571 - protein, 106 aa, Poa pratensis
QAARFLFMKNKVRMICDCRARSIKVIEAEALPFEISLCGSALRAPHNCHLQYMENMNSIASLVMAVVVNENDEDDEVESDQPTEQQKKKKLWGLLVCHHESPRYVP

SEQ ID NO: 12572 - protein, 104 aa, Poa pratensis
QASRFLFMKNKVRMICDCAATPVKLIQDDNLSQPISLCGSTMRAPHGCHAQYMANMGSIASLVMSITINEDGEEDGETGSDQQPKSRKLWGLVVCHHTSPRFVP

SEQ ID NO: 12573 - protein, 104 aa, Poa pratensis
QASRFLFRQNRVRMIADCHAAPVRVIQDPAMPQPLCLVGSTLRSPHGCHAQYMANMGSIASLVMAVIISSGGEDEHSMGRGAVPSAMKLWGLVVCHHTSPRCIP
